United States Patent Application Publication US 2026/0103690 A1 - sequence listing, part 101

SEQ ID NO: 501992 - protein, 376 aa, unidentified
MNELNGEISKGIGAEATQDKALGRVLKLGLDVHYRQVTVAMQEDGGRIKVAGKMNHGAFLNWVRTKLEQGWRIESCYEAGASGYWLHRQLVELGVKNLVVAPKAMGGAEAKRQKTDKRDSAQLCDGLDRYLRGQDKALSVVAVPTVEQEQNRALIRYHRQMIKDRTRAEARGKGLLCTQGIEVGGRWWEGKGWAEVQSDPRLKDWMKEQLEGWQKKILSAQSQEKPLREQIEALAPERLPKGVGAYSAAVLQHEMKGWKRFSNRRQVASYTGLCPGIHLSDGRGKEGSINRCGNPTVRWTLVEMVWRLMIWQPHYGPVRQLAAGLVKSKRAKKRLVVKAARRLAIDLWRLETGQTTAEKLGLIMRLRSSSKKNRGL

SEQ ID NO: 501993 - protein, 376 aa, unidentified
MKKTVRFLGLDVHAETIAVAVAEADGTVRSLGTIANREEAVRKLVKKLGLAEDLRACYEAGPTGYVLYWQLTQLGVECSVIAPSLVPVKAGDRVKTDRRDAEKLARSFRSGDLTAVWVPDAGSEALRDLVRAREAAKQDQLRARHRLNKFLLRAGRRPAMGVKAWTLPYMAWVRALRFEQPAQESTRLDYLHEVEHMGERVKRLEQAIRDAVKLAAPVIQTVIAGLQALRGVAELSAVTIVSELGSLTRFAGPRQLMAYSGTVPSEDSSGKRTRRGGITKTGNAHLRRIAVESAWSYRLRPGVGPELRRRQQGVPEEIKEIAWKAQNRLHKRYVKLSLAGKDQRKIVTAVGRELLGFIWAIGVRAEAAGRQMAAAG

SEQ ID NO: 501994 - protein, 337 aa, unidentified
MEPQVSFNQVVSRGCGIDVHQKVVVATISGEGLKKETREFGTFTRSLTELKDWLLENGVTHVAMESTGIYWKPVYHVLEPTSIKVWIVNARHIKYVPGHKTDKQDSAWICKLLLAGLLKPSYIPPREQRELRDLTRYRTKLIQNIASEKNRIIRILEDCNIKLSSVVRNTQGVVATKLINKLCEGQNITMADIDEVYHKKLEVSKEDLYEACQGLMDKHHIYFLEMIRQDIASTEAVIESLNVRVKETLSVYENVLENLKAIPGLSKKTVEDLVAEIGLDMSVFPTEKHLASWAGMCPGNNESADKKKRTHQPWQQTCKSRAYGGSVGGHPNQGYFL

SEQ ID NO: 501995 - protein, 408 aa, unidentified
MNAVGIDVSKGKSMVAALRPMGEVALLPQEFLHTEVGLEQMAYAIVALGEDTRVIMEATGRYHEPIAAALHEYGIYVCVLNPLFIKQSGGGSIRKVKTDKADAMKIAKYGLDNWVDLREYTPMDTVRQQLKLCSRQYNLYMKTVVSLQNNLISLTDKTFPGVNELFSSPERADGHQKWVDFVMTFWHCDCICRVSEKAFTDRYQKWCKRKGYHFSTEKALDLYAGSCGHFTTLPKNDNTKLLITTAAQQLLAGKTTLAALRTEMTRLAKQLPEYDTVRAMYGVGETTAAQLMAEIGDVRRFPRRSSIVGFAGVDPAVDQSGKHSAKSVPTTKRGSPHLRKTLYQIVCTYLRKAPADEPVYQFLDKKRAEGKPYFVYMTAAQNKFLRIYYARVKECLEAFDERQDTVQN

SEQ ID NO: 501996 - protein, 335 aa, unidentified
MDTISLSVGLDYAPGKVQVCVLDQAGQVLRNRWTSDEWRAIVAVTHDLGTVRRAAIEACSGAADLADELIAHAGWPVVLAHPGYVSRIRRGPDKSDWSDARLVADLVRVDYLPQVWLAPTEVRELRLVVRERMELARQRRRCKQRIGAVLREQRCFAPPRLRAWSKPWLAWLREDATVSPAARWLIGRRLAQLEALAGQLAQVHKHLAEMTAEDPLVQRLLAEPGIGPVTAWMLRAEVGRFDRFNRGRELARFCGLSPRNAATGKHQHTAGLVQAANGELRSVLIEAGHRLIRYQSRWAELAATLRGLGKPGSVVAAAVANRWMRWLYYRLVAVS

SEQ ID NO: 501997 - protein, 351 aa, unidentified
MYTLGIDIHKKSSVWILIDAERTELWKEDVLCSPTYISTIIKSLPVSPREIQVAIEPIGGWRWVSDLLEASGMNVHIAHPRKMQLIAQSTKKTDTEDARVLANLLLAGYFPEAHKSSEDIYKLRLLLRERTFIIQRRTSVKNQLHGIATTQGLHLIQSGNPLFKKGKADIMAENNFVLQQLHYLIEDLDRRVVPFDEQLLLECMKYPVAQLLMTFPGIGIITALTIISEVDDFSRFSSGKKLASFAGLVPRQRSSGESIRYGSITHAGSASLRTSLVETAMRIRESNAPELYAFVTRLTPVCGAKKARVALARKILVIIWKMVITNTPYQPNHAPSVCTANLSDLDTTSGT

SEQ ID NO: 501998 - protein, 414 aa, unidentified
MDVVHPRCAGIDVSKRDAKVCVRIASGGRAKAKSTVTTWGAVTNQVLALCDHLIAEQVTLVVMEATSDYWKPFFYLLEDGPFEVMLVNARHVKNLPGRKTDVSDAAWLARLGAHGLVRGSFVPPQPVRQLRDLTRTRTIIVRERSREVQRLEKLLEDAGIKLSSVASDLTGVSGRAMLEALVEGVRDPIELADLAKRRMRIKIPQLVEALTGRFNEHHAFLVRLHLNQIDQHNQSIQDLTDRIEVMIEPFRGVRDLIVTIPGISTTVADVIIAETGGDMSRFPSAGHLASWAGTCPGSNESAGRIKSTHTRPGNPYLKGALGIAALSAARSKDTYFAAKFRRIASRRGPMKALVALEHAMLIAIWNMVNTGSYFTDPGGDFYSRLDPDKAKNRAISQLKRMGYAVTLDPLVDAG

SEQ ID NO: 501999 - protein, 330 aa, unidentified
MHVAGIDVAHKTLGVVLSADEKTGKAQEFANTADGHQALVKALKAARVERVCLEATGSYHLDLALALDAAGLALMVVNPKAAKRFAEALLTRTKTDAVDAAVLAQFAQRMPFEPWQRPDNQALALRACARRLEALNRAKTEAKHQLHALTQSQTTPEVVLADVRLTITQCEAQIKDLRTWAEGLIQADTHLQEIFALLTTVKGIATASAIQLMGEILVLPADMRAKQWVALAGLDPRQSLSGTSVHKKPRLSKAGNRYLRLALFMPALSAARHDRHVNGYYRHLIEERGLKKIQAVCAVMRKLLHAIHGMLKSRQPFDGSRFYTLAATPT

SEQ ID NO: 502000 - protein, 355 aa, unidentified
MESTKYVGLDVHKEATTVAVMNSAGKLIMESIIETKAITIRQFIQGLRGDLHVTFEEGTWAAWLYDLLKPYVTKVVVCDPRKNTLLKVGNKSDRIDPKKLAELLRNGSLSAVYHGENGVRTLKELARSYLTISKDLGRVMNRVKALYRSWAIPCAGTQVYALCHRSEWLSKITEAGVRRRAEHYYQQLDALQTLRREVRKDLLLESRKHNATKLLRQVPCIGPIRAAQLVALMQTPHRFRTKRQLWTYSGLGLETRDSAQYRYVEGQLQRSKKPQQLRGLNTNHNHDLKNIFKGAATMASISTGPFHDFYEALLTKGMQPTMARLTLARKIAAITLIVWKKGVRFDPEHLKQQAA

SEQ ID NO: 502001 - protein, 343 aa, unidentified
MDYFAGLDVSVKETSVCIVDDAGKIVREARVASEPEALLQVLTNTIYRLKRVGLEAGPLSQWLYSVLAEAGLPVICVETRHMRAVLKAQINKTDRNDARGIAQMMRVGLYRPVHVKTLRSQKLRMLLTHRKLLQSKAIAIENDLRATLRNFGLKVGIVGTVKFEARIKELVAKLPDVALLVEPLLVVRRVLREQVGILHRRLVAVVRDDDVCRRLMTIPGVGPVVALTYRVTVDVPARFRNSKAVGAVFGLTPSRYQSGENDRTGAISRCGDEMMRMMLYEAAQSMLVRSTKWSWLKAWAMKIAKHRGMKKAIVALARRLAVIMHRVWVDGTEFRWTREVAAA

SEQ ID NO: 502002 - protein, 389 aa, unidentified
MKPDSQMTLDRYFRQCVGIDVSKDKFTACLQMYNRASDVGCHTTSIDFENTKSSFNQFVKWSRKEAVKGFPLTYLMEPTGVYYEPLAYHLHKIGQTVYVVLPNKARSICEAEGIKTKTDAMDARSLALMGCTSRKLKPWSPPAPIYLELRQMTRFHADLSQIMTSVMNRMESLNHMKEADKTVRKNCQKLIDEIDTLMENNDKAIMQKVAEDKDLEARVKRIAKTKGLGVTTVVCIVAETEGFHLIENRKQLTSYAGLDVRARQSGKEDPKHAISKRGNAHIRAALYMPALVAVRYNPQIKTVYGRICQKHPKEKKIGVTAAMRRLLLLIYTLWKNGEEYDPMRDKTHTPKKRMKEEDTELEYGPEDCIGPKHEPVDWNATDEHGNPPF

SEQ ID NO: 502003 - protein, 428 aa, unidentified
MTVKDCTSVKEFWQLKKEIRGSKDYLIVGIDVAKDEHKAFFGTANGKTLLKRLSFKNDIEGFEKLLTRVKTMKAKHSLNEVVLGLEPTANYHKPLADFLIKCGHMVVLVSGVSVKRNRELLDGRWDKHDTKDSANVADLISQGKCLYYEYAPVVLRDLRNLLSLKRRLKKQEHGLRIRIRNSLLAQYFPELDRYYSKWEPEVLSVVRWCLNPSVIVGLEYDQFVSLVSPGSKNIRQQGRLEWIWKKAVASIGCDAGEAAEFEAKVMVEELGHIREVIKETDAKIKDVCVGFPEYDYLLTIPGFGPDVSSKVLAAIGNPFRFHSLSQVLKMAGMDLNANRSGKSSDRAVPVISKKGNAHLRYALYQAAFIASVKNKYFIGYYTHTLRGREREKGIKTKMRVKLAAKMLVIAWTLMKKREPFDPAYLKIN

SEQ ID NO: 502004 - protein, 349 aa, unidentified
MRFYTKQHQFYCGIDLHARLLAICIVDEAGVVVCRTQIPADKTILLETLAPFRRDVVVAVECLFAWYWVADLCTAEKIPFVLGHALYMKAIHGGKAKNDDIDAEKIGRLLKGGNIPVAYVYPKGLRETRDLLRRRMYLVRQRAALITHVQIVNAQYNLPEFSKKLIYAKNRAELKIAERFDNLQLRKSVAIDLALIDALDVQIADAELHLERTAKVEDPQTFHLLKTIGGVGKILGLTLLYEIHDIRRFPDVGEFLSYARLVRCRHESAGKKLGSGGHKIGNAHLKWAFSEAVCLLVRHYPAVKVWQARHEKKHGKKKTLGILAARLGRTVYHMLRKREAFDVKRFLGQ

SEQ ID NO: 502005 - protein, 395 aa, unidentified
MYKLLVGIDVSKERFSAAGIDSGGKEAFSQAYTMDSKGFEGLLKMVRFHCEEDSKVLMAMESTGCYHINLFSFLSSQGIRTLVVNPLLISNYAKLSLRKTKTDKKDAMSIARFLVDHHKEISQLSISQDNQDLRDLSRERESLSHLMSAAKVEIKRVLRTTFPELETIGDIDTGVMLRLIREYPSARLVTAAKLKGIIKLLKEPRRGNKLTYTAEDIYRAAKTSIATVSPGREIILRGKVATLLHLQQRLEEITKLLTELCQSTRMDDLDILQSIKGVGPGTAAPLLAEMGSIENFSSHKKLIAFAGMDPSVTESGQYIGASRLSKRGNRHLRRAIYLMTTSVVNWNAWFKAYFQKRKAEGMAPQKALFATAHKLIRVIFAMLSQRTYFKVKEAK

SEQ ID NO: 502006 - protein, 465 aa, unidentified
MTPHKDYFLDPRPPAPMLPQSPVLSETLQVCHPHAAGVDIGEAEHWVAVPPGRDPQPVRRFGTFTVDLDALADWLIDCGVTTVAMESTGVYWIPLFELLEARGLQVLLIDPRQAKRAPGRPKTDRLDCQWLQRLHAYGLLAGAFRPDDQVCVLRAYLRHRQMLLTYAAHHIQHMHKALQQMNLKLTQVVSDLTGATGMAIIKAIMAGERNPQHLAKLRNPHCHHDEDDIAKALQGTWRAEHLFALQQAVALYEFYHQQLALCDQQIKTHLETFADKSAGQPLPPKARRHKKTNEPQFDARTPLYRLAGVDLTTIEGIEENTALVILSEIGTDMHRWLSVKHFCSWLGLCPQHKISGGKVLSRRVRPGAHRVTVALRLAARSLHHSQSALGAFFRRMKARLGTPKAITATAHKLARLVYSLLQHGSAYVQQGLDAYEAQYRERKVTAMARHAKALGSTLVPVASQG

SEQ ID NO: 502007 - protein, 317 aa, unidentified
MSKEDWFVGIDVAKESLEVAFLRGEEEAVLQLPNAPDGWAALVTACRERPAERIVLEATGGYERRVTAELMTAGLPVVVINPRQARDFARATGRLAKTDRLDARALARFGEAIRPALRPLPDEKAAELQEKLSRHRQLIQMRTAENNRLGHARSKRVRESIQSLLEVIDRQLKELDKDIDQRIEESPAWREKDQLLQSAPGVGPQTARTLLSGLPELGQCSRQQVAFLVGVAPLNRDSGKMRGTRTIHGGRAQVRQALYMATLAATRCNPLIRQHYQHLLQAGKKKKVALVACMRKLLCILNAMLRDHKTWNCALPT

SEQ ID NO: 502008 - protein, 358 aa, unidentified
MAVTEGTGGIVGGVDSHKDLHVAAVVDEQDRVIDTRCFATTRQGYRQMLAWMRSFGELQRIGIESTGSYGAGLLRFMHQAGIAVLEVTTPDKQDRRRRGKNDDLDAQNAAHAAFAGQRTVTPRSRDGMIESLRVLMACRKTAVSARRVALQMIHNTIVCAPDDLRDQLRSLTRMQLVRTLAAWRPDLTAYRDLDSAYRIGLKSLARRYLELHDEIADLDAMIAAIVDELAPNLVARNSIGHIGAAQLLLTAGGNPERLRSEASFASLCGVSPVPASSGKTVRHRLNRGGDRAANSALHIIAIGRLRTDQRTKDYVARRIAEGHSKLDAIRALKRYLAREVYTLIARRRREINATRIAA

SEQ ID NO: 502009 - protein, 321 aa, unidentified
MQNATVVGIGIDVSGAKLDLAIRFSDSNYFDDTFENDAEGIKSLVSVLKRQETAKAAPLVIESTGNCHLQSAIMIKRAEYLVKVINPVLTKKFQKSSIRNAKSDKIDARRLADIACIEPDLPDFNGSIEEISAKKLTSYLSHLEKTRQKMNSSLGQLEKTSKLLKIKIDLKPTKKAIEKIEEQMEILSESLKSNLPERAKKIVQETKGISEKQMAIFLALIGEKKFANRDKLVAYVGFDIALRQSGSWRGKQKLSKRGSGYARKILYQIAWSLKQNNEEYKSFFNRLKNENKKHYNTAMVATARKFLRFMHAHYFREMQTV

SEQ ID NO: 502010 - protein, 348 aa, unidentified
MVVVGVDAHKRSHTLVAVDGNGRVMGQTTVRATSAGHLEAVKWVAQFDRERMWAIEDCRNMTRRFESELLAAGETVIRVPTKMMAGTRKSARESGKSDPIDAAAVARAALREPDLPRAHLDGPAREVKLLIDYRESLVRERTAAQNRLRWRLHELAPEFDPPSGSLSRYRTLDRTVALLEDHTGLIAELARREVARIRAITAEANQLEAQIRDLVTQVAPSLLELPGCGALSAAKLVGETAGIERFRSRDAFAMWAGVAPIPVWSGNPNKYRLNRGGNRQANAALYRIAITQLRIHPQAQAYIQKRIAAGNSKKEAIRALKRRLADRVYQTLIHDAQNHQTTTQLKAA

SEQ ID NO: 502011 - protein, 317 aa, unidentified
MSESPVFVGIDVAKAQLDIAVRPTGARWNASNDEAGITMLVTHLQAIAPTLIVLEATGGFQRAVVAALTVVGLPVVVANPRQTRDFAKATGQLAKTDALDARALAHFADAVRPIPRPVPDAQTEAMRALLTRRRQLVTMRTAESNRLGSASSPMVQADIKAHLAWLDQRLATLEDDLDTTLRASPVWRERETLYRSVPGIGPVCAKTLLLDLPELGTLSRQRIAALAGVAPFNCDSGTLRGHRAIWGGRAPLRATLYMATLVAVRHNAVLHAYYERLLAAGKAKKVALVACMRKLLTILNAMAKHQTPWHPQEVAIA

SEQ ID NO: 502012 - protein, 428 aa, unidentified
MIAAVVERCAGIDVHKKFVMVCVLIGPADSNPTPQIRRFSTFNAELERLRKWLLELQCNRVAMESTGPYWKPVFNVLEEAGIEMVLANPQQVKNLRGHKTDPKDAHWLAHLFRHGMIRPSYIPPKPIRELRDLTRRRKQLVRNGAMERNRVQKLLEEANVKLGSVLSDVFGASGQDMVEALMKGEATAEQIAQLAQRKARKKIPEIQKSIEGHRLNQTHRDLMQQCMTHLAFLEEQIEEIDQQIQNKIRSYGLSEAYELLQTVPGMQAEAAATVLAEVGADVQAFPSAAKLSSWAGVCPGNNESAGKRKSSHTTKGNPYLREVLLECAWASSRKKNSQMQHRYRRLLGRRGKKRAAVAVAHALVQAVYYVLSTRKPFVDTAEPRRSPGQVRRLVRHHTRRLRKLDCWTRRTKSENKGNSMAQNQQTSG

SEQ ID NO: 502013 - protein, 343 aa, unidentified
MEHYVGLDVSLKQTSICVVNQVGSVVREGVVDSEPEAIAAFVRSKAPGAVRVGLETGPTATWLWSELKQLGLPVICIDARHARAVLKMQINKSDRNDAAGIARIMQTGWFKEVRVKDLGSHSVRALLASRALLVKIKRDLENQIRGLLKNVGLVIGRAKFNVFAVRAEELIEDRPELIAVVGPLLKARQAIEQQTDDLDRKVLKLARHDVQVRRFMTVPGIGPITALCFKATVDDPTRFKRSRSVGAYVGLTTRRHASGEIDWTGRISKCGDAMLRSYLFEAAGVLLTRVPKWSALKAWGMRLAKRNGLRKATVAVARKLAVILHRMWMDRTEFNWSKKEVAA

SEQ ID NO: 502014 - protein, 339 aa, unidentified
MKLYVGDDLHANNNFLALVDLKGKRVDQKKLPNDLFVIRDFLKPYKKDIVGIAVESTFNWYWLVDGLMDSGYKVHLANPAAIQQYSGLKHVDDKHDAFWLAQMLRLGILPEGYIYPKEERPIRDLLRKRRHLVKLRTSLIVSLQNIISRNCGVQFRANEVKRLKEDRVSPLLESNEDLALAGKTSKEMIDQLTRQIYKIEGAIVQRVELKESYRYLLTLPGVGKILGLTIMLETGPIGRFADVGNYASYCRKVSSRWTSNEKTKGKGNQKNGNKYLAWAFSEAAEFARRYDAQARAYYTRKMRKTNFMVAHGALAHKLARAAYYLMKDQVPFMPEKLFS

SEQ ID NO: 502015 - protein, 391 aa, unidentified
MICVGIDVAKDKHDCFILSSEGVALADVFTIPNSLEGFNILLDKLRACSTPQDSIKVGLEATGHYSYNILGFLLDNGLATYVLNPLRTNLYRKSLSLRKTKTDRVDARTIAAMLLSDAGLKPYTDTSYHNEELKSLTRYRFDKVKERSKLKQSVSRLVCILFPELEKLVPTLHMASVYALLSEFPGAKQVAAAHLTRLKALLADASRGRYGKDMAVELRDAARCSIGSRMPAKSLELQHTIRLIRELDAEIEEIETEIQTIMDELHSPITTIPGIGYRMGAMILAEVGDFSRFDSPDKLLAYAGMSPSTYQSGQLKNCYPHMEKRGSRYLRYALYNAAKYVCHWDPTFAAYLAKKRAEGKHYNVALSHAAKKLVRLIFALEKSRQPYRLAA

SEQ ID NO: 502016 - protein, 367 aa, unidentified
MQKVSTAAAMQGRNISQQRLTVGLDLGDRNSWYCVVDEAGQIRLEQRVRTSAKALQEVFGAMPRSRVALETGTHSPWISRLLSELGHEVIVANARKVRLIGESRKKDDRLDAQTLARLARIDAELLCPVKHRSAQAQADLAVIRARAGLVRARTGLVNTVRGLAKSYGERLRGCNVRNMNPEKAEGLSPELQRALEPLLSAIEEVSQRIGEYNERIEVLAQQSYPQVALLKQIKGVGTLIGLTFLLTLEDPHRFRKSRDVGCYLGLQPGRRKSGQSEPQLHISKEGDPYLRTLLVQGAQHILGPFGVDCDLRRWGLKLAERGGRNGKKRAIVATARKLAVLLHHLWVSGEVYEPLHNSSRMTAAAAA

SEQ ID NO: 502017 - protein, 381 aa, unidentified
MRTAYVEQHSANEPVLAVALELAKASWKVALSDARRNPRLKTVDAPQPLARLEQVVQTIAETRALWALPASARVVVVYEAGQDGFWLQRALQARALEVLVIDPASLLMARRRRLAKTDRLDALRLVEALLAWLRGEQRRFQVVCAPSVEDEDRRHWGRERQQLQRELQQHRNRIEKLLATVGCWTRLDRAGRQQLAEGTLRDWAGQALGAALQARLQRELQRWEEARTQLRRLEREHAQRFGTRQAEQVARLSQLRGIGTVGARQLVLELFWRQFRNRRQLGACVGLVPSPYDSGTLRVDQGISKQGNPRVRALLVEQAWLWLHYQPNSALSHWFAKKAGGDCRRSRRVAIVALARRLVIALWRYLERGELPAGATLKAVP

SEQ ID NO: 502018 - protein, 464 aa, unidentified
MEEVTDEPLYRDRVCGIDIGKAQIAATIRVPSEKNPARRASETREFATTKRGVLALADWLRCWQVPAVVMESTGDYWKPVFYRLEAEGFECVLADAKQVKNLPGRPKRDPSDSRWLAACFERGAIRSCFVPDPEFRVIRLHTRYRRDLTDERTREKNRAEKLLESAAIKLSSVVTDLHGVTGRDIMDHLIAGQRDPRVLAQLARARARRKITELEHALDGAEFFTAEHAALLKTMLERIDRVNEEIARLSEVIEQLLAPYEEQLQQAESMPGWGRRSAQDAVAETGVDMTRFPTGGHLSSWAGKTPLDHQSGKRTGRARHKKGNKYLAAVTGETAVAAGKTATREGARYRKLARSRGKGKAQVAVGNTQLRVYHKLLSNPGMRYQDLGPDYYQQQAALRRKIAYHVREIEALGLEVTLARTPEPDPGGPASTQAARPTRPPLPTAPNHGRQLPRAQLRSYFRAS

SEQ ID NO: 502019 - protein, 363 aa, unidentified
MHYVNNTELSSHEETRCQFNGGRCAIKLGIDVHQDFYVVVEQAGATNPKPPQRFQKEAFLHWAAKLKSEAREVHAVYEACGFGFSLQRKLSALSIQCHVVCPQKLDEQNRRVKTDGLDAKALCLKLDRFVQGNRDALAIVRVPSEEEEQARAIHRQREQLVKARKQLEAQGRSLMVNHGIEPVQNWWKPRTFAALAMPQWMKELLANSQPILVALQQKIAALTVQLQSAASPDQPRGLGKMTSVVIDREIGDWNRFNNRRQIASYTGLCPGEYSSGNTRLQSCVTKHGNPRLRAALVELAWRLVRFQPDYHPVRKWRQILTKGALATGAARKKAIVAVARQLAVDLWRIKTGRLNAATLGLIS

SEQ ID NO: 502020 - protein, 347 aa, unidentified
MKHLFIGLDVHKKSWSVTIQEGQVVLKRFSMEAKADSLIYYISKHYKGYSVECCYEACCCGYHIYRDLTKAGWNVLVVNPGDIPRINKQSTNKSDKIDSSYLCHHLASGHLRGISVPEEKQEQFRSLFRRRADLVKSLKRIKCHIKSMLLYYGIELPQNYDNVNWSKAMTHWIEKLKWLYPTAAATMKSRLDEYHFLRGEYLGVCNELRSYARKQYKKDYYLLRSIPGIGPFIAIAVLSEVGDIRRFKGIDRLSSYVGLVPSVHSSGQKSYSRGITYRSKNLLRSYLIEGAWIAAKKDEELMQYYQQRKGCDHRKIIIKMAAKTLSRIYHVLKTGKPYQTMQVRMAV

SEQ ID NO: 502021 - protein, 421 aa, unidentified
MQPEPEFAAFIGIDWADQKHIWCLQSAGAAKRETGELEHTPEAVESWVAHLYQRFAQRPIAAAVEQSRGALVFMLSKYERLHLFPVPPQMASSMRQALYPSSAKDDPRDADLQLDLLLQHRNKLRRLSPDSEATRRVQNLVEERRKLVDEKTPQINRLTDHLKVYFPQMLDWFGRLDSDVVCALLERWPALEELHKAPPASLRAFFRKHRCRDREQIEQRMEAIRRGIPALHDRAVIEAKSSAVRVIVRLVRVLVEGIEDLDGQIEEAAAAHPDFFIFNSLPGAGPVMAPRLLAAFGSQRERYRSADELQSFSGIAPLTESSGKRKWVHFRWACPKFLRQSFHEWTGHSIAQSEWARAYYQQQRSKGNTHHEAVRALAFKWIRIVFRCWQNRVAYDENRYLAVLVKRGSPLGARVAMGKTL

SEQ ID NO: 502022 - protein, 428 aa, unidentified
MVVEVKGGMAVEVVHRRCAGIDVSKRDAKVAVRVVGGGRAGTSTVVTTWSSMTGQIVALREHLLAAEVSCVVMEATGDYWKPFYYLLEDGPWELMLVNARHARNMPGRKTDVSDAAWLAQLGAHGLVRSSFVPPAPIRELRDLTRTRTALTRDRAREVQRLEKLLEDAGIKLSAVASDIVGVSGRAMLEALVAGQRDPLVLAELAKRRMRSKIPELTEALTGRFGEHHAFLVRTHLDLIDHFTDAVNATTARIEEAMAPFRAARDLIVTIPGVSTGVADVIIAETGADMARFPTAGHLASWAGTCPGANESAGRVKSTHTRPANPYLKGALGAAAMAAARTKGTYLAAKHRRIATRRGPLKAVVAVEHAIIVATWHMLIEHESYRDPGADYFARLNPDKTRNRAIDQLRAIGYDVTLTPRPTASPRRE

SEQ ID NO: 502023 - protein, 342 aa, unidentified
MVDQRVLKQIVGIDIGMESFYACYQVMRQDGSVLIKGTKSFTNTTKGMKALWGWCKKREKGSVQPTVYVMEATGVYYENLAYFLYENGEKVSVQLAQKLTYFAKSNNLKTKTDKVDSKMIATFGIEKALDKKDHWTPPSKEFKVIRDLSREHTNLKKELTAAKSQLHAMDYAHYTYKKVVEIKKEMIAFYEKQLKAVEKELKALVKADEGLWEKIQNIVTVKGLRFITVVKVLSEVNGFLLFNNIRQLVSYAGLDVVAKESGKHRGKTRISKKGNARIRSALYMPALTAATHNSSLKNFYERVNHNRTIKKQGIVAVMRKLLILIYTLWKKEEAYIENYGMC

SEQ ID NO: 502024 - protein, 362 aa, unidentified
MAKAMTFVGLDVHARQTHAAVLDPATGELAVSKLRMAPEEVVSFLQRLGPAVRAVYEAGPTGFGLARAGRERGIDVRVAAPGSIPRGAGDRVKTDRRDAVRLVRLLAAGELSFAFVPSVADECFRDLVRSIEDARGDLMRARHRLSKFLLRRGKRYPGPGGAWTAAHMRWLRSQAFEDACSQATFLDYLAAVELLAGRRGTLLEALAQAIPECTQAPLIARLRCFRGIDTLSAAGLAAEIGDFTRFPRPSQLAGFLGIVPSEHTSDRKRRQGSITKAGPGHARRLLVEAAHHYRYQPRIGETLGRRQQGQDPRVLEIAWRCQRRLHQRWQHLHLERRKPAGVVAIACARELAAFLWETATLD

SEQ ID NO: 502025 - protein, 345 aa, unidentified
MKLSRVGIDLAKNVFQVHGVDEHGELVWKRTLKRATWLGVFFKTVEPGCEVAMEACTGAHHWARELQARGYKVKLIPPQFVKPFVKSQKNDANDAEAISEAMSRPAMHYVAVKSIEQQDIQAVHRVRSELMSHRTAKANQVRGLVAEYGLVAPQQLGSLRAAIPCWLEDAQNGLTDRFRALLHGLWEDLTGLDQRIKVLDTEIAVIASTHPDARRLQQLRGVGPLIATALVAKFGDASHFKQGRQAAASVGLTPRHHGTGGKNRIFGITKHGDPYLRSILIHGARAVVSQAKRRDDRLSRWTTELAQRSHMNVAAVALANKTVRMAWAMLRNGTDYDPEIAVAEV

SEQ ID NO: 502026 - protein, 369 aa, unidentified
MLDSMFIGLDVHKATISVAVAEGERGGDVRHWGTIPHRPDHVRKLVEKLDADGVRLHFCYEAGPCGYGLHRQLVEMGHDCIVVAPSLIPVKAGDRVKTDRRDAVMLAKLHRAGELTAVWVPDAAHEAMRDLVRARATAMRVLGKARQHLQGFLLRHGRIYPGKKGWTVAYRRWLTTVRFQHPAQQIVFQDYVDAVADAEARVARLTGQIADLLPSWSLAPVVEAVQAMRGVAFIVAVTVVAEVGDFHRFDSPRQLMAYLGLTPSEHSSGTSVRRGGITKAGSGLARRALIEGAWSYRMQARVSRKLHDRIEGLPRTVRDIAWKGQLRMCQRYRHLVAAGKAKVVVTTAIAREMVGFIWAIARAVTAAPA

SEQ ID NO: 502027 - protein, 403 aa, unidentified
MRDGYGVFLGLDVGKGDHHTVGLAPDGKRLHDAPLPNTEVRLRQLFDKLARHGRVVVVVVVDQPASIGALPVAVARACGHQVAYLPGLAMRRIADLHPGSAKTDARDAYVIADAAHTLPHTLRRVDTGDEALAELEVLVGFDDDLAGEATRVSNRIRGLLTQIHPALKRVLGPKVHHKAVLELLSRCGGPIGLRKAGRRKLLSIATVHAPRMGERLVAQIMTALDEQTVTVPGTQAAETILPRLADSLRDILRQRDQAAGEVERMLDAHPLAPVLTSMPGIGVRTAARILLEVGDGTAFATPGHLAAYASLAPVTRRSGTSIRGEHPPRGGNKNLKRAFFLAAFAALADPVSRAYYDRKRAEGKRHNAALICLARRRCDVLFAMLRDKIPYQPRPTDQAPIPA

SEQ ID NO: 502028 - protein, 336 aa, unidentified
MSEHYVGIDVHKKWCVFTEINSTGKVVRQSRFGNNFGEVLDFASSLTPNVHVVVEPVLNYLWLLDHIEPQVGSVHVAAPQKVRVIAESKRKTDKYDSRMLAELLRVGFLPESWIPPREIRVLRGQIRQRYHLVKLRGMNKNRIRHLTFQHGVDLRTSDVDSPKARREIKKLVIPSVTGHAIEQCLQTISLLNEQIEDIERSIWRSVKGDPAVELLKTIPGVAKVRSAIIYAEIGDINRFHSAKALASYTGLIPTIRSSGGSVWTGGVTRLGSRPLRHALVEAAISASRRAPRLVRMYRRIEYRKNAQTARVAVAHKLAVIIYAMLRRNEPFHAEAA

SEQ ID NO: 502029 - protein, 339 aa, unidentified
MELYAGIDLHSTNSYLGIIDREDRRIFKKKLPNEHEVILRALERYKKDLMGVVVESTFNWYWLVDLLMGEGYRVHLANPSAIKKYEGLKHVDDKHDAFWLAHLLRLGILPEGYIYPKEERPIRDLLRKRGHLVKLRTSLILSLQGIISRNCAVKLNVNKIKQVREDHVSPLLTGQEDLELSGRVSKEAIDFLTRKIREIEGIVERKVKVKAPFNHLKTVSGIGKILSITIMLETGSIDRFPTVGDYASYCRKVPCGWTSNGKKKGNGNKKNGNKYLAWAFSEAAELARRYDPYARAYYNRKAAKTQFMVAHAALAHKLARAAYYVMKNCVAFDPQKLFA

SEQ ID NO: 502030 - protein, 375 aa, unidentified
MQEKVRFLGLDVHAETIAVAIAEPDGEVRSLGTIANRAESIRKLVKKLGPVDQLKACYEAGPTGYVLYWQLVKLGVECEVIAPTLAPIKAGDRVKTDRRDAERLARSYRSGDLTAVWVPNEGSEALRDLVRAREAAKQDQLRARHRLSKFLLRSGQRPAMGVKAWTQPYMAWVRQLRFTQIAQEFTRLDYLHEVEHMGERIKRLEQAIAEAVKLASPELREVIKGLQALRGVAQISAVTIAAELGNMSRFEGARQLMGYSGAVPSEDSSGQRTRRGSITKTGNAHLRRIAIEAAWSYRLRPGVGPALRKRQEGLPDEIKEIAWKAQHRLHRRYLSLVAAGKDQRKIITAVGRELLGFIWAIGVRAEAAVRQPIAA

SEQ ID NO: 502031 - protein, 381 aa, unidentified
MTTAATHHEQSNTTEAMLFVAFELSEKTWKLGFTTGHGQKPRERIVTARHHEHVLDEIAQAKRRLGLPETAPVVSCYEAGREGFWLHRFLQAHGITNHVVDSSAIEVNRRRRRAKSDGLDVRKLLSMLMRYEQGERHVWQVVKVPAVEAEDQRHLHRDLETLKQERASTMTRIEGLLSSQGLRVTSLTKLPEQLEALRLWDGSPIPPGLRRRVLRVYAHYTFLSEQIAEVEAERRAQLQTSSEASIDKVRQLMQLKGIGINGAWLLVMEFFGWRAFKNRREVGGLAGFTPTPYQSGERAREQGITKSGNRHVRWMTTELAWSWLRFQPDSALSVWFRERFGSGGKRLRRIGIVAVARKLLIALWRFLETGVIPAGAVLKEV

SEQ ID NO: 502032 - protein, 435 aa, unidentified
MSFVHRLSATNVNAKEESQMRSIGLDIHRDFMEVAIAEGGEIRSLPRVEMSSESLQLFGQSLGADDQVALEVSGNAWEVVRIIRPHVGRIVAASPTDTGMRQARAKTDRLDARALARLLAQGQLDGVWVPDEATQAMRRRLQRRRQLIVTRSKAKNEIHGALMRRLVAKPKVSDLFGIKGRRWLEELELPAAERETVDSALRQLDFCDQEIAAIEKVVAAEALVCEEIRRLMTVPGVGVITAAAFMAAVGEIRRFPNQKKLVGYLGLDPIVRQSGSSEAAHGRISKQGSAAGRYALVEAAWSVVRAPGPLRAFYERTRVRRGAQVAIVATARKLACLFWCLLARGEDYAYGQPSLLKRKLRALELRAGAPKRSTRSEGIWKANDAVREAERELAAQAEAAYKRTVADWQRNQARREAAKRRAEKEGAGATSGRAS

SEQ ID NO: 502033 - protein, 407 aa, unidentified
MPLFVGIDVSSKNLEACLMDAAGETLVTRTVTNNFPGASELKDVILQHAKPGDTIQIAMEATSVYSWHPAMFFHEDPELKQRQTKVFTLNPKLVKNFKRAYAEMDKTDPKDAWVIADRLRFGRLPKSVIQSEQYLALQRLTRMRYHLVHSLTREQQVFLNHLFFKFSAFNLEVDTSAFGHAITELLLEAYSLDEIAQMPLEDLAKYLQTKGRGRFSDPEDVASSIQKAARDSYRLSKCVEDSIDLILGSSIEIIRHLKRQIKDLDKAIARVLDGLPNTLETIPGLGPVSCAGILAEIGDIERFENQAAIAKFAGLFWPRHQSGDYEADDKMLARTGNRYLRYYLVEAANLVRRHEPEYRAFYQKKYREVQKHSHKRALVLTARKLVRLIDALLRNDQIYAPKKKVTR

SEQ ID NO: 502034 - protein, 354 aa, unidentified
MPTTARTAIAVVGIDIGKNSFHVVGLDDRGAIVLRQKWSRNQVAVRFANMPPCLIGMEACVGAHHLSRGLQRLGHDARLMPARYVRPYSKGQKNDFRDAEAIAEAVQRPTMKFVATKTADQLDLQRLHRVRERLVRQRTGIINQIRAFLLERGVAVRQGLRFLRNELPSILAAPSDALSPRMLRIIEDLAGDWRRLDERVEGLSKEIEAIARQDAGCERLISVPGIGPIISSAIVAAIGAGDVFSKGRDFAAWLGLVPRQISTGDRTILGKISKRGNRYLRVLFVQAAWVVLIKPKSWERHGLKSWIEAARKRLHHNVLAIALANKLARIAWSVLARGRSFEASKLAAAVTQPA

SEQ ID NO: 502035 - protein, 430 aa, unidentified
MKSNTQNAKIEAITEKTLVLGIDVGSETHYARAFDYRGIEYSKKPFKFSNTEAGFVTFKEWILDLKERHEKDKVVSGMESTGHYWFNLGKFLQDNEMKPVLVNPHHVKKSKELDDNHPTKNDRKDPKVIAGLVREGRYMIPYLPDGVYADLRTASNIRFQLQAELTRIQNRINRWFNIYFPEYKTVYGKPDAKSGILILKEAPLPEDILTLGIDGVNQIWRDAKLRAVGKARAKTLIEAAEHSVGSKEGAVSARMEIRMLLEDYESRSIRLQEVMTLIEGLVKQIPMAEKLLEIKGVGIRTVSGFLAEVGDISRFNNPKELQKLAGLALVENSSGKHKGETTISRRGRKRLRYLLFEVAMSLVAKNPEFRELHNYYTTRRLNPLKKMQSLMAIAAKLLRVFYAILTKGVGYDPKKMVNDIRRPAAYAQAA

SEQ ID NO: 502036 - protein, 427 aa, unidentified
MSTTLFVGIDISLKKATCCFLNQNGKLLKKVFEVDNNISGFEKLQEQIEILIPANEFSLVCIGLEATSMYGFHLLDYFSSAALKYPVEVKLYQVNAKYVSKFKKAFPEKEKTDMVDCRVIAEYLRFGRLPAEYKPECLFLPLRRLVRYRYHLVKNLEKEKKIYMANLFLKFPGWVQNKPIGPLGKTALDVTGEFTLDQLAEMPLKELALFVAKAGKNRSPDPAAIASEIQKAAKESYRIRPELASSVTFVLASISRTISALKDNLKQVDKAILAETKGFINPLISIKGIGPVYSAGILACAGDVKRFASHDQLARYAGLVWKRKQTGDTESEEKRIVRECDKYLRYYLVEAANSLRMHNEKYRIFYQKKYQEVPNHKHKRAIVLSARKLVRLVFALLSKNQLYDPLWVPQSPRPVLNQNCQRANLQV

SEQ ID NO: 502037 - protein, 432 aa, unidentified
MNPFSVSPEPSPVAAWVGLDWADQQHVICLYEVATGQSTVSRLEQKPEVLQDWLSQLRQRFGGAPVAIVLEQARGAVIYALLSADFVRLYPVNPQSLASYRKAYAPSGAKSDPADAVLLMEMVRNSPERFRPWKPDDADTRSLQLLTENRRQLVNQKTALTNQLTSLLKTYYPQALELAGVLDSLQACDFLTQWPTLEALQQARAGQIRQLYREHGHPRLEQLDRRLEQICQARPLTTDPAALLSGSMMVQALVQQLRPLLGAIERFDRQIAVLFRKHPDRPLFDSLPGAGAVLAPRLVAAFGTDRDRFQSAQQAQQLFGIAPVTEQSGKQRWVHWRWACPKFLRQTFHEFAGHSRHWCSWAKALYQRLRRCGKGHHAALRVLAFKWIRILFHCWKTRTGYDEQIYLKSLQKRNPTLWAEIQLLPPRKKRVA

SEQ ID NO: 502038 - protein, 342 aa, unidentified
MKDTIIGVDLAKRVFQAHGASMTGHVKFRKKLTREQFRRFMAEHPACVVVFEACGSASYWAREMQALGHEAKLIAPQYVRPFVKRQKNDAADAEAIVIAARQPEMRFVAPKSAEQQAKGVLFRGRERLVHQRTELVNALRAVLYEYGHVFPAGLAHLRRIEAVVEDSDCDLPELVIAECQDLLAQIAEKTERIDAKTKALKALAAQTDMARRLQTMPGVGPLTALAVEAFAPDMAQFKCGRDFAAWLGLVPRQHSTGGKARLGRISKAGQTDIRRLLIIGAMTRIMGRARHKVPAESWIGRMLARKPKMLVGIALANKMARQIWAMLTKNEDYRDPALATAA

SEQ ID NO: 502039 - protein, 402 aa, unidentified
MADDPMRYIGLDIHKEYFVAVGVNAKLEVIFGPQRVSNYQLDDWILRCLTPEDAVVLEMSTNTYQFYDALLPHVHSVMAVHSPNVAMVTNAQVKTDKKAALALAQLHAAGLLTGVWIPPYPVRDLRSLIARREKMVHLSTMAKNRLHSMLHRHHLVTPEKPFAYAQRTWWESLPLSANEQFLVRSDLDTLDFAQKQIEQIEERLKQESAEDARIPLLIQLPGVAMLTAITILAAIGDITRFPTAKKLVGYTGLGIHIHDSGMTHSSGRITKAGRKDLRCAMVNAANHAVEHHIHWKKELERLVPHLGRSKAIVAIARKLLVAVWHVLSEQVADRFANPRDVASSFLRYAYRVGVRNLPNEQPALAFTRDQLDRLGVGKDLKEIPWGSKRFKLPPSKILLEKE

SEQ ID NO: 502040 - protein, 321 aa, unidentified
METWVGIDISKDTFDAAWIMDGKKNHLKLENSSNGFKRLLNEVPAESRFAMEATGEYHLNCARYLSSRGNPVAVLNPFAVKMHMQSDLRRCKNDRADAYSIAKFAAEKNTDCWTCPTDDEIRLKHLDAVIDNLQKQIRQSKNILHSLTQVSLRDDQAVSIIKKTISSLEALMEKARNRQLEMVETGKKEEIALACSIPGIGLETSLKFFTHVGNIERFGSSRSLISWIGLTPRNAQSGTSIHKNGSISRMGCTRLRGQFYMCAVVAIKYNPDCRSFYTRLKESGKPSKVALIAVANKLLRQLYAVLTKKEAYVPNFCTKAS

SEQ ID NO: 502041 - protein, 400 aa, unidentified
MAGPHKASHTAVAIGAAEERLGEVRVRASAAQAGKLVAWAAPWPERTWAVEGAGGLGHLLAQQLVAAGERVLDMPPKLAARVRLLEAGDTNKNDPDDALSVAVAALRSKARREVTADDHGAVLKVWSKRHRDLGRARNQVACRLHAVLCELVPGGIAKEISAGQAAHFLAQVTPSGAAALARRELAAEFVDDMRHLDAQLCETRKKLAAAVKASGTTVTEIFGAGPVIAGTVIGDVADVSRFPGRNQFAAYNGTAPVEVSSGNRKIYRLSLRGNRRINHAIHMAAVTQIRHRHSDGRVYYDKKLAEGKTRKEALRCLKRRISDAIYARLQADARRAAGTPADAGPGGQPGNDSDSSAAGSHPADQLFGQATPEPGTTLRPAALRRRTAPKPTPKKTPETP

SEQ ID NO: 502042 - protein, 383 aa, unidentified
MRAVCGLDVHKDSVFLCIVCETGEIIEKVFGVLTYQLEDMRRLMQSYGVVEVTMESTSVYWIPVWRVLEPHFRLKLVNPYFIRQLPGRKSDVKDAQWIAECTLKDLVRGSFVPPEIIQQLRQYDRRIFDLDAEIIRKLSKLDAVMHRCNIRLSNYVSNTDTKSYKDVVADLCDGVTDPEALITRIHSRIINKHGRETILAALTGVVSQAETDAMRQLKEELDLARRHKQECHQKMVDICKEHFPKQFERLMTIPGIKERAATSLIAEIGVDMTKFQTAAHLASWSGLRPRNDESNRKVKSRRITHGNAFLRKTLIECAWGATRTKGCFFNRFSYHQIQVRRKNKMKILVAVARKLLIAVWHVLRDETGYRDFDPDCNQPAANG

SEQ ID NO: 502043 - protein, 339 aa, unidentified
MELYSGMDLHSSNTMIGIVDEKRKHLMDRKLPNDPELIRSFLKPYKPVLKGIVMESTYNWYWLADLLQEEGYRVHLSHPVANEQYKGLKHSDDKHEAFWLAELLSLGILKEGYIYPRQIRSLRDVLRKRAHLVRVRSALLVSLGHMVQRNCGMKVKTGDMKRLTQDLVSPLLNRDEALLLAGKTSKEVIDCLTRQIDKIERWALNRLRQEGVFLGLVTLPGVGDILGMTILLETGPVSRFRAVGNYASYCRKVSSQWTSNDKVKGRGNIKNGNKYLAWAFSEAAEYARRTNEACRRFYDRKLRQTNTKVAHNALAHKLARAAYYIMKDHVFYEEEKMFS

SEQ ID NO: 502044 - protein, 391 aa, unidentified
MIFVGIDVAKDTHYAAVSDDSGAVLVKPFAFQNNAEGFCLLLKKLSEFDRSKLLIGLESTGIYSENLICFLYESGFRLAVINPIQTATLRKTAIRKTKTDKVDTMLIIKSLMVNSYRLYSQRDADFLKLRTLCRFRQNLKKSKARLKIQLAGYVNLVFPEFGKFFKSGIHIAASYALLKKYSSPKEIAALRTSTLCTLLSKASHGRFGKDTAEALKSLALSSVGVKNPYISIQIAQTIAQIELLEQQIKDLNSAIEEAMESINSVLMTVPGIGAVNAACILGEIGDIKRFSKPCKLLAYAGLDPTVRQSGQFTAKSTRMSKRGSALLRFALINSAWQLTLNDTTFKAYYDLKRSQGLNHYGALGHVAHKLTRVIFKLLTSDTPFIPAKLVA

SEQ ID NO: 502045 - protein, 397 aa, unidentified
MRNKPTGGPLMRNYTNKTVYLGMDVHKKTYAVTAICEGQVVKKDTLKADPAILMAYCKKYFVGAKIESAYEAGFCGFYLHRCLEAEGIKNIVVDAAGIEVAVGDRVKTDKRDSLKLATHLSVGRLRAIRVPSAEREDCRAVTRLRETFSRQRSRFACQLKSLLFQHGMIRADDKRKVSEKWAKVLEATPVSPGLKYAIANYLALWRQMNIRIKEIDRELSAQAQKDEAIEAIYRSVPGIGTTSARILANEIEDTLQFDNEKKLFSYTGFTPREYSSGEHIRQGHITRHGKPILRKILVQAAWRAIRLDPSLKEIFQRISIKGGKKKAIVGVARRLIGRIHACFRTGELYRIPLTKNKKAEEKSIVSQEPREANAALQIAKGNLLRLAFDEKCIELNS

SEQ ID NO: 502046 - protein, 357 aa, unidentified
MQRNKISFKGQNIYVGIDVHLKTWHVTTVTESGYKYSFALHSDAGELFDRLNRKFPDAHFVSAYEAGFCGFSAHYALAELGFESIVVHAADIPTTGKEKAMKTDAVDSEKIAWALKRGELTGIYVKDREYMDDTNLMRLRQRFVADLSRQKNRTKHLLYTQGVTYPERFSKNRTHWSRNFMKWLRDEVDLLSEEKRSLVLLCDQVENTRKSILEVTREIRRLSTTDKYKENYDLLASIPGFGLIISMSMLTELDNNVARFPNERTFVSMLGLIPTCHDSGEKKFCGEKTNRGSKQLGPLIVEASWVAIQKDKGLGAYYCDCCQRMKPHKAIIKVARKLACRAYAVLKTKTKYKHEQS

SEQ ID NO: 502047 - protein, 428 aa, unidentified
MKYTQNEKILQVTEKTLVVGVDIAKERHVGRAFDFRGVELGKRIEFENRKEGMEKFLDWANKIMKANGKDNMIVGIEPTGHYWLCFEQYLRENGIKVVLVNPFHVKRSKELDDNTQTKSDIKDPKTIAMLVKDGRYTEPNIPEGIYAEMRVAMNIYERLQKQLNVLKNQIINWLDIYFPEFLEVFSDWEGKVALLTLKEMPLPSDVIEKEVEGIIEYWRDKVDKRAISRRRAMDLVETAKRSIGKKEGRKLARQEIKYLLEEYELLKKQVEEIEGEMAELLKDVPNGDRLLEIKGVGVKTAVGFISEVGDIRRYEDARQIQKLAGLNIIENSSGKYKGQTCISKRGRGRLRSSLFRAMITIVAKNEEFKQLHMYYTTRQNNPLKKKQSLIALCCKLIRIFYAILKKGIRYDGNKMLSDIKRETLARTA

SEQ ID NO: 502048 - protein, 360 aa, unidentified
MKNTLNHALSTTTTLTPSETQVRISQLKLGVDWHADQFRVVRMCDGQSPQPAQRFTPASFLPFVQKQLTLADQVFVVYEAGPGGFHLHRQLTALGVTTFVVHPQKLDPQHKGVVTDKTDARELTLNLDRYLRGNIRAMSVVRVPTPAEEQRRALSRQREQLRRERQRLAAQGRSLCLTQGIRLRGEWWKAPLTLPDWLAQRLAVWRQLIAAVETLLEALTQQVEALAPKQRPKGLGPLTLGLLIAELCDWARFKNRRQIGSYTGLCGGVSSSGQSHCDLSITKAGNARVRWALIELAWRMVLYQPQSKAVQRWRHQLLNPHAAARQKKRALVALARQLAVDIWRWQTGKVTPEQLGWVMV

SEQ ID NO: 502049 - protein, 417 aa, unidentified
MTDLVPPTVFERYVAVDLHKDYVVVGGVNARLEVVLSPRRIELEAWPRWSQAHLRQTDALVVESTSNAWDFYDQVAPLVGQAVVANPRLVKLIASGRVKTDKVDTLSLAKLLATGFIPTVWVPPLEVREARGLLAHRRRLVRNRTMVTNRLQSVLQRHNLPAPAGEPFSAANRPWWDKLSVSPTEKLRVRQDLATLEHLAGQIAELDDEVVRLSTQAPWADQATYVMQLPGFSVLLTMTVLAAIGDVTRFESAKKLVGYAGLGASVHSSGATHRTGRITKTGRRELRWALVEAAWSAVRYHPYWKAEFERLARRLSDNKAIVAIARKLLVAIWHVLTEQVADRHADEKMVATKLMRWSWKLTDEQRGGLTTRQFIRVQLMKLKLGEDLTHLKYGNMPRRIASVEEVLAVRPELRDTV

SEQ ID NO: 502050 - protein, 334 aa, unidentified
MALELLAIDLGKRAFHIYGIDTDGVILSRKVSRAKLAEVVGDLEPTAIAMEACASAHHWARCWLAASRQVRLINPRFVKPFVKGSKNDAVDAEAIFEAAMRPTMRFVPVKSTDQRDLQSLHRARDRLICQRTALINHTRGLLAEYGVVLPQGPRRFMTQAPTAIAGADLSDLARAIFGELMDQLDDLDRRIQKLDAMIVTLCRTNETCRRLTKLPGVGPIVATAIVAAVNDGRQFRSGREMAAWIGLVPRQYTTGGKPRLGGIGRRANHYLRRQLIHGARAIVSRSDKHDDRQSTWLKALVARRGFNRTIVALANKTARIAWVLLSRKQEYAAP

SEQ ID NO: 502051 - protein, 407 aa, unidentified
MDVIYPRCAGLDVHKETVVACVRIASDGPPEQAVQTYKTTTAGLLALADWLGSFDVKCVAMEATGVYWKPVWHVLEGHFELILANAAHVKNVPGRKTDVNDAMWLADLLAHGLIRASFVPPMAVQELRTLTRTRKQLVRERSAHVLRIDKVLEDANLKLGVVLTDIMGKSGRAVLQALIDGQGDPESLARHVSLRVKASRAEVLEALRGHISSHHRFMLKLHLGQIDALDRAIADIEQEVGLGLRPFRQAADLLTTIPGVSDTSARAILAEVGIDMSRFATPGHLLSWACLCPRNDESAGKRRSTRLRRGGKWLKTTLVQAAWAAVKVKGGYLQAQFHRLRARRGAKKAIIGVAASMLSAVWHMLRDGTVWHDLGAAHFNQANATKTANRLIRRLQQIGYTVHATPE

SEQ ID NO: 502052 - protein, 391 aa, unidentified
MSQYFVGIDISKYKHDCCIINAADQSIVAKFTIKNDKDGFNELLTSLQSLSTPEDIRIGFESTAHYALNLELFLEKAHHSFMEVNPVLISEYKKSTSLRRTKTDSVDCESIARWLMTVEYKPHSKGFYHAYSLKSLTRLRDRLIRQRSFYIVKITNVLDHTFPEFKPFFQERFSKTALYLLENYGSAEKMAHMNSASYDNLRRISRGKFTPPKFIELKTLATNTIGVNNSIFDTELKCLLTLYKEAANQISVLEAQITELIEEVHPHYMSIPGIGPISAAVIYAEYGDISNFSSPAQMLAFAGLEPGINESGTESHKGRMVKRGSSQLRYVLMNCALPLIRFDVTFATYYAKKRSEGKPHRVAISHVTKKLVRVIFALERQNTDFVATALR

SEQ ID NO: 502053 - protein, 349 aa, unidentified
MTEQRRSYAGECVYVGVDVHKETYTVTCVCHKQIVKTATVQAEPASLAASLRRWFPGATLASAYEAGFSAFVLHRALTTAGITNIVVNPASIAVAANDKVKTDRRDSKRLAVDLADGRLQGISVPTEEEELARLLPRTRAQLVEHRATLARQIKAKLHQFGLIAPSSRRMLSHRYLREIESWTLPPALRASLQMLAEQWRFVTRQLIEMRRLLREQATAQAAIDKVYRSVPGIGEVVARTLATELGDMTRFANERALFSYTGLTPSEYSSGASVRRGHISHQGSSRVRHLLVETAWRARPYDAVLQTRLERIAATRGKKRAIVAIARRLIGRMRACFRQGTMYAVGTLA

SEQ ID NO: 502054 - protein, 362 aa, unidentified
MAKSTTVIAFDQHAATTVAAVLLPGHRTPALHTLASDSPTILRFVERLCRQGPIVCCYEAGPCGFELQRALSARDITCEIIAPALIPRRAGDRIKTDRRDAGQLAVLYRAGALTAIHIPTEQEEAARDLLRCREDIRADLLRARHRLSKFLLRHGRRFTGTKKAWSKRHDLWLRAQTWPLPALDHTHRAYLRAVEETVARLRAVEEDLRALLDLEPLRPRVIRLRCFRGIDDLTALTIAAELGDPRRFPTAPSTMAFVGLVPSEHSSGARRAQGGITKTGNGHLRRVLVEAAWHYRHHPFVSAALRHRQRGAPDTVVAQAWTAQQRLHRRYHRFAARGKPKQHIVTAVARELTGFVWAALTQ

SEQ ID NO: 502055 - protein, 425 aa, unidentified
MSEIRSTQPEPEFAAFIGIDWADQKHIWCLQTAGSEQRESGELEHTPEAVESWVANLYQRFGQRPIAVAVEQTRGALVFMLSKYELFHLFPVPAQTAASMRQALYPSGAKDDPRDSDLLLDLLLQHRNKLRRLSPDSEATRRVQNLVEERRKLVDEKTAQINRLIDHLKVYFPQMLEWFARLDSELVCAQLERWPTLEELQNASPASLRAFFRKHRCRDRERIEHRMEAIRRAIPAIQDRAVIEAKSAAVKVIVQLVRILIEGIEDMDGQIEEAAAAHPDFFIFNSLPGAGPVMAPRLLAAFGSQRERYRSAREIQSYSGIAPVTESSGKRKWVHFRWACPKFLRQSFHEWAGHSIVQSGWARVYYQQQRRKGNTHHAAVRALAFKWIRIVFRCWQDGVAYDENRYLATLVKRGSLIGTAYGKTL

SEQ ID NO: 502056 - protein, 427 aa, unidentified
MNSNTQNEKITSITENTLIVGMDIGSMNHFARSFDWRKVECSKKPFPFLNTEDGFTEIHEWIEKQREDNNKKDVIVGMEPTGHYWINLAIFLIGCGYKVVHVNPAHVKKSKEMDDNSPSKNDRKDPKVIAGLVSEGRYCIPYIPDGIYADLREYNFQIRQITQRSTELKNLIARWFSIYFPNFLDVYSSYTAKSALMVLDVAPLPDDIVKLGEDGINKIWRDAKLRGVGPKKASELVEAARHSVGSKRAADAAREEIKRHIRDLKQAMEDLAKLKTVTETVLLKVPYIEKLLAIKGVGFGTALGFVAEVGDISRFHNPKELQKLAGLQIVNNESCKYKGRPHISYRGRKHLRYVMYEAAISVLGHCEEFQVIHKHFTERKQNPLRKMQSVIAVSCKLIRIFYAVLTRGIDFDAKKMLADIRWEEEAA

SEQ ID NO: 502057 - protein, 355 aa, unidentified
MKYYSSTTEFNCGIDLHAHQMYVCLLNRDGKKLVHTNVRHNDFDYFLKLVAPYRHDLTVCCECMFGWYWLSDACQAAGLKFVLAHALYLKAIHGGKNKNDRIDSEKLAHLLRTNLIPPAYVYPADKRPLRALLRQRIYYVWSRTELLARIQSHQLAYNRNPIRQTRPNRDPWEQQLLAQEPDPVRQLALHNDLAMIRHYDNQITALEEALHRLTKQTAPRDYALLQTVPGIGEHLGMTILYEIGDIERFPTVKDFISYCRLVKGTVASAGKIKGLRGAKLGNPYLRWAFGEAAIIAKRDHAVIGPLAERLEARMNGNKFKANTVLAIKLARAVYYMLRQHTVFDPDRLVAALARN

SEQ ID NO: 502058 - protein, 316 aa, unidentified
MAPSVTALPRILGCDVGKQEIVVYDKARNRLTRLPNQADALEAFAASLGSDCFVVCEATGGYELALLSALLCAGVPAHRADARKVKAFIRSFGTLGKTDAIDARALARYAEERRRDLPLWRARDVDRVHLQSFVLARRDLVADRLAYANRRDAPNAGPLRAHYDSLLREFEARIQALDAEIKALIEGCEPIAKTVKALVAIPGIGLKTAAALVGLLPELGSASPKRIASLAGLAPHPNQSGAADRHRFVHGGRPEVKRTLFMAALTARKHNPNLRVFYERLVANGKKPIVAITAVMRKLLTFANAVIRDHQTIQVS

SEQ ID NO: 502059 - protein, 380 aa, unidentified
MARRREMAVREEDTTKTPTIYIALDLGHRRWTVGVLLPGDRDARLFQIAGGDREALSELIRRWRQTLGDPGVRVVSCYEAGRDGFWLHRWLRDQDIDNRVLDPASLEAPRRWRRVKTDRVDTLGLLRVLLRLERGETEMTRVIWVPAPAIEDARRHTRERERLVSERTAHRNRIQGLLAARGVTAIKVGARDWPDRLAVACTGDGRTLGVALLAEIRREAERLALVEHQIREVEAAQHAALKADTALAATACKLKRLKGLGEVFASGLTNEAFWRDFGNRRQVGGAFGLTPWPWDSGDMHSDQPISKVGNRRARTMAIECAWMWTLHQPGSALTRWWQKRFAGGGRRVRRIGIVALARKLMVALWRYLKEDLIPEGAVLA

SEQ ID NO: 502060 - protein, 382 aa, unidentified
MEPSITRYALGLDVSKDDLKACLISVEQSLSTRIKASRTFNNNLKGIKDLEIWLNQRFKDPNSFLNVVIEATGVYHEQLAWALHLAGYRVCVLLPNKVKNYLRFLGNKSKNDKMDAEGMAKLGVQQLLEQWQPISDRLYELRLLTRRHENVQKSKTILNNQLEALEHGHIQQKIVMKQLRSCIKLLDKQLVDLKREIQRLIENDVLLAERTQHLYSIKGVGMICAATIIAETNGFALFKNQGQLISFAGYDVVENQSGRHTGKTRISKKGNSHIRRVLHMPALSVVKLKVAPFTGLFERIMQHQPHKMKAYVAIQKKLLVLLYTLWKKNEPYKKDMLNQTSGVQEAKLLFQVKVENIVAPYLGATQDELPSVQSAKVLFQVL

SEQ ID NO: 502061 - protein, 348 aa, unidentified
MNYYAGIDVSVEYSSVCLVDASGKIVREAKVETTPEAIIAWLGSFGHPIERIGVEAGPLSQWLHRAMSEAGLAVELLETRHVRNALKAMTVKSDRKDARGIAQLMRTGWFRPVHCKSMEAQEVRAILGARKLVQSKLLDVENSLRGTLRNFGLKVGHTTTRSFGGRIRELVAGHPSLEVIGTSLLSVRDVLLRELNGFEKRVRGMARTDARTRLLMSVPAVGPIIALTYASAIDDPARFKSSKQVGPHFGLTPKRYQSGETDRSGRISKVGDAAVREALYQAAHVMLTKPVKGCTALKSWAMRIAKRAGMKKAKVALARKLAMIMHRMLADNVAFNPAPKAAASAMAA

SEQ ID NO: 502062 - protein, 429 aa, unidentified
MTKTYILKTQTVPADRSAVETYLAPPPPSKGKIIGLDCHPDTFTAAFFVGQTPHDARKIGSRENLSLDALLKWAAAELTPQDIILMEAGSNSFELCKRLGNLGLKACVLESCHVGKHAKTYADNDKMAAARIALVYLAGNAPCVWVPDEQSRERRELLHAYRKAVDEHTAATNSIKSYLNGRGLRLGKHSLDEKTTSQWILDQADWSVLQKNILAEHLANITESKERRKRLYRLIAAEIAVDPTMMRCMKVLGVGIVSAFALLAVIGDIGRFHSPEKLVAYIGLNPGQRQSGKGKDIRLGVGRRGRGDIRNLLIQGAHAIMRSGRNTPLGQWGWKLFTRKGNRNVAVAAIARKLLVQVWHLLHGNPPLALESDTSFRIKLQKLAVALGSTLRTGIGLGKTLEDSVKTLISRCQTHAEPSASPCETPQPA

SEQ ID NO: 502063 - protein, 401 aa, unidentified
MTAREVMWVGVDAGKQAHHAVAVDAEGRLLWSTRVANDQAAIEALVARAGRSGAEVCWAVDLTCAAATLLLALLVTAGQRVVYVPGRTVNRMAGAFAGEGKTDAKDARIIADTARLRRDLTELSTPNELVVEMSLLVAQRADLMGDWVRGVNRLRELLTAIFPALERTFDYTTRSALILVAGYQTPQAIREAGPDGLAAHLSEAGAWRKGIPSMVDKALAAAAAQTIRLPAEATTAALIARLARRLLDLDREIKDTDKLLTERFRTHPQAKIIESMPGMGPILGAEFLVATGGDLAAFGTSARLAAYAGLAPVPRDSGRRTGNLHRPKRYHRGLRRVFYMAALSSLRASGASQAYYRRKREERLRHTQALIALARRLVDVLWALLRDNRQFHDSPPLTARA

SEQ ID NO: 502064 - protein, 347 aa, unidentified
MTIVEDRRAVTGGVDTHADTHVAAALDPIGGLLGVQEFPATTAGYARLLGWLGGFGTVALVGIEGTGSYGAGLARHVTAAGIRVVEVDRSDRQDRRRQGKSDPLDAVSAARAAQSGRARGAPKGRDGAVEAIRALMVAKRSARSERTQTINQARALVLTGPDDLRARFAGHTAAGLVSGLASLRPRPGSTVGYATRIALRELGRRAEFLDGQLGRLDELIIPLVTARAPALLALHGVGPDTAALLLIAAGDHPERLRSEAAWAHLCAVAPIPASSGKVTRYRLNPGGNREANHALWRIVITRMSSHPRTRVYVERRTAEGLSKKEIIRCLKRYVAREVYRHLRAAAD

SEQ ID NO: 502065 - protein, 347 aa, unidentified
MQYFAGLDISQEKTSICIVDAEGRIIAERKVATCPEAIADVLTKFSVTRAGLETGPLSVWLWNELKAAGVPIICMDARHANAALSMMPAKTDRNDAVGLAQIVRTGWCKIVHVKSAPSHEARALLAARSQLVQIRCSLENEIRGVLRTFGIVFGKRVGGFARRAEEIVAGELDISPTIRAVVDALMKARADIAAQVSSLDARVRSMARTTPVVRHLMTVPGVGAVTALGYVATIDDPSRFRRSASTGAYLGLTPKIYASGETMKAGRISRRGDDFLRRSLYEAANALLTRVARPSPLKTWGLRIAKRGGFKRAKVAVARKLAVVLHAMWRSGEAFRWSSSVTEPTAA

SEQ ID NO: 502066 - protein, 354 aa, unidentified
MLYLGIDQHARQITISLRDEDGDILLARQVSTQPAKIHAFFQQLTRRRLAHGESFTAVLEVCGFNEWLIRMLKDYRCHKVILIQPEERKKQKTDRRDAAALSELLWVNRARLLQGKPVRGLRQVDISSTTDQENRRLTTLRKSAGQAQTRIILKIKHMLRRYNLQWEMPTKTFPTQRAIAWLKKLALPEIDRWEMDHLLADLEHAQRRVQELEKVIAQRSATSDAAALLATIPGVAAYTAIALACRVGRVERFPRSHSLANYWGLTPGCRDSGETRRPGSITKAGSATARWLLAQMTRQVLRKDARLREWFKRIKRRRGSSIARVAVMRKLATTIWHMLMKKKTYAECRALSAS

SEQ ID NO: 502067 - protein, 332 aa, unidentified
MMAQNERVVVGIDVAKDKVDACIRALSHRQTFPSGAEGRRQLIAWLRKHKVGQAVMEASGGYERDWAKALREAGIAVRIVDPKRVRNFARSAGRLAKNDPIDAEMIAWFAETFDEAPGQAYDAAREKLAQIVNARQGLLELQTELQNRREHSVPEVVQKVQARLLKKIAAELATLEAAITALIKATAHFAELAEIIESVPGLGGTTSAGLIAAMPELGQVNDKIAAALLGTAPYDDDSGKRRGERHIKGGRRRIRNLFYMACLGAATRHNPVLKAFYGRLIAKGKEPKVALVACMRKLIAILNTMIARRQKWDVTRYKVSDHARPLPSACPA

SEQ ID NO: 502068 - protein, 335 aa, unidentified
MYYVGLDYHLRSSNLCIVDDGGKTVKQNRISGRWPAVMEAIGQVPGPVSVVFEASCGWGLLYDQLCRVARRVVVAHPGSLALIYKTRKKNDRVDAAKLAKLLYLDAVPQVHVPSAATRQWRRLVEFRRCLVTRRAAVKNQVHALLRTLGIDSDRLRFTRKELVKLGKEPMEDRPGLERDLLIEQHRHLSDQIRRVQRELNRIADGDGRVTLLQTAPGVGPRTAEAFCAYVDRIERFGRSNRLGSYFGLVPCQDASAGMNRLGHITKQGPASVRQLLVEAAWIGIRKDAGLKARFDRLCQGRPERRKIAIVALAHHLACAMGAMLRTGRSWQSQGA

SEQ ID NO: 502069 - protein, 377 aa, unidentified
MIAAARSDVSVNEPVLYVAFELGKKEWKLAMTSGFGMQPWLRSVAAGDLAAVERAVANGRQRLGGPGTARVMSCYEAGRDGFWIHRALIALGVENRVVDSASIEVNRRARRTKTDRIDALKLVMMLVRVCCGERRVFAEVRVPSAEAEAARHRSRERTALVQEQTRLRNQIGSWLATCGCRVTARTRQKAAWWTGARDWADAPLPPPVQARIARAEARWAVVAEQIATIDASQTATVRQADPGSALARLVQLQGVATTSASVLLDEGVVWRAFQNRRQIGGLLGFAPAKYDSGESERDQGISRAGNTRLQSMMVQLAWGWVHWQRQSALTRWYQERFGRGKRARRVGIVALARKLLIALWRYATAGVLPAGAVLKRA

SEQ ID NO: 502070 - protein, 342 aa, unidentified
MEQIATIGLDIAKSVFQVHGVDAEGVTVLRRRLTRGRLLEFFRKIDPCRVGIEACAASHHWARELRALGHDVRLMPPSYVKPYVKRQKNDAADAEAICEAVTRPTMRFVEVKTPEQQSTLVLHRTRAILMRQRIQLSNAIRGHMAEFGIVAPIGRNGLERLLEVIRDGADERVPAAARACLQMLADQLRLVNIQALETERRIRTSARATEVGRRLMGIPGVGPLLASALVATIPAPQAFRSGRNLAAWIGLVPKQNSSGGKERLGGITKQGNRYLRQMLVVGALAVIRYAERHGTRRPWLVQLMARRTTKVAAVALANKMARMVWAIMTSGESYREPVPRIA

SEQ ID NO: 502071 - protein, 361 aa, unidentified
MNKVSRGLPKMDAGIAKPEMTVGLDLGDRYSHYCLLNSDGEVVEEGRVQSTEAALRRHFEGEDCLRIALECGTHSPWVSRLLNALGHQVIVANARKIPAITGSESKNDRNDAEKLARFAAFDPKLLSPLEHRSEERQVDLNLIHARSTLVRARTMIVNALRGLVKSAGGRLPACSTESLPARALAAIPPALSAVATPLVEQIALLNAQVDGMDKQIEKLSAKYPEIVLLRTAPGVGPIVAAAYVLTLGQPDAASNRSAGAFLGLRPAQSQSGAADPQRRISKSGDSFLRSLLVQSAQYVLGRFGLDSELRRWGLKLAATGGKRGKKRAIVAVARKLAVVLHALWRSGQRFQPFPQQAAVAA

SEQ ID NO: 502072 - protein, 316 aa, unidentified
MSKVERAVGIDVSKGLLDVAGLPEGESGSATNDEEGITQVVKRLKSLRPRLVVLEATGGMETALVGAAATARLPVVVVNPRQVRDFAKSVGALAKTDAIDARVLARFAEAVRPEVRPLKDQEASQFSALIARRRQLVEMLTAEKNRLATAPEAIHPSIEEHIAWLEQRLEDINGKLKKAIKKSPVWRAKDQLLRTVPGVGSVFSATLVAGLPELGALNRKRIAALVGVAPFNRDSGKYRGRRCIWGGRATVRAVLYMATLAATRFNPVIRAFYLRLCAAGKEKKVALTACMRKLLTILNAMVKTGTPWLLRSEQTT

SEQ ID NO: 502073 - protein, 462 aa, unidentified
MKRKAKSQATHSGLAVVNPNAAAIDIGATMHVAAVGADRASDPVRSFGTFTADLHRLADWFAECGVKTVVMESTSVYWIPIFELLDERGFEVILVNARDAKHVPGRKTDVSDAQWLQRLHSYGLLRASFRPKGEIVELRAYLRQRERLLDTAASHIQHMQKAMTEMNLQLHHVVSDITGATGMRIIRAIIAGERDPAVLASMRDTRCHSSAEVIEKALTGHYRAEHLFVLEQALALYDVYQQKVAACDIRIESVLKELISIRGRKEDARADGSGSPRRRSRQSNGPDFDVGKALHSLLGKDLTRIHGMGPYLALKLVSECGDDLSAWPSAKHFTSWLCLAPSNKISGGKVLSSRTRRSGSRAASLLRLAAVTIGRSDTALGAFYRRLSARAGKSKAVTATARKIAVLFYNALRHGMDYVDPGASYYETRYRERVVKNLHRRAKAFGFILQAAEMPAAEQAVS

SEQ ID NO: 502074 - protein, 370 aa, unidentified
MKLTYPICCGVDVHKTFLVATIITSEYTMPHYHQKRFSTFYSGLVAFKKWLLENNCKDVCMESTGKYWVPVWNVLEDSIHVVIANPKWVSAVKGNKDDKKDSKWIGNLFRMGLVPGSYIPSKNIRILREFTRYRSKLVSMRSSEKNRFQNAFTVCNLTLDAVVSDMFGKSATDIENYLLKTDIVDPAQCVSLLRGSLKKKSSDVVEAVSGFNMTPEQKERVRIVQGHFDDIDHRITQLDEVIGNLVAGYEGQIALLCTVPGIGRRTAITILSEIGTDMTGFGSSKRLCSWAGLTPANNQSAGKKKERLMHELCKCPHWCQNSTRLHSSVISLEKDGQNLSGWSLSETRLSGSRPCCCKSHGETSLLPHQV

SEQ ID NO: 502075 - protein, 355 aa, unidentified
MKYYTSTTEFNCGIDLHARQMYVCLMDRQGKKLVHTNVKDNDFAYFLKLLEPYKQSLTVCCECMFGWYWLADACQAAGLTFVLAHALYVRAIHGGKNKNDRIDSEKLAHLLRSNLIPPAYVYPAQQRPLRALLRQRIFYVWRRAQLLARIHCHQLAHNRIPAKQSRWTRDDWEERLLKAQIHPLRQLALQNDLAMIGHFDHQIFEVEKELYRQTKQLAAREYALLQTVPGIGENLGLTILYEIGDIERFPTVKDFLSYCRLVKGTVASAGKIKGLRGAKLGNPYLRWAFGEAAVIAKRDHFRIRPLAQRLEARMEGNKFKANTVLAIKLARSVYFMLKNKTVFDPDRLVAALARN

SEQ ID NO: 502076 - protein, 467 aa, unidentified
MSPRSGKQFRTSEQVEDLTVTHRHAAGIDVHAAVHFVAVAAEDVPAGFVNPDGKLPVGVRKFGTNTGDLEALAAWLKDCGVTTVAMESTGVYWIPVYDLVASQGLEVLLVDPRQTKHAPGRPKSDVLDCQWIRRLHSYGLLTASFRPSDEIVRWRGFQRQREMLIRYAAQHVQHLQKVLEEMNVKLPEVVSDIMGQTGMKIIKDIVRGERDPHKLAKHRHESCKSTEAEIASALYGTWRPEHLFGLKQALKLYEFYQKQLRECDGQIETCLRMMKDQSNGQPLPASLRKRKPEKNEPRFGARALLFRMSGVDMTQIEGISETTALVILSEIGTDLSKFPHEKNFVSWLGLCPQHRGSAGKIFKRRIRRGANRAARALRMAAQGCHHAKNALGAFYRRIQARAGGPKAIVATARKIAERVYRLLKYGQDYVRQSEQAYEAAYQQRLVKSLATKAASLGYKLVPETMTP

SEQ ID NO: 502077 - protein, 385 aa, unidentified
MSQLNDLSRSLTSLEQDNTIIAVIEMSQSSWLVAGIVPGIERHPLKKLDPNEGELLRLLMRWRAEATKMGCTITRIAVAYEAGRDGFWLARWLRARDIETYVIHPTSVAVSREHRRAKTDRLDTGLLKRVFIGWLRGEPDHCHMAAIPTLAEEDAKRPNREREGLVRERTRIVNRMKSCLARFGVRNFKSTLRKAPERLATLVTPEGVLLPPNTLLELRRDMARLRFVIDQIKQVEEARAQRLEQAPQEKSHAMVRLLARVIGVGIETADMLVHEVLARNLRDRRAVARYAGLTGAPDESGSKRREKGLAKAGNARVRRGMIQLAWRFLIFQKDSALAQWYRTRTESAGKKRKTMIVALARKLLIALWRLVTTGEVPAGVILRAA

SEQ ID NO: 502078 - protein, 330 aa, unidentified
MNYFAGIDVSKATLDVTVCNLKKESFYSKFTNNTKGHKQLLSWLKATGVDVAETLFCMENTGLYSRGLSLFLTAKAVKVWVVMPIVIKRSIGLQRGKNDKVDSVRIAQFAMKHYNDQKGSQQQSAAVLELKDWLACRSRLVRQRIQLQQPINEFAAMGLIAQAKAMRIAITPALTGILKSIRQTDQAIKTLIRNERDLKKLYTLMVSVPGIGDITAWHLIAYSNGMKNFNNAKQLACYCGVAPFEHSSGSSIRGKTRVSQMANKQLKSLLHMGALTIVGGKKGEMYTYYERKVNEGKSKMNVINALRNKILQRVISVVKNDLPYQSKIAA

SEQ ID NO: 502079 - protein, 412 aa, unidentified
MKDLLEISCGLDVHKEKIVACILTGPLGKPTRSEIREFSTLIPDMIALRHWIVSKNCHHVAMESTGIYWMPIYEILEDAFSGDITLLVVNARHMKNVPGKKTDMRDSEWISTLLRAGLLNGSFIPEKRIREFRDLNRYRKSVIRDITSQKNRIEKFLQSSGFRLSSFISDIFGASGRNIILHLIEHGQIDKTALDSCLKTKTRNRIDEILMSVNGTLSEHQKAFLRILMTHYDSLKKHLAEIETSLEEDMAPFVLQVEQLNSIYGISTTASCAIIAEIGIDMKPFKTAEHICSWAGLCPGNNESAGKRKSTSVTKGNPYIKSMLCEIAWVIAGKRNTYLSAWYWRIKQKKGAKKAIVALARKLLVIIYTMLKQGTVFDESCFETRRKHCEQKQLSRYIRELEKHGYHVEAQS

SEQ ID NO: 502080 - protein, 391 aa, unidentified
MIYVGIDVAKDKHDCFITNSNGEVLFKAFTISNNQDGFNVLYQRIESVMEDVTKVKVGLEATGHYNYNLLGYLIDKGLTTYVINPLHTNLYRKSLSLRLTKTDKVDARTIAYMLMSDVNLKSYSDTSYHNEELKSLTRYRFDKVKERAKLKTSVSRLVCILFPELEKLVPTLHMASVYALLSEFPGAKHIAGAHLTRLTNLLSDASKGRYGKDTAITFREAARASIGSNMPAKSLELKHTIKLILELASEIDEIENEIKIIMDEINSPILSIPGINYRMGAMIIAEIGDFSRFDSPDKILAYAGFSPSTYQSGQLDSAYSHMEKRGSKYLRYALYNAAKYVCHWDSTFAGYLAKKRAEGKHYNVAISHSVKKLVRVIYHLVKSNQQYIKVA

SEQ ID NO: 502081 - protein, 333 aa, unidentified
MPRANSNLLDWDFMKSATTNEKIFVGVDVSKATLDVYRPDTKEVFKIDNSDEAIALLCSQLKKMKRKVMVVMEGTGGYEYLLLKHLAAHKLEAAVINPRRVRDFAKGIGLDAKTDPIDAKVISKYADVVVPQPMATKSDHELKHGALVARRNQLLELVNQENNRLKQSWDDDAKQSIRDVLEMLKKQVKNIDSQLAKMIQADTENQRAIEVLQSVKGVGPVMISTVLAELPELGKLNRGEIAKLVGVAPINRDSGKKSGKRFIGGGRGQVRRVLYMATIVAIRHNPAIKAFYAHLKSKGKESKVAIVACMRKFITILNLLIKTDQLWEDKMSV

SEQ ID NO: 502082 - protein, 369 aa, unidentified
MSSSTVPSTSSAPRTRRPAGEVVLGVDTHRDVHVAAVLSASGAVLATDEFPATAAGYRDLLKRARKWGTVRRAGVEGTGSYGASLSRYLLAQGVDVFDVNRMDRADRRRRGKSDPLDAQNAARAVLSGRARARAKSGDGPVQIARMYKLTKVSAVKARTQAINQLKAVLVTADPVLREELAGLGNAELFRTCAQFTDARGHEDAGAESVVQATRITLGLLAQRIGRLSEEIRNVEARLTRLVEGHAPQLLDVVGIGPDTAVALLITVGDNPERLDSEASFAALCGVSPVERSSGRRQFRRLNRGGDRQANAALHRIVFTRLRVDPRTQDYYERRIKEGKTRREIVRCLKRYAAREVFHLVKQLQPDPRS

SEQ ID NO: 502083 - protein, 430 aa, unidentified
MAAVSIPIVDWLDKPQSFHFAQGYEDRFLWNTVVANDTRSDAYMIYLGIDVAKNSHVAAAMSSEGEVLLMPFSFANSADGFTLLREKLNNLPKLPLLVGLESTAHYGENLICFLCGNGYHVAMINPLQTAAIRKSAIRKTKTDKVDAFVIAKALMMEGYTELQQSDIQILKLKGLCKTRQNLILMRTRCKIQLGSFVDQLFPELNRFFRSGLHINVSYTLLKAHPRPAEVGALHLTYLSNLLRKASRGKYKKEDAIRLRELARNSIGTDNPALALQIRQAVSQIELFSAQLKQVESEISTIMDSLDSPIMTVPGIGYLNGAMILSCIGNIQRFSSPAKLLAYAGLDPAVVQSGNFSAKSTRMSKRGNSMLRYALINASHNVVRNNETFAQYYNSKIAQGKSHYCALGHTAHKLIRVIFALLTNNIAFDLA

SEQ ID NO: 502084 - protein, 442 aa, unidentified
MRIPSSVPMPNEVPREQEIVAYVGLDWADQQHVICWQAADSAAVQSAVVQQRPEELQAWVAELRQRFPQGLVAIALEQSRGAVIAALMHFDFLRLYPINPKSLARYREAFASSGAKDDPDDAALLLELLVKHRDRLTPWVPDDALSRELALRVEHRRQLVNLQTKLIQQLRSHLKVYFPQALDWVGELDSLQACDFLQRWPTLAAVQKARPSQLEKFYHQHHCRRPQLIQQRLEQIRQAQPLTQDSAIVPAYSQMVLALVAQLRVLIPTLQQWQQQISQLFAQHPDAALFASFPTAGPVFAPRLQAAFGSRRDRFGSAAEVLQFSGVAPVTKRSGKSRQVQRRWARPKFLHQSFVEFTGLSIPHCCWARALYQQLRARGHRHWAAIRVVAYKWIRILFRCWQDRVPYDEQKYLKSLERRNPTLWAAIQQLPAQPSRKEVGRL

SEQ ID NO: 502085 - protein, 356 aa, unidentified
MNSPHYIGFDVHKKTISFCIKTATGEVVEEGVVAAQRRALQQWASARSQPWRGALEATLFSGWIYDTLRPYGEQLEMSHPAKMKAISAGKKKSDAIDARTIADLVRCNLLPACYVATPRIRELRRLLRYRSLVVSEAVRMKNKMAGLLMETGAIYVKEKLHRKKYFANLLEELEEVPPSVIELLRLSRGALEMFETTQKRLVRELLADPELTQRVERLMTIPAVGEITALTWALEIGDPHRFRSGAEAMSYCGLTAALKSSAGKQQRGPISKQRNRWLQSTLIEAAKLAPRWNPQLAAVHARELERGHRNRATLAVARKLVTYLLAVDKSGHSFQLRGPLIEDLAQQEMPLKIKTS

SEQ ID NO: 502086 - protein, 414 aa, unidentified
MEVVYTHCAGLDVHKKTVVACCLTPDPQGGWKKEIKSFGTMTCELLQLSDWLQARECTHVAMESTGEYWKPVYNILEANFETLLVNAGHIKNVPGRKTDVRDAQWIAELLQHGLLRPSFIPPVNVRELRDLVRHRSNFVRERATVVNRVQKVLEGANIKLACVATDVLGVSGRAMLNALCAGDTDPAVMAELAKGRMRTKRELLARALDGRVKPHHRFVLTELLCQIDSLDETIARFDEQVAVYCAPFDEAVALLDTIPGVGRETAQLIVSEIGTDMERFPSAHHLAAWAGVAPGNHESAGKRLSGRTRKGNQALRQGLVQAAHAAAHTKETFLSAQYHRLAMRRGKKRAIIAVAHSILVIAYHLIVRQEEYRELGGEYFDRRNPAATAKRLTHRLEQLGYRVTLQEQTSVAMD

SEQ ID NO: 502087 - protein, 440 aa, unidentified
MFVARERDYRVKSSSTAVALEESMESKDISVAGLDVHKKSVVVVVLQSNQPDEDQATGIFGTTRFGLNELIAFLRQHGVRDVAMESTAQYWRPVWMALEGQFALTLAQARSTRAPRGRKWDKADARRIAKRLLSGDLTISYVPSAEQRDWRLLSRTEVAMRESVVRVRNQIEVLLEQAQIKLSSVVTDLLGKSGRRMLDALVRGISDAAQLAELGDRRLHASQQELTDALSGHLTEAQRLVLKLYLEQIDILERHMTDLDKSLAKALVPHQQAIERLCEIPGISVRTAQYIIAETGPRAEAFAGAGKLASWAGMCPGQQESAGMSVSSRSAKGNWMLRRTLCQTAWAAIATRGSEAQRRFQRWRPRLGTRKAAWAIAHYQIRIVWKVLHDGVRYCSPDTEAMAQRALVARAKRALNDLRKLGYAVSITPPATQTARPSVS

SEQ ID NO: 502088 - protein, 341 aa, unidentified
MWIIGCDFHPRFQQIAFVNTEGGECGQRRLEHREEAEQFYRGLAGQAVRVGMETGGSSRWFERLLCELGHELWIGNAARIRAAATRKQKTDARDAEHLRQLLCSGQFEEMRIWIPPAENRDLRQLLWHRHRLVQMRTRVKNQLRSLATSEGMERKPGLWSQAGQKQFQALELAPWAARRRQDNLELLAELLHRADPLDQEVAQQAAQRPEAVRLMTHPGVGPITALAFVLVIGDPMRFANSKKLASYLGLIPSEDSSGGKQRLGHISKQGNALLRGLLVEAAHVAVRHEAQWKRDYRRLAMRKNRSIAVVAVARKLAVRLWSMWRRGVDYAQLSASGSHAG

SEQ ID NO: 502089 - protein, 331 aa, unidentified
MSMHVGLDVGSRTTAMSWRNEGHFAGACNIDQTPAGRKAAVNKLLELNPLSVVMEATGIYYLDLAMELTAAGLPVSVINPKSFHNFAKLMLKNSKTDAIDAQLLAEYGERMSPKLWTPPTTIQLELRAIGRHINRLTCHRTRAKNELHALKATQTTVKMLIEDEEEAIEAFDKRIERFRLAGRALIDNCPTLSAQFGHMIAAPGMGEISVFAALAELTTLPVTLKSAQVSRHAGLDVRLTQSGTSIDKPGRISKGGNAYLRSAMYMPALTAIRCDSNVKAFYEALIGRGKRKMQAIVAVMRKYLTGLWACMQAGEDFDTAKLFSAKDLAKA

SEQ ID NO: 502090 - protein, 323 aa, unidentified
MVVVAGIDVSKATLEISVSEGPVLSFENSTAGIRRLLRHLERAGVTKAVCESTGGYERLAVGKLREKSVTVQVAHPVRVRAFARACGYEAKTDPLDAQVLSRYGVVFSESDTAQPEVDPDREELRQLLSRRRQLVDQRVRERNRLDKGLSGGVGKSTRRHIRWLDGEIERLDEEYKELLKHNASLGETVELYQTVPGVGQLTAATLVAYLPELGRWDGRALTSLVGLAPWSRDSGKKRGNRSIRGGRGTVRRALYICAWAVLRIDGDLRDFYRRLRERGKPGKVATVAVARKLLMQINAVARRGTPWVKQHGSGCPSYQADPA

SEQ ID NO: 502091 - protein, 315 aa, unidentified
MDHNKAVYGVDVSKRNLVTAGYDEPTPVVVANLPESIATWLAQLPRGATVAMEATGAYHQVLAHLAHTAGMQVYVLNPQTLKHYAAAIGQRGKTDGCDARMIARYAVHEQAKLRRWLPPAPAADRLSQLLERRHTVVSTRQTLAQSLAVPMLKAPRQSLLANVDRILRRLEILIRHEIARLPGMAALYERLKGIVGIGPVVAAQLVAVFSTLNFAKADSFIAYTGLDPRPDDSGDWRGRRRLSKRGPPLLRCLLYNAGMAAANSRLLKPVYKQLRARGLQTTEAIVILARKIARIAFALYKSGHCFDPQKLLKIA

SEQ ID NO: 502092 - protein, 423 aa, unidentified
MNCTQNKKLMQITSETMVIGVDIGSEIHYARAFDFRGFEFSNKAFRFENNREGFNAFDNWATELMKKNNKTKAFVGMEPTGHYWYGFGCHLQNMRVEFGMVNPYHVKRSKELDDNTPSKHDRKDPKTIAMLVKDGRYLIPYMPEGVYREIRNLMELRRQNVVQLISIQNRVKIWLAIYFPEFNTVFKKWNGKAALLTLKYFPTPQAVIEMGEEKIVAIWKQTIKRAIGNKHARKLIKAAEESIGLKHGLESAVLEISTLLDEYEIYARKLQVIMQKVEEQVNKVPNANKLLGIKGIGIVAIAGFLGAVGDIGRFDAPEQIVKLMGLNLRENSSGKHKGKTTITRRGRSDGRYAIFQAVLPLVARNAEFRQLHLYYINRENRPLKKMQSIVALCGKLIRVFYAILKTGSNYNGEKMMKDIKRVA

SEQ ID NO: 502093 - protein, 334 aa, unidentified
METHYFLGVDLSKKKFDVTLTMDGKNFHEAQIENNPTAIQLFFRNLKKQLSSLNQVMVCLEHTGIYGFPLLDFLVKNQIKVIVEPAMQIKQSQGMVRGKNDRIDAKRIAIYAYKNRESLRLWHPQRHCIQQLKALLLLRERMVKVKVQLEVPINEGEEFIASSILKQTVANCQKTLRALQSDIERIEREIEALMSSDEQLTQQCKLVTSVPGIGKITALNIIISTQEFSKIQDAKKFACYAGVAPFEFSSGSSIRGKTRVSKMANITLKKLLHLAAMAAIRYSDEMKTFYKRKVDAGKNKMSVLNAVRNKLISRIFACIKNNRLYQKNYKHTLA

SEQ ID NO: 502094 - protein, 356 aa, unidentified
MQTQVTKKIDFTGKDLFVGLDVHKKSWSVTIVVDGIEHRTFTQPPDPEALKKYLQRSFPGGNYQSAYEAGYCGYGIHRRLNDLGIKNIVINAADIPTTQKDKLHKRDPVDSRKLARGLEKNSLRGIHVFDRDMEELRSLNRTRFYLMRDLRRSKNRIKSFLMYYDIPLPEEFDNNQWSLKFIAWLKQVKLQTTAGEEAFSHLITSYEHHRQQLLILSRILRLRISQHDKELFNLLKTISGIGPLTSSALITEIGDINRFPHIDDLGSYVGLVPRVRESGETTHTGGITFRCNNFLRVLLVEASWQAIRQDPALMQYYHKHVINSKGHKVIIKIARKLLNRIRYVMKNRQPYVTGVA

SEQ ID NO: 502095 - protein, 460 aa, unidentified
MSTCIRSQTLFVGIDVHKETHIAVGVSPFGEKLFEIKIGNYQKDFQSLSEKVKSLKGSLSPYFGLEDCHGYGERLATYLIEKYPVIHVPSIMVDRIRQNATHPEKSDSLDAYGVAKVMMQSIDTLPPYTLTEEAKRAKQIKEISVDREYLVDERTRLKNQLHILFYRIWNTEYQTKFKDVFALKALKYWIKAKTSCDEYLLRIMKRKVRRIIDLHYEINELEKDITTLLADGNYTIQTASGCGAVIAADIIGEIGDINRFHSPSSLAKYSGCAPRECSSGKTKRYRKTRSGNRRLNCAFHRMALSQISRMGNSKAKTYFAKKISEGKSKSQALVCLRRQIVNIVWMMLKHKTEYRYPQKSLTFSHSGSLLPRRPSTAFRPATLPEYLEGRTPKEKHPFLFQKKFPTRQIKKARSVFLSGLPRLCEAVAERYERTRQFRATTRSARASFGVLLEVSQNFLV

SEQ ID NO: 502096 - protein, 316 aa, unidentified
MANQVEQITLGVDVSKDELVVFNWNSKDLSKLSNEPATIRAWLRTLQGPVRIAIEPTSSYHLAFVEQAMARGCSVYLVNPRQLAHYREAVNERNKTDPDDAYLLARYLNNEASQLRAYEPLDPKAQRLWTLLKRRAVVVDARKQLRQSLAEAQLPSQALFTQFRHVLARIDARIDKLIGQLGWSDDYQRCLSVPGFGRLNAAALVCAYRRGAFASSDAFVAFLGLDIRVRDSGQFKGKRKLTKRGESELRRLLYCATKPARTYPPFDRYRQRQLDKGLPKIAANVILARKLARIAFALLRDQTTFRKQPMEACPTP

SEQ ID NO: 502097 - protein, 391 aa, unidentified
MTKCKTETVNDLSRCLDPLDIDATLIAVIEMSQSSWLVAGLVPGVERQPLKKLAIDERALLNLLSRWRAEAEKKGHRITRTAVAFEAGHDGFWLARWLAAQGVETHVIHASSVAVTREHRRAKTDRLDTELLKRGFLGWLRSERGHCKMVAVPTLAEEDAKRPSRERETLVGEASRIITRVKAAFIRLGIRGFNPKLKAASARLGTLRTPEGEPIPPNTLAAIKRDLDRHQVVKQQIREIEQTRLKLLEKAPAKGPHAMVRLLARVVGIGVETADMLVQEVLSRNMRDRRAVARYAGLTGSPDESGAKRREKGLARSGNARVRRGMIQLAWRFLMFQKDSALAEWYRQRTANAPSMRKTFVVALARKLLIALWRLARDGVVPDGVRLRPTV

SEQ ID NO: 502098 - protein, 451 aa, unidentified
MSKNKISAFDEIRRNVAGIDIAGHADHYICGPRRDDGSRETVHFGTTTSELYKLLDWLKKRAVDSVAMESTSVYWIPVADVLESAGIEVVLVDTREVRMVPGRKSDVKDCQWLQKLHSSGLLRGGCRPPENIAAVRTVLRERENMTSIRTQCIQQMQKSLDQMNIRVHHAVSDIDGKTGMAIVGAIVSGERDPKVLAALRDPRCKKSVKQIAEELTGTWREEHLFNLGQAYQTLLFMNERIAEYDEKSADMFKALADASGNEPPPPAKEKLTVKERRNLEEKCILQQFVGFDMTSITGIGYETAAIVSSEIGIDLSRFYTEKHLVSYLGLAPSLGKSAGKNVRQRKRCKNTSRAGRALRMAASTLYRSDSELGAYFRSVARRSDRKTAVKATARRMAQMIYRGIRYGEAYVERGAEAYEERMRDRAVRAAYRIIKSNNINELELKKAFATV

SEQ ID NO: 502099 - protein, 326 aa, unidentified
MEHELHYIGIDTAKEKLDVDVLRPDGRHRTKKFANTTKGHDELVSWLKGHKIDHAHICIEATGTYMEPVAECLYDAGYIVSVINPALGKAFAQSEGLRNKTDTVDARMLAEFCRQKRPAAWEAPHPLERALRALVVRHQALTDMHTQELNRTETAREVQRPSIDAHLLWLEAELKRLEKQIKDLTDDDPDMKHRRKLLESIPGIGEKTFAVLLAYIGLKDRFAHARQFAAFAGLTPRRYESGSSVRGASRMSKAGHVSLRRALYMPAMVATSKTEWGRAFRDRLAANGKKGKVILGAMMRKLAQVAYGVLKSGVPFDASRHNPVAA

SEQ ID NO: 502100 - protein, 341 aa, unidentified
MMGNVTTIGLDIAKSVFQVHGVDAASEVVVRRKLTRGRVLAFFESLPRCLVGIEACSSSHYWARELNARGHDVRLLPAQYVKAYLKRQKNDAADAEAICEAVTRPTMRFVPVKTPEQQSVMMLHRVRLMLNRQRTQISNALRAHLSEFGVVAPIGRNGIEQLFVVINDENDARIPADARLCLRMLEAQLRVVKEQILENDRRVRASARETELGRRLMEIPGVGPLLASAFVATVADAHAFKSGRCLSAWIGLVPKQNSSGGKEKLGSISKAGNRYLRQLLVVGAMAVIRYAERNGTRRPWLVQLMARRTAKVAAVALANKTARMVWALMTSGERYREPVIA

SEQ ID NO: 502101 - protein, 406 aa, unidentified
MRAIHERCCGLDVHKKTVVACVLTPEGRWTRTFGTMTAELLQLLAWLQQEGVTHAAMESTGVYWKPVYNLLEGQGIELLVVNARHVKAVPGRKTDVKDAEWLAELLQHGLLKASFIPERGHRELRELVRYRRSLVEQRATVVQRVQKLLEGANIKLSDVTSDVMGVSGRSMLKSLAAGKTDAAELAELAKTALRNKIPQLERALTGSIGNHQRFMLQSQFRLLESLEAEIATLDQEVAERMRPFQAALSRLDEIPGIGPRAAQQILAETGTDMSRFPSATHFASWARICPDNNESAGKRKHAGIGGGNRWLRDALMEASWSVTHCRRSNFFTARYHRIAARRGKKRAAVAVAHSLLIAIYHLLKHGTVFQDLGAQHWEVRHREAIARRSLRRLEQLGYRITIEQTA

SEQ ID NO: 502102 - protein, 343 aa, unidentified
MQAITTIGLDIAKSVFQVHGVDAGGQPVIRRQLKRRHVLTFFRKLPPCLVGIEACASSHHWSRELQALGHTVRLMPPAYVKPYVKRHKNDAADAEAICEAVTRANMRFVATKTPEQQSCLMLHRTRHLFIRQQTAVINSIRAHLAEFGIVAPVGRQGVEQLLGVVADAHDKRLPEIARACVAALGAQLRVLKAQILQFDRMIIAWHRSSEASKRLDEIPGVGPALATALIASVADPKAFRSGRDFSAWIGLVPKQNSSGGKDRLGSISKQGDRYLRSLFTAGALAVIRYAKIHGTKHRPWLAALLARRPTKVAAIALANKLARMAWAMMAKGERYKQPAALAA

SEQ ID NO: 502103 - protein, 379 aa, unidentified
MYSVGLDVHARRSSLCILDENGKRLKHLEVRGPWPKLMETIDTLPRPFSICFEASCGYGYLHDQLARRAACVQVAHPGQMRLIFRAKNKNDRVDASKLAKVLYLGEVPAVHVPDLDVRGWRKLIELRQSLVSKRAACKNQVRAVLRSGGRLSPPDRCSLWSKKGRAWLEQQEMSGSDRTSLRLLLGQIDLFNQQVRSVTGELTKIGQKHAGVQLLMTIPGVGMRTAEAFVAYVDKATRFSSNRKVGAYFGLVPCQDSSGGIHRLGHITRDGPSTVRKCLCEAAHMAVRRSPTIRARYERMVRNDPQRKKIAIVAICNWLCRVMAAMLKSGQVWQYEDKKGRTRSTASGGGECSPPEDTAPRTAVSSGGGKGPGVKAVEA

SEQ ID NO: 502104 - protein, 288 aa, unidentified
MLADELDYVLGVDTHRDEHVMAVVTAPAGAVVAGAAAPANAHGYRELLRVAEQHAPGRRAWAIEGTGSYGAGLSRYLHARGESVLEVSRIPRGERRLRGKDDALDAARTARAALASNTLALPRRGERREALRLLLVARRSAVDVRREALTQLRAIIVTAPELLRQELCRLPEGKLLDRCSRFRRTNSAGADELATRIVLRSLARRVRTATVEADELEREILAHVRALAPTLLDEPGVGPIVAAQLIVAWSHRGRLRSEAAFARLAGVAPVPASSGQTTRHRLSRGGDR

SEQ ID NO: 502105 - protein, 382 aa, unidentified
MPDGIRWVGLDVHARESTFAVFDQATGEVMTKRVVGRPHELMPLLREIPRPARMVYEAGPTGYGLARRALAEGIELSVCAPGKTERPPADRIKTDKRDAVRLARLLAAGELTLVTIPSVEREQLRDLVRCREDIRVDLVRARHRIGNFLLRREIYWEDTGEAWTRKHRSWLTAIRFADHASQATLGDYLHAHDVLIARRDQVEADLATLALTAPCAHTVARLRCLRGIDTLSAVGLCAEIGEWERFDHPDQLSAYLGIVPSEHTTGAQRRLGSITKAGSTHARRLLIEAAYHYRRGPVVGEALQRRQRGHAPEIINISWKAQRRLNARWRQLKDARRKPGGIVAVAIARELAAYCWEIATCPTTAPEPTPTPTTRNRLTNSR

SEQ ID NO: 502106 - protein, 359 aa, unidentified
MQTQRNELNFEGQNIFVGIDVHLKSWTVSIFTEKLHHKTFTQPPKAELLSEYLKLNFPNGSYFSTYEAGFCGFWAHFKLKELGIQNIVVNPVDVPTTQKEQMRKSDAIDSNKLGRSLRSNELKGIYIPQAETLEDRTLIRVRFAIVRDMVRLKQRIKALLNLYGIEYPNELKNTNTHWSKRFINWLKTIQLQYSTGTDALNILIIAAEQHRLILLDATKKIRTLSKSEHYSKNIELITSVPGVGIITGMMLLAEIEDINRFNNSDKLAGLIGVVPNCHSSGENEKKGEMTSRGQYFMRKGLIESSWVAACKDPALSLSYNTYCKRMEPNKAITKIARKLVNRIYSVLKNQKRYEMGIVK

SEQ ID NO: 502107 - protein, 366 aa, unidentified
MAMTTMTHPPQPTLGVLGGVDTHKDVHVAAALDDTGRLLGTATFPTTTVGYRQLWRWMRSHGEVVAVGVEGTGAWGAGLARYLTAEGADVREVMRPNRQHRRRYGKSDEADAIGAARAVLAGEALGTPKAGTGQVEAIRLLRVARRSAMKARTQAGNQIHAVVDTAPEELRRRLVSRPTATIVAEVARFHRRLPDTPLEAARFTLRSLARRWQYLDDELAALDAQLDELTATAAPTLRAMNGVGPQVATALLAAAGDNPDRLRSSSSFAALCGVSPIDASSGRQQHHRLNRYGDRQANWALHVIIISRLRWHVPTKAYMARRLAQGRTPKMIMRCLKRHVVREVHRAITLDLGHQTERTRAQPIAA

SEQ ID NO: 502108 - protein, 420 aa, unidentified
MDVHKRTLAVVVSDVEIDGEYAFERRRFGSNPAQLRLLAEWLLEQQVEEVVMESTAQYWKPVWGALERYWKPLCQKREGARPMSGALHLAQAQSNRAPHGRKKDFPDAERLVKRLVAQELTLSFVPDPEQRLWRTLTRAKYQQTRNRVQLQNRLEGLLEEAHIKLSSLVSDLLGVSARRMLKALAEGETDPGAVAALADYRLRATPEQLGDALGACRELNPVYRRLVKAALEELELIEKHMGQLEQEMADLLRPHQDSVQRLAEVPGLGVDSAHQIIAQVGATAATFPSAAELSSWVGACPGDNESAEVNHGHRSPKGNRPMRRILNQAANAAVKQKGSIFEILYRRYVPRLGHNQTIGVIAHRLCRLIWKILHQGVHYEERGPAVSCRSKQRRTARMIRELRSLGYRVQLANPQSAVSA

SEQ ID NO: 502109 - protein, 407 aa, unidentified
MDVIHPKCAGLDVHQKTIVACVRLMAGNTVQYHRETFGTATRDLFALADWLSGHGVTHVALESTGVYWKPVWYALEGQFGLLLANPLHVRNIPGRKSDINDATWIADLLAHGLIRSSFVPPEPIQDLRDLTRTRKQLTRETARHTLRLQKTLDQANLKLTGLLTDILGVSGRAILDALVGGERDPERLADLARGRLKASRPQLVAALHGRLTPHHVFILKLHLTQIDALHAAVRDVEARLGEALEPFRAAAHRLTTIRGIGPRAASVLIAEIGVDMSRFPTAGHLRSWAGLSPRQDESAGKRRSTRTLAGNPWLKTVLVQAAWSAVRKDPSYFRAQFLRLKARRGAKKAIVAVAASILTVAYHVLQRGVDYSDLGGDYFSQRDKAKLARRLIARLHDLGLAVEVRAA

SEQ ID NO: 502110 - protein, 375 aa, unidentified
MGENSEAFVAFDTSKLRNAVAIAEAGRDGEVRFLGEIDNSGAATAKLVRKLVAKYQRLTFCYEAGPTGYGLYRQITSLGYSCIVVAPSLIPQKPGDRVKTNRRDAVSLARQLRAGELTAVWVADERHEAMRELTRARGAAVEDLRRKRQQVSAFLLRHGRHYAGKKSWTKAHRSWLLSQKLEHPEERIAFEEMLLAVCQAEERIARLEEAIRMAIPDWSLAEVVTALMTMRGMDLISATGFLAEIGDLSRFRTPRELMAYLGLIPSENSTGDKVKRGPITKTGNRRARRILVECSWSYQHPPRIGKEKQAKVAAAPRAVGEIAWKAQCRLNARYRALTRNGKLKTVAVTAIARELCGFIWAINREITGPRAAAQL

SEQ ID NO: 502111 - protein, 408 aa, unidentified
MNQMTCGIDWAENHHDVALVDEDGTLIAKKRITADMGGFRELLELIAEHGGGPASTPVAIETDKNLLVVGLAAAGFTVYPINPRALARYRERHSQSGGKSDPADATALAHVLRTDRHLHRPLPDNSDGALRLKALARQHQEAIWALHQTVSRLRSVLLEFYPQAVKAFPKLPHYAATAVLSAAPTPAAGARLTKRRIESIFHRVGRRNDAALVEQILTDLKTPALRQSEPVESALGNVVAGLLRVVESMRDAVEDLERALTAELANHPLAPVLQSAPGIGAVLAARILAEIGDDPNRFTTAAGLRAFAGTAPVTRASGRSHYVKARKVRNKRLGDACHWWAFAALTRSPAARAHYDKRRAAGDHHNAALRNLANKLLGSLWWCIRNGELWDEEAAWPATIVAPGRAAA

SEQ ID NO: 502112 - protein, 346 aa, unidentified
MMLIGCDYHPSWQQICWLDTATGETGEKKLEHASGEAERFYRQLPAPALIGMESTGNCQWFVELAATLGHDLWIGDAAKIRASDVRAQKHDRRDAELILKLLREGRFPRIWTPSGEEKDLRQLLIHRYKLVRIRAQVKTELQHLAMNQGITKKRRLWSKAGEKVLRELPLAPWASQRRKDLFRVREMLDGQIDLLDQAVVEIAEKNEKARLLMTQPGVGPITSLAFVLTMGDVSRFQRGKQVASYLGLIPREYSSGGHQRFGSISKQGNRFMRMLLVEAAQGAVRCDPGFRNEYVHRCHRKPKGVAKVAAARKLAIRLYWMLRTNSGYPEVVRVESSSRVPLVSAS

SEQ ID NO: 502113 - protein, 350 aa, unidentified
MNARTIAIDLAKNVFELAIADEAGKIVDRKRLSRSQLRRYFENYGAAHVVMEACGTAHYWGRWFSERGMQVSLLPPHYVRAYIRRNKTDRADATALLEASRANDIIPVCVKSVEQQALQGMHRVRSAWRGTLTARLNALRGLCREFGIIAPVGARRGLAELVQRIADESSGLPRIIRTVLQGVIEEVRAIQERLRQLELELAAIAEQSAVCQRLRKIPGIGLIGATAFAGSIGDIRSFRSPRRFAAWLGLTPREFSSGNIRRLGSISKRGDGYLRMLLVHGARAVLYSANAAQRAGRPLDALREWGLRVRSRSGHNKAAVAVANKLARIIWASWYRQRDFEFRPPSPATH

SEQ ID NO: 502114 - protein, 343 aa, unidentified
MQMITTIGLDIAKSVFQVHGVDAAGEVVIRRQLKRRYVLAFFQKLSPCLVGIEACASSHYWSRELQALGHTVRLMPPAYVKPYVKRQKNDMADAEAICEAVTRANMRFVPTKTPEQQSCLMLHRTRHLFIRQQTAVINSIRAHLAEFGIIAPVGRKGVTELLHVVADPSDRRVPEVARACLAALGTQLLRLKQQILEFDRMIMAWHRSNQTSKRLHYIPGVGPILATALVASVADPRTFRSGRNFSAWIGLVPKQHSSGGKDRLGSISKQGDRYLRSLFVAGALAVIRYAKVHGTKHRPWLTALLGRRPTKVAAIALANKIARMAWAMMAKGERYKQPVALAA

SEQ ID NO: 502115 - protein, 460 aa, unidentified
MNPKRSKSKDGGNMPMVHPNAAAIDVGATMHMAAVRADRAPEPVHSFGTFTADLHRLVDWFTECGVETVAMESTSVYWIPIFELLDARGFTVFLVNARDAKHVPGRKTDVSDAQWLQRLHSFGLLRASFQPKGQIAELRAYVRQRERLLEYAAAHIQHMQKALTEMNLQLHHVVADITGATGLRIIRAILAGERDPEALACLRHYSCHSSAETIAKALTGSYRAEHLFALEQALALYDTYHEKASACDARIEAVLKELSNHRGRGHGPAPRASLRRNRTDQANALAFDVREALFALLGKDITTIDGLGPYLSLKLIAECGDDLSSWPSAKHFTSWLGLAPSNKVSGGKRLSSRTRRSGGRAAALLRLAAVTVGRTDTALGAFYRRLSSRIGKAKAVTATARKIAVLFYNAVRYGMDYVDPGASSYETRYRTRVVNNLHRRAKAFGFVLQPLEPTVGDAVS

SEQ ID NO: 502116 - protein, 414 aa, unidentified
MDVVHPRCAGIDISKKDAKVCVRIQGRGSRRTSATVTTWGAMTNQILSLREHLVEQQVTCVVMEATGNYWKPYFYLLEDTLEVMLVNTHDARNMPGRKSDVSDAAWLADLGAHGLLRGSLVPPPPIRRLRDLTRARTALTRDRARQVQRIEKVLEETGIKLSSVATDIMGVSGRAMLDALIDGRDDPAVIAELAKGRMRSKIPELAEALTGRFTPHHAFLISMHLTLIDQYGQALGELDTRIAEAMEPFRAARDLLTSIPGFSTTIAEVVLAETGGDMGVFPTAGHLASWAGTAPGSHESAGRVKSTKTRPGNRYLEGALGTAAMSVSRSKDTYFSAKYKRIASRRGPMKALVAVQHAMLVAAWNMLTNGDLYRDPGADYFTRRLPAKTRARAIDQLEALGYRVTLTPLAADTA

SEQ ID NO: 502117 - protein, 367 aa, unidentified
MEAIYYGIDLHSTQLTNHLIKNEEGKSIERKNEKIYVNQIKSKLLPNLTKDTHVCIEASCCTFKFAEMIRNHVKQVYVINPLDFKSLYCSGKKTDKIDAKKLANRLKYYVESEDKDEDFPLVYIPESHVIKMRKLFSVYKLVTGNMVSLKNRLHSILKSNMIFYKREHLFKVIEEQFKGDELDDVDKFQIEILLEEISRLDDKIKMIKNKILEIGYKHFEDEIKLLISIKGISDFTACAIMSDIGKIERFANSKKLSSYLRSTSKVDSSNNVVKIGKRNKKGRKLSFELIIQGLNHIINSTPKFQRFYETKSKGKNKNVVRSAIVRKVIVAIFFMLRNKEIYNDYDKKNYETKLKDFEKKKKKFFLN

SEQ ID NO: 502118 - protein, 355 aa, unidentified
MTSTKYIGMDVHKESISIQVMNSVGKVVMECVIETKASTILQFIDGLRGDLRITFEEGTWAAWLYDLLKPHVTEVVVCNPRKAALLKDGSKGDRIDAHKLAELLYMNKIKSVYHGEHGLRTMKELARSYLTITKDLTRVMNRLKALYRSWAIPCGGKEVYARRYRAEWLGKISEAGVRRRAEHYYQQLDVLRLLRQEVRRDLLVEAKKHKPWKLLRQIPGIGPIRAALLVALMQTPHRFRTKRQLWTYCGLGLETHDSAQYHAVEGQLQRSRKPATVRGLNTNHNHDLKDIFKGAATRVSSSRGPLHDFYEALLAKGRKPTMARLTLARKIAAITLIVWKKEVCFDANYLKQQAA

SEQ ID NO: 502119 - protein, 387 aa, unidentified
MPQSNDLSRSLTTLLQDNTIIAVVEMSLASWLVAGIVPGIDRHPLKKLKADEQALLRLLQRWRDEATKAGRAITRIAVAFETGRDGFWLARWLRARGIEAYVIHATSIAVSREHRRAKTDRLDTDLLKRAFIGWLRGEPDHCHMAAIPTIEQEDAKRPTRERENLVGERTRIINRIKSCLVRFGIHGFKSTLRKAAERLAVLKTPEGVPLPTNTLAELRRDIARLRFIVDQIKAIEVARLERLKKAPKEGPHAMVCLLARVIGIGIETADMLVHEVLSRNLRDRRAVARYAGLTGSPDESGKRRREKGLARAGNARVRRGMIQLAWRFLMFQKDSALAQWFRTQTADARRGTRKTMIVAMARKLLIALWRLVTNGEIPIGVALRPAA

SEQ ID NO: 502120 - protein, 327 aa, unidentified
MAKRTTICAGIDTGKRKLDIALDGSSEQLQIGNTPEGYKTLSDWLRRHRVKRIGIEASGGYEQAVVAELRRKGFVVVVFQPAQVRAYAKFHLQRAKNDKIDAALIAACTAAVKTIHAPPDARLLPFAEHLTMIDQIGEDIARLKNRLETCRNPRFRQTWKEDIARLEKREKIELKVLVAAIREHRDLAERLDLIESVDGIGLPTAVAILVRLPEIGRISREQAAALAGVAPYDDDSGEQFGVRHIEGGRQRLRRALYTAALPASLRWNPQLIALYQRLIAAGKEHKRALIACARKLLIFANTVVARGIPWDHERPPIASMTAVPHTG

SEQ ID NO: 502121 - protein, 320 aa, unidentified
MSALSVTVGIDVAKAHVDVCVLGTHSDVQRFANDVDGHCALAAALQSMDVGLVVMEATGGYEAALACALQAVGLHVAVVNPRHARDFARSMGRLAKTDAVDARMLAELAAVLMRRDDLARFLRPVADERQQWLAALVTRRRQLLTMLNSERQRLQITPRKLHPSIEAIVAAIKAQLDDLERQMVGHVREHFGELDGLLQSTNGIGPVASATLIAQLPELGRLNRREIAALAGVAPVANDSGNRKGRRRVQGGRFEIRRVLYMATLTAARYNPVIRAFYERLRAAGKLPKVALVACMRKLLTTLNAMVRTGKPWDPSLHRA

SEQ ID NO: 502122 - protein, 324 aa, unidentified
MKTIMIGLDLAKSVFQVHGVDDAGQVMLRRRLRRGQVLGFFAKLAPAVVGLEACGGAHYWARQLSALGHEIRMMSPGYVKPYVKRNKTDGRDAEAICEAMQRPTMRFVAVKGEDQQAVMTVHRTRALLVRQRTMAGNALRSAFAEFGVVAAQGIKGLRALLAQLPTPTGIPPQAHAALAMLARQWQALDGDIRALELAIVQAARSDEHSRRIMHIPGVGPLTASAVMAGVADMRHFRSGRGFAAWLGLTPRQNNSGNKCRSGGISKQGQRDLRSLLILGAASHLRQERRRGVKDPWLAKLIARRPVKVATVALSPRWRASSGLC

SEQ ID NO: 502123 - protein, 339 aa, unidentified
MERQYVAVDLHGRRSMIVRENAAGEELAVVRIDNSVEELSAALAEAGPNPEVAIEATYGWYWAVDALQELGATVRLVNPSGLVWEDRRVKNDYLDCRELITRMRINKLPEAWIAPPEWRELRELVRYRFKLVCLRTGLKAQVKSVLAKHGLQPPVNDLWYATGAGPRWLDQLQLPDAYHHRVESLRDLVGAIDREISTLERMIHQQLKDHAGYRAIQHIDGIGRVLAPIFVAEIGDVHRFGSPAALSSWAGLTPKHRESDVKAHRGKVTKKGNRLVRWAAIEAISHMRGGPKLQADYHRIADRRGKNIGRTAVARKVLTLVYYGLRDGEIRSLAKAQAG

SEQ ID NO: 502124 - protein, 339 aa, unidentified
MSILYVGIDLAKNVFAAHGVDESGTARLRQPKVARAKLHALVASLPPPCVIGMEACSGAHHWARLFQAHGHTVRLMAPKFVAPYRMSGKQGKNDAADAAAICEAVQRPNMRFVPIKSVDQQSRLLVHRARQGFVEARTATINRIRGLLSEFGVVLPLKAEVVRTEARNHLEDLPGYANTVIGDLLSEVSHLDDRIKQYDAHIRAMARDCALAQRLMQLKGVGETTSTALVAMIGNASEFDNGRQLAAWLGLVPGQYSSGGKTRLGRITKAGDPYVRSLLVLGARAVLNAAANKTDSLSRWALGLRERRGYWKAVVAIAAKNARMAWAVLTKGESFVLPT

SEQ ID NO: 502125 - protein, 346 aa, unidentified
MCSLPVFVGMDYHDSFVRVVVQDTDGSEMGNADRTNHWKAIADFGDRFGRPVRAAIESCCGAADLAEELVSCAGWSVALAHPGYVQRMKQNPDKTDCQDAQLLADLERVGYLPRVWLAPRYIRELRHVVRYRLQLTEQRRATKLRLRALLREQRCHAPEGLNAWTKAWQHWVRHTTELSAQGRWLVKQHLRELARLAIRIHEVEKRLEHLTANDVEVQRLQQQPGIGPVTAWTMRAEIGHFDRFRTGKQLARFCGLSPRNASSGQRQADAGLIRAANPALRTVLIEAAHRLVQYDPSWQKFAQRLRARGKPGSVVAAAVGNRWMRRLYHEMKTSSGELAIAVGPAR

SEQ ID NO: 502126 - protein, 317 aa, unidentified
MDKPPAATCFVGIDVSKGHVDVHVRPDGTAFSCTTDPDGLANLITRLAPLQPQLVAMEASGGYEAVIAAALTEAGLPVAIVNPRQVRKFAGAIGRLAKTDAIDAGVIAHFVDAIRPAPKPMPDALMLRLRELLARRRQLVVMVNAEKQRLGKAADKLAQRSFKTILRSLEAERARIDRAIDTLIQQSPLFCAKQDLLKSVPGIGDIVARTLIVELPELGSVDRHQIAALAGVAPMNRDSGRYRGKRRIQGGRVEVRAPLFMACLTAIRHNPPLRSFYRRLRDAGKPARLAIVAVMRKLLTTLNAIIRDNTAWTHVHI

SEQ ID NO: 502127 - protein, 313 aa, unidentified
MTTSGAWIGVDICKRYLDVGSTTGTPVRVANDADGRAALARRLRCENVRGVILEATGGLERPLMQAFAAEGVPASIVNPARVRKFAEGVGQLAKSDRIDTTMLARFGDYMKPGPTALADPPRQKLRDLLAYRAQINQEITARSAQIRLYTATDLLARAKAAIEALRAERKTIEREIEALIKAQAAMQVVYQRLITMPGVGLIVAATMIAELRELGDMNRRQIASICGVAPFPNESGDRKGYRSIRGGRDEVRQALFNCARVAIRHNSVAKPFYERLRARGKAHKVALVATMRKLLTILNAMLKTNTDWTCKTA

SEQ ID NO: 502128 - protein, 457 aa, unidentified
MSRARKVPQTVKSVAEVDTLTRLNPNAAGIDIGLDEMWVSVRADRDAEPVRRFGMNTPDLIAVAEWLKACGVETVAMESTGVYWIPLYEVLEERGFQVYLVNARHAKNLPGRKKDETDAQWLRRLHTFGLLNNSFRPAGEMCAVRAYWRHRADLIEHRAAHIQHMQKALHQMNVRLSPTVKDITGVTGMAIIRAILAGERDPLTLARLRDPRCAQPEAEFVKALTGNYRDEHVFALKQAVALYDAYTQQILECDQELERKFSALKPVHDDDLPPLDTTDKRNTHSKNAPAYDGRALLYQLLGVDLVAVDGLNEVTAQIIISEIGTDMSRWQDEKHFCSWLGLAPHNDISGGKVLRSRTLKTHNRAGQAFRLAAQAVSKTPPAYGAFFRRMRAMHGPMKAIVATAHKIARAVYFMLKNRTPFHDINAEEYTQREREREIARLQKKATKLGFTLAPVAA

SEQ ID NO: 502129 - protein, 304 aa, unidentified
MFGIGIDVSGENLDVAVHEQAFRQFKNNKRGWASLIRWLQQWPAKQVVLEASGGYEQKALDALHGAGLPMVRINPGRGRSFASATGKQAKTDRIDAMVLAHMADALKLTRYVPPAAWQRRLGELCQRRRHLVQMRVSEHQRMRAFSEPSLISMLNQHLREIQRSIKQLDSIIAALLAEQDGWRDFAKLKGAGPVLMATLACELPELGRLSGKAISALVGVAPMSRESGTWKGRRSITGGRAVVREALYMAALTAKRYEPRLKEFFESLVNQGKPGKVALVAVMRKMLVILNARKRDAEAQMASA

SEQ ID NO: 502130 - protein, 351 aa, unidentified
MFVAGIDAHTRYVVIVIINKMGERVLGPTRVKVEHRDRLLALLAPYRPLDVVMETSSSWPWLHEVLTGAGMQFVLAHARRLRAIAEANYKRDDIDAELLARMRVAGLIPVVYPTPVAQREWATLIRHRTTLVAQRTALVNRIHAQLHARGLHLARGRLLTRAGRQWVRSEAWPHLGREQRALVRSHFRVMAGLRPLLRALDRHIAEVAATIPEAQLVMTIAGIGPQRALVICAEVLPIARFRTPGHLASYAGLVPRSKQSGQGPVRHGQIPAGANRWLRGALVRAVVSHVQHAPESWLTHYYVAQKARLGWPTARVAAARKLARAIHAMLRTKHGWTHDPARGELHETHAA

SEQ ID NO: 502131 - protein, 332 aa, unidentified
MAASMPEYTLFVGIDIAAKSFTALIHTMTLVATERPFTLDQTPQGFAALQQRLAATASAPAQTLIVLEATSTYWTALAVTLHQAGYAVSVVNPEQVHHYAKSLPRRGKTDNLDAFVLARYAAERKPTPWTPPPAVYHELRQRLVARDALVAMRQQARNHRHALLQWPVVVDAVKTHLDEVIEDLDARIATLDAELATVLADGAWAQSAALLQTIPGIAVLTTAWLLVATINFTLSATPAGLAAYAGLVPLPRDSGSSIRGRPRIGHSGHSRLRAALYLATLSAARHNPTIKPFYDRLRAAGKPMKVARCAAARKLLHIAWAVVTKQQAFTTS

SEQ ID NO: 502132 - protein, 366 aa, unidentified
MEKGTTFVGLDDSKRKLVVAIVRAGASEPEQWELPKEPHLIRRLFQRLAREGQVRACYEAGVSGYDLYRQIVACGVECAVIAPALTPRRPGQRIKTDRRDAAKLVRLFRAGELTPIHVPNEAEEAVRDLVRCREDVRRDVLRWRHRLLKFLDRHGRLYVTGKNWSQRHWTWIRAQQFALPVLERTFEATLFGLEQALARRAALDREVAALAESEPYRTPVGWLRCFRGIDTLSAMILIAEIVDFQRFGHPRALMAYLGLVPSEYSSGATQRRGAITKTGNTHARRALVEAAWHYRHRPSVAGALRHRIEGQPPSVVRHAWRAQQRLHRRYRHLVGHGKRPPIAVVAVARELVGFLWAAMTLPAVAA

SEQ ID NO: 502133 - protein, 343 aa, unidentified
MQVVTTIGLDIAKSVFQVHGVDAAGQVLIRRQLKRRAVLAFFQKLPVCLVGIEACASSHYWSRELQALGHSVRLMPPAYVKPYVKRQKNDMADAEAICEAVARANMRFVPTKTPEQQSCLMLHRTRHLFIRQQTAVINSIRAHLAEFGIVAPVGRKGVTELLHIVADPSDKRVPEVARACLAALGNQLLSLKEQIVEFDRMIMVWHRSNETSKRLHYIPGVGPMLATALVASVADPRTFRSGRNFSAWIGLVPKQHSSGGKDRLGSISKQGDRYLRSLFVAGALAVIRYAKVHGTKHRPWLTALLARRPTKVAAIALANKLARMAWAMMAKGERYRQPVALAA

SEQ ID NO: 502134 - protein, 453 aa, unidentified
MEEPQEVPADEEHERVWERVAAVDIAKASGVVCTRVPDEDRPGRRKTHVWTVQAMSKAVIELGDYLRARQIQVVTLESTSDYWRIWYVILEAAGLRVQLVNARAVKNAPGRAKTDKKDAVWLAKLTEKGLLQPSFVPPYEIRRLRELTRLRTDLVHDKSRYWARLEKLLERAQIKISAVLSTLDTDTARAMIEALIAGQRDPKALADLAIGKARAKRAELAAALDGRWEDHHSVQARILLDNIGALNRQIDQLTAQVSELISQIPAAWGVDADGTTGPHAGTSPDSPVLPAIAQLDAITGCGIIAAQAIIAEIGLDMTVFGTPGRLVSWAKRCPQTRQSGKKTSSGKAGKGNPWLNGILGEIAASASRTDTFLGERYRRLARRRGKRKALTAIARSILVIIFCLLSDRSARYHDLGPDFYDTQINRDRKIRNHIRQLEALGLTITLAPKDDAA

SEQ ID NO: 502135 - protein, 340 aa, unidentified
MEKRYVGVDLHRNQFTVCVRLEKGRTYLRTWRLEALPQFVKQLRAGDELAVEVTGNTRLFHDAVAPHVGRVVVVDTNQFRVITQSVRKTDAHDAERLALYLAKGLLPEVRMKDKQHSQIASLTQTRDTLVKQRSGLKNKVNNLLSAHGINLAKEALSSEKKLEEVLGLSFDRLVQLELRVIIGQIRSLNQSIRELEKTIGEEGSQLEGHRQLTSIKGIGKITGAILLSVIEDVNDFPDEHRLASYFGIVPRVSNSNATEHSGHIHKRGSKLGRTALVQSALVAAKYSPYLKNFYQRVKNRRGAGRAIIALARKFLGIIYRTLKHQWVFEDFPNFVLAEGA

SEQ ID NO: 502136 - protein, 391 aa, unidentified
MIYVGIDVAKDKHDCFITNSDGEVLFKPFTISNNREGFENLFQRIESVSDDFTKVKVGLEATGHYSYNLLGFLLDKGLTTYVINPLHTNLYRKSLSLRKTKTDKVDSRTIATMMMSDMNLKSYSNTSYHNEELKSLTRYRFDKVKERAKLKSSVSRLVCILFPELEKLVPTLHMASVYALLFEFPSADAVANSHLTRLSNLLAESSKGRYGKDTAVMFREAARSSIGSHMPAKSLELKHTIKLIHELDAEIEEIENEIKSIMDEIHSPILTIPGISYRMGAMIIAEIGDFSRFDSPDKILAYAGMSPSTYQSGQLDNCYSHMEKRGSRYLRYALYNATKYVCHWDESFAVYLAKKRAEGKHYNVALSHATKKLVRTIYAMEKSGQPYQSAS

SEQ ID NO: 502137 - protein, 340 aa, unidentified
MSEITTIGLDLAKHVFQVHGIDAQGTTVLRKRLRRGQVLAFFSRIPRCVVGLEACATAHYWARELGALGHEVRLMPAQYVKAYIKRNKHDAADAEAICEAVQRPTMRFVLVKTAEQQATALLHRGREQLVRQRTMLVNALRAHLAEFGIVAAQGLRNVGELIAIVRDDGDTRLPDAARQVLQVLANQIEQIETAVAGLERQLLAWHKANPVSQRLASIPGIGPIIATAIATTVADPKVFRSGREFAAWLGLVPRQNSTGGKTRLGGITKRGNRYLRRLLINGASANLLRSKATKADPWVIGLRRRRPPLVVAVALANKTARIAWAVMLREKEYQPRAVAA

SEQ ID NO: 502138 - protein, 360 aa, unidentified
MQTLTQSNKLDFKGQNIYVGFDVHLKSWTVTIMTEKLTLKTFSQSPKPEILYNHLITNFPGGTYHTAYEAGFCGYMIHNKLKSYGINSIVVNPADIPTTDKEKVQKEDKRDSKKIARSLRNGDLTPIYVPSVKTLNDRGLLRTRSALVKDMTRNKNRTKSFLHFNGIEIPIKYSKQTVWSKSFINWLNAIEMSEKSGKDSVNAIIGASENLRASVLKVTNQIKELSMTTHYQEQIKLLRTLPGIGLLTAMVILTELESINRFESFDRLCGFIGLIPSTHSSGDKDVVGNITPRGHSILRSAIVESAWFAVRIDPALTMSYHEFCKRMEPNKAIVKIARKLLNRIRYVLKNKKPYVCAVVK

SEQ ID NO: 502139 - protein, 414 aa, unidentified
MDEHSTSAGIDWAKDEHALCVIEASGRMIAMEGRFAHDERGIAKLCRTLEDMGVERVAIERPEGVLVERVLECGITVLAIHPNQLKASRPRFRASGYRAKSDSFDAFCLAELARTDHHRLRALTPDSEETRALKVLTRAREDLVGTRVALANQLRAELEAFWPGAAILFSEIDSAISLAFLKRYPSPIDASRLAEKRLESFLSKNHYSGGKSAHQLLERLRKAPCGRAGKAEIEARREAVLALVGTLGALVERIKHLEGRIARAVRAHPGEEIFLSLFLSPNSTLTAASLVAQIGDRRERYPTNESLAAAAGMSPVAVESGKRKVASFRRACDKHLRRAFATLAESTRHHNRWAKDIYRRARNRGCDHAHAIRILGRAWVRVIFRMWREGQPYDPARHGGLQRLRSAEGLPQGV

SEQ ID NO: 502140 - protein, 377 aa, unidentified
MTKVRFLGLDVHAETIAVAIAEPDGEVRSLGIIPNREEAIRKLIKKLGPVERLRACYEAGPTGYVLYWQLTALGVKCQVVAPTLVPVKAGDRVKTDRRDARKLAQSYRAGDLTPVWVPDAAQEALRDLVRAREAAKQDQLRARHRLGKFLLRQGRRPAPEIQKAWTGKYMAWVRQLQFSQPAQQDTLDDYLHEVEHMAERVARLEKKISAAVKLAPPRMREVIEGLQALRGIAAISAVTLVTELGSISRFPTARQLMAYSGTVSSEDSSGQRQRRGAITKTGNAHLRRVVVEAAWAYRHRPGIGAALRQRQQPVSEPIKEIAWKAQQRLHKRYRTLAAKGKDHRKIITAVGRELLGFVWAIGTRIETAHDQRRAVTA

SEQ ID NO: 502141 - protein, 451 aa, unidentified
MEKKNVKMEVINPNCAGIDIGSRSHFVAVGQELTDVKESGVYADELVEICIWLKEHSVTSVAMESTGNYWQNLYVELMKSGFEVVLANGKFTKNIKGKKTDVKDARWIQKLHSIGLLTSSFLPDEQTEKLRTYCRQRENLLTLAAEATHKMQKYLKLLNFRLDVVVRDVCGLTGMAIIKDICEGNLDPVSLAKHRHYNCRKSQEEIAKALKGNNRSDFLFGLKQEYECYNFYQKKIAECEKMIGQFLKNQINTNPENKKLKTTEKSYKRNNKNALKGLDLNQASYQYFGGVDLMAIEGVAHSTILSIISEVGPEGFTKFETAKQFTSWLRLAPNNKISGGKLLSSRTPKGSNRLKIALRNAANAIGNLKDTHLSNFFNRVCYRKGRTVAVSATARKLAVIIWNMVIKKVAYQPPTNYLFLDEKRKLGLVSRIKKQIAKFEITPLDLGLVTD

SEQ ID NO: 502142 - protein, 384 aa, unidentified
MRTEQAYTGSGDVLVLAVSLELAAAKWKVALHDGRRDKPAVHTVAEPQAAARLQEVLDLIEAHKEKWSLPADVRIAVSYEAGQEAFWICRALQARHIECYVVDPASIPVERHQRRAKTDRLDVIKLVINLRAWLRGERDRMHVVHAPSPQDEASRQLMRERGQLQKEVLQHLDRMRKLLATLGCWDAVNHRAFAGRLQRDEVCCHDGAPLPRQLRERLLRECERLALVEQQLAALEKTRQTEVPALARQRCDALERLHGIGEVGASRLALELFWREFNNRREVGACVGLVPQPYDSGDSQADQGISKQGNRRVRALLIEIAWNWLRYQPNSALTKWFNQRTQGTGPNRRARRIAIVAVARRLTIALWRYLRDGETPKGAQLKSI

SEQ ID NO: 502143 - protein, 427 aa, unidentified
MNETDAIRVEEFRQFKKEIRGSREYLVVGIDVAKEKHHAFFGTAMGKTILRGLVFENNLEGFRKLLEQSEALGVQEQLSKVAYGLEPTGNYHKPLGEHLIKCRKLVVLVSGVALKRNRELLDGRWDKHDVKDAANVADLMVQGKCLFYEYPDSQLRDLRVLLSLKRRLRRQEHGYRVRIRNHLVAQYFLELDRVWGHSESESLAIVRWCLDPSVVAGLDLDEFVRRVSARDRGVRQRARLERIWNLAVDSVGCEVPEAVSVECKLMVEGLRRLREEIGEVLEKIERICLQFPEYSCLLSIPGFGPEISAQVLGAIGDPHRFRNAKEVLKMAGLDLSADRSGKTAESARPVISKKGKAHLRYMLYQAALIASIRNRHFMNYYTAKLVGRQQERGIKTKMRVKLAAKLLVIAWTLMKKKERFDPGHLTN

SEQ ID NO: 502144 - protein, 352 aa, unidentified
MNGIYYIGIDVHNNNTEIAIRYKGQIRQRFSLPTSIPAIATAIESINGKKIMAVEEGPMAGWLYRNLLKKVDKFIVAEPRRNKLISSDGDHDDKIDSAKLAMLLEGGFLKEVYHSDDDKKAQLKQWVNLYHDRVKDAVRSINKIRAVGRMQGIKIPRCVINKPQNRVKWLKQLEQVSLSEQLNMLFIGYDAAAEQTHLAKKQLIRLGRSYPIIKIWQQLAGVGLIRATTLFAYIDTPWRFRKKNKLWKYCGIGLVRTASGTDSKGRPKPARLQLPWFCNRTLKNVVLGAAISAVRQKDNIFSRQYERMIKNGIATSNARHSVARSLLTVMWGIWKSSYKFDMTQGHHQIAVA

SEQ ID NO: 502145 - protein, 324 aa, unidentified
MKTTPVLGIDVALRSLAVALWFDAARCAKAQFPNDSRGFRQLSRWLRQHLAGQLRVGLEATSTYGEAVAAWLHQAGHQVFVLNPERVACFARTIGQRNKTDPADAVTIARFVAGREDLTVWQPPSTEQQALRSLTRVRQQLTAQSLLLRNQLRTAEPPARQHLQTVLRTLSRQLAILQREIRAHLKAHPSLGEQVRRLMTCKGIGLVTAAIAIAELPPINPQSDPRAISAWAGLTPRRWQSGRTEAPARLSCKGNTYLRQALFMPSLVAKRHNPVLRAFAQRLAVSGKRPGAILGAISHKLLRIMVGLLRSQTDFNPNWSAQKT

SEQ ID NO: 502146 - protein, 342 aa, unidentified
MQITTIGFDLAKNVFQVHGIDVKEKVVARKQLRRGQVIAFFKALPPCLVGMEACATAHYWARELTKLGHEVRLMPAKDVKAYVKRNKNDAADAEAICEAVRRPTMRFVRIKSAEQQGQLMQHRTRDVLIRQRTQIINALRAHLAELGIVAAQGDAGVNELREIVADDRDERLPIDARASVIVLAAQLEALQTLIGSIEKRIKMQHRSNETSQRVETIPGIGVLGATAIVATVPDPKIFRSGRDFAAWIGLVPRQDSTGGKQKLGPISKQGDRYLRRILVVGAIAVLRRAQENPGKYPWLTQLLARRPFKVVAVALANKMARTAWALMAHGGTYRAPELAEAA

SEQ ID NO: 502147 - protein, 408 aa, unidentified
MDVIVKRCAGLDVHKRTVVACVRIVSDSEVRREVRTFGTTTGELLELFDWLSDNDCTHVVMESTGVYWKPVWHILESGFELVLANAKHVRNLPGRKTDVSDAVWLADLLAHGLIRGSFVPPLPIQDLRDLTRTRKQLRQEMSRHTLRIQKILEDANIKLSGLVSDILGVSGRAVLQAIIAGESNPEALVAVTNGRLKASHDSLVAAALGTTRDHHRFLLKLHLKQIDEIRNTIASVDAHIETVVRPLREHVERLVTIPGVSLIVALVILAEIGADMSRFPTVQNLLSWAGLCPRSDESAGKHRSTRLKPGDPWLKTILVQAAWAATRVKGSYLQAQFLRLKARRGPQKAIVAVAASILTATYYMLRDHTTYVDLTANHFHKHDQHKTADRLVRQLTALGYSVKLEAAA

SEQ ID NO: 502148 - protein, 410 aa, unidentified
MEAIVECCAGLDVHQATVVACVINGPAGKRPKKETRTFGTMHHELMQLRDWLKQAGCTLVAMESTGVYWKPVHAMLEDHFDVIVGNAQHIKNVPGRKTDVKDSEWICNLARHGLIARSFVPPRAIRDLRDLTRYRRKLVEAAAAERNRLIKLLESAGIKLAGVASDVFGVSGRAMLRALIEGDQSPAEMAKLARGRMRSKLTELEHALRGDIDEHHRFILRLQFGRIIAAEADLAVLEARIEEKLAPYEDALRRLLDIPGIDRVGSACIIAEIGVDMNQFHGASHLASWAGLCPGNHESAGRQRGGKTRKGNVFLKTALVTAAIAAGKARGTYYAEKYRRLCARRGKLRAAVAVGHTMLVVIYHMLRDGTFHQDPGAEFLDRLDKSRTSKQLVRRLTAMGFNVQITPIAV

SEQ ID NO: 502149 - protein, 319 aa, unidentified
MIAQDRLVGIDVSRDHLDVFCLWDSRHLRLPNATAGHIELVAICQSCQGVRVGFEATGGFEWALWETLASAEIDARQLPPAQIKWFAASRGSQAKTDRIDAELIARFMAFRPDAGRRLPAENLRLLRSLTTKRGQLVEMRKRLVCQIKARNRCGGAEDLAAMDKQLGTLLSAQIANTEQRIEQTLRANNMTCNRARALRSVPGIGPVTSAILIAEMPELGLITGETAAALAGLAPIARDSGMLRGKRSIGGGRRQVRHVLFQAALVAAQHNPTLKCFAARLKSRGKPHKVIIVAVARKLLTIANAICRNDVQWVPSTAN

SEQ ID NO: 502150 - protein, 374 aa, unidentified
MSNHSEAFVGFDTSKLRNAVAIADGSRTGEVRFLGEIDNTEAATAKLVRKLAAQYQRLTFCYEAGPTGYGLCRQIKSLGHECIVAAPSKIPKKPGDRVKTNRRDALSLAKSLRSNELTAVWVPDGHHEAMRDLVRARETAMLDLRSKRQQVSAFLLRQGRHYPGKNTWTKAHMSWLASQKLEYVERRLAFEETMLALRQAQERLGRLEQAIRAAVPDWSLAEVVTALMAMRGIDLIAATTFLAEVGDLSRFQTPRGLMDYLGLVPSEASTGDKIKRGPITKAGNRRARRMLVECSWSYQHPPRVGREKQQKVDAAPPRVREIAWKAQCRLHRRYRALLRRGKLKTVAITAVAREFAGFIWAVGREITITPAAAK

SEQ ID NO: 502151 - protein, 327 aa, unidentified
MTNDIQFSSFCGIDIAKSVMQVYKVSSDGVVSNKAVKRADFLNEFRNIPPALIGMEACGGSQHWARELQSLGHTVRLMPPKLVKPYVTGLKNDKNDARGIYTALEMSVREVPVKSAAIRDLALLQTMRAKRQREKVAKINHIRGILTEYGLVMGKSLNAFLAKAGSLIVELKDRADVSPYVVSELIALFEEVKEAIAKIKELETNIESIAKTLKQYDLFRSAPGVGPITAATMLVLLCNPAVFKNGREFAAYIGLAPKSSGSGGKNFVTHIPKKYECNNEVRTLLVQCAHAICRSKHKSDWVSSILARKPKRWPLLPLQISLPDSYG

SEQ ID NO: 502152 - protein, 398 aa, unidentified
MKTSGLDVHKDSIFCAIYDGKSYSVVKEFTTTTNSIRLLGAYLQLEKVKKVAMESTSSYWVPVWDILNEMGFELKLVNPLHIKQMPGRKSDAKDAQWIAELLHKNMLRGSLVPSPLIQELRSYTREYRTLVNQRTKVLTQMDRILVMCGLRLSSCISNIDSKSFMQIVEALTRGDTNPETLVRLVYGNRKNKESGKLKECLTGNMKAHHRMKLTTSKQQFDLLESQIELYLNEMQKLCNEHFNEEVCNLTTLPGVSQISAMIIVAETGGDMSAFENSGKFTGWTGLRPRNDESAGKFKSTATTKGNKHLRAIIVQVAWAASRTKGSFFMDRFQKLAIRKSRKKALVAIGRKMLVIMWHILSEKTQYNPCLVHIYDPVKVEHKIKYHEREIERAKKLIA

SEQ ID NO: 502153 - protein, 415 aa, unidentified
MEVLGPMDVVYARCCGIDIHKQTAVACVIRSDTPGPPRKQIRTFGTMPDDLLALADWLRTEGVSHVAMESTGVYWKPPYNLLEGEFEVILANAQHIKAVPGRKTDVQDAEWIADLLRHGLLKASFVPDRPQRELRELTRYRTSLVRERAAEVNRLQKTLEGANIKLGDVASDILGLSARQMLEGLVTGTDPTILAQFARGRLREKIPQLERALAGHFAAHQRFLLATQLAHIDYLDALIEQLSAEVAQRLAPFAPLIERLDAIPGIARRTAEIVLAEIGTDVHRFPTAAHLASWAGMCPGQHESAGKQTSGKTRKGSPWLRSALVEAATAAAKSKRSYLASQYSRLARRRGAKKAAVAVGHSILVIIWHLLEHDCPYVDLGSTYFDQRDHSHVKRHLVQRLEQLGYAVTLSRAAA

SEQ ID NO: 502154 - protein, 326 aa, unidentified
MEKFDVNFIDQNGNEKNKTVKNGINSISNFLKEVPAGSILCAENTGVYGDLLLFLSNLMGVTIAFIPGYNIKHSLGLVKGKTDKVDAMRIREYGERFYDKLVPTQYEEETIRELQELYTLRAQLIRSRKALQASETGRKHQPMQSVSAHISAQSVINHLNSEIEHVENEIKKLILADQQLKNSYELATSIKGIGPVIATDLLIKTGNFKTIDTARKAASYAGVCPFPNSSGKMVKKARVSPFADKKLKSLLYMGAKSAVKYNKEYRLYYQKKKIEGKPHFLIMNNISNKMLRTVYSVVKNEIPYNENYVCLDPRERKINSSKIKVA

SEQ ID NO: 502155 - protein, 407 aa, unidentified
MRVIGLDVHRSFAVAAFLEDGQLRAGQRIVLEHDAVVHFAQTLRPDDEVVIEATGNTAAVVRLIAPHVRRVAIANPLQTRAIASAKVKTDKIDAGVLAKLHASGFLPEVWSPDEDTLALRRLVAERVQLVTHATRLKNRIHSVLHANLIPPYGGKLFTKGGRAWLAELPLAEDQRRAIERHLREFDRTADEIATMDRAIARRSLDDPRAQRLMTVGGINAVVAVSLLAAIGDVGRFSSPEKLVSYFGLNPSVRQSGDRPAYHGRISKQGRAHARAMLVEAAWAVATGPGPLRAFFIRIRQRRGDQVAAVATARKLAVLAWHLLSKGTDYAWARPALVAWKRRKLELQAGEPSRRGGNKPGPASEYSLRDVRDREREWLGMAEEEYRQFVSAWQTQPPPGRKPQKHTK

SEQ ID NO: 502156 - protein, 423 aa, unidentified
MMKLKYSICCGLDVHKNVIVATIVTTNKDGISEYLQKSFSTINSDIQRFHNWLIENNCYHVCMESTGKYWIPIFNYLENDIDVCLTHPKYVKAIKGKKTDKKDSKWIADLYKFDLVRCSFIPPKDFRQLRELSRYRFKLVCMKSSEKNRIQNCMTVSNVGIASVLSDPFGKTATEIISYLLEHTADSMDEKAVRKLIKKGAKSKSDEIIEAIKGYTIETDQAKKLELARGHLEYLDDMITQTEVELYVRIKPYYEFVEFVSTMPGMTELSSTIVLAETGVDMDIFDDAKHLCSWCGLSPANNESAGKKKSVRIAKAGDYLKPMMVQCALAAIKSKKQPYFAIKYGRIKKRRGHKKAIIAIARMMMVCIYHMVSEKKPFTPTDYEELITPPNHVERVVLNENNVFAYLESLGYDSSKLVKRNDN

SEQ ID NO: 502157 - protein, 387 aa, unidentified
MARKRTLSTLDTSIAYETVGLDLAKTDVALAAFDSDHKEPYLIDRIPYDKLYELLANMAPTLVAMEPCSGAHQIAEQIQELGHEVMMISGRHVQAWVKDHCNGQKTDLNDAFAILNLAYDRWLTPIRGKTREECRLLALQASYRQLKGQRTKTMVHVKATLHAWGFPIRAGSFNQKALHELIDANREAFGDEVVETLHLMINRVHDLDHDIATVLKLLTEATQRDPRASLLRSIPGFGVLTTSRWCAVVGDIARFDSPKQTMAFIGLVPNNRITGHHTETSSGREARGQGKMSKRGDKMLRSLCILGAGALCLMVRNDRLPDCPFVASIKERLASPRPWFKVLVYVAAKLVRIATALLKYGETFSFEKAGISKAVLKQWELEQAKAA

SEQ ID NO: 502158 - protein, 342 aa, unidentified
MTIYYIGMDIHKKTIAFCIKKQDGTIVDHGTVKATRPALKKWVGSLQCPWIGAMEATIFTGWIYDFLKSYAEDLKVANSKMLKAIVSSKKKSDRIDAQKIADLLRCDLLPECYMLSEEVRELRRVLRFRNLMVREASRMQNKASGLLMECGAEYSKKKLHGKKYFNSLLDSLEEIPESVITLLQISRSSYEMFQRSQKTLIRGLKNHSSIRKRVELLMSIPGVGEITALTWALEVGDPMRFSSVKKAVSFCGLCSAHRESAGQCKRGPISKQRNKHLQTILVEAAKLAPRWNPQLAEIHAKALEKGDKNRATLEVARKLVAYMLAVDKNQKSFISAEKQAAA

SEQ ID NO: 502159 - protein, 334 aa, unidentified
MKELKSSVGIDISKDSFEVCIKQLKDERSVIKATHSFQNEFSGFENLLNWTLRKVSNPIFVMETTGVYHEDLTHFLYSNDQKVSVVLANKMKHFAKSLNIKTKTDKADAQMIAQYGLERQLEWWQPMMPQMKNLRDLCRERLSLKKDLVRCKCQVHALKHAHSTLDVVLQLKEQQIEFLEKNIQIIENEIIRITEDDKEFNQRVKNIETVKGLRLLTIVTVLCETNGFTQFNNIRQVVSYAGLDIAERQSGLFKGKTRISKKGNSRIRECLYMPALSATSYNEHIKALYQRVIERNPTIKRKGVIAGMRKLLVLIFVLWKKNESYNPDFQWNVH

SEQ ID NO: 502160 - protein, 344 aa, unidentified
MATFTKTKIMKNFDETLGTDLSKKTLDAYLHVAGEYAQFDNNPKGFRALLAWAFKMGGVKSENLLICFEHTGLYGMALAAYLEKKNMSFAMVPALQIKRSLGMVRGKNDRVDAKRIAQYAHMRRDTIEETKMPAAVLQKMKQILALRERMVAQRAGYTTQFKELKRIYKRSENPSLYSAQEKLIRELTKAIDTLEAEIKALIKSDGEVKRLFDLVTSVKGVGLVVGANIIVITRCFKAFKNSRQLACYCGVAPFQYQSGTSLRSKAKVSHYANKKMKALLNIAAFSAVQADKEIRTYYQRRVAEGKSKMSTMNIVRNKLLHRIFAVVNRGTPFVETYRHQVNYC

SEQ ID NO: 502161 - protein, 406 aa, unidentified
MISVGIDVSKGKSTVCILKPGGEVVAPPYEMLHTVESVLALVKRIKSFTEETRVILEDTGHYHWSVVKVLSENGVFVTSVNALRMKRYCSQDIRGAKTDRKDAIRIASYGLTYWSELTHVLPSSDTYRELRLLSRQYQRKTVLSASEKVNFSNLLDRVMPGLPSVLRDNRDRNRLYGFASRYCHYEQIVGMGEKKFMMDFCKWAKKQGYRPYERLAKELFTIAQTGIPALPSSPTANTAIKEAVRLIQEIEDSRKIILTQMIALAKTLPEFSAVREMNCLGDALTAGIIAEIGDITRFHSKHALIAYAGIDVPPYQSGTFNATERHISKRGNRYLRKVGYQVIQSIIMHKPQNDPVYEFIEKKRSEGKTGKEAMIAGLNKFLRIYYGKISEVYDSIDLQLLFGSRV

SEQ ID NO: 502162 - protein, 426 aa, unidentified
MNEVEDIRLTEFRQFKKEIRGSKDHLIVGIDIAKEKHHAFFATATGKTLFRRLIFDNTIEGFEKLLTQVRAIQVAQGLEKVVFGLEPTANYHKPRGEHLIKCGRMVVLVSGVAVKHNRELLDGRWDKHDTKDAANIADLISQGKCLYYEYPEMGLRDLRTLLSLKKKLKKQEHGYRVRIRNQLLAQYFPELDRFSGRPEVEPIVRWCLDTSELAGLEFAQFVQRVVPGRKTLAQHQRLQTIQQMAIDSIGCEMGEGAHFEARVMVDGLRQIRETIKTTDEQIRETCRQFPEYGYLLTIPGFGPDVSAKVIGAIGNPFRFQNRKQVLKMAGLDLGAYRSGETSNTATPVISKRGKADLRYALYQAAFIASTRHRPWIEHYTDQLQGRAKEAGIKTKRWVKLSAKFLIIAWTIMKKKEPYNPRYLNPA

SEQ ID NO: 502163 - protein, 412 aa, unidentified
MDVVVERCAGLDVHRDSVVATVRLPGAGRRRREQQTRSFGTTIGQLEALADWLAHFGVTLVGMEATGVYWKPVFYVLERRFECWLLNAQHLHNVPGRKSDLIDSAWCCQLLEHGLVRPSFVPPPEIRRLRDLTRLCVAQTEERTRAIQRLEKVLQDAGIKLSSVASSTYSASARAMLEALLSGVSDPAALAELAKSRLRAKIPQLQEALANRFELAHHGVLVAGLLAHIDSLDHTVATLDASIAAATGPHAELVELLCTIPGVNVNTARVLIAECGLDMSVFPTAEHLVSWAGICPGLNASAGRRRSGKTRHGNRWLRKALTEAARAAARTKNTYLASHYWQIRGRRGDAKAIGATRHDILIAYYHIARDRVPFRELGPDWLARRHSVEHRTRRLVKQLEALGHTVTLEVAA

SEQ ID NO: 502164 - protein, 319 aa, unidentified
MSVSSVVGIDVAKAHVDVFVLGAEFKPQRFDNAAEGHSALASALAPLGVRLVVMEATGGYETALACSLQAAGFAVAVVNPKQARDFAKAIGLLAKTDAIDARALASFADTLSRQPDLASYIRPLTDEAQRDLAALVTRRRQLLAMMLSERQRMQLAVAKVQPSIEAIMQAIKAQLDEVEGEMVGHVQEHFGKLDALLRSTKGIGPVASATLIAELPELGKLNRRQIAALVGVAPMANDSGNSKGRRSVKGGRFEIRRTLYMATLAATRYNPAIATFYARLRAAGKLPKVALVACMRKLLTTLNAMARSGQHWDPEFKPA

SEQ ID NO: 502165 - protein, 433 aa, unidentified
MTDAVLSFDVSLDQLDVALRTDDTGWQWPHRAYPNNWPGYQQLKAELLVELGQTTATGLTAVAESTGPYWWPAFYQLAHDADLADYQPHLAVLNPQHVKRFRKALPEQDKNDLLDPQLIDRYYQAVGVKHFFQFNDRYLPLRFLTRAYARIIHTLAAEKAYLRSLLFILASEYQRLEPFSDLFGATSLHVLDEFDDIQALAAMPLVELTDQLRLWSGNHLSDPAHTAQQLHQVADHSYPLPQPLAASLHAIVQLSIAHIRFLSDNQKTMRRLIEQALQQLPEANLALEQPGLGPILVAGCLSEIQNTTRFISGLKFDRKLKRLRPRHYRDGQAAVAKLAGLWWPQADSGRFQADERHLARERNPYLRYWLVQAAHTLQRYQPDYAAFYWRKFYQVHTHQHKRALILTARKAVRLIFALLHKGQRACLEEEPMT

SEQ ID NO: 502166 - protein, 368 aa, unidentified
MVHLRARIEPKNLKEGTVHYIGVDYHKKYSYVVVKDRDGRVERRGTVNNTKEEFRQLLEPYQPGKAVLEATRNWGLIYDWLEEILDDVALVHPLKVRAIAEARIKTDKISADILCDLLRSNLLPEAYVPSKETREAKDILRQRMFFVRVQTMVKNRIHDILDRHPELLSQAPAVSDLFGASGMAWLKRVVLPGRDNQLLTPQLELLEVLKQKISESNGIVKDLARRDKRVKLLRSIPGLGPFFSVLVAKEIDDISRFRGDKKLCAYAGLVPSTYASGGKVFHGRITKTGNKWLRWTFIEAVQPAIRCDADLFAYHERIKMKKGANAAKVATARRLLTIAYRVLSQGRFYERRNRKARRDLAPAALASP

SEQ ID NO: 502167 - protein, 340 aa, unidentified
MENVTTIGLDIAKSVFQVHGVDAVGAVVIRRKLTRGRVLGFFEKLPRCLVGIEACSSSHYWARELITRGHDVRLLPAQYVKPYLKRQKNDAADAEAICEAVTRPTMRFVPVKTPEQQSVMMLHRVRLMLNRQRTQVSNALRAHLSEFGVVAPIGRNGIEQLLVVINDDNDTRIPADARLCLRMLEAQLRVVKEQILENDRRVRASARETELGRRLMEIPGVGPLLASAFVATVADAHVFKSGRCLSAWIGLVPKQNSSGGKEKLGSISKAGNRYLRQMLVVGAMAVIRHAERNGTRRPWLVQLMARRTTKVAAVALANKTARMVWALMTSGERYREPIIA

SEQ ID NO: 502168 - protein, 325 aa, unidentified
METRSLCCGIDVSFTSLDVCYQNNLGELFHLRVGNNNEGFAKIMEHTGTQYHFVMEATGVYYIRLAFFLHGKGCSLSVVNALSIKRFIQMHGERNKSDKKDAGWICRFAIEQQPPLWQMPEGAYFQGKQLYNTIREYQEQIKRFNNQLHSLGLLPIQSKDAIRSIERMKASLKKEVKSLEGKLQELLQAWQPEQLKNISSVKGIGKRAAAMLIIFTQGFKHTHSHRQLISFAGLSPTEYSSGSSIVGKPKICKRGGKPLRDVLYMCAMNAMKTNQACKALYERLRAKGKTGKQGLIAVCNKLLKQVFAVMKSQTLYQPNYCPPKP

SEQ ID NO: 502169 - protein, 421 aa, unidentified
MNEQAVVYSVYVGIDWADAKHDVCIQPTTSDTREFGVIRHRAEAIDAWAKGLHQRYGGHIAVAVELSKGPIVSALQKYDFIDIFPVNPGSLAKYRETFQPSRAKDDPTDAELAVDMLLRHPEHFKPLKPQSAEMRALAIMVEQRRSLADDLVRITNRLRSALKQYYPQVLEWFEHIDTPLFCAFVKRWPTLTQAKRARANTLRRFFHEHHMYRKGVLDNRRQAINSARPLTSDDAVIVPYRMQVLVLVEQLELMFKAIDQFDDEIAKLASQHPDYALFQPLPGAGPALAPRLLVAFGEQRARYKSAADIQKYSGIAPVTERSGQKHWVHWRLQCPTFMRQTFVEWAAQTINKSYWAGEYYRQQREKGSTYQAAVRSLAFKWIRILYRCWQTGVVYDEIRYLKALERRGSPLLKRQSMLKTT

SEQ ID NO: 502170 - protein, 391 aa, unidentified
MIYVGIDVAKDKHDCFITNSDGEVLFKAFTISNNLDGFNELYQKIESVMEDITKVKVGLEATGHYSYNLLGYLIDKGLPTYVINPLHTNLYRKSLSLRQTKTDKVDARTIASMLMSDVNLKSYSDTSYHNEELKSLTRYRFDKVKERAKLKTSVSRLVCILFPELEKLVPTLHIASVYAMLSEFPGAKQVANAHLTRFTNLLSEASKGRYGKETAIAFRDAARTSIGSNMPAKSLELKHTIKLIQELTSEIDEIEHEIKLIMDELNSPILSIPGINYRMGAMIIAEIGDFTRFDSPDKILAYAGFSPSTYQSGQLDGAYSHIEKRGSRYLRYALYNAAKYVCIWDPTFAEYLAKKRSEGKHYTVAISHAVKKLVRVIYHLEKTNQQYIKAA

SEQ ID NO: 502171 - protein, 347 aa, unidentified
MNFYNNLHPYYCGIDLHARVLYVCIIDQAGQTRVHKEIPASPDPLKILLEPYLGNIVVGVECMHCWYWVSDFCEDLGVDFILGHALYMKAIHGGKAKNDRIDSFKIANLIRGGNFPLAYTYPKEMRATRDLLRRRTKIVRHGAHLKAHVSNTTSQYNLPPNKVNLKNVGAREQLKVAFPDRVVQRNIDLDMAVLDCYAKELSKIECFLEQQAKRHNPVHWHLLKSISGIGRILALTIIYEIGHIDRFESVQKFASYARLVKCKAESAGKSYGTQGNKIGNAHLKWAFSEAAVLYLRGNEKAQKYLLRLQRRMSKAKALSVLAHKLGRCVYFMLKNGTVFDEKQFLKG

SEQ ID NO: 502172 - protein, 411 aa, unidentified
MQALYRCCAGLDVHKDTVVACVRRLDDHGQAHEEVRTFGTMTGALLALADWLAQAGVTHVAMESTGVYWKPVYHVLEGQFELLLVNAQHIKQVPGRKTDVKDCAWIAQLLQHGLVKSSLVPPPFQRELRDLTRQRTQLVAEQARVAQRIQKALEDANIKLASVASDVLGASGRDMLRALIAGTTDPQRLAELARGKLRTKIESLRQALLGRVTEHHRFLLRMHLEHYEQLERWGQEFSQRIEEKLAPFAQEAALLQTIPGIAERTAQVLLAEVGPDLTPFPTADHLASWAGVCPGNNESAGRRRTGRTRKGNQWLRSGLMQMAWSASRAKDSYLSAHFRRLSARRGAKRAAVAVSHTLLVIVYHVLTRRQPYKDLGANYLDQLAPERLTQQLVKRLERLGHKVTLELPQAA

SEQ ID NO: 502173 - protein, 370 aa, unidentified
MAEPTTLFVGLDVHKDSIAVAHASADSASDIVYVGQIGTREADLDKLLRRLRSHASRLVVAYEAGPCGYGLYRTLTQKGISCLVVAPSRIPKKPGERVKTDRRDAAQLARLLRSGDLTSVYVPTVEDEAVRDLSRAREASIRVLKAAKLRLKSFLLRLGLNYSGRATWNDAHLRYLAKVVCPTPAQQIVFQESLRAVSEQTERIRRLEDELVEVAATWRLHPLVEAFQAMRGVQHHTAVIVAAELGDLTRFDTPRQLAAFVGLIPSEYSTGTARRLGPITKAGNGHARRALVEAAWAYRYPAKVSAHLQQRLERCPKPIQDIAWKAQVRLCKRYRRLVARGKNPNIVVTAIAREILAFLWAIAREVPIVQ

SEQ ID NO: 502174 - protein, 411 aa, unidentified
MDVISRCCSGLDVHKQTVESAVRRMEPDGSVQVEIRQFGTMTDDLLEMVQWLKAQGVTHVAMESTGVFWKPIYNILEGHFTVLLVNARSVKQVPGRKTDARDCQWLAQLLQYGLLKGSFIPARWQRDLRDLTRERTQLAEEQTRVANRIHKVLEDANIKLGSVATDILGVSGRDILERLIAGEQDTEKLAERARGRLRRKIPELRRALRGHLSEHHRFALRLQLDHLQRLEQLIERLDQRIAELCKPYDEQIEQLDQVPGVDRTGAQSIVAEVGVDMQVFPSDGHLCSWAGICSGNNESAGKRRSGRIPKGNRWLRRTLVLAAQAAGHAKDTYLASRFRRLAARRGNKRACVAVAHSILKIVYHLLKYGCPYRDLGVSYFDRLDPVRLTRYLVRRLERLGHKVTLEPVPTA

SEQ ID NO: 502175 - protein, 411 aa, unidentified
MAGQARKRMIAAQLVEDEDYRLRHEKVAGTGIAKAKGDVCTRLAPAEGGVRRRSRVEEVPATVPEIAALAGRLLDDGVELVSMESTSDYWRVWFHVLEAAGLRVQLVSSSQARQLAGRPKTDRLDAQWIARLTEMGLLTPCFVPPPEIRELRDWTRARLHLVHDRTAEWQRLEKLLEGALVKVSSVVSALAGNKTARAVVEALIAGERDPERLAGLALGRLRGKRRELAAALEGARFGEHHARLARMHLDRIDALDRHVAVLDDEIAACLEAIPAAWGVDSAGAPCPDPGEGAPVLAAAARLAEIPGMSPALAMAVIAEAGLDMSRFPTAGHLVSWAGLAPSARQSGARSRKPGKGQGNAYLRGYCTQAANGAARTDTFLGERLRRLSRRAGARGRGARSPGRSWSSSGTC

SEQ ID NO: 502176 - protein, 350 aa, unidentified
MAAISKDIIANIGIDLGKNNFHICAMNDKGMIVMRERLTRAALPKRLANIPPCLIGMEACAGAHHIGRQLVTLGHDVRLMPAKYVKPFLKGHKNDYRDAEAIAEAVQRPTMRFVPLKSDEQLDLQALHRVRSRLVGQRTAVINQIRAFLLEHGVAVRQGPGALRQALPSIIARRTDVLSPRIIHLIEDLIDDWRRFDQRVADMTREVEELAKQDENCKGLMAVPGIGPMTASAMVAAIGDGAAFTKGRDFAAWLGLVPKQISTGDRTILGGISRRGNRYLRTLFIQGARSVLQRSDGWEKKSFGRWLIAASKRLHKNVLAVALANKLARIAWTVLYHARGYDAAFTPKAA

SEQ ID NO: 502177 - protein, 429 aa, unidentified
MTTTYATLSPLLVAIDISKHRHEVLISIPGKKRRRRMTIMNTLEDFQRLAINLASYDLPVRIGFEATGNYHRVLAHHLGQAGFELKLVSSVGLARTREALHNSWDKNDPKDAQVILHMLEIGAVQFFHDPLVTGTADIQELSKTHEIVSRSKTELWHRILTHYLPLYFPEAERFHRNSRTDWFLAFLEKYSTPHMITAMSREAFIADAWKVVGRKVSKKRLLLDIYATAVGSVGLPVQPDSDAIRMFRLVLAEGRSLIRQRDIIEARAVELLSDLPDYQLLTTIPGIGPINAMTILAEAGDLRRFRHHRQFLKFCGMDLATVQSGMFRGQSRISKYGNARLRRTLWMAGQTAVLKRTNSFRDKFERYISKDRHNAHLRRKAYTAIAAKMARTVHAVVKHGEPYRPFFEGVSPGGRTSLCSSRGGSSLTS

SEQ ID NO: 502178 - protein, 315 aa, unidentified
MVDVPCFIGIDVAKAQLDIALRPAGERWAVPNDASGIAPLVDRLQALHPTLIVLEATGGLERAATAALAAAGLPVVVVNPRQARDFARATGQLAKTDALDARALAHFADVIRPTPRLLPDAQTQELRALLGRRQQLIGMRTAEQNRLVGTNARLAKDIEAHITWLNAGIATLDDDLETMLRASPLWRENDDLLQSAKGIGPVCAHTLLLELPELGTLTRQQIAALVGVAPLHCDSGTLRGRRTMWGGRAHVRTVLYMSTLVATRFNPQIKVFYERLLAAGKVKKVALTACMHKFLTILNAMLKHRTPWKPQEVQN

SEQ ID NO: 502179 - protein, 412 aa, unidentified
MLFIGDDWAEGHHDVVAQDDAGKALARRRLPEGADGIARFHEMVASCLGEDAEPDPARVVVVIETDRGPWVKALAAAGYRVYPANPEQAARHKETIAVPGKKDDFFDAGALADMGRTRRHQMRELAADSDIAEAVKIAARAHQKLVWERTRHLLRMRSALREYFPAALEAYAGLSLTGPDTLELLRKAPDPAPAARLTVTQVTAALRRAGRRGALDERARNIQAALRAPHLSQPAVIAEAHAASVQAGAAVIAALNEQCKVMEAKVSEFFRRHPDAGVYLSQPGIGDITGARILGEFGDAPGRYASAKARKNYAGTSPLTIQPGKKKTVHARYIRNRHLIDALRAQALSALIASPGARAYYDELRAHDTGHDDALRRVAGRLAGILHGCVKTSREYDETTAWSHRPEFPQAA

SEQ ID NO: 502180 - protein, 367 aa, unidentified
MNQRNQAIDGEAKAKPKVIKLGLDLHVRQVTECRQLDGSTPKPAQQWDPWKLLAQVKDWVQAGIKVYSSYEAGACGYWYHRELIKAGALNFVVVPRVLENQRTRHQKTDRLDARALLDRLENYLNGNLHAMSIVRVPSLQEEQQRSVVRYREQLMRDRRRAEARGRAIALVQGIEVPVGWWREARWQEFNRQLPEWMSLQVRHWREQAVALDYQERTIRRELQKSLSIELPLGIGALSWITLERELRGWVRFHNRRQIASFPGWCPGIPNSNGRGREGSINRCGNSVVRYTLIEMAWRLLRWQPNYGPLQKLRKAFVSKRAKRRLIVALARRLAIDLWRWATGRATAQELGLQLASSMEQKNQALKA

SEQ ID NO: 502181 - protein, 332 aa, unidentified
MSVYVGIDVHRKRSQVAVIDEGGAVLANRSVTNGVAPILSVIGELPAGTPTAFEVAFGWGWLLELLEDYGFEPHLVHPLQCKAIASGRLKNDKADAATLAQLLRADLLPEAWIAPPEVRQLRALLRHRVQLVRLRTLLRNRVHAVLADHGHGRPEGCWSGPGRQWLASLELPAVSREVIDDALALTGALQQPIDRLDQEVRQQARSDPRVKVLTQLPGVGPFTALVLLAEIGDISRFESARKLAAWAGLTPTVRGSDRTVRHGHISKQGPAWARWVLCEAAQTAKRHPDFAAGYQAIARRRGSKIATTAIARKLLTRAYHLLTDAASGGAPS

SEQ ID NO: 502182 - protein, 339 aa, unidentified
MSTMYCAVDLHSNNGYYGIVEKSGKRVFGKRLPNKIDAVLDTLSIFKDNIKTIAVESTYNWYWLVDGLMNYGYNVKLANPAAMEQYSGMKNTDDKTDAFFIADLLRLGILPEGHIYPKDERGIRDMLRRRIFFVQQRTAQILSLQNMMSRQSGSSFSIREIQKMEIDEFIQVLNNDDNMFMAKQNLDMIRILSEKIKMLENYILPKAEIKPEFRKIMSVPGIGKILGLTIMYETGDIGRFKKAGNYTSYCRCVKAEASSNNKKKGNNNRKNGNKYLSWAFVEAAHKMKPYCPPAQKFYDRKYYTKCGALATKALAAKISKSIYYILKNKEEFDVKKIFG

SEQ ID NO: 502183 - protein, 417 aa, unidentified
MKPWNEHTHFAALDWADDHHDLVVVDAGGQLVLKLTFEHSAQGWQQAQQALAQWPGLPVALETSASPAVDQLLQRGFTVYPVMPKAAARYRDRKRPTGPKDDFHDAWSLADALRTDGHGWSVLSPLDPLTAELRMLCRDEIGLIEQRTALVNQLQAALKEYYPAAVEAFEDWTLPATWDFVLAFPTPTALAEAGKRKWEKFLHTHKLWRPQTASSRLEIFARATEFSGAAPIVAAKSLLAQSLARLLQALERQLDGYRARIRELFNRHPDHELFGSLPGAGPKLAPRLLVELAAVSWSQVSQVQARAGTAPVTYQSGQIRRVKIRRACTHWLRASLHLWADLSRHYSAWAAAYYRAHRDKGQSHSCALRCLANRWLEVVGAMVRTGTTYDAEKHLAEIQKHGSYVLQMLSCTNPEKL

SEQ ID NO: 502184 - protein, 344 aa, unidentified
MPQPHHVGLDISVKETTISVVDELGHVAHRAVVPSDPAVLVEHLVRLGFAYGRIGLEAGPLSAWIYAGLVDAGLPAICVETRHMHAVLSARINKTDRNDALGIAQMMRVGLFKVVNVKTPASQQRRLLLTARKLLQRKVNDIENDLRGQLRNFGLKVGAVRPSAFEQRVRELVADMSFVAAVVIPLLDARSALRAQLAKLHKMLLDMVRSDPVCRRLMTAPGVGAIAALTFRTCVDNPARFSRSKCIGAHYGLTPRLYQSGETARIGRVSKCGDAMMRVALYEAAFVALTRSQGRWNPLKAWGVAIAKRRGIQKAVVAVARKLAIILHRMWRDETDFRWTAAKV

SEQ ID NO: 502185 - protein, 474 aa, unidentified
MIKSVGIDFHQGKHVARCLDEKAQLCDGFSFQTTPEGLATLEEHIFRDGSNPVIVFEPAGLTWFILAICIRARHPDCRLVRAKGQKVAALRRYLRGSSKSDRIDALTLAKMTFIDPEQLDEVYLPPAKIHALQRLSRQRKRLESDIAAHKTRIGAIVESYVPGVRKAFSDPWSSQARAFLRCQLNPLAVAHDGEKALHSFLVRARHRNKTDKEESHRIYLACQSAADLYELSSRAEAVDDEFFSVFQEEIERELRLMELEEAESEAIAKRMEELYRELHPSDNLRSIPGVGRVTAPMFLATVGDPARFHNQSAFVSWTGVVPRTRQSSDVEAKGLRMTKAGPAIMKWALFQAGDIGRRFDPQLASLYYREMVHHGKNHKQAMGAVMSHLAARVIKVLQDGRPYELRDNEGKAISPAEAKKLILLNYQVPENIRRERRRRNPVKRGSLKSQGTELPRTNEAAVAPQPVKATIPEN

SEQ ID NO: 502186 - protein, 313 aa, unidentified
MYYIAVDVSKKELSVYDGKKDMTFLNTEGLSSLKKYLRKHYRDFNQLIFLLEATGSYSDYLIEMCAKYRIKALIINPKASHHFAKSLGIRNKTDKIDARMIYQYQKLINTQMITVPRINKEAKTLSAYLVSYQLAMKQRIALDNHLEHVRDKDLFALLQKDLKRAYRLEEQILKRITAYILKHPRLKADYQRLLTIPGIGEKSAPALLYLFITYQGTNRNQITALCGLDPIQRQSGTSVSGKPKISKHGSRLIRKVLYMPMLSAIQVNPRIQAFYQRLLQNHKVKKTAVIAAMRKMILIAHAIYRDKTEYVPI

SEQ ID NO: 502187 - protein, 417 aa, unidentified
MPGDRDDTPVRTFRTFSGDLYRLTDWLEETGIKTVAMESTGVYWIPVFEILEARGFEVLLVNARDVKNVPGRKTDVNDAQWLQQLHQHGLLRGSFRPRDGVVRLRAYLRHRERMVDYAASHIQHMQKALMQMNVQLHHVVADITGVTGMRIIRAIVSGTQTPDALAEFRDVRCAASEETIREALTGNYRPEHVFALRQSLELYDFHQAKIAECDTEIEAVLQTLNEERATPEQPLPAVRHAKGRNEPDSDVRPALYTLLGGDLTQIHGFGPYTVLRLVAECGDDMRKWPTAKHFTSWLCLAPGNKISGGRLLSSKKRRSSNRAAALLRIAAVNVGKTQTALGAFYRLAARTGKAKAVTATARKLAILFYKALRFGMTYVDSGASYYEERYRQRVIQNLHRRARDLGFTLVAGPATNG

SEQ ID NO: 502188 - protein, 343 aa, unidentified
MNEISMIGLDLAKNVFQVHGVDASGKMVLQRQLRRNAVEKFFAKLSPCTVGMEACGSAHYWARVINRYGHEVKLMPPAYVKPYVKRNKNDGRDAEAICEAVSRPTMRFVAVKSVEQQAMLSVHTTRALLVKQRTMIANALRAQLSELGIVAAQGHKGLHELMARLEAPSQEIPEIMRSALLVLAGQWQSLDANERALEKQIVKAARCDREARRLMGAPSVGPIIASMVLAKVSDASVFRSSRDFAAWVGLTGRDHGTGGKHRPGRISKQGDRVLRTLLINGASAHLRQQMRRGVSDPWLRELLARRPYKVAMVAFAAKTARIIWAMLAKREDYRDRASASAAA

SEQ ID NO: 502189 - protein, 405 aa, unidentified
MVDYYVGIDWASDHHDVQVIDKEGNEVCSFRVSHNPEGLRQLCQNLKKLAGGDPSRVAIAIETNQGLLVSALLDEGFLVYPVNPKESERRRKSSGAKTDFIDANNLAKMLRTEIKNMKPFKPSSETITELRQLTRDQNGLVQTKTALVNQLRACLLDYFPAFIDLFSELDGDTALAFLRRYPTLEKASRLSVEQLAESLRAHRYPRSYEAARLIHAKLQQPQLTAKPPVVRAKSRLAVALAEQIQVLKKQIASYDKEITALFRSHPDSVIFASLPGAGKRLAPRLLAGWGDDRERFASAQEVGALAGTSPTPYQTGKFSRPRFRHSCMKDFRYALQLFAWESTKSETWAREYYENHRRRGKSHHHAVRALANVWVRIIFAMWKNHRPYDREIFLAAQMAHRRQVA

SEQ ID NO: 502190 - protein, 416 aa, unidentified
MKKSSNSQMKREQSSKPTMARGPVQRDAKEVLAELLTKLTEKLGPKPGRASAEEEGKGNVLRPNLDRLTVGVDLGDKCSSYCILGMDGETLAEGQLRTRQQDFAEFFQALTGSRVVMEVGTHSAWIREIVAGCGHEVLVANPRQMEGPKRRKRKNDRIDAQKLARLGRVDPQSLFPIEHRSTEVRQDLVVLRARDALVAARTQFINTTRGLVKSMGARLPKCSSPSFQHKVQAALPPEVRESLLPLVRLVETLSDCIKIYDERIEKLASEKYEHTELLRQVKGVGPLTSLAYVLTLENPERFAKSREVGPYLGLVPKQEDSGDSRPQLRISKAGDEMLRRLLVGSAHYILGPFGPDTDLRRYGLRLCERGGKNAKKRAAVAVARKLAVLLHRLWISGEVYEPLRHAPPVATEREAA

SEQ ID NO: 502191 - protein, 313 aa, unidentified
MVQSIGIDVSKGKLDVGLINLDQTTSNLQCGNDRHSIPSLVKVLQNCQDVRDIPIVIEATGGYHYGITFALIEKGFKKVFVINPIITKKHLSSQIRKIKTDKKDSILLAKIGLLEDLHTYAESKQEVLFKRNIRLFHFLKKQLQQVNNRLSSAKSLNIENDFEQEMLLETKKNFDTQLKKVKQVIITGITVETPQIKGLSELHLKAIISELGNISRFKNHKQIVAYAGLDPSIRESGSSVRGKSKLSKRGSKTMRYFLFQSAWGVMMHNEKYKEYYQKKRQENKHYYTCLSAIARKLLCEIYHNLKEHPYSIN

SEQ ID NO: 502192 - protein, 342 aa, unidentified
MTFVGCDLHTRMQQVAMLDTRTGEVSERQLVHDGSAIEDFYAALPKPVTIGIESTGYAVWFHTLMQRLGHTRLVGDAAKMRAMVVRKTKTDRRDALHSLDLLRHDRFPTIWVPDPATRDLRALLTHRMRLVRIRTMVKNGLHAIALNSRLTIGSKLLRQAGLAQRQALALPPHTARRRDQSLELLAGLNTQIRELDDAITTAALAHPDAPRLITHPGVGALTALTTIVVLGPISRFHDSTHVVSYVGLAPALNASADKYHLGHITKQGSPLLRFALGQAAAPAARMDPDLKRTYGALVHRRGRPKAKVAVARKLLVRLFIMLRDHIDYEEFCRRGRTAPASA

SEQ ID NO: 502193 - protein, 395 aa, unidentified
MFIVGIDIAKRSHEAIIIAEDGQVVRKAFSFRNNCTGYNLLLEQVRRLTLVKSQIVFAMESTAHYWLALYARLLKDGYTVMVLNPIRSHSLRELYIRKAKTDARDSLIIADLVRFGRCKASNVPQDKILALRELCRSRAYLVDMAADLKRKLIALLGRIFPEYESLFDSVFSKASIAVLSKYSTPQKVKNANLRKLTDILMESSNGHFGEWKAHQLKEAACSSFGIDDSGGVYSTLLGMFLEQILSLTAQADSLEKQISIFFQEFNNPLTSIPGVGTVLAATILSEIGDITRFSSADKLLAYAGLDPSVKQSGEFKSNQNRMSKRGSPYLRRAIWLASTVAVHRDPMFQTYYEKKISEGLHYMNVIGHVSRKMTAVIFAVLRDGQPYQPILQSAG

SEQ ID NO: 502194 - protein, 314 aa, unidentified
MLYAGLDLSRKRLDVHLLEESGATKEVTAVAPDADALRTLVASTARHGEPVRAAIESMNGARFVHDTLELNGWDVEIADAQKVKGLAPLACKTDRIDAWVLAELARRDLVPAIWLPSPGVRAERERARFRLHLVRHRTALKNRIHATLIAFGHPCPVSDLFGTSGRELLNRLEIPEPWAGTMEASLALIEELEVEIDLCEKDLRRLGADHRYVPLLTTAPGIAWILGYTIASEIGDISRFPSPKKLTGYTGLCPRVHQSGGKDHRGPLPGTARRTCGGRSSRPPPTPPTIPRTTTTTSGPNAGSASSEGPRWPG

SEQ ID NO: 502195 - protein, 332 aa, unidentified
MDEGGEVVFEQKISTTPKALREVFGAMPRSRVALETGTHSPWVSRLMKELGHEAIVAQASKVRLIGQSRKKDDRLDARTLARLARIDPELLGPIQHRSARAQADLIMIRARAGLVRARTALVNAARGLTKSYGERLRGCSARNIDAEKRKGLSAELQIALEPLLRAIESLSQQILDYNERIEQMAREGYPEVERLKQVKGVGTLIALAYVLTLEDARRFAKSREAGCYVGLQPGRRNSGSSTPQLHISKEGDCYLRTLLVQGAQHILGPFGEDSDLRRWGLKLAERGGKNGKKRAVVAVARKLAVLLHRLWVSGEAYEPLRNQRAVELSVAA

SEQ ID NO: 502196 - protein, 410 aa, unidentified
MELLHRRCCGLDVHKETVVACLRLVSDGKVTTEVRTFKTTTADLLHLSEWLAANGCTHVAMEATGVYWKPVWHILDDGEFALVLANAAHVKNVPGRKTDVNDAMWLAELLAHGLIRASFVPDTQTQEMRNLLRTRKQLVREHSSHVLRVQKTLEDANIKLDSVLTDLMGKSGRAMLEALIAGETNPAKLASLADRRAKASPEEFREALRGRVTKHHRFLLRLHLNQIDALDAAMATVDAQVEANLGPFRTAVELLMSIPGIKNLGAHVIVSEIGIDMSRFPSHAHLISWAGICPRNDESAGKRRSNRLRKGAPWLKTTLVQCAWAAVKKKDSYLQAQFYRIKARRGPKKAIMAVAASILTAIYHMLKDGTMYKDLGRNHFDRRSTDQQKKRPVKRLADLGYAVEIKPLAA

SEQ ID NO: 502197 - protein, 419 aa, unidentified
MKPLSPHPFTAYVGIDWADTKHDICLQAAGHDRREFDCIPHKMPDIDAWAMALHQRFGGHIAVALELAQGPIVYALQKYDFFVLFPINPLTLAKYREAFTPSRAKDDPTDAELALDLLMRHPERFAPIHPQSAAMRTLVNLTEHRRELVGDKIRLSNRLINTLKQYYPQALDWFEQRDTVLFFDFLTRWPTLAHAKRARVETLKAFFNTHNSRRSHVVEARLESIKAAMPLTEDRGVIEPCRLHALMLVKQLRVTLESIEQFDHAIAKLAPTLPDYSLFQRLPGAGEHLAPRLLAAFGEDRQRFAAADALQKYAGIAPVTERSGKKQWVHWRWQCPKFLRQTFVEWAGQTINKSFWAGAYYRQQREKGSSHAAALRSLAFKWIRILYRCWITMPPYNETRYLNALRKRGSPLLKNLVST

SEQ ID NO: 502198 - protein, 414 aa, unidentified
MNTLVSNIGVSGTLIALDIAKKHHDAKIRHPDGRTSYLRIENTLEGFNRLLALTASPHEDIIAAFEPTADYHRNIAWWLHKQGVQCHLVSSVRCARAREMLFKTWDKNDRKDASVIMYLLEQGLSSPFYDPLANGIIDIQEISNTYHQVTLARTRCLNSLVNHYLTLYFPEAEQFLHMSRAEWFCQFLLQFPTPSCITSLNRDVFVKQSWDVVGRKQYKQQFLEHLYDVAANSIALPLPDDSLAVATFRLQLHRYIELSAQRLQLEKQAEKYLQERSDYQHLRTIPGIGPVIALMVIAESGDLTRFAHYRQYLNFCGFNLSAIQSGQKHSGYRLSKRGNARLRYAFWLAATVAVRTRENSFRYKYERYLRENGDKPDQKRKAMTAVATKVARVAHAIVKQNIDYKGYYEISHGT

SEQ ID NO: 502199 - protein, 412 aa, unidentified
MKIAGIDVHKKVLMVVIIDASMPEEKPMRRRFATLPSELHRFLLWLREQGVEEAVMESTAQYWRSVWLELEPHMRLHLAQAFSNRAPRGRTHDFKDAERLVRRLIADELILSFVPNGEQRIWRSMTRMKVQLTRDRVRLQNQMECLLEEMRIKLSIVVSNLLGASGLRILHALAKGETDPKTLAQLGDERLQCTEEQLVDALTGRVQPLHREMLALQLQRLQLIDQQMAELNRMIAQAMRPHQDAVMRLAEVPGLGVDSAQQVIAEVGAQASTFPSAAELTSWVGTCPGKEESAEQNHSSRSAKGNKYLRRVLNQAAHAAVTKKGSYFQAVFRRLLPRLGYQSAIWAIAHRLCRLVWKILHEGVRFIEQSREPNPQAKRKRAQMLARALRKLGYQVVITPINQVAATNGIQI

SEQ ID NO: 502200 - protein, 354 aa, unidentified
MITIGVDFSKRNSNYQVRDNNGNTIKRCKLKNEPEGIVKFLDALPYPKRLAMEATRNWGLYYETVKEHVDEFLLGHPRKMKQISESQTKHDRKDADLISQMAYSGFFPKAHVSSLDTREMRSILRFRHFLVKQRKSIRNQVQILLDRNLWPCQRPGAFKNPFCKRGLEWLKSLSLSDRERHILDDCLENFYSLSHQIANLEAFVESQTLDHPDLAYLRRVPGFQKSRVNTYVVLFEIEDIRRFPKAKSFAHYAGLIPSEYSSGDKHCTGRLVKQANHFLRTALIESTHAAVRKDRGLRVYYQSVKKRAGSGAAVIACARKLGYAVYHVLKNKVDYEPYQPSATTSHPSSIPSKG

SEQ ID NO: 502201 - protein, 447 aa, unidentified
MKQKKPSQKRGTKLPKHLQHLNQHAAGIDVGSRSHFVAVPEGTDSQPVREFSTFTDDLERLAKWLRSCGVTAVAMESTGVYWIPVFELLDRHGFEVRLVNARHVKNVPGRKSDVLDCQWLQQLHTYGLLRGAFRPTDQICTLRAYVRQRATLVRSSASHIQRMQKSLAQMNLQLHNVVTDITGVTGMGIIKAIIAGERNPKTLAGLRDKRCKNTEETIARSLHGTYRAEHLFSLQQAVELYEFYRQKIADCDQQILAQLKSFDSSDDSDTDRKSPGNIEDALQQMSGADLSRINGINTNTALKIIAEIGTDMSRWKTVKHFTSWLGLCPGSKISGGKVLSSATKPVANRAAAALRMAALTLFNSKSALGAYLRRQRSRLGAPKAITATAHKLARLVYSMLKHGTDFVDAGQEQYEERYRSRVVQNLKRRAQEMGYKLVSLQDEPQAA

SEQ ID NO: 502202 - protein, 410 aa, unidentified
MLYLGIDQHHKQITISLRDGEGNVIQRRQVSTRPEKTRAFLEELARQSGEDGFMAILEVCGFNDWLIELLEEYRCKEIVLIHPDKRSKRKTDRRDAGKLSELLWLNGERLRMGMKPQGLRRVVIPTADDQADRQLTALRKRTTQQRTRTINKIKNILRRHNLTWEQPTKTFQTKLVRVWLAQIDLPPIDRMEMTHLLVQWNMYEQQIEQTQKSIEERFPQNESACQLSTAPGVSAYSALTIASRIGSIDRFASPRSLANYFGITPGCRNSGEATNRLGSITKEGSSMVRFILGQLVLHVLKQDPWMRDWYRRIRRRRGSKIARVAGDASAGDDLLAHAQTQRGLSCRRSATIAAEEDSPTGGKDDAISPTNLSSGSTKGGPPLPPSPSPQPQMLGAGRGDGEGGRGSRTP

SEQ ID NO: 502203 - protein, 405 aa, unidentified
MGDIVEVAWVGIDAGKVSHHATLVDADGTIVWSRQVRNDQAAVEQLIAKAAATATTVRWAVDLTSAGAALLLALLIAAGQRVVYVPGTVVNRMSDTFAGEAKTDARDSYVIAETARLRRDLTELITPNELVAELALLAAHRADLMADWVRGVNRLRELLTRVFPALERSFDYTTRSALILVSRYSTPDAIRDADADQLAAYLRSKEAHRPSIPGMVAKAHAAAAAQTVRLPGEAATAALITRQARKLLDLDREIKDLDKQITERFRAHPQARIIESMPGMGPILGAEFIAITAGDLAAFGTAARLATYAGLAPVPDDSGKRKGVRHRPRRYHRRLRHVFYMAAFSSLKTDGPSREFYARKRSERQRHTRAMIAPARRLVDVLWALLRDNRTWQPEPPTPLPATAA

SEQ ID NO: 502204 - protein, 372 aa, unidentified
MKDYSEVFIGIDTSKLRNAIAIAEVGRGGEVRYLGEIDTNDAAIRKLVAKLAGKYRSLTFCYEAGPTGYGLYRLIRGLGHECQVVAPSLIPKKAGVRVKTNRRDAVELAKLLRADELTAVWVPDERHEAMRDLSRGRQAAQKDLKGKRQQISSMMLRLGRHYPGKKTWGPAHMNWLMQQKVEHREQRIVLEELLEGMRQETERVERLEQSIREAVPEWSLAEIVTALQAMRGIDLVAAVTVLAEIGDLSRFQNPRELMGYLGLVPSESSTGDSVKRGGITKAGNGRARRILVEAAWTYRFPPRVSREKQQKVAAAPRHVREIAWKAQTRLCARYRALMRKGKRPTVVTTAIARELSAFIWAINREVIARRQA

SEQ ID NO: 502205 - protein, 418 aa, unidentified
MIDDVQWFVGIDWATQSHRACLLDVEGRHVSERDFAHDGAGLTELRDWLLERTKAAPGQIAVAIETPHGPVVEMLLDHAFRVFAINPKQLDRFRDRFTVAGAKDDSRDARVLGSAVRTDPHAFRRLVVDDPVVIELREWSRMADELQQERTRLANRVRQQLWRYYPQATELTDDVADDWFLALWQQVPTPATAAKVSEKTITRILKDHRIRRLDATTVLKTLRKTPLFVAPGTTEAACAHIRSLAARLHLVNQQIKEAHRALDELCAKLEAATENPSGQIREQHDVTILRSWPGIGRIVLATLLTEAAEPLRARDYHALRALAGTAPVTRRSGKQCFVIRRLACNKRLQNAVHHWSRTAIQHDAAARRRYDALRRRGHGHARALRTVGDRLLYALCTTLKRQTTYDPNCQAAQITASL

SEQ ID NO: 502206 - protein, 346 aa, unidentified
MKYFAGLDVSLEETAICVVDETGSIVKEARFASEPDALVVALEGMGLVFERVGLEACSLTAWLHDALRGAGLPAICIETRQANAAMKTMPNKTDRNDARALAQIMRTGWFRPVHVKSRQCRLWRSLLVARRTILNEMRTIENVVRAIMREAGIKLGTPSRAAFADRVRAMVGDDTLVKPLVAPLLTVLATMLDQFSRLTKQVLDLVRKEEVCRRLMSVPGVGPITALAFRATIDRPDRFRRSRDVGAHLGLTPARYQSGETDIQGKISRCGDELARTALYEAAHTLLVRSRKWSSLRAWGMKIAKHRGIARARVAVARKLAVILHRMWSDSSPFRWGKEADVGIAA

SEQ ID NO: 502207 - protein, 352 aa, unidentified
MFISGCDLHPRYQQIAMLDMTTGEVVTRRLEHENGEARAFYASLQGPVRVGIEATGYTQWFERMLKELEQELWFGDAARIRARALRRQKTDRRDAEHILDLLRTDLFPRLWVPSPEERDLRQRLKHRQKLVGMRPSVKNQLHYLAMSQGVCRKGKRWTKRGGQELERLELGQWASRRGKELLEWLDRLEPEIAELDQVVESEGQSRPDVVELRKQHKGVGAVVGLAFVLTIGPVERFKRSGPVVSYLGLNPREDSSGGHQRLGHISKQGNEMMRWLLVEAGQSAVQYDPELRRKYQRLKFRRGAKVAKVASARQLAVGMFWTLRQLQAATSPVGMSGSPARTLVEEAIPSLP

SEQ ID NO: 502208 - protein, 424 aa, unidentified
MTDTFSFFVGVDLGAERHAVVVLNAAAEILGRRYFAHNGAEVLELFSWLAKLTDQASPQQIAIAAETPRGSILESALERGHPAFSINPKQLDRFRDRFSMAGAKDDHRDAFVLASSLRTDQHCFRRLQLGDPRLVLLRELSRSQEQLQQNLRRACNQLWSLLQRYFPALLQLSPAADDPWLWSLLQAGPRPATAARLKLPRLEKILAQHRVRRFSASELKALLEQPPLPMAPGAAEALAEPVLLLLPHLELLHKQLAQLSARIDKLIDQLQQDTSFTEHRDIEILRAFPGLGRVFTATVLAEAYLPLGERDYHALRALSGVAPVTRQSGKTELVLLRRACNHRVQHAIFHSANVFVQKDPRAKLQYRRLRAKGKTHARALRGVADRMLNLLFALLKSQSCYDPERRTVPTEPEGTPPPKKTLDK

SEQ ID NO: 502209 - protein, 346 aa, unidentified
MQSTTIAVDTAKLVFEVVVSDGHRVIGNHRLNRADFQAFIVHQPPSRFVMEACGGSHHWARLMLAHGHSVRLLPVPYVRAYRRRNKTDRADCMAMLEADRNPEILSVPVKGVDAQAIQGLHRARSAWMGCRTARINTLRGLLREFGVILPLGAHAALKQMATAIDDPAVPDLLKITLLELLAEVHDLDDKIARVERQLASVARQNPAVRLLQDIPGIGLLTSTALYASAGDAKHFRSGRHLASWLGLTPKEHSSGSRRHLGGISKRGDKYVRTLLIHGARTVLLGARRNENAGRPLSPLQQWALGVQARSNHNKAACAVANKLARIAWASWANGTCFDANYQAIAA

SEQ ID NO: 502210 - protein, 436 aa, unidentified
MRGCRCSMIMGFTKPIEHFNLQRKKVITMNTLYVGIDVSSKSNVIYLMLPNGDKHSNFSVANSHEGSTQLVKRILSALTSHSLDTVLIGLEATSVYGDNLVYFLREDATLAPFNRKIHVLNPKQVKKFHDAYNDLPKNDYVDSFVIADCLRFGRINKKVYMGDYRYKALQNLTRARFFAVQNLVKEKQRFMNVLFKKYSTMTQEKVFSDTFSTTALAVYDEFESAEALANMDLHELTDFIIEKGKNRFPDPDAVAKAIQKAARSSYRLPKTVNDSVNQVLSISITSMKALESQIKEFDKAIKAQMELLPNVLISIPGIGPVYSAGIMAEIGDINRFNSQAALAKYAGLAWKQHQSGGFESEVTRLIPSGNRFLKYYLCEAAFSLVRCDKEYSDFYRLKYKEVNRCQHKRALALTARKFVRLVFRLLKDNRLYCPAK

SEQ ID NO: 502211 - protein, 423 aa, unidentified
MTKLTSTPAGAVLVAIDMSKNRQEVLIERPEGGRRRRMTVMATKEDYGGFVEQLAAIGRPIIVGFEATGNYHRTLAHRLLTAGFELRLISSVALARTREALHNGWDKNDPKDAQVILHMLRIGATQRYVDPLAAGINDLQELSKTHETISRMKTQTWHRILTHYLPLYFPEIARFAGNSRSDWFLALIERFPTPATITALDREAFSAAAWPLIGRKVSKARLINDIYETAFASTALPVPEDSAAVTMFRMVIAQGRSLIHQRDEIERLAHARLADDVDYQLLRNIPGIGPINALTILAEAGDLRRFNHHRQFLKFCGLDLATCQSGTFRGRTRLSKYGNARLRRTFWMAAQVAARQRDNSFRDKLGRYIAGHADDADRRRKAMTALTAKMARVDHAVIKTGTEYRPFLERSDARWKDPSLQVP

SEQ ID NO: 502212 - protein, 422 aa, unidentified
MQNTAARKRKQVPEGYLIVGIDPHKKKHAAVAITQDLTIRDRFKLDNTKEGLEFMVRRVRTEMVKSDCRGVMFAIETGGHYWRNIAYFLDEQGIPFRFINQYTLKRRREGKDLNHKKNDYRDSEVAAQLLCTGEFTESTIPQGVYAELRTAHNAYRRLVKERTRITNLMKGLLDGLFPEFVRVFKDPCAVTALCVLSCCAIPSVIAGMTQDEFAATIEAHYHGRRLMRRKLVALHQVAISSIGIAAGARSVASEITFLVEKLELIKGQICSIERTLVSLVDETEEGKYLLSITGLNYISAAGLIAELGCFKLYRTSKQMIKMAGSNPTESESGGKRGAHTPMSKQGRPVLRYCAWTSVIPMLRFNTDFRAWAKQRRERPAHANPLGGREVVGAALNKLLRLSFTLVKNQTLYRSPQLMPMTN

SEQ ID NO: 502213 - protein, 329 aa, unidentified
MEQYIGVDLHKQFFQACSITSTGARAWEMRFPRTDGGLALFCARCGPQTAVAVEACGPTWAFVDAIVPTGTAVCVVDPRKTRLKAGFAAKTDRLDARRLADALRRDSVVSVYVPPPAIRELREVCRGRHQVIRLRTRLAQMIRALLLRSGGPDVPVRRVFSPRGLAWLEEVQLPPDAAASLARLRHVLTVIQAEAAAAEAVVAARAAADPLARALDTMVGIGPVLALTLRAEIGDGLRFPRGAALASYAGLVPRVDASADRYWSGRITREGSPWLRWALVEVAMHAIRRQDAVGRWARQLAIRKGAYKARVALARRLCDDIVHVWRQAV

SEQ ID NO: 502214 - protein, 410 aa, unidentified
MELLHAHCAGLDVHKDSVVACARHMVDGKVTTAIKTFKTTTQELMAMSDWLSSQGATHIAMEATGVYWKPVWHILSDGEFALVLANAAHVKNVPGRKTDANDATWLADLMAHGLIKASFVPDEPTQQMRDLLRTRKQIVRERSSHIQRIQKTLEDANIKLDSVVTNILGLSGRRIIEALIAGQTVPQALASLAHRRIHASVEELEASLRGRVTRHHRFLLKLHLDQIDAFDQTIAAIDKEVDGNVEPFRVAIEMLSDIPGVGDLSAAVIVSEIGIDMSRFETAGHLISWAGLCPRNDQSAGKRRSTRMKKGAPWLKSTLIQCAWCASRTKDSYLQAQYLRLRSRRGAKKAVCAVASSILTVVYHMLKNGTVYQDLGASYFDNRAKDKQALRLISRLKNLGFEVQIKPLAA

SEQ ID NO: 502215 - protein, 361 aa, unidentified
MNESTTIVAFDQDAASIVAAVLRPGDAPALQPLSPDDASIGRFVARLARRGPVQCCYEAGPCGFELQRFLSGRQIPCDVIAPSLIPRRPGDRIKTDRRDARQLAILYRAGALTAIHIPTAQEEAARDLLRCREDIRADLLRARHRLSKFLLRHGRRFTETKKAWSKRHDTWLRAQVWPLPALAQTHRAYLRTVDEAVARLQAVERDLRDLLTLEPLAARVQRLRCFRGVDDLTALTIAAELGDARRFPTAPSAMAFVGLVPSEYSSGAKTARGAITKTGNAHLRRVLVESAWHYRQHPCIGRALRLRQRGAPDPVVQHAWTAQHRLHHRYRRLAGRGKPKQHVVTAVARELTGFLWAALTQ

SEQ ID NO: 502216 - protein, 429 aa, unidentified
MSEEKSLELRVSVDVGYRRHSVAMGLSSGEVLEEFEIDHRIEGFEEFFSRIEKQRKKENCAVAVAMEGYNGYARPLDSMVRQRGYRLYNLNNLKFARFKEIFPGSAKSDRIDARKGLELFQLSDHLPLAKEVLQEVSGTPPENEVLKRLTRRRRRLVNERVRVVNSLQADLQAVCPGLLEITAEASNQWFLNFLLSADTLPQLARLRRSTLLKIPSVGVKSAAIIENWQKRAHFSQEVEWVGEMIQEDATRCLELDGKVKRLEAQIAEVAKGSKITKILRSIPGFGAVCTSELAGEIGTIERFASEASLSLYLGMSTLDNSSGKYQGTKTPKHVNTRAKAAMMIALDRHRKYVPESQRYYEKKRSEGKKHNQAIRSLGRHLSRIIYKMLKEERDYEIRPEKGNTKTKVSPRSSIKTQIRRPKISSKKNK

SEQ ID NO: 502217 - protein, 343 aa, unidentified
MEIRSVGIDLGKTTFHLVALGDNCKVLLKKKFTQKQLIAFTANLQTSLIGMEACSGAHFLGRTLREQGHDVKLIPAQFVKPFVKSNKNDFLDAEAIAEAVDRENMRFVPIKTDDQLDLQALHRVRDRLIARRTSVINQLRAFLLERGLVFAKSPARLRERMPEILENAEEDLTPRMRNLLAQLWNEWKDLEQRVVDLNQEVELIASSDAACTRLRQIPGVGPLVATAIVAAIGNGAAFHKGREFSSWLGLVPRQHSTGGKARLFGISKRGNNYLRKIFIHGARAVVLRSKRDRVAMGAWMTALEARAPRNVLIVATANKLARIAWAVLSSRQDYRAVQEPVAA

SEQ ID NO: 502218 - protein, 346 aa, unidentified
MKKSTTIAIDLAKNSFQVCKLHGSSCEFNKAFTRDKLKAWLTQQPPTTVVMEACSTAHHWGRFCRNQGHSVRLIAPKYVTAYRTGQKTDKNDATAIAVASQQANARFVALKSIDEQALQSIDRIRQHLTDSMTATSNMVRALVAEFGLDIPKGKNAFKKRLPEVLEDGQNALPDILREHIANAFYLHEALAKQKSELEVSLTQHLKQHYACKKLEALEGVGPVNALGLYLSLGANGGNFKNGREASACIGLTPKQHSTGGRVTLLGISKKVGQKKLRSNLIQGALAVAKVVDKREPKNDKEAWLKSLIQRSGLMKAAVALANKTTRTAWALLHYGSEYRIPQACEP

SEQ ID NO: 502219 - protein, 413 aa, unidentified
MAAVEFTQVVSRGCGMDIHKEVVVATIRGEGIQKETRSFDTFTRSLTEVREWLVSMGITHVAMESTGVYWKPIYNVFEGHIPHVWIVNARHIKNVPGHKTDKSDSEWICQLLMAGLLKPSFIPPREQRELRDLTRYRRKVIQMVSANKNRIIRTLEDGNVKLSSVLSDTSGKTGATLIEMLCDGRDLTLQDIEDVRHGRCHHTSEEMLEACTGYMNDHKRYMLQRIRECNRKLTVEISELDLRVKEIVTPYAEVMERLDEIPGLHDRTLEDLIAEIGLDMTVYPCAESLCKWAAMCPGNNESAGKKKSGKTNHGDKYVKATLVEAAWAASRTKGTFCRERFERLSKRRGGKKALIAVGHSILKAVYYVVSTGGRYHELGEQYVPSKIEKKRRDYLKSELQKLGYDVSLIKKKD

SEQ ID NO: 502220 - protein, 380 aa, unidentified
MNRVTLQSNDNAGEGVLYMAMELGDKHWKLVFSDGGAKRRHEIVEAGRRMQLVEAISTAKAKLHLSPEARVVSCYEAGRDGFWLHRYLVSLGIENQVVDSSSIETNRRERRAKTDRLDGVKLLTMLIRYWAGERGLWSVVRVPNVEEEDARRLHRELGSLKKERTRHRNRIRDLLVAQGLRLEPHRDFLQRLETLTLWDGTSLPAELKGELEREYRRLSMVEEQLRALEQTRTERIAHADSHPLRQVVRLMGLRAIGPNCAWLLVMEFFAWRGFRNRRELGACAGLTGTPYDSGGSKRDQGISKAGNARVRTMMVEIAWLWLRHQPNSKLSRWFRERFAGGGARMRRVGIVALARRLLIALWRYLEEGLLPEGAELKAAG

SEQ ID NO: 502221 - protein, 347 aa, unidentified
MKYYVGLDVSLKQTSVCIVDETRTVVKEGKVASEPEAIAAWLQKQDLEFERVGLETGLLSPALYHGLAEAGLPVVCMDARHLKAATSAMHVKTDRIDARNIAWALHAGWYRAVHVKSRATHRLRALLRSRAALVSSRVDLDNHLRGILKAFGLKVGPVRPNRFEARVLELVEGDGVLEKVVGAILGVRSELIRRLDDLHQMILSVAKADQVCRRLITVPGVGPLTALAFRTAVEDPTRFAKASLVGAYFGLTPRKYASGEVDRTGSISKCGDKLTRTLLFEAANALMTRVQRWNSLKHWGVEVAKRRGLKRARIAVARRLAVIMHRIWVDGTTFRWTKAVAVELPVV

SEQ ID NO: 502222 - protein, 344 aa, unidentified
MSEVIIIGLDIAKHVFHVHGADERGRAIFSKRISRGKLLDFFAAHPSCTVALEACGGAHHWARQLTQLGHEVRLIPPAYVKPFVKRQKNDAIDAEAICEAAQRPGMRFVAVKSEQQQAAGLVFRTRDLLVRQRTQLINAIRGHLTEYGWIAPKGRSHVAMLADLLEEEEMASSLPEAARAMFRLMLDLLAGLGGKIAVLDKEIARRARQDEVSRRLMTVPGIGPISATAIAALAPPAETFAKGRDFAAWLGLTPLQRSTGGKRKLGATSKMGERTLRRLLIIGSSAVVLQASKRGAPKGSWLEQMLARKPRMLVTVALANKTARIIWALLVKQENYKAPVAAKA

SEQ ID NO: 502223 - protein, 347 aa, unidentified
MEQYAGLDVSLDSASVCIVDAQGKIVKEAKVACEPEVLIAWFAAHGTPMARIGLEAGPLSQGLFAGLKAAGLPVELLETRHVRAAFKAMPVKTDRKDARGIAQLMRLGWFRPVHCKSLPAQEVRALLTTRKLLQAKRHDVEMSLRGALRGFGLKVGPTTPKTFEARVRELVAQHGTLQTIADALLNARAVLEQAFEALEKRLSALARCHAPTRQLMTTPGVGVIVALTFASAIDDPARFRSSRTVGAHFGLTPRKHQSGETDVTGRISRIGDHGVRVALYEAANVILTRAVRGSDLKNWALRVAKRAGMKKAKVALARKLAVVLHRMLADGTTFMASPAARAVAGAA

SEQ ID NO: 502224 - protein, 416 aa, unidentified
MVWEAVTERCCGLDVHQKTVVACLLMGGLDQQPTESIRTFATTTKGLVELRDWLVENSCSQAAIESTGIYWRPVFHVLEDSVTLLLANAYHMSQVPGRKTDLKDAQWIARLLRWGLLRPSIIPPRPVRELRELCRYRKKLTEHAAAEKNRIQKVLEDANIKLSSVVSDVFGVSGRAMLGALEQGQLTPVETANLARGSLRKKMSQLTDALEGHVNEHHRYLIQEQLAHLDYLETLIADLNQSIAEKAKPYEHEVSLICTTPGVDAVTAQHILAEIGADITLFPSADHLASWVGICPGNNESAGKRRSGQTSRGNQWLKTLLVQCAHAASRAKGTYLKAYYHRLAARRGKKRAAIAVAHKQLTMIYHELSNDVPYKELGENFFDRLNQRRLEKNLVRRLEGLGFRVELQPEDNLQTS

SEQ ID NO: 502225 - protein, 346 aa, unidentified
MNANPVFLRYLALDAHKHYVVIGGVNAACETVLPPRRLEWAELEDWLRAHLQPTDKVVIEASTNTWTLYDQVARYAGAVVVAHPPHIKLIGAALVKTDKRDVQVLAKLLALNLIPEVWVPPQPVRELRELVAHRLRLTRARTQTTNRLHSMLQRHNIAAPDGDPFAAQHRAWWNALDLSPTEKLHVRQDLATRDLLNAQLAEVEQELTRLSTVAPWAAHVPFLVQLPGIGLITAMIILAAVGDIARFAHAKNLVGYAGLGTYVHDSGKTHRHGGITKHGRADLRYAMVEAAWVAVRTHPRWQAEACPERSRRVRTAGQAHAGQSSHRRHRPQAAGRRLARPPRPRS

SEQ ID NO: 502226 - protein, 345 aa, unidentified
MSHFVGLDVSQKMTAICVVDKDGRRVWRGQCPSVPEQISAALRRYAGDNARIGIETGAMTPLIVHELRNLGFEVVCLDARHARAALKMQINKNDQNDAEGLAQIVRTGWYRSVHVKSFDSHRARAILGARTQLVGMTTRLSNHIRGVLKTFGLLPGAMRGLPFDRKVEVLLEGRSDVAPIVRPMLVAWRQLRAQIAAFDKAIRAMVRMSGASRLLMSVPGVGLLSALAYVSTVEDPSRFARSRSVGAHLGLTPRQYQTEEVDRSGRISRCGDTLTRTLMYEAAGVILTRVKKASGLRDWAAAIAKRSGPGKARVALARKLSVILHSIWRSGEPFRWSEPKHAVVA

SEQ ID NO: 502227 - protein, 349 aa, unidentified
MSSVIIAVDLAKHVFELAVSTSAGRVTERKRLSRSQFERFWSDRPPCQVVMEACGSSHYWGRRLRALGFEVVLLPPHYVRPYVRRNKTDRTDCEALLEALRCAGIHPVAIKSEDQQAIVALHRMRSQWMATRTARINALRGLLGEFGLARPTGANRFIRELPQLLEEKKELLPVRVRRLALATYEEVRSLEDRMQEIERELESVIQEVPTLEALRKVPGIGVLTATALYASVGNVHAFRSGRHLASWLGLTPRESSSGSRRRLGRISKQGDAYLRMLLIHGARSALLAAERRRHASQPLNRLQAWALERADAGHRNRAAVALANKMARITWAVWKHERSFDGNYLAKAA

SEQ ID NO: 502228 - protein, 358 aa, unidentified
MQSKGFSFEGQNIYIGIDVHLKTWAVAIMIETGVIERFSQASEASILYAHLQKRYPGGNYFSVYESGFCGFSTHYCLQSFGINNMVVNAADVPTSQKEKVHKTDPVDAVKLVKSLKSRLLHSIYIPEMEIVLDRDLVRTRTAIVKDVSRWKTRIKHLLYRHGVKYPERFANANTHWSRRFFKWLEEEVELLPGSSREPLLQHIASYLVSCERLLDITRKIRTLSRNETYAQNMELLCSIPGIGFHTAISFLTEMGDIRRFSNEKEFASFIGIVPTCHSSGEKENTGEMTFRGNKHVRQQLVECAWKAISKDLALGACYGKYCQRMDENNAIIRIARKLSNRILTVLKTKRKYVNERNH

SEQ ID NO: 502229 - protein, 366 aa, unidentified
MKKTSTVRVNKNTIFKGHKLTIGLDLGDRWSCYCVLDAAGEIILEQKVAMTPEAMKQTFSKIPQGLIALETGTHSPWVSRLLTKLGYKVIVAHAQRVQLITKSNRKDDRHDARTLARLARIDPELLGPVRHRSAQAQIHLTVIRARAELVHARTALVNAARGLVKSYGQRLPKCGTQQVSRELGAGLHAELREVLEPLLKEVESLNERIQEYEVRMEKIAKESYPHVELLKQVKGVGTQIALTYVLTLDDPHRFPKSREVGCFLGLCPGRRDSGESQPQMNISKEGDRYLRTMLVQGAHYILGPFGEDSDLRRWGLKLAARGGKNAKKRAVVAVARKLAVLLHRLWVSGEVYEPLRNSQKAMRAAA

SEQ ID NO: 502230 - protein, 342 aa, unidentified
MDHYAGIDVSLECSSVCVVDASGKIVREGKVASEPEALINYFGSLNVVLVRIGLEAGPLSQWLYAPMKEAGLAVELLETRHVHDAFKAMPVKSDRNDARGIAQLMRLGWFRPVHCKSLAAQELRAVLTARKLVQSKLRDIENSLRGILRGFGLKVGKTTARSFAGRIRELVEGQANLETIAQALLAVHAVLLREFNGFERRVRTMAREHVKARLLMTTPAVGPIVALTYAGAIDDPARFKSSKQTGAHFGLTPRKYQSGQTDVTGRISKIGDATVRTALYEAAHIMLTKPIKGCAPLKSWAMRIARRSGMRKAKVALARKLAVILHRMLVSATPFNAAAAAA

SEQ ID NO: 502231 - protein, 361 aa, unidentified
MVVNVGVDLHKTCFTVFVKHEKQQFAEYRTNEQGYKRFTNRISAWKEAGLQVRVGVESTGNTRFFKNTTEKAGAEVIVINTLKFKVVTESVKKTDRHDAATIAEFLEKDMLPEAKLCSEKSEQLRRLLKVRSTLICTIVTVKNQIHALLTGLGMEDTKASLQSKRGRQKILDVLEKAGNGLVVQPLFNTIEQLYESVKSIEAELAKLTQEDKTVQLLMSIPGCGPIIACTIRAYTDDIKRFASAKKYAAYAGLVPCVRNSNMTVHYGKITKHGPEGLRTAFVQLVMGIRRCTYTANWRIIERYEYMKQHKGSGKSIIATARKLATIVWYMLSSETPFDNTFMIDKILNKKAFLMQTLLTNY

SEQ ID NO: 502232 - protein, 350 aa, unidentified
MFIIGCDLHTRYQQIAMLDTVTGEVVTRRLEHENGEARAFYASLAKPALVGIEATGCTQWFERMLAELGHELWVGDPAEIRARAVRRQKTDTRDAEHMLDLLASNRFPRIWIPSLQERDARQLLKHRDKLVRMRTSVKNQLHYLAMSQGVCRKQKLWTERGRRELEGLPLGTWASRRRQELLELLDRLQPRIEELDEAVKVEAQARPEVLRLMRQKGVGPVVGLAFVLTLGPVERFPRSKQVVSYLGLNPREASSGGHQRLGSISKQGNEMLRWLLVEAGQSASQADPELRRKYQRLKLRRGTKVAKVALARILAVRLYWALREASPQRSPVRMPGSPARTLVDASPSTC

SEQ ID NO: 502233 - protein, 352 aa, unidentified
MGVKKLFIGMDLHKNSSTFCVKDIDGELVASKKVATNKSEVLGFVNQFKDFNVRLAMEPVSQWYFMADTIQQSGIDVRLANPLKVKAIASARIKTDKIDAAVLCDLLRGNLLPEAYLSSAEMRMWKELVRFRLSLVNLRTQIKNKIHAVLGKNGCISKFTDTFGKGGRVWLNELKLPEHFRNSLDEYLSTLDYLTGQIKQAEKRIKAVAVSNKSMRLLATIPGVSYFSALTIMAEIGDIKRFPSAKQLMGYAGVVPSTYASGDKVRHGRITKTGSRWLRWIMIEIAHKQVRCKRNPGLGWYYLKIKRNKVSKTAAVATARKLLAVIWRMLVDERPFISPLEVREAYRNNIVH

SEQ ID NO: 502234 - protein, 342 aa, unidentified
MGQKRYMGVDLHRKVFTCCVRLESGREFLTEWRLEQLGQFVKKLRSSDEVAVEVTGNTRLFYEAVSPHVKRVVVVDPNQFRVISQSVKKTDANDARNLALYLAKGLLPEVRMKEKQQAQVASLTQTRDRLVKLRTALKNKVNNLLSARGIELEKEALSSEKGLTRALTMEVEELTQLELQIIVEQIRSLNQSIAKLEEVIDREGKKLKGHRNLTSIKGIGSLGASILLSVIGDVRDFPDEGRLASYFGIVPRIHNSNETERSGGITKRGSKLGRTALVQCALIAKRYSPYLASYYEHIRSRRGTGRAIIALARKFLGIIYRTLKNHWVFQDFPHFVLEDSTT

SEQ ID NO: 502235 - protein, 410 aa, unidentified
MEILYQRCCGLDVHKETVVACLRIMSGGEVLREVRTFETTTASLMALSEWLAEKGCTHVAMEATGVYWKPVWHILDDGDFQLILANAAHVKNVPGRKTDVNDATWLADLLAHGLIRASFVPDAQTQEMRNLLRTRKQLVREKSSHILRVQKTLEDANIKLDSVVTDVMGMSGRAMIEALVAGESDPAKLARLANYRLKASQETLREALRGRVTKHHRFLLRLHLNQIDALDASIAMIDEQVEAGIAPFRAAVGQVMTIPGIREIGAQVIVSEIGTDMSRFPSEGHLISWVGLCPRNDESAGKHRSNRLRKGAPWLKTTLVQSAWAAVRKKDSYLKAQFLRIKARRGPKKAIMAVAASILTAIYHMLKDGTLYQDLGPNHFQTRSKGQQTKRLVKRLADLGYDVALTPLTG

SEQ ID NO: 502236 - protein, 319 aa, unidentified
MGKSKIEYEQVIDRGCGLDVHRDTVVATVMGKGIKTETRTFGTTTSSLNELGVWLESLNVTDGAMESTGIYWKPVLHVLRAYPLNLIVVNARHIKNVPGRKTDKADSQWICKLLISGLLKGSFIPPEKIQELRDLHRYKKKLIGIVASEKNRIIRVLEDANIKLSSVVSDTSGVTASYLIKGLIEGRKDLEKLISECYHRKLQASPDQIKEAITGRLTAHHAFILNSMQKHIASVEERIAEIDVEIDRYIKDFEKEIELLQTIPGVGKEGAIGIVAEIGVDMDVFPSEHHLASHSGMCPGNNETAGKKKVQEHDRGTNT

SEQ ID NO: 502237 - protein, 421 aa, unidentified
MNERAQLKNCVALVGIDWADKKHDVALQVAGAQAPECSSLEQTPEAIAQWVAGLRQRFGSGHIAICLEQARGALIYALMAHENLLLYPLNPQSLAKFRKVLHPSGKKDDPVDADLLLKLLRHFGEQLRPWVPDDVPTRRLRLLVEARRGFVDRRTSLLNQLTATLKSYLPQAPKLVGEDLASTMATDFLQKWNRLDLIQKLKPAVLRNFYYGHNSRSESLIKERLALIAKALPLTQDEAIVGALSFAVVQLAAALASLRVIIARYDAQIAQVFAAHPDAFIFQSVDGAGPVLAPRLLVAFGSDRQRFGDPNALPRYSGTAPVTERSGKQKWVHRRWARPKFLHQSWVEFADESRRFSAWAARCYQHLKTEGLGHWAAVRVLAIKWQRILWRCWQDHAAYDEAIYIKSLQARGLKPYADLTT

SEQ ID NO: 502238 - protein, 343 aa, unidentified
MKVTTVGIDLAKNVIVVHGVDERAKTVLKKQLKRDQVASFFANLPPCLIGMEACGSAHHWARKLQSFGHTVKLMAPQFVKPYVKTNKNDAADAEAICEAVSRPNMRFVPIKNGEQQAVLALHRARQGFVKARTAQANQIRGLLSEYGIVIPQGIGHIAKRLPDILEDGENNLPGPFRQLLNRLGEHLKELDRQVGELEAQIQRGHRENKASKKLAKIPGIGPITASALVASIGDAKSFDNGRQLAAWLGLVPRQHSSGGKPTLLGISKRGDSYLRTLLIHGARAVIRVVERKADGPDAWLRGLLGRRNKNVAAVALANKNARTAWALLAHERDYQPGYEPAVV

SEQ ID NO: 502239 - protein, 341 aa, unidentified
MDSKKLIIGIDVSADTFTWTPYEVTNKTYGSATTFPNTPEGFENLTQWVIQQEYTPEQTLICLENTGVYNHTLCYWLSTRKFTLSVEPPQKVKRAFFETFKKTDELDSRQIAEYAVRFLDCLTLWAPPRELIEHLQALLSTRDQLSKQSVMNKNILQMLQRKYIRTHTAEKSLEILIQQIKEEIKKIDKEISDRIKTDSTFAPLFALLVSVPGVGILLASSMILMTNGFEQGADPRKIASHLGIAPHPRKSGSSINKHPCSRGYGSDRLRRLLYLAALSLRTHQDVFKKYFLRKVDAGKNKRLVLNNIANKLVRVICAVVNSRTPFIDNFMSVNPMILKNS

SEQ ID NO: 502240 - protein, 370 aa, unidentified
MHQSTTLCVGLDVHKDSIAVAHAEAHCTDPPHFVGTIGTRQADLDKLVRRLQSKAAQLVFAYEAGPCGYVLHRYLTGKGLTCTVVAPSLIPKRPGDRVKTDRRDAVELARLLRSGDLTPVYVPSVDDEAIRDLSRARDAARVTLKAAKLRLTSFLLRLGLHYTGRANWTDAHRRYLAKVVCPTPAQQIVFQESIHAVDEQHQRLGRLEQELRELAPQWRLAPLVDALQALRGVQWIVALTVVAELGDLTRFQNPRQLAAFVGLIPSEHSSGDSRRQGAITKAGNARARRVLVEGAWAYRYPAKISAHIQQRIERLPPTVQAIGWKAQVRLCKRFRRLAARGKHANVVVTAIARELLAFMWAIAQEVPIPA

SEQ ID NO: 502241 - protein, 444 aa, unidentified
MQYQKVLKMLENTPYLSVGLDVGADFTWMSIMLPNSTLTGKPFKIVHSDPQSRELAVTKIKEAQKAYSLESRCFLESTGIYHIPLLCFLRDKGFDCSVINPIITKNSTNMNVRKLHNDKFDSKKAAKVGLDASLKTSVIPDDEVIDLRNLVRDYYYFKDLQSAVILKLTAELKVSFPAYRKVFSKVTTQTSLKLLDAYPLAQELLAAPKETVVEMIRSTARFGEKYALAKYDALHDAAEDAAVFGRALQSNALRIRLYIKLYREYQEHLDSMLEELHKAVERLEGTPVRGRISLLQTLPGVGFLSAVVLIAEMGSFDLFSSPKKLYAYFGMDPGVNDSGKFHGDRVHMSKRGSSLARRILHMAAINNLKVDKAANAPVNPVIYDYYIRKCAGKKKIVAVGAVMHKICNTIFAMLRDNKPFELITPEEHCKRYAAEHSGTMNAAA

SEQ ID NO: 502242 - protein, 316 aa, unidentified
MKIHTNQNLNVGVDTGKFQLDIYIRPLDIYFTVPNDEKGIKEAVKAIKKHCPERIIIEATGRLEMPFIIACAKENLPFVIANPIHIKRFAGAIGQRAKTNKLDAQLIAHYGEAIKPKLSQLKLETMQVMSDLVARRNQLLVMQTMEKNRLQILPKELVMTIKPILTAFNHQIKKIENKIVKIIESCLEYQARNTILQSMKGIGKIAAASIISNLPELGYISSKQASSLVGVAPMNRESGRYQGMRKIQGGRHQVRTVLFMAMMSAIQTNPVFKAHYQKLLAAGKAKKVAIIACIRKMVVILNSMLRDGVIWEAPKV

SEQ ID NO: 502243 - protein, 412 aa, unidentified
MPYHIAGIDVHKKMLAVAVADVAVDGDFHFERLKVGTSPVQLRALADWLVEREVDEVVMESTAQYWRPVWEALERYWRPTRRTHPDAIPVSGTLHLAQAQSNRAAGGRKRDFPDAERLVKRSVAQELTLSFVPDAEQRLWRTVMRRKYQITRNRVQLHNRLEALLEEAHIKISSVVSDLLGTSARRMLHAVGDGETDPATLAALADSRLRATPDQLRDAFGACADLHPVYRRLVKLTLDELRLIEDQLAQLDQQMAQLLAHHHDAVHRLAEVPGLGVDSAQQIIAEVGASAAAFPSAKQLASWMGACPGNEESAGVNYSHRCPKGNRQMRRVLNQAANAAVKAKGTIFAVVYRRLVPRLGHAQAIGATAHRLCRLIWKILLSFGRFARVSRPGHPQKRIRPTSASAVSYNEN

SEQ ID NO: 502244 - protein, 318 aa, unidentified
MHYIGMDAHISSLDFAVINDAGRLVKSTRVTTGVNNFMDFVRQITPPRIVYMEEGTLAAWAMEVCVRFGEKLVITNPKENHWIGSSGQKNDPLDALKLAQLARGGYVKEIHHPLGERRRFRELMEAYHDTVRGTTRIKNKIKAKFAQNGIPCTGCTVYLKSHQDEWKSKLAQNDTVLLILEGLWHQLEQSEQTEIVLLAAAKVQAKRYPEIRRFKDLPGIGFIHSATISAILETPHRFSNKRKVWMYAGLGLMSRSSGGKLSSEKLTTDYNRLLKCTVIQAAEAAIRTKDNPFRQKYLDMTLLQGIPPHRARLTVARP

SEQ ID NO: 502245 - protein, 344 aa, unidentified
MKFTRCGLDIAKQVFQVHGVNEHGVVKGHRTLARTRVLEYFAQMPPCLIGIEACGSAHYWARELTKLGHVVKLMASQYVMAYRKRAKNDANDAEAICEAVGRPNMRFVAIKSEEQQSVLMVHRARSLTVANRTAQVNQIRGLLGEFGLVVPRGVGRLRRELPGILEDAENGLPGLGREVLSGLLQELREADLRISAYDRQIRALAEASEPARRLMRVESIAAQTATALVATVGDPHVFRNGRGFAAWLGITPRQHSSGGKEHLGPITRQGDSYLRTLLVHGARSYLRVVDKKTDAKSEWARRLKQRRHVNVAAVALAAKHARIAWAILAHGTEYRPAGPQTAVA

SEQ ID NO: 502246 - protein, 391 aa, unidentified
MILVGIDVAKDKHDCFITSTDGEIIQDVFTIPNNRDGYNKLYTAIRAASSDLSKVKVGLESTGHYSYNILSYLLNKELTTYVINPLHTNLYRKSLSLRKTKTDRIDARTIAYMLMIDQSLKPYAIESHHNENLRSLTRYRFSKVQERARLKTSVARLTNILFPELDQMVSTIHINSIYAMLEEFPGASHIASAHLTHLSNLLSASSKGRFKKGTAATIRDAAKKSIGSAIPAKSLELRHTIAFIRVLDKEIMEIEAEIDKIMKEIASPITTVPGINFRMGAMILAEIGDFKNFDSPDKILAYAGMSPSTYQSGKMTGGYAHMEKRGSRYLRYALFNAAKYVCQWDAGFASYLAKKRTEGKHYNVAISHAAKRLVRLLYAMEKSGQMYRAAA

SEQ ID NO: 502247 - protein, 481 aa, unidentified
MAKRKVSSFQRLQSGKLNPRDYKELQRRLQAEDPGLMVVHGNAAGIDVGAQSHFAAVPPGRSEQPIREFGSWTAALHEMAAWLISCKIDTVAVQATGVYWLGLCDVLEKAGLKIWVVNAHGTKNLPGRKTDVQECEWLRKLHTYGLLRDSYRPPESIREIRDLWRLRERWVQEIGRALQQMQKSLTAMNLQLTNTVSDIGGVTGLAIIRAIVGGERDSRKLAKLRDPRVRASEDEIAHSLEGTWREAQLFELGQVVEHYDFLAKKIVELDKLLQQKMKTMPTREPVVVEQGTQAEAEQAVWKRKRKKPSKNAPKFGLEKELERVLGVDLTLIDGVHVLIAQTVYAEVGPDLSAFPSEAHFAAWLGLAPMRSVSGGKLIRHERKKMTNRLSLALRMGAETLENSKTYLGARFRNIKGRRGPAKAVKAMARYLACLIYRMMTKGQTWIDRGEAAYEAQRSVRELQFLTRKARALGMNLVPAKV

SEQ ID NO: 502248 - protein, 406 aa, unidentified
MNAVGIDVSKGKSTVAILRPGGEVIASPFEVSHNPRELNELVTLIKSLDGDSKILMEYTGNYYLPVALFLQKSGLFVSVVNPILVKDYNNKSLSVRKGKTDKKDSLKLAAFALDRWNELPLFSAQSDTRTLLKAFNRQYNQYNKLKVMLKNNLISILDQTFPGANTLFSTPARKADGHEKWIDFVLKFPHCECVSKKSFSAFSKGYLSWGRKFGYLFSEAKAKEIYAFACNCTPSLADSEATHTLVSAAILQLNTLNETIASLQKEMDLLAASLPEYDTVLSLYGVGSVLGSQLIAEIGDVSRFSNKKALVGFAGIDAPPFQSGNFNPQSRNISKRGSAALRKTLFQVMSVILQKAPANDPVFLFMDKKRSEGKHFYVYMMAGANKFLRIYYARVMEHPNSLQKAA

SEQ ID NO: 502249 - protein, 354 aa, unidentified
MSVRYAAADLHKATTTIVVKDENGKTIRQSVMETTEENLRSELRAIQGPVHLTFEESQYADWMFDALQPLVNKLIVCDPRHNRLLSQGDKNDQFDAERLADLLRAGLLKPVYHGERSKRDLRELVKSYDQLVSDRTRTKNRINALFSSRGIKRPKEGLYALDLETREKLIKQLPGRGMRLRAMDLYVELNTQDALVKEARKEMLAEGKKFPGVAHLKTVPGFGDIRATRAVAWIQTPHRFRTKRQLRKYAGLAVVTTTSSDWVVTEQGMERKTRVQTRGLNQRFHRPLKAIFKGAAKDAVTHYDSWKNHRNVLIDEGMRPDLPRLTIARKLASIVLSIWKQGVDYDESKTFLRS

SEQ ID NO: 502250 - protein, 369 aa, unidentified
MAHGRADSLSLSLKMQRYMENLIVGIDFSKKTLNYCVLSGSVDNIAAEGVLGNNRKGWSSLLRLARKRLRACDACGLLFCGEDTGLCSWPAAEWLTSHGCRVWLGDAFRMSRSMGYAPEKTDASDARRIADYAFRYSDKAVDYVPMTEADKRLRLLEKQHRTLTDVKVKLKNTVGALSALLDGQTRELEDTLAYVSERLKAVDRKIERLLKTDPELAPNAALAVSVPGVSYTTAAAVMVDTRNFTRFTDGRKYAAHVGCVPYRCESGTSLKRRPHVSKHSNRRLNSLLTQGAVSIMTRNRQMMEYARRKRAEGKNTGFIINNIRCKTIKRLFAVIRDRTPFREDYRNCMECRKTVGLNDKCNMCSHYLT

SEQ ID NO: 502251 - protein, 366 aa, unidentified
MNPRTGSVFIPKEYDVFCGMDVDKHSISATFLTHYGEMKSIKTRYSAQNLMNYAKNQYPGQKIVYAYEAGPTGFGLYDDFVSEGNICLIVSPASIPSASNERVKTNRLDSKKISENLRGGQLKSIHVPSEVYRELRHLTQLRDTFVKEMVATKLRIKSLLLFEGIEFPHSRNSAQEWTCEVKNQLRELFCSQTVRFKLDSLLNNLEYFHKNILETSKYIRQFCANNEEIKQNMEYIQSVPGIGGITASQLLAHIGDWRQLKRPNQIGAFLGLVPSEDSTGDDINRGSITRLGDHRLRNKLVQCAWIAIRKDKELKDFYQRIYNTHNKKFAAKVAIVAVARKLTTRIFAVLTEQRKYELKERVSLNR

SEQ ID NO: 502252 - protein, 373 aa, unidentified
MPKYSTAFGMDVHLRSTTVCALDADTGEAVTRRFPGNPWGEIAGWMDGFPGPSLAAYESGYPGFAPQRELAGLGVECVVAAVSKIPRSAADSASKNDRNDAARMAKAILAHDISPVWVPSPEVEGIRDLAGAYDGATARLATAKQRLLAFLAKRGFVYGGTTPAGNPRKYWTYDFLRWLDKVRPEDDGGVRTLAALRNEVEAAAEARADLLSEYRAAVDASPIAAEVAALQSIKGCAFALAAAFSAEVGDFTRFRSGRQVTAYFGLAPSQRSSGDSVRLGGISGAGNALVRKLAVEGSWCYAAARHQPKLMPRDTGVPLEIRMHGRKGSERLLRRREEMLARGVPAAKANAATAAELVRWLWALGAMCREGAE

SEQ ID NO: 502253 - protein, 320 aa, unidentified
MKMIYDTTIPDGKKCGGVDVGKDFLDAAVEGGAALRSPNTQEGRAALVEFFRTHDVGCVGLEASGGYEIEIRNDLRSAGFEAALLQPAQVRAFAKMIGQRAKTDRIDAALIARCVAVLKKPAVQEDLRLAALAERLTFLEQIEEDIARLCTRRDRFREPDLLAKLAAEIKRRVADRKAALAELVALLRVHPDLARRFDLIKSIDGIGPRTALSLVIRMPELGSLSREQAASLAGMAPVTRESGRWTGQAHVAGGRKRVGRALFAAAQAACQRWNPQLVAMYKRLRAAGKHHSVAVVACARKLVIYANTVLAKDTPWTSRC

SEQ ID NO: 502254 - protein, 377 aa, unidentified
MSKLRFVGLDVHADTIAVAVAEAGGEVRSLGIIPNRLESIRKMISRLAAIETLKCCYEAGPTGYVLYWQLAQMGVACEVIAPSLIPTKAGDRVKTDRRDAEKLARCYRAGELTPVWVPDADHEALRDLVRAREAAKKDQLRHRHRLGKFLLRHGKRPTDAGKAWTQKYLNWVRIHVHFEQPALEATLKHYREEVDHIAERIAKLEQAIDEAVKQASPEIRAVIEALQALRGVAQTTAATVVAELGSLSRFASPTQLMGYSGLVSSEHTSGNRVQRGAITKSGNAHLRRVLVEAAWTYQHRPNVQGRVLRRQKLLSLSEEAKRIAWKAQERLHKRFTALTARGKESNVAAIAIARELLGFMWAIAVHTESQSKPAKAA

SEQ ID NO: 502255 - protein, 338 aa, unidentified
MAVKVIGLDTAKHVFQVHGADASGRAILHKRLRRSQIPDFFSNLPKCVVGIEATQGAHYWSRVIGSFGHEVRLVAPQFVKPYLKGQKNDARDAAAICEAISRPEMRFVPQKSIAQQDLQALHRIRSRLIGCRTQLGNQIRGLLAEYGIILPLHLSEVRKQLPELFSEDHPLLTSFSRELFASLYEELCALDERVQAMEQRIQRVFATNEQCQKIAAVEGVGPLTATAMVAAVSDGKVFRNGRQFAAWLGLVPRQHSSGDKQRLLGITKRGDPYLRMLLVHGARSVVYRSAGKTDRRNLWIADKQRKLGTTKACVAVANKNARIIWALLAKDEQYRPAA

SEQ ID NO: 502256 - protein, 349 aa, unidentified
MMIIGCDYHPSFQQIAFVNTETGELEERRLAHREEAEQFYRQLKEQDLVRVGMESSGHSRWFERLLRDLEFELWIGDAAEIRTKRVRKQKTDRQDAQLLLRLMVEERFPRIWVPDAENRDLRQLLWHRHRLVQTRTRVMNQLHVVALNEGLRRKKALWRPAGRQELESITLAPWAGRRRQDLLDLLDQLTPKIQQLTRALEEEVEKRPVARRLATHPGVGPLTALAFELVIGTPERFHCGKQIASYVGLVPTEESSGDRRRLGHISKQGNVLLRFLLVEAAQVTVRSQQEWRSKFFHLAMRRGRKIAKVAMARKLAVHLYWMWRKGLDYGELHKLGSHAGEPGNRDGAQ

SEQ ID NO: 502257 - protein, 343 aa, unidentified
MNYFAGLDVSVKDTSVCIVDETGKIRREAKVASEPEALLQVLRTAGYHFKRIGLEAGPLSQWLFGALAEADLPMICVETRHMRAVLKARINKTDRNDARGIAQMMRVGLYRPVHVKTLRSQKLRMLLTHRKLLQSKAIAIENDLRATLRNFGLKVGMVGTAKFEARIKELIENLPDLILLVEPLLVVRRVLREQLNLLHRRMLAVVRDDAICRRLMTVPGVGPVVALTYRATVDVPARFRKSKSVGAVFGLTCSRDQSGERDRPGAISRCGDEMMRAMLYEAAQAMLLRSAKWSWLKVWAMQIARRRGMKRAIVALARRLAVIMHRIWVDGTEFRWTRDAAAS

SEQ ID NO: 502258 - protein, 433 aa, unidentified
MKVKYEDRQKQKVIAITTDTLVVGVDIAKNYQWARFVDFRGIEHDRALKFKNSRGGFETILARIREICKKENFAKAVVGMEPTGHYWKAFANWLEKQDGIKVVLVNPYATKQAKELDDNSQTKSDKKDALTIAKLVKDGRYFELYLPHDVYAELRGLSTTRTGLNKRKNALKNTITAVMDEYFPEYEEVFKCPLSGKASRHILKTCPFPKFILELGEDGVTDEIKKAVKKTVGRKKAAQLIETAKESIGVDYGEEAAGLKLRLMLEELELLEKQTEELEGQMADALHQTDYADFLLSIKGIGIVTLAACLGELGDPTRFEDSRQMSRMAGYNLVEDSSGKNKSGTKISKRGRKNLRCVLYQMALTMVATNDEMKQLYHYLKTREKAPLRKMQALIVVSKKILALIHTLAKKKENYEPGKVFGHVRREQMKAAA

SEQ ID NO: 502259 - protein, 400 aa, unidentified
MLSIGIDVSKGKSTVCGMKPGGEIVYAPFEVQHTREGMSELVSLLRSSGEEVRAVLESTGSYHCPVVAALLENGIFVSVVNSLRMKRFCSQSIRKVKTDRIDAMQIALYGLAYWQELQPTRLPEDTYRELQLLARQYYQMTSILIKAKVDFNAICDQVLPGMQELMNDHAGRHKLSDFVLRYRHTTHILEMGETRFRKDYCKWAEKKGYRNCERMAVLIFATAQNGIPVLPNAPSTQIVITEAIRVLHTVEASRDAILTQMQALAKTLPEYSLVREMPCIGDTLAPRLIAEIGDVRRFHSKRALIAYAGIDAPPYQSGKFCANNRHISKRGNRYLRKTGYEVMQSYVMHKPANDPIFTFIEKKRGEGKSGKLAMVAGLNKFLRIYYGKVTELYRSLSAIE

SEQ ID NO: 502260 - protein, 328 aa, unidentified
MDTADGEARQRDLHHQQDDIRAFYSQFAGDVVVGFEASSYSRWFEQLLDELGHQLLIGDAAEIRRLARRKQKNDHRDADHILDLLIKGEFPRVHRPSPQSQEVMRQLRYRHRLVKIRTMIKNNLHALALGAGVSLRTQIRTVKGRERLEALALPAVLGGQRDEWLRLLDTISDQITAVEKWLTASARQDERVMKLETHPGIGLITSLALVHILEPVSRFSTARKVVAYAGLDPVEHSSAERKRFGSISKEGCRFLRFLMVETAQKAVNGDQELKAFYYRLVQRKEKSKAKVAVARKLLIRGYIMLRDQIDYAEFLRRGVEARSARCVA

SEQ ID NO: 502261 - protein, 355 aa, unidentified
MQSNKISFKGQNIYVGIDVHLKTWHVTTLTESGYKYSFAQHSDAKELFDRLNKKFPEAHYKSAYEAGFCGFSVHYALTELGFENIVVHAADIPTTGKEKAMKTDAVDSEKIAWSLKRDELRGIYIKDKCFMDDTNLMRLRQRFIMDLSRQKNRIKHLLYTQGVTYPERFHNSETHWSRNFMKWLREEVELLSEEKMALTLLCDQVENTRMAILTVTREIRRLSTTDKYRENFSLLTSVPGFGLITSMSMLTEFDNNPTRFPNERKFVAMLGLIPTCHNSGEKKVSGEKTNRGNKQLGPLIVEASWVAIYRDYQLGAYYSSCCQSMKPHKAIIKVARKLACRAYAVLKTKTSYVLS

SEQ ID NO: 502262 - protein, 340 aa, unidentified
MPLYGGIDLHANNSVVVLLNDQDQVIYQKRLPNHLPVILEPLSLYHREIEGVVVESTYNWYWLVDGLMEAGYHVHLANPAAMQQYNGLKYTDDRSDARWLAHLLRLGVLPEGYIYPKAERAVRDVLRKRAHLVRQHTANVLSVQNILARNTGGRFSLKRIHEFTKQELEALLPEADQMLAVTSSLAVLDCLSHQIKALEKSVHQRLRHTPAYEQLLTVKGIGPILAQTIALETGDIRRFPTVGHYASYCRCVDSTKLSNGKRKGQGNVKNGNPYLAWASMEAAQFALRFQPAAQRFYQRKLAKTNNNTILARKAVAHKLARACYYIMRDLVPFDAMKAFG

SEQ ID NO: 502263 - protein, 272 aa, unidentified
MSKSLRFIGLDVHKDSIVIAVAEAGREPAYVHGEIANDWGILRKALRRLAKGHLLQCCYEAGPCGYGLYRKMKEAKIDCILVAPSLIPVQSGNRIKTDRRDARKLAHFLRSGDLTEVFVPDEEAEAIRDLERAREDAKKAQRVARQQLGSFLLRHGRRWNGSHWTQKHMDWIRRQEFPHQAQQRVLVDYLKALADATEREEQLVKDLAELVRQTELYPLIKALQAFRGVRLITAVTIAAELVDLRRFGSARQLMAFLGLVPSEHSSSTTQRR

SEQ ID NO: 502264 - protein, 390 aa, unidentified
MPSVSTISISPIFWVGLDVHKESVTAAVFRNRDPEPMRVDRLPNDHKRIRRYFERLSAEGRARACYEASGAGYVLHRALTEWGIPCELAAPSLIPRRPGEHRKTDRRDAIKIARDFRDDRLVLIHVPTEAEERVRDLVRCRETFQREILKSRHYILKFLRRRGFIYREGTHWTTRHMNWIRQVLQPGTLADDDRTVLTEYFALLEYKLQRRDELDRRIEELALTPRYKPVVDRIACFRGFKTHAAMVLATELGDVRRFDSPRKLMAYLGLVPGEHSSGERRRMGAITKAGNSRCRHVLVQAAWCYRRRPAVGASLKRRQEGQDPSVIGHAWKGQHRLYKVFHRLAATKPNQVAATAVARELVGFLWAVLKDIDFDSLSHDFTTPEDAHAA

SEQ ID NO: 502265 - protein, 426 aa, unidentified
MNCTQNHKINQVTEQTLVVGIDIAKRTHYACFVDDRGRVLRKSFPFLQSKKGFRQLNEAIQEAMQAFGKSQVIVAVEPTGHYWLNLAYFLEENGIPLVMVNPAHVCRSKELDDNLPTKHDAKDALVIARLAKDGRFLVPRLLHEIEADLRVGSTLKEKLRKEQTAVKNAIIRWTDRYFPEFWTVFRDLGKTALSVLEWTPFPADMAGRTAEELIEVYRQSEGLKCPQKAKIQALIDAAKDSIGVTEGTTMARFEIAALVRRYRQLEAEIAALDAELKALVQTTMEYQWLKTVDGLGDATIIDLLAEIGSFAHYRDPRQLVKLAGLTLKENSSGQRKGQKRISKRGRKRLRSVLFRAVIPLIRHNEAFRELHEYYTTRSVNPLTGKQSIVALCRKLLNVLFAICTKKQAFDAERMKQDVLSQVQRAA

SEQ ID NO: 502266 - protein, 410 aa, unidentified
MGLFCGIDWATEHHDVAVIDDDGHVVARGRVSNDAPGFAALLTLLAQAGDSAADPIPVGIETDRGLWVAALRETGRTIYPINPLAASRYRARYGVSGAKSDATDAVLLANIVRTDPGAHRPLPADTELAQAIRVLARAQQDAVWARQQIGNQIRDLLKDFYPAALTAFADLPEGGLARRDARTVLAAAPTPAQAAKLTPARLRRLLIKAGRKRYLDRDIARLREVFTDTYLHQPPVVENAIGIHLAALLGQFEAACTAADALAEAAVAHFEQHPDAEIITSFPGLWMLVGARVLAEIGDDRSRFADARGLKAFAGSAPITRASGKKTVVLHRYIKNRRLAAVGPIWALGSLRASPGARRHYDARRAAGDWHQQAQRHLFNKFLGQLHHCLHTGLRYDEHLAFPPPLQLAA

SEQ ID NO: 502267 - protein, 397 aa, unidentified
MNISKNKSKNNKKVVKYDYYLAIDWSQVNCVLAVKKSNSLEPKTIEFNSDQNSNLKKLKEKLKEIPGKKILAIEETTSTHWLYVELKEYVDKIFVCDPYRNSLLSEGPKNDKTDSRKLCKLLRSGMLKEIFHSMDEDYKIRKLESSYGDIVKAGVRVLNQRSAMYRAIGLAVKKDKLPKDDIYSVIERNQNKAIELYNEQKEDYEKAFKELKRKNEAIKNLCSIHGIAEIGAVKIYSRVIEAERFENKYKYWAYCGLAKHEKESGGKSYGKKKPRYCRVLKGVYKTAAWTAIGGKNDIREYYEYLLTEKYYPEEKAINQIARYVAKVSLAVMRNNQSYQPYKWRKEKDEVQSEATLSFLRHRHKNKKRTQSETTVSIYSRGSAYPSTGCSPAEPTYV

SEQ ID NO: 502268 - protein, 410 aa, unidentified
MKLYCGIDWATQHHDVAVIDADGRVVARRRVDNDAGGFAALLTLLAEAGDTPDSPIPVAIETDRGLWLAALRATGRAIYPINPLAASRYRARHQVSGAKSDATDAVLLANILRTDPDAHRVLPADTELAQAIRVLARAQQDAVWARQQIGNQIRDLLKDFYPAALAAFADLPDGGLTRRDARTVLAAAPTPAQAAKLTRARLHRLLVNAGRKRYLDRDVDRLREIFAHAYLHQPPQVEVAMGIQLTALLGQFDAACTAAADLAEAATAHFERHPDAAIITSFPGLGNLAGARVLAEIGDDRTRFADARGLKAYAGAAPITRASGKKTVVLHRHIKNRRLAAVGPIWALGSLRASPGARRHFDARRAAGDWNHQAQRHLFNKFLGQLHHCLHTGQHYNEHQAFPPPLELAA

SEQ ID NO: 502269 - protein, 379 aa, unidentified
MGLAPEPPAGPRAWLQIDVPAPSDLAVAWPERGMNALRRSGIRHARHGPPSPMWKWSVLMAVMIGIDPHKGSHTAVAVTAAEEPLGTVRVRACPGQAGQLVAWAAAWPERTWAVEGAAGLGRLLAQQLIAAGERVLDVQPKLAARVRLLHTENTGKSDPNDALSVAVAALRSTTRREVIANDHAMVLKVWAKRHRDLSRARNQAACRLHAVLCDLVPGGVADEITAGRAARILGQIRPAGPAAEAHRELAAELLADIRHLDAQRREVKKKLATAVKASGTSLTEVFGVGPVIAATVIGDVVTVARFPTRDRFAAYNGTAPTEVSSGEKKIYRLSLRGNRRLNHAIHMAAITQISHAHSDGRAYYQRKLAEGKTHKEALR

SEQ ID NO: 502270 - protein, 407 aa, unidentified
MQATPTNSTFAGIDWSWQHHALCVVDNDGQRIEEATVSHTRPGLAKITTLLRRHGVARVGIERGDGPVVEHLIRDGFQVVVISARQVKSLRARYGSAGNKDDRFDAFVLADALRTDAGRWTIVQPDSEETIALRMLVRARHDLIDHRIAVHNQLLAVLQHNFPGAIGLFSQLDIPISLAFLRRFPTEAKASWLSELRMAHWLKASGYCGRHTPARLVGHLCEAATGRVGGAAAEASEVIVLTLVDLLTTLRHEQEQLEARIKEALLTHPDGPIFQSLPRAGTVRAATLLAEIGDCRARFPDPASLAAAAGVAPSTRQSGKHLNVTYRRGCNKQLRAALVDWAQDTPRANAWARDTYDRARARGCRHPHAARILAQGWTRILWRCWHDHTPYDPDQHGRLSTLAQEAA

SEQ ID NO: 502271 - protein, 397 aa, unidentified
MMTLGIDVAKKSHNATLLDQAGNMVFGNFTFVSNRQGFERFIHQVNEHHATPDCVRIGMEATGNYWTILYHTLKEKGYDVCVINPIITSARRNIGVRGNKTDSEDSKLIATILRESNPRESSIPNELTKQLRDLTRMRYECAQAIVSEKQRLLALLDLTFPEYSLLFSDVFGVASREILSQFPTANMLARVNITRLTSLLKKASRGRLGKKDAQRMKQAARTSFALKGELDGLALEIKFIVQRINLALEQVKQLDERLKDHMKDKQALLKSIPGIGDVWAPTILAEIVPFFHPEEKNGAKKLVAAAGIDVKKNDSGNMEGRGRMSKRGSKYLRTAVLQSAMIAVYTSKDPLFLSVYDRQRKRGKSHMVALSHVGNKLLHVIFSVLKNERNYKPILSK

SEQ ID NO: 502272 - protein, 355 aa, unidentified
MDSAKYIGMDVHKETISIAVLSASGKLVMELVIETKSLTIIQFVRGLRGELHVTLEEGTWAAWLYDLLRPHVREVVVCDPRKNALLKTGNKSDRIDARKLAELLRSNLLRPVYHGEHGVRTLKELSRSYLTISGDLARVMTRLKALYRSWAIPCAGKQVYAPRYREQWLDKITEAGVRRRAELYYQQLDALRALRQQVRRELLAESGKHKASQLLCQVPSIGPIRAALLIAILQTPYRFRTKRQLWSYGGLGIETHSSADHRYVDGQLQRSKRQVSLRGLNRNHNHELKNIFKGAAIIAATKPGPLQQFYAALVAKGMRPEMARLTLARKIAAIILIVWKKGVCFDAQYLKPQTA

SEQ ID NO: 502273 - protein, 371 aa, unidentified
MSMMHYRYVGLDVHCATISVAIADPDQAPVSYGKIPNEPTAIHKLMQRLGGAERILRVAYEAGPTGYVVQRQLSELGIECMVVAPSLIPVRAGDRVKTDRRDALKLARLLRSGDLTPVWVPDREHEALRNLVRARAAAKADQLRAKHRLSKFLLCHGCRPPQGVHNWSKRYFGWLGGLTFVHQADQVVFAEYLAEVVAAGERLKRLDMALRHCAQTTPQAALIQALQAFRGIGLLSAVTIVAEAGDLRRFPTAPQFMGYTGAVPSEASSAGKQSRGRITRTGNSALRHMLGEAAQHARHAPSVSTELKRRQKHVPQPVIELAWRAQLRLHARYRHLSGRLGPHKAIVAVARELAGFVWATGALLAESTPAA

SEQ ID NO: 502274 - protein, 344 aa, unidentified
MQIARIGLDLAKYVFEIHGVDARGKTILCKTLRRHAVSAFFANLPPCLVGMEASNGAHFWAKAISELGHDVRLISPQFVTPYVKSNKNDRNDAEAICEAVGRPNMRFVPVKSAEQLAVQAVHRIRSRLVADRVRLVNQVRGLLGEHGIVVAKDIGNLRRALARIVGDNEDRALNPLVRALMGELREELTELDVRIAGYDRKIRELYRNSEICQRLGKVEGIGPVTATALVAAVGDRSSFKNGRQFAAWLGLVPKQRSSGGRARLFGISKRGDRYLRTLLIHGARSALGRVRDKQDPRSLWLGKMRQRRHPNIVAVALANKNARIAWSLLTSDSVYDASLSVCAA

SEQ ID NO: 502275 - protein, 378 aa, unidentified
MQSTQRIDGKAGLDSSLELAGKSWKVALICGKQANATVIRLDDAHRWDRLLHFLQVIEQWRGKWDLARDCAVQVIYEAGQDGFWIARELQARGVQVFVVDAASVPVARHARRVKTDRLDALKLLEVLRSWLRGERSEVRMLHIPSEAAEARRLLSRERGLLQKEIGQHRDRMRKRLLLYGCSEELDSSFVERLIAGEVRCANGARLPEELWQWLMRECERLELALKQLRALEKTLLQQLPETVQRTVSDLARLSGVGWVGAMRLVLELFWRDFANRRQVGACVGLVPQPYDSGNSHSDQGISKQGNRRVRALLIEMAWLWVRYQPGSDLAQWFAKRTAAGSGRGKRIAIVAVARRLAIALWRYLRDGVMPAGAQLKAA

SEQ ID NO: 502276 - protein, 328 aa, unidentified
MIKRTTICAGIDTGKRKLDVGLDGSGKQLQVENTPEGHKVLLAWLSQHRVKRVGIEASGGYEQPVVAELRRKRFVVVVFQPAQVRAYAKFHLQRAKNDKIDAALIAACTAAVRKIHAAPDPRLLPFAEQLTMIDQINEDTARLKNRIESCRNAQIKKLWKEDIARLEKREKAELKALVASIRKHPDLAKRLGLINSVDGIGLPTAVAILVRLPEIGRITREQAVALAGLAPYDDDSGEQVGVRHIEGGRKRLRRALYTASLAASFRWNQQLIQLYQRLTAAGKEHKRALVACARKMLIFANTVVARGTPWCDEPPAVKASMAGSLSVS

SEQ ID NO: 502277 - protein, 332 aa, unidentified
MQRKQISFKGQKIFVGIDVHKDSWRVAIAPEIGVVKGHSQNPSAKELFDFLKKHYPDGDYHAVYESGFSGFSTYYALTDIGIDCIVMHAADVPTTQYEEFMKTDRVDAAKLVKSLKAGLLTGIYIHERDNIDARSVVRLRKTTQKMLGGCKSRVKHLLHCNGVVLPERFSRPGTHWSKAFIRWLKEEVRLISSTRDSLDILIEQVESLRKTLLSATRKVRQLSRSDRFKPQYDLLTSVPGIGISVAMSILTEIGDISRFRNEREFASYLGLIPTSHSSGDKVSHGERTFRGNKKLGPQLVEAAWISIYRDHGLGCAYMAYKKRMEPQEAIIR

SEQ ID NO: 502278 - protein, 428 aa, unidentified
MQYALTQVLPDVPAGGVCAGIDWATADHAVCVVGMAGRVTDRFCAAHDKAGITAIISRLRRDKVTEVAIERGDGPLVDALLAAGLTVVVITSRQVKNLRSRYTAAGAKDDRFDAFVLADTLRTDRARLRPLVPDTPATISLRMAVRARRDLVAHRVAACNQLRAHLAVAFPAAVGLFHDLDSPISLAFLARFGSQDAAADLDEQAIGAWLATVAARGRPAPASELHARLRAAPPGATGPDGAARAGVTAALTATLTALSAQIKALETRIAGQLAAHPDGHIFTSLPRPGTVRAARLLAEIGDCRPRFPDPESLAGLAGVAPVTRQSGKHTTIGFRWAVNRQLRDAVCDFAADSRHASPWAAAIYDAARDRGKDHPHAVRITARAWTYVIWRCWHDGTAYDPAKHNALQAIQARQQATLAASPAPQEDR

SEQ ID NO: 502279 - protein, 359 aa, unidentified
MVVVGVGMVVVGVDAHKRIHTLVAVDQVGRKLAERTVAATSDGHLQAVRWAAQWPQPQVTFALEDCRHLTRRLEADLLRAGHRVLRVPTRLMATARRSGRQPGKSDPIDALAVAQAALREPDLPVAHLDGPTRQVKLLGDYRADLVVERTMLFNRLRWHLHELDPELQVPSRGLRRYKVIDELAARLVGVDGTVAQIARELLTRCRELTVRINQLERDLRDLVCVLAPGLLAIPGCGVLSAATILGETAGAARFRSRHAFARFNGTAPIPVWSGNTVRVRLNRGGNRTVNWALHMIAVTQARGVGPGQAYVERLLAGGKTRTEALRLLRRRLSDVVFRVLLADEHRQAATQPADTPIAA

SEQ ID NO: 502280 - protein, 458 aa, unidentified
MSKRSKKTKSQSFKAPSLPRHLQHINLNAAGIDIGSERHLVAVPEGRDEISVREFGTFTADLEVLAAWLKQCGVTTVAMESTGVYWIPLFELLERRGFEVKLVDARHVKNVSGRKSDVLDCQWIQQLHTYGLLAGAFRPPDEVCVLRSYLRQREMLIQTASMHIQHMQKALQQMNLLLHNVVSDITGLTGMKIIKAILAGERDPRVLAGNRHERCQNDAATIAKSLVGNYREEHLFALRQAVDLYETYQAKIADCDQAIIKQVEKQPDISDDEPPTPEKQVQARDRIRDGVDVRDLLFKKSGVDLFAIPGLAADTLLTLVSEVGFDMKPWKTEKHFASWLGLCPGTKKSGGKVLNNKTKRNPNRATQAFRMAAASLYRSQTALGAFYRRIKSRAGGQQAVTATAHKIARIYYAMLTKGTSYVELGQQAYEQRYKQRRIDHIMTQAKSLGFQLVPCVTS

SEQ ID NO: 502281 - protein, 335 aa, unidentified
MRMYAGLDIGGKRTAICVIDGSGKAVWRGTVDTHPEMIDRALQRFNGSLDKVGLESGPFTPHLFRSLEAIGYPMICMDARRAADAIKSRRIKSDKGDAWALAEMLRTGWFSSVYVKSVDTHRLKALLGARDQLVKLKRSLGNQVRGLLRPFGIKLPSRAGGKKFDEAAYLATRNDPILHAAIRALLESLASIEGQQARLDDELDELAKRNEIAWRLMSVPGVGRITALAYMAAIENVERFRRMRDIGAYLGLTERRYQSAETDVGMGISKQGDAMARHYLYEAANVLLTTVKKRFALRNWGLRLVKTIGPKRARVAVARKLAVLLGQKEPSMRAS

SEQ ID NO: 502282 - protein, 343 aa, unidentified
MAERSFAHTGTAVTEFAEWLSELAGDPGCVAIAIEIPRGAVVETLVERGVHVYAINPKQLDRFRDRHNVSGAKDDRRDAFVLADSVRTDRPCFRRVRLEAPLVIQLRELSRIDEDLRREANQLTNRLREQLQRFYAQMLKLCPAADEPWLWALLELAPSPASRGGCGPSVLKSCSRNTAFAACGRRSWERCCRPPRCTSRPGWSRLPPNTLRCCCRVCAWSTPSASAAGRASKLCSKNSRARTTEMKSRPDTAMSRFFPPCPGSEKSWPPRSSPRPPVLSPSVITMALRAHAGIAPITKQSGKHKMVLMRYACNGRLRHALYHWARVAVMCDPPSKNYYAALR

SEQ ID NO: 502283 - protein, 400 aa, unidentified
MKRLSGGIDIGSASHHITILDEEDHILYDQKVSHKLNEFTESIKQFKKIEKKEKGEISFALEGKNGYSAPFDRILIDQGFTLYNIDNLKLKRFREAFAGEWRDDGRDALMLSKMLKLKKHINSKREKVFIKIENPSPVTESLKILSRHQQTLIDEKVRLVNRLCKKLLEVCPEILKLGKVENKKTIAILTKYPDFSKYKKITLKSLLKIKGIGKIQAPFLLKRLNNMEYIGLTDIYKTIILSYAKRISELQEEIKDIDKKLDEIGTQSKEVNHLKTIPGVAIKLSSRLIGEIGNINRFPSEKQLAVYCGIACVNNDSGKVTKAKAVYKANKICKQTLIIMAGCSIRLNFQCSTYYLKKRAEGKSHNHTLRCLARQLIKVIYKMLTEDRDYIVRKALKKVA

SEQ ID NO: 502284 - protein, 348 aa, unidentified
MKKLVAGMDLHSNNVVIGIMDLDGQRVASGKVGCELKAVTQFLAPYQARLEQVAVESTFNWYWLVDGLRAQKYPVVLANPAGMEPYSGLKHADDTSDAFFLAELLRLKILPTGHIYDAQLRPVRDLLRRRMLLVHQRTALLLSFKSLYARTTGRTLTLTELKALQIPQARELYQHPANQMIAGLQLEHIEQLNASIAELERAVLAAARELPSYARLNTLPGVGRILGMTITLEVGDIQRFAGAGNFASYCRTVKAERLSNQKKKGENNAKCGNKYLAWAFVEAANFARRYDEPCRRWYDRKAAKTNSIIATKALACKLAKAAWHVMTAGVDYDPQRVFGSRPAPPLKA

SEQ ID NO: 502285 - protein, 289 aa, unidentified
MPIVGGLDIHRKQITFDYLDTGTGQVQRGQISPADREHLRAWLARFSGRGDVAFAVEGCTGWRYVAEELAAAGVAAHLAEPADTAFARGRKRHAKTDKTDCRHLRQLLAEGRVPQCWIPPGNVLECRAMLETYHDLRREHTAWVQRIHAVLFHQGAPALGGGTLRTGPGLAALRAAAAAHLSPAGQLQVATALDVLEALEDRMHELRHQLTAAARRLAGAKVLAARLYGVGPIAALAMTCWLGGAGRFSSSRKAVRFAGLDVTVWSSDRKGPARPAVPAGTAGAALGPL

SEQ ID NO: 502286 - protein, 351 aa, unidentified
MYAIGADIDMVKAVLYALDYKGEPVKEFNKLFRRTRLTEDGLRDVREWLLESGQEYCILVENSTKTHHMAWMMESLGIFFIVGHSTDLRQITKSDSKTDDIDAEKLASYMLARLHGANQFHVSYYCDKETMRRRTLCRMAKKTVTSKGACKRRIRMYAHMFGLTIPSGDLEHTSVRKSVRDIGDLELDMMLDELEQLIERSKMQKKRIETEFRGRPIYERIQEIPGFGPITSAYLDALICDIGRFPNAKAFQASLGVVPRVFQSGEKDRNGKITKKGEPHARWLLYQAVSAHVREFQDSPVTRFFNRLNDGSIEERKARHEKVLMKRDAMIAASRKMAAIIYTLLSKDRHW

SEQ ID NO: 502287 - protein, 443 aa, unidentified
MYNATRLTRGDRRRNEKLRRLRAVVRPELAIVAVDLAAARQAVVVADHDSCVLARRMFSLSPWGIDQILDWADVQARAAGFAGLVLTCEPTGHRWKPLLERASAQGVGMVCVQPMLVHRAREGEDFTKDRSDFKDATLIARLTGELRCYPPIALAEGWARLRHLGQRRYAVLTQATAARQTLRDLLECAWPALLETAAAPFDSLTWQAAARVALDPERVRRMGPARFERAVARALPKVGGRRRNLRILAAVMTAAREPGGLLAERAGALERARFAFDDWQHARGELCEVERRMVETLDTLGLAELVTSVPGLSTVGAAAILAETADPALFDSPRTWVKHAGLCPRANESGSFRGKTTVSGRGRPDLRTAAWRAIWGLLPHNPVYAARYRHLTTRARNPLGDGQARAALAAALLRQLHVIVTQRVVWDAEIARGAGKEVAPLAA

SEQ ID NO: 502288 - protein, 314 aa, unidentified
MYHYIGIDVSKKVLNIFDGKKDLIFDNKENLSSFKKYLKKRYPDFSSLVILFEATGIYSYHLKAFCAENNIKACIINPQASHNFAKSLGKRSKTDTTDARTIWAYHKLIGEKDISIPKVDRKIITLSSYLTSYRLTLKQRLALTNHLEGVKDKTLYRLLKKELGRLCKLEQELLVRMDTYIKKYPKLNEDYQRLLSISGIGQKTAISLLTLFQTYPDTNRNQITALIGLDPIQRQSGTSVHGRSRISKHGNQMMRKSLYMPTLVSIQYNQKIKVFYDRLVLKHKPKKVAVIAAMRKLLLIAHAIYKNKTVYVPG

SEQ ID NO: 502289 - protein, 338 aa, unidentified
MSKFSGIDLHSNNAVVVVSDERDQVVYEKRHANDLAGILAGLEPYRDELVGVVVESTYNWYWLIDGLMDAGYAVHLANTTAIKKYEGLKYSGDEADAAYLAKLLRLGLLPEGYIYPREARAARDLCRKRMQLVQYRTAQILSIENILATQTGARLTSAKVQRLTDEQIAALGFAPDVTLAIQANAVVMRSLQQQIEKIEERLHERVQLSADYALLKSVPGIGQVLATTIMLETGSVKRFATVGNFSSYCRCVQSLRLSNGKKKGEGNAKNGNHYLAWAFVEAAHFALRNCPPAKRFYERKKRQRNGAVATKALAHKLARACYHILREQKPFELARCFA

SEQ ID NO: 502290 - protein, 365 aa, unidentified
MTTRRRSTSSTTDPPVPGEVVLGVDTHGEVHVAAVVSPLGKVLGTESFPATAAGYRRLLVWARKRGRVRRAGVEGTGTFGAGLSRYLMTQQIQVFEVNRPDRSARRQLGKSDPLDAQAAARAVLSGRARAQAKSGDGPVHSARMYKIAKDSAVKARTQAINQLKAVLVIAHPALRERLSSLGNAELFRTCARLGPPGGGGDEDAVTQATYLTLRMLAERIEQLTGQINELNQRLTELVEHHAPQLLEPVGIGPDSAVTLLITMGDNPERLNTEASFAALCGVSPIEYSSGRRSTRRLNHGGDRQANAALHRIVFTRLRHDPRTRAYYERRTQEGKTRREIIRCLKRYAAREVFNLVRPVARTPTL

SEQ ID NO: 502291 - protein, 349 aa, unidentified
MTTQRLSYVGQSVYVGVDVHKDTYAVTCVCNKQIVKTATAKADPAGLTASLSPWFPGARLSTAYEAGFSAFVLHRALTKAGIMNIVVNPASIAVAANDKVKTDRRDSKKLAIDLSDGRLQGIYVPTEDEELARLLPRTRAQIVEHRATIARQIKAKLHQFGLIAPASRRLISNRYLREIDAWPLPPDLRVSLTFLAEQWRFATRQLIEMRRLLREQAKAHPAIEQVYRSVPGIGEVVARTLATELGDMTRFANERALFSYTGLTPSEYSSGPSVRRGHMSRQGSSRVRHLLIETAWRALPRDAVLKEIFDRIAATRGKKRAIVAIARRLTGRIRACFRQGTTYAVGTYA

SEQ ID NO: 502292 - protein, 482 aa, unidentified
MVVPNEEPKKPTKPNKPTKPNKLTKPNKSRERSLPVPVPVSAAALHVINPDAAGIDVHSDMHMVCVPADRDANPVRQFGANTADLQEIVAWLKKCRVRTVALESTGVYWIPLFELLESEGFEVNLVEPGQLSRCGARPKTDVLDAQWIQRLHSYGLLRASFRPPDSVLALRAYWRQRQMQVRYAASHVEHMQKAMEQMNVKLTEVVSDITGVTGMSIIGAILEGQRDPVKLAQLRDKRCQSSEDQIALALEGTWRPEHLFELRQAYELYQFHHRQITECDQQVQAELANFPNRAGEKTRTVKRRKRGRKSNDVRFEATGPLFQALGVDLTSIEGIDVGTALVILAEIGVDVSRFPTEKHFASWLRLCPPQDESNKTKKRRGHRKGTNRVTIALRMCARSLGKTMTPLGLFYRRIRSRIGGLGAVKATAHKLACLVYRMLKYGQQYVTQSMEEYEAKVKANMLKALKRKAAALGFQLSPLPTQ

SEQ ID NO: 502293 - protein, 461 aa, unidentified
MAGDDTETFDNNRRQLGGLPVVRRNVAGVDLGSERHWVCAPTQDGSGREITSFGATTSELVRLAEWLKARQVESVAMESTGVYWIAPHEVLEGQGLQVLLVDTRQLARVPGRDKKTDPTDCEWIQRLHSCGLLRGSFRPEEAVCMLRTLVRDKANLVAESGDWLRRMQKSLDQMNVRLHRAVSDIDGVTGLAILRAIAQGERDAHKLAKLRDPRCSKTEEEIAEQLTGHWREDHLFSLQQALKMYDAVQERIVAYEKEIVRKLGEMERDEQRGQTAPPLPNTNKAKMIKKRGQEAKRQALYRMSGVDVTQIDAIGVETVEVVLSEYGCDLSRFPTEKQFVSHVTLAPHVPKSGGKAVKKRKRNSASTRVAAALRMAALSLRHSQTALGAYYRKLAQRIGGDIAVFATARKLATLIYRLLRWGQPYLDEGAAAFESRYLQQRIKSLSAKAKQLGYQLSPASG

SEQ ID NO: 502294 - protein, 359 aa, unidentified
MDQLIRIGVDTSKHIFQLHGVNAAEQPVLRKKLRRKEVAEYFSKLAPTVVAMEASTGAHDWARLLGTMGHRVRLIAPQYVKPYVKRGKNDAADAEALCEAMSRPTMRFVPVKTAEQQAALMLAGSRERLIARRTQLGNVIRGYAAEFGLVMAKGTDKIEPLLARLAAAETVPPLARELFAIHGKEYGQLQAELEVVEAKLMAWHRDDACSRRLAQIPGVGPIGATMLVMKTPDPASFPSGRHFAAWLGLTPRDHSTAGKTRLGVITRAGDETLRSLLVVGATAVIQQARRGRGHHSPWLVSLLQRKPPKLAAVALANKIARTAWKLMMTGESYDARLAPTTPTRAVVTRSADQSIAMMP

SEQ ID NO: 502295 - protein, 322 aa, unidentified
MSVSVLGIDIAKQKFDVALLVDGKTKHKTCKNSAEGFETLMLWLEKQGIQKVHACLEATGNYGEDLAIYLHEAGHIVSIVNPARIKGFAQSELIRTKTDKIDAGIIARFCLAMKPDPWIPPSPEIRFLRALVRRVDSLIDMRSHEKNRLSTAHESVISLIKEHIAYLDQEIEKIRRQIADLIGQNPHLKQRKELLDSIPGIGKATIPHILAELDDLEKFNHVRQMVAFIGLAPKETLSGSSIKGKPRLCKIGNARLRKALYMPALVSIQCNPVMIAFYNRLKDKGKNGKVIVCAIMRKLVHVIFGVLKSGKKYDPNYKPASA

SEQ ID NO: 502296 - protein, 384 aa, unidentified
MNKNSILFIGLDTHKDFFEIAYFSPSHHSSVEHFGRISSSKVSLTKFVNTMQRKYPQATLHVVYEAGPCGYWVYRHLTRMGHLCFVVAPSLIPKKPGNRVKTDKRDAILLCTLLKNGDADPIYVPEPEDEAIRDLSRARERTMHDLNDARYQLKALLLRNNINYDGLANWSAKHLRWLTEIVLPHASQQFVLQEMIVTVHERKDRLERLDNELQHHVHHWRYYPVVKAIQAMRGVRLLVATGVVAELGDLTRFDHPRKLMSFLGLVPSEHSTGGKRRLGSITKCGNSRARRLLIEGAGSYRYAANVSTELQKRQEALPKQTVDIAWAAQVRLCRRYQRLMARGKHANIVKVAIAREMIAFIWAISREVVLPKVDLSKRIARVPA

SEQ ID NO: 502297 - protein, 427 aa, unidentified
MSERKSLELRVSVDVGCRRHSVAVGLSDGQVLEEFEITHRREGFQEFFSRIEKHQKAQGCKVAVAMEGYNGYARPLDSLVRQRGYRLYNINNLKLARFKEIFPGAAKKDRIDARKGLELFQLRDHLPLAKDVLQEVTGSPQENEILKRLTRRRRRLVNERVRVVNNLQADLQAVCPGLLEITTEASNQWFLNFVISGDTILQLARLGKSTLLKIPAVGRKYASLIQQWQKRAHFSEEAQWVSEMIQEDARRCLELDERIKTLETKIKEVAKSSKIANTLLSIPGFGAVCTSELAGEIGTVERFSKEGSLALYLGMSMLDNSSGKYQGTKQPKHVNTRAKAAMMTAVDRHRKYVPESQKYYEKKRTEGKTHNQAIRALGRHLCRIIYQMLKEQREYRVRSEKGDTQGRVDSRSCVKTKIRRPKISAHS

SEQ ID NO: 502298 - protein, 409 aa, unidentified
MEVLHPRCAGLDVHKKTVVAAFRIQEGNQVEVTVETFPTTTSGLLDLCGRIEELRIGHAAMEATGVYWKPVWHVLSGHVELLLANARHVKNLPGRKSDVKDAEWIADLDAHGLITGSFVPPADQQDLRNLTRTRVQLVRERTRHVARLHKVLEDANIKLTSFISDVLGVSGRRVLAAIIAGETDPDLLLKNLLVPRLKAKAEDLRESLRGFLRDHHRFMLKLHLEQIDSIDEAISRLDVRIDGHLRPFRYARELLTTVPGLSTTAANVVLAEVGADMSHFPTGNHLVSWACLCPRSDSSAGKRRSKRTMKGSHWLKPVLVQCAWSAVRVKGSYLRTLYYRLRARRGSKRAIIAVAASMLESIYHMLRDGVEYADLGAEHFDRVDQISYADRLVKKLQRSGYEVTIRKVA

SEQ ID NO: 502299 - protein, 415 aa, unidentified
MTDERRWYAGVDWASESHHVLLTDGDGRKIGEKIFKHGGEGLAEMAAWLMAMSGVAEPRQIHIAIEVPHGPVVETLIERSFKVHAINPKQMDRFRDRFTLAGAKDDSLDAEVMASALRTDPRCFRLLAVADPVVIELREWSRIAEDLGAERNRLTNRLREQLWRYFPAMLDLESDLGAEWLLDLWETAPTPHKAIRIREATVAKVLKRNRVRRFDAAHVLDVLRKPPVQVAAGTTEAASAHITTLIARIRLVNQQLREAHRQLDALTARLIPSEETGLGQRKQHDVAILASLPGVGRIVLATLLAEAFDALQRRDYAALRSLTGVAPVTKRSGKSCIVVRRQACHDRLANAMYHWARVAVQHDPRSRSKYAALRSRGHSHGRALRSIADRLLNVACAMLKNGTTFNPSLATEKSP

SEQ ID NO: 502300 - protein, 366 aa, unidentified
MASLPSGPGVVHVGMDTSMREIVCGVLRPGMEVPAVERIPNDEESVRRLIGKLGSRHLLAVCCEAGPSGYELHRLITSMGVACQVIAPSLVPKGGSERVKTDRRDAVRLTLGLRAAILTPVRVPSPAEEAVRDLVRARGDLLDDRKRMQQRLNAFLLRHGRIWSGGAKWTIAHRLWIGRQQFAEDALQEALDAYRAGLEAREAELRAAEARLSAWAGREPLAPAVARLSGYRGIAELTALTLAAEVVDWHRFPSARAFMGFTGLIPSEYSSGSRTRRGSITKAGPEGVRTALAEAAWAYQHRPAIGAGLRRRQAGLCPETLARSWKAQQRLHATYAKMTARGKPHGVVITAVARELAGFVWAEMTS

SEQ ID NO: 502301 - protein, 427 aa, unidentified
MPYHIAGIDVHKKMLAVVVADVEIDGDFHFNRLKVATTSADLRGLADWLIAQDVEEVVMESTAQYWRPVWEALEQHWRPRRRAREGAPRLAGTLHLAQAQSNRGPVGRKRDFPDAERLVKRLVAQELTLSFVPDAEQRLWRTVMRRKYQVTRNRVQLQNRLEALLEEAHIKVSSVVSDLLGVSARRMLQALADGETDPAALATLAAPRLRATPEQLCDAFHASTTLHPVYRQLLTLTLEELRMIEDHLGQLDQQMADLLTAHHDAVQRLAEVPGLGVDSAQQIIAEVGATAATFPSSKHLASWMGACPGNEESAGVNYNHRCPKGNRQMRRILNQAANAAVKAKGTIFAVVYRRIVPRLGHAQAIGAITHRLCRLIWKLLHERVRYEERGPAVSAEAKKVRARKMIRELRSLGYHVAPLPPPSSNPA

SEQ ID NO: 502302 - protein, 384 aa, unidentified
MSVSSHATISTQLNAIFVSLELSRSTWLVTSLAPGNGERMSRHTVPGGDIVALLARFCQLETKVRERTGISYSLVVIQEAGLDGFWIHRCLVNEGIESHVVDAASIATSRRSRRAKTDRLDGEALVRALLAYKRGEPRVCAMVAVPSVEDEDRRRIGRERRVLVGERIQHVNRIKGLLFAQGITGYEPVKANRRALLEELRTGDGRPLPNHISRQIERELDRLEMVIAQIDEVNKVRDAMLPTVEAVGTANAPGLLLQLRGIGHEFAGTLYSEGFYRHFANRRQVAAYAGLAPSPWRSGTIDREQGVSKAGNKRLRTTMIQVAWLWLRHQPGFELSQWFNQRVQDGGGRIRRVMIVAMARKLLIALWQFSTAGVVPKGAILKAA

SEQ ID NO: 502303 - protein, 331 aa, unidentified
MEIKEIIGIDVSKLTLDCCHHSSGSHKEFDNNLDTIASMVKWSLQVSGVSKKKLLFVFEHTGLYSDQLVQFLGGGDYLFNVVPGLEIKRSLGIARGKDDKADAKRIALYGYRVKDELKPFQIPSKTLEVLKRLMSVRKKLVTQRAGYIATLKEQARILSKQHNKVLFKVQGKMILTLDKQITIVEQEMNQLIEEDPELLNLYRLITSVKGIGGVTARFLIVYTVGFTTFESWRKFASYCGIAPFPFRSGTSIRGRTKVSHLANKEGKSLLSMCAASAIQSNPEMKAYYNRRIDQGKNKMSTLNIIRNKLLARAFAVAQRRTPYVNTMKFAC

SEQ ID NO: 502304 - protein, 386 aa, unidentified
MEGLPLLSAIVTMDRLPEISPPHMPSSVDKESSGIAPNRLDRRFDREVTPACGHPSKHTLALGDLRMQTTVTAPLYIGVDVSKDGLLICVHGSSVRRTLANQRSAIEAWLKALPAGSAIGVEATGSYHELLADLAHRKGLTVYVLNPKDVHHYAKGVGMRGKTDGVDATLIARYIAHEHTKLHVYRPPSPEQRQLQRLLTRRAKLSRSRASVQQSLQGIAGFAAPVRQLLERFDALIGLIDARIGALMNACPQRQAAGQRLRTIPGVGPVVAPALLCPLQRFAFAHADSFVAYTGLDPRPDDSGKRQGRRRLSKHGPSELRRLLYNAAMAAVTSRAWKPLYQHHLAKGLERTEALVIIARKIACTAWSIYTHNTTFDPKRITLSLT

SEQ ID NO: 502305 - protein, 445 aa, unidentified
MPRGRRRPTHPVTMPILHPDAAGIAIGAPEISGCVPLDRDPEPIRRFATFTEDLLALAAWLQQCRVTSVAMEATGVYWIPLYQILETRGFEVCLVNARHVKHVPGRKTDVQDCQWLQYLHSVGLLRASFRPPETVCAVRSLWRHRDTLVRLAGSHTQHIQKALNQMNLQLHHVLSDITGITGLAILDALLAGERDPHVLAQHRDPRLKASRETLAKALVGDYRPEHLFTLRQSLASYRHYQRLIAECDAEVQALLGAFAAAAPPPLPPPPPALRFDLRAELTRVLGTDLTQVPGLHTATVHTLFAELGADLTKFPSGKHFASWLGLCPDNRISGGKVLSVKTRHVKHRVAHALRLAAQSLGRSRSALGGFFRRMRAKLGAPKAITATAHKLARILYHLLTTRQPYAETRLAAAEAQHRQRTEARLRAQARALGFQLVPAIEQSVS

SEQ ID NO: 502306 - protein, 410 aa, unidentified
MTSFCGIDWAETHHNVAIIDDSGLLVAKKRIGDDPAGFAELIELLAEAGDSAEAPVPVAIETPRGLLVASLRATGRPVYAINPLAAARYRERHSVARSKSDHADAMTLGNILRVDAHLHHQLPADSELCQAIAVLARAHQDAIWARTKAHHQLRSLLREFYPTFLDVFTSRFPLGIASPEARDVLAIAPTAAAAANLSVSRIAAALRRAGRARGIDQAAAEIKAGLRKPQLRQPLLVETAMGKHALALLAALDTACANVDELGQASAELFQTHPDYAVITSFPGLADSTGARVLAEIGDDRTRFADARALKAYAGSAPVTRASGRSISITHRHIKNKRLANVGWMWAFNAASTYEPARRHYHQRREHGDRHAAATRHLFNKLLGQLYHCLQHNQTFDGVKAFPRPCSAAA

SEQ ID NO: 502307 - protein, 387 aa, unidentified
MPASGPRPGQVAIQISLAAIFVSLELSRSTWLITSLVPGGGDKMSKHSVSSGDIAGLLDHFTKLREKAHARAGASFPIIAIQEAGLDGFWVHRVLERAGIESHVVDAASILTSRRRRRAKTDRIDGEALLRTLLAYKRGEPRVCTMVRAPSPEEEDRRRLCRERKTLVAERVAHVNRIKGVLFAQGISGYEPLRNDRRSRLEALRTGDGRPLPPYLKAQISRELDRLELLLEQLKAVEAERNALLEPANDAAPVAVQALAGLRGIGPEFTAVLWSECLFRSFRNRRQVAAYAGLAPTPWQSGSVQHEQGVSKSGNPRLRSTMVQLAWLWLRHQPTSELSLWFRERVKRNNGRSKKTAIVALARKLLVALWKFSSSGVVIEGAMMKTA

SEQ ID NO: 502308 - protein, 321 aa, unidentified
MSNSIAWDHPSVKVIVGVDTHKHEHVAVAINDLGARLATFRAPANRAGYADLVAWAGTLGAVEAFGIEGTGSYGVGLASFVRREGLCVVEVNHCDRRKRRNNGKDDTLDAESAARSVLSGVATAIPKAADGTAEMVRQIKIARDTAIKARSAAIVTLKTLLVNAPGALREALEPLTDRKLIERCAALRPGEIIDPTASVKHSLRALAARWRTLAGEIGGHDEVLDTLTRRAAPTLRAGYGIGPDSAAEMMIVAGDNPTRIRSDAAFAKLCGACPIPASSGVTNRHRLFRGGHRQANAALYRIVIVRMRWHQPTIAACGESR

SEQ ID NO: 502309 - protein, 362 aa, unidentified
MGTRKQRYVGIDLGKRTYTMAVVGANGKVTMSNGKTTAEGRQKLYRKLEASDKVALEAGNLAFIMAKELETAVGCPVYVLNPSHLPLIYKTMKKTDKEDSLKLAHILEDYREERLPLVAVPSEQEMKRRKLLGSYRREQRVRNQAVNRLHGLFVAQGITDVVKKNLATEGAREEAVRRLEGLEREEAAHLLACLKLYEKRIEALEAQMEQEAQGDEEIERLQTVPGVGPKVSFAFTAHVAAEQFENASQVSNYVGLVPRVYISGDTVRYGKITKRGNGYLRALLVQAAWALVRSKAGGKLKERYTYMTVEKGISKKKAIVAIARRLAELLYTLMRNGTSYEPRPFMTGRKDVEVLAQEALSA

SEQ ID NO: 502310 - protein, 343 aa, unidentified
MEYGAIDLHLRRSQIRILADDETVVLDRRVDTTRADFDRVFAGRPRLRILLESSTESEWVAQHLEALGHEVIVADPNYAPMYGSRSRKIKTDKRDVAALAIACRRGIYRAAHRASAAARTLRQTMRVRRQLVQMRSGLISLLRAVLRQDGVRLPSGAAERVLQRLDQVAVPATVTAVLEPLRAMLSQLTTTLATADQAAATRAATDPVAVRVMTAPGVGPILALTFHGIMDDPQRFGGDAGRASAFVGLVPSEDSSAERQHKGHITKTGPRDLRAVLVQASWTIWRGRSATGAELRTWAQALAARRGRRIAIIALARRLTRVLYAMWRDQTEFTPRRRVAVAA

SEQ ID NO: 502311 - protein, 339 aa, unidentified
MSKLLKNFVGIDISKTYFDAAIIKADHPSGSMHNQFSQCQDGFKKMLTWLQQQDVLLNSETLFCMEYTGIYNRGLVNFLIEQKAQLWVEMPLRIKKSAGFERGSDDKISAIKIAGYAFRYQDKMQLWRPVDSSIEKIKHLIAQRDRVVNAITQLSVPVKELSDCGCSKEAKELEKLQRSPLKALQKTKEAIEELIVKTVQQDAVITKKVQQVQSIKGIGQVTAVAFLAYTKGFTAFSNAKELACYCGVVPFAKKSGTSIKFKPGVSLYANKKLKKLLHLCALSAIKSDKEMRAYFERKVAEGKNKMCVINAIRNKLIHRVFAVIRDDRFYEENYVRKCA

SEQ ID NO: 502312 - protein, 412 aa, unidentified
MSNAQASQDPNRVVVGMDPHKRSVTIEVMAGDETILGGGRFATTAEGYRAMRAYVAAWPARVWAIEGCAGIGGHVATRLLADGEQVVDVPPKLSARARVFTTGQGRKTDATDAHSVAHSVALVGTRMAGLRPVVNDQQLAVLRVLVDRRRSLGEDHTRMVSQLHHLLLQLIPGGAKKDLSAAQAKALLASVRPRDTAGKTRRRVAAELVADLERIYQRKKAADKELTALLAQTGTSLLTLKGIGPSGAARLLVEVADITRFPSRAHFASWNGTAPIDASSGDQVRHRLSRAGNRQINRVLHIMATVQLRNPTPGRAYYDRRRAEGKTSMEAMRALKRRLSDIVYRTMVDDAVSPARITATGGIAAERTGPGGHSGATTSSSAVDSNPGIDASEKSLPGPATDQPTTPLKTAS

SEQ ID NO: 502313 - protein, 334 aa, unidentified
MDIVGGFDVHRKQITFDYIEIESGEVHRGKIRPADRESLREWLDEFTERFLGKQIAIALEATTGWRYVLEELRRAGVEPRLAEPAETKSLQGRKKRAKTDRLDAGHLRDLMVINRLPESWIPPDHIQEIRTLMRLRHSMIEERTTHKQRIHAQLFHNGYPRQSNLDSTEGRANLEDMELPAAARKVVDLSLAMIEHINEELEPVEKELRAYARSQAGCKALMMSHYGVGELTSVALLSELGDTRRFSSSKKAVRYAGMDITVHNSDDKRAAGKLSRQGPPVLRWAAYEVAKRAWRKNSPDHEYYLQNKERIGAGRATLSIARKLILAKLGRTTP

SEQ ID NO: 502314 - protein, 323 aa, unidentified
MNKGINYFGIDISKDVFDVTDSNNVHTVFKNDFKGFKAFLKLLDSSSHCVMEATGYYYCQLAYFLQDNVIKVSVENPLSVKRFIQMRLSKVKTDKSDSKMLCEYAQSTKLKLWQGNSKDQIECLQISRLLGVYIKQTTVLKNKIHGENVLGEPSSLVVHSLKRSLKTIQKEIKSLEEKLTVLVKKEHQELLTHIESIPGIGRKTAITLIVLTDGFERFTNASELCSFAGITPIIRQSGSSIRGRARISKMGNPKLRDLLFMCSFTACKNNKACKALYERIVAKGKSKKLALIAVCNKLLKQAFAIAKSGLKYDENYRSVLVEN

SEQ ID NO: 502315 - protein, 394 aa, unidentified
MHKDIHCAVIIDCWMNKLGEITFENRPAKFPTFVEDVRKICGTKEFVFGLEDTRGFGRNLAAYLVGRRFDVKHVNPAYTSAVRLSNPIVYKDDGYDAYCVARVLRDMVDVLPDAKHEDVYWTIRQLVKRRDLLVKNNVMNKNTLHNQLMYSYPSYRKFFAEIDGKSALYFWENYPSPEHIQNTTPEQVYKTLKAINQGLKMERILEIIAMIENDGDTLKDFQDERDFIVKSLVKSIKNNLEQIKEIDVELERIIPLAGYKLRTMPGIDLATEAHLISEIGDINRFPDSDKLARFMGLAPVQFSSAGKGKDERCRNGNRVLNAIFHFLAIQMVAVSKGGKPRHPVFREYFEQKVKEGKNKPQALVCVARRLVRIIYGMMKTKTEYRPFEKADSKN

SEQ ID NO: 502316 - protein, 341 aa, unidentified
MANAALIGIDLGKQCFFLHAQDRRGNQVWRKKATRKQLYELLATCPACVVAMEACAGAHWLARKCQSFGHQPRLIAPQFVRPFVKGNKTDFADAQAICGAACRPTMRFVALKTTQQQTLLALHRVRDALVTERTATSNQIHAFLLEFGISLPASAPAITRLPLLLDDPANALPPLMVALLHRLHRRHAQLAQEISELDTQIKRQVIEDDAGRRLLTIPGIGPVTASNLLAMAGDMDGFKRGRAFAASIGLVPRQHSTGGRPTLLGISKRGDKHLRRLLVQGARSVMRVIDRRHDALGRWAQELLRRRHSNVVACALANKMARIVWAILAKGGEYRAQPDIA

SEQ ID NO: 502317 - protein, 410 aa, unidentified
MEALLERCAGLDVHQASVVCCILISVPGRRPQKLLRRFGTTTRELEALRAWLAEHGVTHVGMESTGVYWKPVYAVLEGHFDLIVGNAHHIKNVPGRKTDVKDAEWIAQLVRHGLVAKSFVPPPAIRDLRELVRHRRTLIETRTATRNRVLKLLEGANIKLSGVASDVFGVSGMAMLEALAAGTANASAMASLARGRMRRKHDALEAALEGRMREHQRFLLAMQLRTLKAIDHDIAALDTQIEAQLEPFCAQHQLLMQIPGVDWVTAASILAEIGPNMSVFATARRLAAWAGVAPGNYESAGKPKGAATRKGNVFLKSALFAAASAAVRAKGSYYCDKYNRLRARRGPVRALMAIAHKLLIAVFHMLTTGEAFRELGESYLDQVTRKRSTTRLVQRLSSLGYDVVLVPKAA

SEQ ID NO: 502318 - protein, 404 aa, unidentified
MSVHAAPVTSSTIVVAIDVGKTSALLSATDGARRRVLGPVEFAMTRSGLGAIVHRVSAVVPAFAQVKVGVEAAGHYHRPVLDYGWPPEWEVLELNPAHVAEQRRVAGRRRVKTDVIDLEAVTELVLAGRGRVITEREVCIGELAAWAIHRSQRIATRSATKNQLLGQLDRAFPGLTRALPDVLGTKIGRLVAAEFADPARLSALGVNRLIRFAAARDIQLRRPVAERLVTAARDALPTRDGSVARRVLATDLGLLADLDTQIADAEGELAALLPASPYSTLSSVPGWGVVRISNYAASLGDPDRWPGPRQIYRASGLSPMQYESAGKRRDGRISREGSVALRRALIDLGLGLWLTEPSAKAYAAELKSRGKPGGIIGCALAHRATRIAYALVRDHTIYNPSRWV

SEQ ID NO: 502319 - protein, 321 aa, unidentified
MISRLQIGADMAKAWFDVDYSVKKQEFAIRYPNTPEGHRKFIEHARGLARKIHVCMEYTGGFETALATACHEVGFIVSLIDGGLFKRYRDTFSKSGLGTDKHSAKLLARYCQERKPERWYPVPDEYRTLRELVRHRQSLLTGKQGWACRSSNTVETELVAAQRKALVAIFTEMTKEVEKAIKAHIKAHPNLAQALKLLVSIPGISFISGSRILAEVGPITNYPTAKALALQAGLAPVVFGSGEKVPVGKLPVYGNKELRCAVYYPTLVAKRFGTGAGPFMLRLAGRGGKVKMTVIAAGMRKMIHLIFGVLSSSTEFDQNKA

SEQ ID NO: 502320 - protein, 319 aa, unidentified
MAQNDLIVVGIDVAKDKVDACMRSLALRQTYPCTAKGQRELIAWLRKHKAGKAVMEASGGYERGWAKTLRAAGIEVRIVDPKRVRSFARSAGRLAKNDTIDAEMIAWFAETFDQAPHQTYDAAREKLAQMVNARQGLLDLQTTLQSRNEHSDVEEVQKMHARLLKKIAGEVVRLEAAIATLIKATKDFAVLAEIIESVPGLGEITSAGLIAAMPELGQVSNKIAAALLGVAPYDDDSGKRRGERQIKGGRRRVRNLFYMACLGAATRHNPVLKAFYRRLIDKGKEPKVALVACMRKLIVILNTMIARRQKWDASLHAAG

SEQ ID NO: 502321 - protein, 407 aa, unidentified
MIFVGVDWAETHHDVHLADEDGVRLVKARLPEGVAGIARFHELVGAHVEDPTEVVIGIETDRGLFVAALVAAGYGVYAVNPMSTSRYRDRHSSSGAKSDAGDAKVLSDMVRTDRQNHRLMAGDSEEVEAIKILARAHQSMVWSRGRQTNLLRSTLREFYPAALVAFDDLASSDALEVLRLAPTPTLGRGLSRSKIASALRRGGRQRRIDERAAEIQSALRSEQLEAPVAVADAMGASVSASVAVIAEMVAQSTVLAEELSSDFEQHPDAEVVRSLPGLGTILGARVLGEFGDEPNRYATAKCRKNYAGTSPITRASGTKKAVLARHVRNRRLADAIYLWAFASLSASPGARAYYDARRAAGEGHHQALRALGNRLVGILHGCLTHHVAYDEMTAWAHRPENELSLAA

SEQ ID NO: 502322 - protein, 316 aa, unidentified
MAEITEPTNIGIDVSKARLDILVLPTGETWDTKNDETEIEELIDKISQLNPERIIVEATGGYERLLVTKLYLAKLPVSRVNPRRVRYFARSVGQFAKTDKLDARILARFGEIVKPALTRLPSEKEQLLSALLTRREQILGILVAERCRLDTASAKIKPSLNEHITWLKKELKQLDKEIDNFIKNTPELNEKDKLLQEVPGIGKTTSAKLIADMPELGHANRKEIAALLGAAPYNRDSGNKKGQRSIYGGRPDVRATLYMATLTATRFNPVIRNFYHRLLSKGKKKKVALVACMRKLLTILNAILRELKPWNPSFSS

SEQ ID NO: 502323 - protein, 427 aa, unidentified
MQTEAERLALYRQLRTDIRGSEHHLIVGLDIAKEKHYAFFGTATGRVLCKQFTFPNSKEGFELLLSRTEQLRLQQQLDPVVFGLEPTANYHKPLADYLVWHDQQVVQVSGVAVKQNRELLDGRWDKHDRKDAANVADLITQGKCQFYEYPSLEIRQLRELLSLKHRFKKEEHGLKTRIRNNLLAKFFPEMDQFINSCKQDTLAVIGTCCSPERISKLDYASFFTKVVPVYKGKRQEAHLMKIWQAAQNSVGCRAGELANYEGELLVRQLQGVRQLIREIEDRIAALCSNFPEYPCLLSIPGVGPDISSKLLAYIGDPHRFETISQVIKLAGLDLSASRSGKPAMQARPVISKRGNADLRYALYQAAVVASTKNTFFRCWFAKQLKGREREHGMVGILRVKLAAKLLGIAWTLMKNKEMFAYEKLNNC

SEQ ID NO: 502324 - protein, 343 aa, unidentified
MAAITTIGLDIAKSVFQVHGVDANGHLVIRRQLKRRYVLAFFQKLPPCLIGIEACATSHYWSRQLQALGHTVRLMPPAYVKPYVKRQKNDAADAEAICEAVTRANMRFVETKTAEQQSCLTLHRTRHLFIRQQTSVINAIRAHLAEFGIVAPVGRNGIEELLHVVADPNDQRVPEITRACVAALGAQLHRLREQILAFDRMIMAWHRSSATSKRLDEIPGVGPALATALVASIADPKAFRSGRDFSAWIGLVPKQHSSGGKEKLGSISKQGDRYLRSLFTTGALAVIRYAKIYGTKHRPWLTALLARRPTKVAAIALANKIARMAWAMMTKGERYKEPIALAA

SEQ ID NO: 502325 - protein, 420 aa, unidentified
MKSATNTPNTALPEFPSNDVTAGVDWARDDHAACIVDGRGRKIAATMVEHTGAGLRDLVTFLGRHGVGEVAIERPDGPVVDTLLAAGLVVVVISPNQVKNLRGRYGSAGNKDDRFDAYVLADTLRTDRARLRPLVPDTEATTALRRACRARKDLVKHRVAAANQLRAHLRNVFPGAIGLFADIDSEITLAFLTRFPTQDRADWLTPKRLGEWLAKQGYSGRTDPAVLHQRLLDAARGASGEHATSQAHITTSYVALLQTLLEQIKALADQIDHQLDAHTDAHIFTSLPRSGRVRAARLLSEIGDCRAKFPTPESLTCLAGAAPSTRQSGKLRAVGFRWACDKQLRDAVVDFAADTRLVNPWAADLYNRARARGHDHAHAVRILARAWLHIIWHCWQDGVAYDPANHRALQPFLTSQDEAA

SEQ ID NO: 502326 - protein, 346 aa, unidentified
MCQYVGLDVSVKEVSICVVNGAGTVLARGTVQTDPDQIAEFLDQNAPDAERVVHESGIMAIWLTRELSKREVPIICIDARLAHKALSGRINKTDRGDAEGLAHLARTGWFTPVHVRSEASERMRVLIGTRERLIRMRKDLEAHVRGVLKTFGIRMTTIHRSGQRRGFRDQLAEAGQTDLAIELMADAFNPIHKALCAAAEAMEDELREIARGSDLAQRLMTVPGVGPVVALSYIATLDDQARFNRATDVGAFLGLTPMRYQSGDRDWSGRISKCGDRDLRRLLYAAGFTLISQVRRSSPLRSWAVRLSERKGIKHAAVAAARKLAVIMLRIWRDGTTFHATKEVKA

SEQ ID NO: 502327 - protein, 338 aa, unidentified
MKVYVGMDLHATNTYVGMVDEENTVLYKQRFRNELPLILSALDPFKKDIQGIVVESTFNWYWLVDGLMAEGYRVHLANVSAIKQYEGLKQIDDRRSAFWLANLLRLGILPTGYIYPKEERPTRDLLRKRLQLVRHRTSHVLSVKNILARNLGLRMKSEDVKKITDAEVKRFFPDREMQTMVLSSVGLIRHLEDQISAIENMITKKLKVRKEFAKLMTVPGIGKILTLTIMLEVGDIHRFPTVGDYSSYCRCVKSIRTSAGKIIGYGNRKNGNKYLSWAYIEAAHAARRFHEMVRSYYEKKMARTNRIVAIKALSHKLTRASYYVLRDQVDYDPARLFR

SEQ ID NO: 502328 - protein, 345 aa, unidentified
MKSMYYVGLDIHKKTISYCVKQVDGRIVQEGVIPARRQELDRWMKQLPGPWIAAMEATLFTSWVYEHLKPHAQAVKVAHPAMLKAIAASKRKNDRIDARKIADLLRADLLPECYMAPAPIRELRRQLRYRNLLVRQMTQTKNKVSGLLMECGIEYNKQKLHQKKYFRQLVASAEHMPPSLPPLLELSRTTLDSLGKMEKQLIQGLEKDALLCQRLDCLMTIPAVGPITALTWALEIGEVSRFASHKQAVSYCGLCGAEDSSAGQLKRTPISKQRNQHLQTVLIEAAKLGPRLDRELARIHARELEHGNRNRATLAVARKLVGYLLAVDRRQSPFQRDRNTQQPAA

SEQ ID NO: 502329 - protein, 376 aa, unidentified
MENDITLYVGLDVHKDSITVAYALGMGEVEQLGKIGTSKADTDRLCKRLQSKARHIRIVYEAGPCGYGLYRELTQKGFDCMVCAPSLIPKKPGERIKTDRRDALKLVRSLRAGDLSAVYVPSVEDEAFRDLSRAWVSTKDDLKRARQRLKAFLLSHGVRYTGKADWGPAHRRWISAFAFDTVWQQLAFDEYRRAIEDRLAQCSRLEEALREAVVNWRFYPAILGLQAMRGVQLTTAIGILAELGDLSRFAHPRQLMAWLGVTPAEHSSGEKRRQGSITKNGNSYARKLLIEAAWSYRHPARVSPQIQRRHEGLPKAIVDRSWDAQVRLCRRYRKLAARGKNPNIAVVAVARELSGFIWDISQLAMSLAVPNEARAA

SEQ ID NO: 502330 - protein, 351 aa, unidentified
MSVRRILAKTIDTDLEYEAIGIDLAKNCVSAALLTTDGEVVCIDRLDYSELEKSAQALSSTTFAMEPCTEMNYLVQKLEAWGHRCLVIGGKNVQNYVENHYSGQKTDLNDAQALAFLAQDKQLRTIKAKDIEQQKYASLTTLREQYIKQYRQTIVSLKGICQAWGLNISKGISGKAQLKDLIENHAAFPEELRESLVDMVTHAQTTQKVLNKITKTLEVLAKNDKVCQLIQTIPGLGTICSCRLRATIGDIKRFKNPKDFPAYYGLVPRSIATGHNEKKGKITHRGDRTMRSLMVQGAGCVIRLATCGKLKSKQLTKWILKKQKEKMPWGKLVCAVAAKLLRIVREALQNT

SEQ ID NO: 502331 - protein, 377 aa, unidentified
MNYIGVDLHKDNMTVVGVNEKGEIFVKERIAPKCIGKIDEFFSQQFLHPCKLVCESIGFYHWFYDLVSPKVEQFILANPIETKKYSWNNPKTDFKDATKLAFLLAGGEFERNKSLSCYIPDKIERTFRETTRTRFHLVRRKTSIINSARRIFLKNNLAGPKILNYSTLCQFINKYGDKFNEMHRKFLYMLAENLFYLEKQISEIERDIYKFLSMERFKNIHQILITIPGVGDMVSAVLISEIGDFKRFPQPDFLASYAGVVPRVFQSDKKIRYGKITKQGSVYIRYALINASWVAVREDRKIREIFIRIAKRAGRKKAIVAIGRKILVWSWHLVINNETWQSFNDKFPAENRSGMTLKRVLNEIKKRDEFIKKNSIM

SEQ ID NO: 502332 - protein, 408 aa, unidentified
MQLFVGVDWAEDHHDVCVIDVSGSVRAKGRVTNDLAGVAKLHDLVGRAVPAELDEDPEVIVGIETDRGLLVRALVAVGYRVLAVNPLGVDRYRDRVRVSGAKSDPGDARVLADMVRTDGHQHRPVAADSDLAEAIKLVARSHQSAIWSRRRLANQVRSALREFYLAALDAFDELTHPDAVSVLAIAPTPELGKALSRSKIASALRRGGRKINVDKRAAAIQAALRTDHLTQPPLVADAYGNIVASLVKVIAAHNTQIAELEEVLEAHFGQHPDAEILRSQPGLGVVTGARVLGEFGDDPDRYATAKARRNYAGTSPLTIASGTRRVVRARHIRNRRLADALHWWAFNAISQSPGARALYDHRRAAGDTHSGALRVVANRLVAITHGCLKNRTLYDEATAWAHRNDLAA

SEQ ID NO: 502333 - protein, 343 aa, unidentified
MQTITTIGLDIAKSVFQVHGVDAGGQVIVRRQLKRRYVLTFFQKLSPCLVGIEACGSAHHWSRELQALGHTVRLMPPAYVKPYVKRQKNDATDAEAICEAVTRANMRFVPTKTSEQQSGLVLHRARHLFIRQQTSVINAIRAHLAEFGIVAPVGRHGIEELLNVVADPNDKRVPEIARACLSAFEAQLRMIKEHILEFDRQIRAWHRSNELSMRLDEAPGVGPVLATALVAAVADPKSFRSGRSFSAWIGLVPKQHSSGGKNRLGNISKQGDRYLRGLFVAGALAVIRYAKIHGTKHRPWLTALLARRPTKVAAIALANKIARMVWAMMARGERYKEPVALAR

SEQ ID NO: 502334 - protein, 338 aa, unidentified
MDPQAVILGVDTHRDLNVAVALNAYGQRLGCLSVPTTEAGHAQLVAWARGLGAIDRIGIEGTGSFGAGLSRFLTSAGLTVLEVDRPQRRNPRAGKSDPLDAERAARAVLAGEVRVLPKGGDGAVESLRLLSTARRGAIKARTQAANQLHGLVVTAPDALKAHLGDLTTAQLVQRAARWRIGAARDPLPAARVAIRAVARRYQALEREVRQLDAELQPLVRALAPELLAARGVGYETATTLLVAAGDNPGRLRSEGAFANFCGVAASSGKTVRHRLSRLGDRQANRALFLIALVRMYRDERTRAYVARRTAQGLSKLEIMRCLKRYVAREVFRLLPRAA

SEQ ID NO: 502335 - protein, 317 aa, unidentified
MERLEERTWVGVDVSKASWDVAIHDRKPVERYASDADGCRQLLAAIAALPAVQVCVEATGGYERALVAALRKQAVVVSIVNPRQIRDFARAAGQLAKTDAIDARMIARYGAVMRPAASETLGEHQEKLRALRTRRQQVSEALVREKNRLSTSIDRDARQSIEEAVEFYRRQLQSLDEQLAQLMQADPAFRQKLDLLVSVPGVGPTTAAALTAELPELGRLNRRQAARLVGLAPINRDSGALRGKRMIGGGRATVRKGLYMATLVAARHNPIIRAFYQRLLQQGKAKMVALTACMRKLLLILNAIVKTNQPWKNAKNS

SEQ ID NO: 502336 - protein, 460 aa, unidentified
MTPKRSKSKNGGEMSMVHPNAAAIDVGATMHMAAVRADRAPEPVRSFGTFTADLHRLVDWFTECGVETVVMESTSVYWIPIFELLDARGFNVFLVNARDAKHVPGRKTDVSDAQWLQRLHSFGLLRASFRPKGQIAELRAYVRQRERLLEYAASHIQHMQKALTEMNLQLHHVVTDITGATGLRIIRAILAGERDPEALACLRHYSCHSSAETIAKALTGSYRAEHLFALEQALALYDAYHEKASACDARIEAVLKELSFRRGHGHGSAPRVSRRRNRTDQANAPAFDVREALFALLGKDLTAIDGLGPYLSLKLIAECGDDLSSWPSAKHFTSWLGLAPSNKISGGKMLSSRTRRSGGRAAALLRLAAVTVGRTDTALGAFYRRLSARIGKAKAVTATARKIAVLFYNAVRYGMDYVDPGASSYETRYRTRVVNNLHRRAKAFGFVLQPLEPKVDAAVS

SEQ ID NO: 502337 - protein, 338 aa, unidentified
MIAVGVDTHKQRHFAVALDALGQVLGERVCAATPAGYAELQRWAERHGDPELVFGIEGAGSWGAGLCQHLQRASHAVVEVERPRRAERRAGKSDRVDALAAAKQVLAGEKLSTPRRRGVLSALRALLVARRSTVAERTRLLNQLQALNATAPVTLRERIGDGTGKQLERRVLSMRARTSADVEERAVFGVMRDLAARSRALAADARRYEQQLAELVRSLDRTLLDEPGIGPISAAKLLASDPARFEHEAAFARCNGTAPLPASSGKTVRHRLNRGGDRQVNNAIHTIALIRAKHQPETRAYLDRRISEGKTKREAMRALKRHISRELFKRLAEVPLTS

SEQ ID NO: 502338 - protein, 347 aa, unidentified
MLTVYLHKQRKDMEFEFFIGIDVSKNELDFAVRMGKQLLFHREISNEPAAINAFLKELSKLPVFNLSKAVFCMEHTGIYNNHLLVCLHKKKANICLEAATHIKKSLGNIRGKNDKVDSIRIAEYAYDKREKLRMWGPKREIVQQLSHFAATRSRLIKVKKILKTPLKEAGPFVKKSITKQNLKVCNGTLNAIEADLKKVEKEIDKIISSDPELKRIFSLVTSVCSIGAVIATQVLISTNEFIDIADAKQFACMGGMAPFTEESGKFKGKGRISHMANKKIKTLFHMAALVAIQYDPELKLFFERKVNQDKKNKMSVLNAVRNKLILRIFACVNQNRKYEKNYARLVA

SEQ ID NO: 502339 - protein, 368 aa, unidentified
MPSTTRICRAGGTAITTIAHTQPARLTVGVDTHKEVHVACAKDQLGRRLATTLVATTTAGYAELLGWADALGQVEAFGIEGTGCYGAELARFLRGHGQRVVEVNRPDRAARRRHGKSDPVDAEAAARAVQAGEATGLPKAGDGVVEMLRVLRVARQTAVRARTQTINALKALVVTAPDSLRQQLRDLPTRQLVATAAAFQPDTPATPTMATMVALGALARRYQVLDGEITMLSKQLHRLVRLAAPALLAVFGVGPETASALLVAAGDNPQRLHSDAAFAALCGASPIEVSSGKTVRHRLNRGGDRQANNALWRIVLVRLRAGHPPTVAYLQRRTAQGKSKREVIRCLKRYVAREIFAVLQTMAVQAAA

SEQ ID NO: 502340 - protein, 404 aa, unidentified
MRRTDHRAAHPRSAAHAHDTALFVALELSRSTWLIGSSMPGSDRISRHQVRAADTTALLALLKRLKARGERSCGATVRVISIHEAGLDGFWLHRFLEANGVESHVVDAASIAVNRRSRRAKTDRIDVEKLLDTLMEWARGGRRACSMVRPPSSAEEDERRLTREREALVIERTRHVNRIKGLLATQGVFGFEPMRKNHRTQLEQLRGWDGQTLPPRLKAELARELNRLELVISQVAAVEDERDRALKAQQHPASSISAAEAAAGAQPVATEHPGRLLLRLRSIGPEFASVLSTEAFYRNFGNRREVAGYAGLVPSPWKSGGIDVEQGISKAGNARLRKTMIQMAWLWLRHQPGSTLSRWFHERVGDRRGKIRRITIVAVARKLLIALWRYVTLGLVPEGAELKV

SEQ ID NO: 502341 - protein, 372 aa, unidentified
MGHHTEAFVGIDTSKLRNAVAIADSGRGGEVRYLGEFPATEAAIRKLVAKLAAKCCQLTFCYEAGPTGYGLYRLLKSLGHDCLVVAPSLVPKKAGDRVKTNRRDAVSLAKLLRADELTAVWVPDERHEAMRDLSRARQAVKKDLQGKRQQISSLMLRLGRIYPGKTTWGPAHMRWLMEQTIEHREQRIAFEELLEGIRQESERVERLENAIREVVPEWSLCEVVAALQAVRGIDLIAAVGVLAEIGDLSRFQNPRELMGYLGLVPSESSTGDKVKRGGITKAGNGRARRLLVEAAWSYRYPPRVSRDKQPKVEAAPRRVREIAWKAQTRLCGRFRSLERKGKRRTVIATAIARELSAFIWAINRELMAHRQA

SEQ ID NO: 502342 - protein, 347 aa, unidentified
METIVRIGLDTSKSVFQLHGVDGMEQPVLRRKLRRGQVLAFFGRLPPTLVAMEACGASHYWARELRSLGHEVAMIPPQYVKPYVQRGKSDAADAEAICEAASRPKLQKNFVPIKSPEQQGAQMLTRVRNQFIGRRTQLANSIRGYAAEFGFTAPKGLARLPQLLIDLKADATVPDLAMELIEALAAEMARVDDQIVTLDKKLMQLHRSSEMSRRLATIPGVGPIGATLLSIKVVDARGFKSARNFAAWLGLTPKNHSTAGKNRLGVITRAGDGMLRTVLVAGATAVIADMRRRGSRPWPWLRDMIARKPPKLVAIALANKLARIAWKLMVSGERYRPASAVPMPTPK

SEQ ID NO: 502343 - protein, 390 aa, unidentified
MYYCGIDVAKRKHAIALLNDRGQPVQRAFTIENTRAGFDQLLQALTTLDAPVLIGLEATGHYWWALYEDLTAHAYAVVVLNALQVHAFRKSGVRKVKSDRTDASWIAEFLRFTQPAPAQPTTAVFLQLKEMSRFRYHLTDQIGDGKRKLLSILDRVFPEYETLFSSVFLTSSRQLLAKAASAQELATFDLVELTEVLKTSSRSRFGRTKAETVQAAAQQSVGVRFLADAAQLEVRCLLAQIDLLEDQRDQVDTALAQLMDQIPQHLTTIPGVGPTTGAALLAEIGDIQRFEAPEKLVAYAGIDAAVYQTGQFEAQHMHMSKRGSPYLRHALWQAAFMAIQSDAELRAYYDRKRAEGKAHGTALGAVCRKLLTRIYFILKENRPYEVRTQR

SEQ ID NO: 502344 - protein, 349 aa, unidentified
MGEYIALDSHKHYTFAQREDGETGRVRERRIEHAPGAIREYLKGVAAGTPVAVETMGSWYWIVSEIEEAGLVPRLVHARKAKLMMGMINKTDKLDACGLNRLQRNGTLPAVWIPPAPLRDLRELTRTRMVLVRQRTRLKNRLQATLQKYGLQVEGCSDVFGVVARRQWTRLLRLLPPQTQWTAQALLDQLDFVERQIDEHQERLAALVARTAEMELLMTLPGVGPILGPVMALEIGDVARFATAERLASYSGTTPRVQASGGKTRYGRLRPDVNRYLKWAFVEAANVVALQQSRHPNRHVSLLYRRLRLRKGHAKAVGAVARHLAEAAYHVLRKKEPYRDPTLGQTGKA

SEQ ID NO: 502345 - protein, 386 aa, unidentified
MQKLNDLSRSLTALEPDGTLIAVIEMSLSNWLVAGIVPGVERQPLKKLALDESALLKLLHRWREEAEKAGRRIERIAVAFEAGRDGFWLARWLKARGIEAYVIHASSVAVSREHRRAKTDRLDTELLKRSFLGWLRGERDHCKMVEIPTMKDEDAKRPNREHDSLIGERSRIVNRMKAALVRLGIRGFNPKLKRATTRLDGLRTPEGEPIPPNALAELRRDMERRRLVNNQIRQIEEERLKRIEQAPCDGPHVMVRLLARVMGVGIETADMLVHEVLSRNMRDRRAVARYAGLTGSPDESGRKRREKGLARSGNTRVRRGMIQLAWRFLLHQKNSALTKWFRSRTENARGTRKPMIVALARKLLIALWRLVREGIVPDGVVLRAAQ

SEQ ID NO: 502346 - protein, 459 aa, unidentified
MAKQVRKKSETAKGNELEGLPPLNRNAAGIDVGSAAHYVAVPTGRDAEPVQEFGSFTADLHRMAQWLKACKVDTVVMQATGVYWTALFDVLESYGFKVHVVNARHTKTLPGRKTDVLECQWLQKLHTFGLLNNSFRPAEEIRVLRSYMRQRENLVTAAGTAIQHMQKSLTEMNIQLANVISDISGTTGMKILRGIVKGERDPQKLAMHKHGRIQASRAEIARSLEGTWRRELLFVLEQSLELYDTYLEKIKQCDRRIDEHLKTMEAKVDTQTATPEPRRMRRPRKHQPRFDLRGQLFRITGVDLTQIDGVDVQTAQTIISEVGVDMSRWNSEKQFASWLGLCPDNRISGGKVLKRGTRHVVNRAATALRLAAWALLRSQSALGAKFRRLRSRLGAPKAITAMAHLLARLIYRMLKFGNEYVDKGMEYYETKYRQQQLQWVAKQAAVLNMQLVPVAGVAG

SEQ ID NO: 502347 - protein, 470 aa, unidentified
MTHNRRRSPGKPRVSPTVLDRINPNVAGIDCGAAEHFVAVPPDRDGTPVQSFPTFTGDLVRLAEWLTACRVQSVAMEATGVYWIPIYEILEARGFEVLLVNARHLKNVPGRKSDVSDCEWIRELHSVGLLRGSFRPPDALVALRAYLRHRQTLIESAGTYVQRMQKALIQMNLQLPVVISDITGVTGLRILRDIVAGQRDPAQLAQHRDHRCRASKAEVMAALTGHYRPEHLFVLQQNLELFDACQARLAACDLAIEVHVRLLVADVVLPDAPLPAPRVTRKPRENEPRFEIRTPLHHLTGGIDLTQIDGITPYTALKLISEIGTDMTRWPSDKHFTSWLTLAPKNKISGGRLLSSRTQPSANRAAAILRMTVMSLGRTDTALGAFYRRLAARIGKPQAITAAARKLAILVYRALKGQLIYRDVGAALYDIQQRTRLLRRLRRQAASLGFELVNRATGELLAANAAQSAP

SEQ ID NO: 502348 - protein, 362 aa, unidentified
MVSKTNGVGWNARSKHQRGTTMNYYVGIDVSLEASSLCVVDANGKIVREGKVASEPDALIAWLKGLKLELTRIGLEAGPLSQWLYAAMRQAGFAVELLETRHVCAALKTMPVKSDRNDARGIAQLMRLGWFRPVHCKSMAAQETRALLTARKLLQTKLHDLELSLRGILRGFGLKVGPTTPARFEERIRELVAGHPRLEVIVKSLLAARGALRREFDHFEKQVRDAARCDTRVRLLTSIPGVGAIVSLSFTAAIDDPARFKSSKRVGAYLGLTPTKYQSGETDIDGRISKIGDASVRAALYESAHIILTKPLKGCTALKSWAMKIAKRSGMKKAKVALARKLAVIMHRMLADGTSFRNAAAV

SEQ ID NO: 502349 - protein, 492 aa, unidentified
MKPSRKSPSVYRNQNALIRAVFERAGDTRKVICVALDFAKSKHVALICDGNGDILKNSFPVRNDADGVAFLCEQIEATARRRKIPQDCIFLGGEDEPTYVANFTAALRSKGYLVVSVNAYEAKESRENLIASTDNLDLLGIAKTLLSRRARDTGRASSDNPAYQHIRQLSRCRSGLVRQQTAASNRIHTLVDELFPGFLCDAKSGLTAFSEGSLTLMEKRFSAPEIARRKPSSLTNLLRRHGVHHPEEATAKILALARNALPPEPHRIVTLQRALSATINLYGCLASNAAQLRTEAALTLATTPYAMLTSIPGIGFVLSAGAAGELGYAKPLPSTDSLCAYSGIVPRTFQSGGPDTPPVQGHASPRCNHILKNWVIQSVQKIHLYGPAELKDRITRWNANGQCGISAGARRYLRLLRSLVHNEIPYLAAQGRHRNSTPEDIAATAMATWRVLQNKWRQIPGGLDLIIDEAYSIGFWRRVLKETHGIELPARL

SEQ ID NO: 502350 - protein, 339 aa, unidentified
MKFAGCDLHKQTITICVVDQLRRVLERRTVRCGEERSILAFFERLGEFEAVVEATASYEWFVRLIEPVAHRVLLAHPKKLRVIAESTRKSDRLDAQILAEFLALDMIPTSYRATPRQHEHRRLVRQRGGVQRRLTSVKNRLRRILCDYNADRPSLFTVEGLAYLAQVPLSGADRFAVDQMVEELHFGRRQLLAVNARLKEFAEAAPLREQEARTLLRTIPGVGFVTTEVVLAELADIDRFGSQKRVVAYAGLSPGQRESAGKSRELHLEKNGSTLLRSTLVEAAWRLVQHSLRWRRIYERLKLRVRAKKAIVAVARRLLCLMTAILKTGQPYSLSQQPT

SEQ ID NO: 502351 - protein, 415 aa, unidentified
MIPAVLECCAGIDVGKKFVVVCVLKGPANGDAQAQIRRFDATNANLEGLREWLVSCGCTHVVMESTGEYWRPVFNVLEEAAKLQIVLANSQQVKGLRGHKTDPDDAHWLAHLLRHGMIRPSYIPPPAIRQLRDLTRRRRQMVRTGAQERNRVQKVLEGANIKLGNVLTDVFGVSGQLMLEALLEGKATPEQIAQLAQKSAKKKIPQIRAAIDGHRMTAMHRKLIGFSLDHMAFLEEQIMEMDQEIGTHLRASKLQRQHQNLQTIPGVKQEAASSLLAEFGPDMKVFGSGAKCSAWAGVAPGNNESAGKKKRAPALRGNPWVRSTLVECAWSASRKEGSEFRYQYERLKPRLGHKRSIVAVAHALTLVIFEVLSTGEPYTKPGANPMPETKAAHLIRHHTRRLKTLRKRLTTRTKP

SEQ ID NO: 502352 - protein, 375 aa, unidentified
MTNNTAFIGLDTHKETIAVAIAEDNRNGEVRYYGQIANEPAAVLKLVKKLAGKYGKLFFCYEAGPCGYGLQRQIAGLGHDCVVIAPSHTPTKKGVRIKNDCRDALELARLHRAGDLTTIWVPDEAHEAMRDLVRARITAMEMVKKYRQHLQGFLLRHGRIYPGKTHWTKTHVKWIRELKFDQPAHHILIEENLAAIRDSRDRLARLEQQIMNLLPSWSLAPIVQAFQAMRGISHISAVILVSEIGDFNRFPHPRQLVSYLGLSPSEHSSGNRVIRGPITKAGSKHARRVLIEGAWAYRLPARVGKTLASRQNGLAKDVLEIAWKAQVRLCQRFRSMGGRRKNQNVVTTAVAREMACFMWAIARTVSLPVQAVRAS

SEQ ID NO: 502353 - protein, 450 aa, unidentified
MAQSQTLNVPSEFAAFIGLDWADRKHSWKLVAAGSVEGESGELNHTPEALQQWATDLHDRFAGAPVAIALEQRRGAVVFQLSKFPHLVVYPVHPTTAAKYRQAFFPSGTKNDPLDSALLLELLLQHRDRLRRLDPDTPATRLLQLLVEHRRKLVDEKTRLSNRLTAALKSYYPQPLQWFDDIDAPLGCAFLQRWPTLAQAQHSHPGTLRKFFVQHNCRSAERIRERIEGIHQATPAVTDTALLEAGGIIVSGIVRASQALSESIAAVDARLQSAVTEHPQAGIFAGLPGAGAVLLPRLIAAFGTQLDRFPSASKLQCHTGIAPVHSQTGNTEIVHMRRACPKFLRQTFVEFASHSVAKSVWARAFLQNQLAQQKDYNVAIRALAFKWQRILHACWRNNTPYDEQRYLQTLQKRNSPLAKLSAIPKSAPTDPTAVGWKSVAGFHTLAMKNT

SEQ ID NO: 502354 - protein, 345 aa, unidentified
MEPMYYIGLDVHKRKISYCVKDRGGKIYLEGSLSATRLDLDHWMKTLPQPWSAAMEATMFTGWIYDHLKPHAAALKVAHPLMLRAIAAAKKKNDRIDANKICDCLRCDFLPECYMASTAIRERRRTLRYRNLLVRQMVQMKIKISALLMEAGVSYNKQRLHKAGYFRELLASNPDINEGLGSLLRLCRETVVRLQKTESAMVRSLERDSLLMERLQWLMTIPAVGPITALTWALDVGDVRRFSSIKKAISYCGLCGAEKSSGSTVQRTPLSKQRNKHLQTTLIEAAKMAPRNSPELAMLYDKEKQKGNANRATLAVARKLVAYLVAVDRRQKEFLTVERENRAAA

SEQ ID NO: 502355 - protein, 430 aa, unidentified
MEEVTDEPLYRDRVCGIDIGKAGMVATVRVPSEMNPARRMAETRAFATTKRGVLALADWLRCWQVPAVAMEATGDYWKGPFYRLEAEGFECVLADARQIKNLPGRPKRDSSDSAWIAVCFERGSITSCFVPTEEFRLIRLHTRYRRDLTGDRTRDKNRVEKLLESAAIKISAVLADVHGMTGRDIMQQLIAGQRDPKALAQLARRRARAKIPQLEQALEGADFFTEAHAGLLKAMLERIERADEEIARLSQVIEQLLSPYEEQLQQAESMPGWARRAAQDVIAETGVDMSRFPTPGHLASWAGRTPLDHQSGARRGKARRKHGNRYIGAVTGETAVAAGRTDTREGARHRRLARKRGKGKACVATGNTQMRVFHVLLSNPGMRYTDLGPDWYADERQAARRLTRLVGALDAMGYEVTLCRKPEPQDSPAA

SEQ ID NO: 502356 - protein, 354 aa, unidentified
MHYVGMDIHKNYSSVAVTDEQGELVDRCRLNHRHREELVEYFKQFQSKTQVVMEATCGWGWLSELLQDLGMEVKLANSSKVKIIAESQIKTDKVDALALAQLLRTNFLPEAYLAPKEQREARDLLRYRISLVHLRSGVKNRIHALLIRLGIFHSYSDLFGKQGRRFLCSLELSSVHRQTLDGYLGLIDNIHKLIGEAEVQIRQVVKESEDGRRLLTLPGIGFILAYLVLVEIGDVNRFSSHKKLCSYAGLVPSVYQSGSKSYHGHISNRANRYLQWGMIEAAQRAKVIDPFLRRKAEIITRKKGPSVATTAIAHHLLVAIYHILKEKTVYRSPKLRHNLSGKPVLTLVAKKQTV

SEQ ID NO: 502357 - protein, 387 aa, unidentified
MQKPHDNSKASPAAFMQDNTLIAVIELSLSNWLVAGLIPGVGREPLKKLEPNPEDLLKLLHRWRDEAIKAGRPITRIAVAYETGRDSFWLARWLRKRGIDAHVIHATSVTVSREHRRAKTDRLDTAMLKRGFLGWLRGERGHCTVAIVPTMEEEDAKRPHREREGLVHEQTRVVNRMKSALIQFGVRHFNPKLRKASVKLETVLTPEGKSLPPNTIAALRRDMERLKIIKEQIKAIEQARLQQFEQKPEALANRMVYLLVRIYGLGLETADLLVHELLSRTLRDRKAVARYAGLTGSPDESGSKRREKGLSRSGNTRVRKIMIQLAWRMVKFQPDSALVQWFKQRTENAKRSRKPMIVALARKLIIALWRYANDGVIPEGFRLHSAA

SEQ ID NO: 502358 - protein, 396 aa, unidentified
MIAVGIDISKAKSTVAVIDSDGTVLASPFTMAHTQPEMEAFVSYLKGLGEPTTILMEYTGHYHYPVLKKLQDEGFPVCIVNPYQMKKYGDVEIHKAKTDKKDALRIAAYALEKSYKLVPYSSMEQKYEDLKFLSRQYNQRISYVAKLKVQLIALLDQTMPGITILPLNSRNPEKCALLLFIKRFKSFDEIQRIGKARFLASYDVLAKKASERSASSKGLSIYELAVDSITTRGEDPYIWLSQNQCVDLLSATQNAADEIISQMRNIAETIPEYKVLRAMHGVGDRLGPIILAEIGDVHRFHSGKALNSYAGNDAPPYQSGQFESRNRHISKRGSSALRKACYEVMQALKLIKPQDDPVYLFMLKKEQEGKPFNVAKMAGVNKFLRIYYARAMELYK

SEQ ID NO: 502359 - protein, 346 aa, unidentified
MRYIGLDLHTNQMTICYLENGKYSYDTLSVDEIETFKKRLLPTDELAVEATGNSSYVYRHCADLVAKLVVVNTMQFKVITKSCKKTDKNDAKLLAEFLSKDMLPAARVKSILDDRLHSLVDSRNKFIELRTRLKNKIHNLLNRCGIKIKKSSLTSIKGLNKVLAYEVDDLVKFELEQIVMEIKNLNERVDQFDDKIAEFGSKLPGFENVSSIKGIGTNTAVTLLSSIGDINDFEDEKKLAAYFGLVPRVNNSNETVNHGRITKRGDGLVRKSLLQCALIAIKYNQKLCGFYNKIKTKRGFAKAIVATARKLLTIVYYTLKDGWYFTDFVNNIREIRPIEKRVLGVI

SEQ ID NO: 502360 - protein, 351 aa, unidentified
MAAKKRSVTGGVDTHGKTHHAAAVDQVGRVLGDQEFPASATGYRALLAWLRSWGRVVKVGVEGTGTYGAGLARHLAAEGIELVEVDRPDRHTRRAKGKSDPIDAIAAARAALSGQACGTPKTRTGPVEAIRALRVARRGAVKARTAALNQLHGLIASAPEQLRADLVAVPASALADRCAELAVDDSRMTEPVNATGAALRAIATRVQALSAEIAQADKRLRPAVAKTAPRLSALYGAGPEVAGQLLATAGDNPDRLRSEAALAHLCGAAPIPASSGRTDRHRLNRGGDRAANNALHTIVLCRMRYEPRTRDYVERRTKQGLSKKEIMRCIKRYIVREVHTALLADFTALTT

SEQ ID NO: 502361 - protein, 342 aa, unidentified
MQATTIGLDLAKNLFQVHGVDTEGNVVVRKKLRRSALLAFFSELPPCLVGMEACASSHHWARELAGHGHDVKLMPPSYVKPYVKRGKNDAADAEAICEAVRRPTMRFVPVKSAEQQSALMVHRARDLLLRQRTMLVNALRAHLAELGIVAAQGMRNVPKLIETVLDETDSRIPAIARPVLVLLVAQMRELSARIKTLESQLLAWHRTNEASRRLETIPGIGFITATAIAATVTDPSHFKSGRQFAAWLGLVPRQNSTGGKARLGRISKMGDRYIRRLLVVGATALIRFARNRSTPLTAWADALLAHRPARIVSVALANKMARIAWAVLARGEAYRTPAPVSE

SEQ ID NO: 502362 - protein, 388 aa, unidentified
MTRGDRRRNARRERLRALLPRDGAVIGIDLAEDKQALAVIDHDVRVLARKTARVKAFRLGEALDWAAGQARARGFDQVAVACEPTGARWMQVQRLCRERGLPLVCIQPLVSHIAREQQDYTTHKTDESDCVMIARLAVELHCYVPEELDEVWGQLRHLGRRRAQLITAATASVQRIADFLSVAWPVVTEACVHPFDSLTWLAALQVVTSRCGADPGKLAAMGLEEFTALVRVAMAGWGGQRPWGPACARVFAALASTEGVVTWSRRGLLRRCADELGDLQRTRAQLRQAEADMAAVLGELGLSRLGGIPGLTAVGAAAILAESGDPRRYDSSSSLVKHAGLAPSDNASGAFEGQAHISRRGRACGWPSGARSGRCCGTTRSWRPSTPR

SEQ ID NO: 502363 - protein, 439 aa, unidentified
MKGYLGIDVSKGYADFILLSEELAELESCFQLDDSSKGHAALIDWITVSLKKHQLTELRCGLESTGGFEDNWFSLLLRLGDQLPVRVARLNPSVVKHGAKASLRHTKTDAISAENIASYLVRFDEQVRYQVADNKYRSYRSFYNHISLLNRQKTQLINELKQLLYTSFPELQRFCKSSIPGWVLELLKQYPSASALSKARPEKLCKIKAITAAKASQLIEKATLSVASRHQSTDSFLVKSMASGILQAQQQLALYKEHLEQTCQGPEVDLLATIKGVGRYSAAAIIIQIEDIRRFPSPKHLAGFFGLHPTVDQSGDKKVKSRMSKKGRPALRAALFMCANSAVLFDPHLKSIYARHRAKGNNHKAALVVIMHKLLRIIWGVLSHKKAYNSDIDLKNQQAVKVVVPDKNETENKRRLQDYDEQAPISRIETKKRKAYQSS

SEQ ID NO: 502364 - protein, 356 aa, unidentified
MPRIAEQELPVTGGVDTHADTHMAAAVDQVGRVLGTEQFPATAAGYRAALAWLRGHGELAKVGVEGTGSYGAGLACYLAGQGAEVVEVIRPNRQARRRRGKSDAADAVAAALAALNGEASGQPKSHDGAAESIRMLRVARCGAVKARTKAGNQLRDLVVTAPETLRQQLAGLPRERQVELAARFRPGDLAGPAEGAKAAMASIARRYQELTAEIARLDAALGELLTRAAPKEFMAKKGVATQVAATLLATVGDNPGRVRKEASFAALCGASPVDASSGKQERHRLNRGGDRQANSALWRIVMTRMSCDPRTKTYVARRSAEGKTKKEIIRCLKRYVAREIYKALCRRGQPGRPPAA

SEQ ID NO: 502365 - protein, 375 aa, unidentified
MNTIYIGVDFHARQQTICYLKTETGELVTAELKHQDKAAVRAFYEQFSGAVIVGLEASGYSPWFERLLEDLGCDVWLGHATEIRRRARWRQKNDRRDAELILDLMLHDEFPRLHRPAVQSREVLRMLRYRQKLIKIRTMSKNSLQALAIQAGLARGSRLFTKEGQQQLSAAEMSPVMHWQREHWLQLMEPLNQQLLETMVWFKAQSKGDVSISRLRSHPGIGLLTSLCLVHSLQPVSRFRNSRKVAAYGGFDPVERSSAERKCFLGISKAGSRVLRYLLVEAAHTAVRKDEELKRFYQRLAERRGRPKAKVAAARKLLIRAYIMLRDEIDYAEFRRRAVAARLARASHRPNVPESLIGQPASAERQEQLTRTKKK

SEQ ID NO: 502366 - protein, 347 aa, unidentified
MRFYTKQHKFYCGIDLHTNKMYLCILDETGEIRLHRNIETNRKIFMKTIQPFKEDIVVAVECMFTWYWIADLCVKKNIPFVLGHALYMKAIHGGKAKNDKIDSRKIAVLLKGGMIPQAYVYPQKMRSTRDLLRRRNHLKNKRAELCAHIQNTGSQYNLPEPFGCIAKPKYRKGVAESFDDLSTRMMIETDLAVINAYDPIIAKMERYIIHSAKHHDPVSHALLNTVPGIGKILSLVILYEIENIKRFPRVQDFVSYSRLVKCTKESNGKKYGSSGKKIGNAHLKWAFSEAAVLFLKGNEPGKRYLDRLANKHGKGKALSILAHKLGRAVYFILKNKKPFNQDKFLGL

SEQ ID NO: 502367 - protein, 412 aa, unidentified
MKDLLEISCGLDVHKEKIVACILTGPLGKPTRSEIREFTTLIPDMIALRDWIVSQNCHHVAMESTGIYWMPIYEILEDAFSGDITLLVVNARHMKNVPGKKTDMRDSEWISILLRAGLLNGSFIPEKRIREFRDLNRYRKSVIHDITSQKNRIEKFLQSSGFRLSSFISDIFGASGRNIILHLMEHGQIDKAALDSCLKTKTRNRIDEILMSVNGTLSEHQKTFLKILMTHYDSLKEHLTEVETSLEEDMAPFTLQVEQLNSIYGISTTASCAIIAEIGIDMEPFKTAEHICSWAGLCPGNNESAGKRKSASVTKGNPYIKSMLCEIAWVIAGKRNTYLSAWYWRIKQKKGAKKAIVALARKLLVIIYTMLKQGTLFDESCFETRRKNCEQKQLSRYIRELEKHGYHVEAQS

SEQ ID NO: 502368 - protein, 312 aa, unidentified
MPDKLFLGIDVAKDWIDVAIHHGPTQRIANTGPAIEDWIDTLDCSQIGLIAFEPTGGYERTLRRCLCQAGLAFARVHPNEVTAFRTRRGVKAKTDRLDAALLAAFAALELATRGLAPLVETDDQLREMVARRRQLVDTLHAERCRAAMAQVPVVKKTLARVIKVLETALDGLEAEIEAHIDAHAELRLTARRMRTVCGVGPITVQTMFGELPELGRLSGKEIAALVGLAPRNHESGRQRSRATTGHGRPGVRQVLFNAARCAIRWNPVMRAFYQRLTTVHRRPGKVALTAVMRKILVTLNAIVRDQQDWKHA

SEQ ID NO: 502369 - protein, 366 aa, unidentified
MKRKVYVGMDVHKETIQIAYLTSNSKEILKEQQIKHNEVQIKKFIKKLKTEWNEIHCCYEAGVTGYPLYRYLKSLGVNCILVAPGKIPRQNTDKIKTDKRDAIKLARLMRSGELESIHVPSEEDEAVRDYLRSRDSLRLDLGRNRQRLMKFLLRKDIKYSTTKYWTVSHYKWLNNLHFNNEILQETFNDYYSRVRVQEENLKSMDKKIQEIAESEPYREKVGILRCFRGVDYLTAMFLLCEVNDFKRFKTAGSFMSFLGLVPGEYSSGSKRKQTGITKTGSPRLRRILTEAAWQHRFPGTGSKIITARRSGQPALVVALAEKASLRLHKKFRNLQRKNSSSDDNGSFKRVIRISLGGNESCSLKLE

SEQ ID NO: 502370 - protein, 345 aa, unidentified
MQIKSIGIDLGKTTFHLVALGAHSQVVIRKKFSRQQLLTYAANLPSCLMGMEAGVGSHFLGRALREQGHEVRLIPAQFVRPFVKSNKNDYSDAEAIAEAVERENMRFVPIKTEDQLDLQALHRVRERLVSRRTSVINQIRAFLLERGISFRKGPASLRRQMPEILENADERLTARMRRLLDFLWQEWKHLQLQIESLSEDLEKIANSDVACVRLQQIPGVGPLVATAVVSAIGNGAAFHKGRQFAAWLGLVPRQWSTGGKPKLLGISKRGNPYLRKMFIHGARAAVLRVKREGSCLGQWMSGLETRAARNVVIVATANKLARISWAVLSSGNDYRPMHRALRCSS

SEQ ID NO: 502371 - protein, 355 aa, unidentified
MNDTKYIGMDVHRESISIAALNSAGKIVLECVVETKASIILQFIDGLRGELHVTFEEGTWAAWLYDLLKPHVRELVVCDPRKNASMKQGNKSDKIDARQLAELLRLNHLNPVYHGEHGLRTLKELVRSYLTITKDLGRVMTRVKALYRSWGIPCTGKQVYAPQHRVEWLAKITEPGVRRRAEFYYQQLDALRSLRREVRRELLEESKKHQAWKRLCQIPSIGPIRAAVLLGILQTPHRFRTKRQLWSFGGLGIETYSSADHRYVEGQLKRSKKPALIRGLNENCNHDVKNLLKGAAIIASTKPGPFQEFYTALLAKGMRPEMARLTLARKIATIVLIVWKRGVSFDAQHLKPQTA

SEQ ID NO: 502372 - protein, 410 aa, unidentified
MDLLHPLCAGLDAHKDSVVACLRRMREGRVEREVRTFGTTTRELLALSEWLSSEGCRDVAMEATGVYWKPVWHILGDGDFELVLANAAHVKNVPGRKSDVSDAAWLADLLAHGLIRASFVPDAQTQELRGLLRTRKQLVRERSSHVQRLQRTLEDANIKLDSAISDVTGLSGRAMIEALIAGETDPGKLAALAHPRLKASPVALREALRGRVTRHHRFLLQLHLRQIDALNGAIREIDREVDEGTGPFRAALGILSSIPGVGQLGAQVISAEIGIDMSRFPTAGHLISWAGLCPKSDESAGKRRSTRMRKGAPWLKTTLIQCAWAASRKKGSYLQAQFHRLRARRGAKKAIAAVAASILTAAYHMLKDGAFYQDLGPEHFDRRAKGAQTKRLVTRLQSLGYTVQITPIAA

SEQ ID NO: 502373 - protein, 322 aa, unidentified
MTRIICGVDISSLSLEARIGPEGAFASFSNNPQGIMALASFCQAHQVELVAMEATGGYEQQALALLWEQGLPVAILNPRAVRRFADSMGQMEKTDRLDAGMIAWYAQTRRSQPACLSSASQQQLRALVTRLRQLTEVRTAQLNQSRLVTDPAVLLLIDELLAVVARQIRELETSIAALIAQDPLWQQLDQVFRTIKGVADRTVARLMADMPEIGTLSNKAISKLAGVAPLARDSGKHQGKRAVRGGRASVREILFIVASVVGRYEPDFILFQQRLSAAGKPRKVIRIALAHKLLVRLNAKARQVRQNFAAPLPLSPLATGTH

SEQ ID NO: 502374 - protein, 408 aa, unidentified
MKRYYAGVDWADREHQVYVEDENGDKIMERNVQQTAEGLAEFGRWLDERRAEGIELWAAIEKPHGRIVDFILGHGVVVYPVNPKALDRARDRFRMSPSKSDGFDAYVLAEFVRTDHAHLRALEPNSEQAEELKLLTRDELRLERHKTRLLNQLTVTLKEYYPRPLEVFSDLETKIARDFLKTYPTPRALSELTRRKWNRFAKREHHLSEERCKELWENLRQPQLAVPEHVVRAKAQLLSALLVQLEALSDAVESYKQKVRSFFASMPAAKLVTGLPGTKTGTIVAVLWAELGDANGRWQSFPHLQAEAGVVPVTRASGKSRVVQFRFSCNKVMRHAAYWLAFVSLNRAEWANHFYRNQRAKGHSHHQALRALGAKWLKIIFVMWRDHKPYDENYHLANIARQKMRQAA

SEQ ID NO: 502375 - protein, 312 aa, unidentified
MSTSIVYIGADVAKDSIELFAENLSLPSSIPNTPAGFRLLIKAIKKSAKVTHLICEATGPYSKALARAFHCAELQVSVVNPRQVRDFARASGRLAKTDKLDAQILASYGGKMQPAPTQPNDPAYEELAALTTRRQQLIEMRNAETKRLAQIDHPHIKRSIASSIKELTRKIESFEVLIKETIENSPPLLAKVESFCKVKGVGPITAALLIAACPELGTLNKNQVAALAGLAPVCRDSGAMRGKRSIKGGRLNMRTALYMAALSASRSNPHLKPFYQRLRAAGKPFKLALTAVMRKLLIHLNSLARCPIPTPI

SEQ ID NO: 502376 - protein, 408 aa, unidentified
MRIVGLDIHRVFAEAMMLDDGVVKRLGRIGMTRNQLAAFAKTLTHDDHVVVEATGNASAVADAIAPHVGRVVIANPRQVRMIAHAKIKTDTIDATVLAKLYASNFLPEVWVADARTLALRRQVTRRNQIVRQRARLKTIAQSILHAHLVPQCPHADLFGIKGRAWLLAQHLPEDELEALERHVREYDRIGEDLRVVERELARDALSDADVKRLMTIPGIDMVVAVGLTAAIGTISRFKTPDQLVSYIGLNPSVHQSGEGRAHHGRITKQGRTHARTMLVEAAWQAVRGPGPLRGFYQRVSARRGNHIAAVAVARKLAIIVWHMLQKGEDYAGVRPTLHAKKLRDLELRSGQPARRGQRGSTYEYNLTRTRQEDKRRAEQAEVAYRRFTEGWTKRGRRLPTGAASEERR

SEQ ID NO: 502377 - protein, 391 aa, unidentified
MILVGIDVAKDKHDCFIMSSEGEVLYKSFTIANNMEGFNELYQKISSTSDDLSKIKVGLEATGHYSYNILGYLLDKGLTTFVINPLHTSLYRKSLSLRKTKTDKVDSHTIASMLMSDVNLKSYSETLYHNEELKSLTRYRFDKVKERAKLKQSISRLVTILFPELEKLVSTLHMVSIYALLSEFPSAKAIANAHLTKLTNLLYEVSKGRYTRETAIMFRESARNSIGSYMPAKSLELKHTIKLIGELDNEIEEIEAEIKRIMDEINSPIRSIPGIGLAMGAMIVAEIGDFSNFDSPDKILAYAGLSPSTYQSGQLYSTHAKMEKRGSRYLRYALFNATKFVCNWDPTFSAYLAKKRAEGKHYNVAISHAAKKLVRVIYQLQKSGQSYIKAA

SEQ ID NO: 502378 - protein, 425 aa, unidentified
MNYKQNEKINQVKESTLVVGIDIGSTTQYARAFDWRGIELGKVFTFSNSREGFESFKAWMQHLQDKYRKSDVIVGIESTGHYWFDLGAYLEDEGILLVMVNPYAVKQTKELDDNSQSKNDRKDPKVIAKLVTEGRYSAPYTPDGVYADLRIMVANRKRLIREMTQIKNRFARWFAIYFPEYTDVFGDYEAQSSMLLLKKVCTPEAIVELGAEKINQIWRDAKLRAVGMKRATTLCETAKRSIGLKKGSSAARYEMKLLLEDYEYKKAQLDAVMEEIEKLCRKIPESEQMLAIKGIGVITVAGFLAEVGDVRRFESPRQIQKLAGLSLRENSSGKHKGQTTISKRGRSNLRAVLFNAAIPLIAKNPEFKSLHEYYTTRANNPLKKKQSVIAISCKLIRVFYAILANGVTYDAQKMLSDIHRQPQAA

SEQ ID NO: 502379 - protein, 436 aa, unidentified
MMRIVVKRGAGLDIHKKTVVATRMRVGEDERLVWETKTFGTMTTELLGLYDWLQEWECSQVAMESTADYWKPVFNILEDAFEVLLVNAQHVKHVPGRKTDAKDSEWLAELLIHGLLKPSFIPPKPQRQLRDLTRYRATLVQERARIVNRVQKLLEGMNIKLSSVATDVLGVSGRAMLEALVGDRLSPAEMAQLARGRLRNKLPELEKALTGIVASHQRKLLALQLEHVDFLDEQVEELNADIRQHIEEMDHLPSSENQPPESGTTDETSTGAPLPPMSYGQALIVLDTAPGVNQNIAERILAELGADMRRFATPEQAAAWTGLAPGNNESGGKRYSGRIQKGNFALRTALVQAAWAAVRDKDTYLRALYNRVVVRRGKKRAIIAVAHSLLKSIWHMLAHHEPYRDLGADYFDQRNKESKVKYHLRQLEKLGCPVQI

SEQ ID NO: 502380 - protein, 351 aa, unidentified
MLLMGVDYHPSFQQIVLFDEETGECGERQLSHSDGEAARFYRDLQQRGVRVRVGMEATGYSRWFERLLAELGFELWIGDPAEIKAKRVKKQKTDRKDAQLLLRLMREGNFPRIWVPSPENRDLRQLLWHRHRLVQMRTRIMNQLQALAMNEGRRWKTKLWSERGRAELEKLALAPWASRRRQELLELLDRLHPTIEELTTAAEQEARKRPEVVRLMTHPGVGPLTALAYVLIIGTPERFHRGKQIGTYVGMIPSEDSSAGKQQLGHISKQGNSLLRFLLVEAAQAAARINPEWRRRYTHLAMRRHKSIAKVAMGRRLAIRLYWMWRNGCAYSPSLEFGSYVGQLGTGHGVQ

SEQ ID NO: 502381 - protein, 452 aa, unidentified
MAKKKKINRKKTVKHLHVLQPNSAGIDIGATEIYIAVPDERASKAVRRFDTFTDDLHDAAKWLKKCGIESIAMESTGVYWIPIFQILDTYGFEVILVNARHVKNVPGRKTDVIDCQWLQYLHSVGLLRGSFRPAQDICAVRSLLRHRDNLVKAAASHIQHLQKSLTQMNLQIHNVISDITGVTGLAIIDAILAGERDPKILAELRDPRIKADKQTIVKSLIGDFRSEHVFTLKQTLQSYRNYRQLIQGCDREIENHLKKFESRVDLDSLPPLPPGTPKRKPKGNEPDFDLREHMYRLLGTDLTQIDGISGLTAHVFFTEVGPDLSMFKNVKHFCSWLGLCPNNKISGGKILSSHTRPGSNRFAHSLRISANSLWNSKSYLGNYFRRMRSRHGAPKAITATAHKLARVIYHLVKTQKMFDDTVFAEQEKNHQKRFEKRVLRQAKALGFQLVPA

SEQ ID NO: 502382 - protein, 369 aa, unidentified
MKKDSTLYVGLDVHKDSIVAAYASSEGGDPVHLGAIGTRQCDIDALVRKLQSKGARLVFVYEAGPCGYWLYRYLTGKGLACLVVAPSLIPRKPGDRVKTDKRDALTLARLARSGDLPPVYVPQVADEAIRDLARAREDALGDLNDARFRLKALLLRHDIRYTGRANWGDEHRRWLARFVFPTPAQQIVFQEYVRTVTERTELLGRLEAALLEQAKTWRMYSVVEALQALRGVQFTVAIITVAELGDLTRFERPPELMKYLGLTPSEYTSANRRRLGGITKAGNGHARRALVEAAKAYRHRAKVSEQIQARQQHLPKAICDIAWRAQVRLCGRYRKMLARGKHPNTIAAAVARELIGFMWAIAKEQPVAA

SEQ ID NO: 502383 - protein, 417 aa, unidentified
MAEEIEWFVGIDWASQSHQVCLVDARGECLGERAVAHDGLGIEELCDWLIARTGATPEVIGVAIEMTQGPVVEALLERGFCVYGINPKQLDRFRDRFTVAGAKDDRRDAHVLADSLRTDRHAFRRLSNDEPVIVQLREWSRMADELQQERARLASRMREQLWRYYPQMLELADDFAADWFLDLWNQAPTPAKAVRLRETTIERFVKAHRLRRWPAPEVLRILKQKPLSVAPGVVEAASDHIRPLIVRIRLINQQLKAAHRKLDELCAQLIPSEEDEPGQRCEQRDVVILRSMPGLGRIILAVLLAEVWQPLRRRDYHALRSLSGVAPVTRRSGKTCVVVRRYACNKRLANALYHWARLATQHDALSRRRYAALRQRGHSHGRALRTVADRLLSVACTLLEQQTLFDPSYEVRDAAGA

SEQ ID NO: 502384 - protein, 368 aa, unidentified
MEKSITYVGLDVHKNSIAVAFADEYGAEIRSYGTIGPDPESLDKVARRLVSQGKGPRFVYEAGPCGYKIYRHLRQQKFECMVAAPSLIPKKSGDRIKNDRRDAMMLARLYRSGELTPVRVPSAEDEAMRDLSRARGDAKKAERKARQQLGAFLLRHGFRYSGLSHWSLAHWRWISDIKMDHEAQQFTLQEYVDTVRSCTERVDRITEQIRLLVGKWRLGPVVEAFQALRGVSLVVASTVVAELGDLTRFDTPRQVMAYLGLIPSQHSSGDKIKLGPITKTGNGHARQMLTEAAWSYRMPARVSRRLRDQQQNLPEKVWQIAWKAQVRLCARYSRLLARGKPSQLVITAIARELAAFMWAIARTVEISA

SEQ ID NO: 502385 - protein, 403 aa, unidentified
MTATRTLHSTTPTLDLPPAARPPVLYLALELGWNEWKLAFATGAADNPRLRAIGGRRTAALLQEIAKAKERFNLPADTPVVSCYEAGRDGFWLHRFLEAQGFANGVVDSSSIEVKRRGRRRKTDRLDAAKLVSMLMRWHQGEPNVWSVVQVPSVSDEDRRQLHRDLLEMKAERTQHVNRIKGLLAGCGLAVARVGEDFATVVAELRSWDGQPVPAELQKRLLREHARWQFVDRQIKDVENERARKIRTATEEPLAKVRQLLNLRGIGANSAWLFVMEFFGWRRIRNRKQLAALAGLTPTPSQSGDSSHEQGISKAGNRRLRTMAVEIAWCWLHFQPGSALSQWFQQRFGKGNSRQRRIGIVALARKLLVALWRYLETGVAPAGAEVLDWKTKKARPQEEAVPV

SEQ ID NO: 502386 - protein, 347 aa, unidentified
MNFYHSTHRHYCGIDLHARSLYVCILDQQGEVLLHKEIKAQPELLLAMLEPFRDDLVVGVECMHCWYWISDLCEEHGIHFILGHALYMKAIHGGKTKNDRIDSFKIAMLMRGGNFPLAYVYPKEMRATRDLLRRRTRIVRHGAMLKAHAVNTLGQYNLPPSKANLNNPGGRSQLTAAFSDPDVQRNIDLDLAIVDCYQHELKKLEWHLEQQAKQHDPASLNVLKTIPGVGRILALTILYEVGDIQRFESVQKFASYARLVKCKAESAGKIYGTQGNKIGNAHLKWAFSEAAVLFIRNNDKAKRYVEKLQKRMNKPKALSALAHKLGRAVYFMLKDKRVFDEQRFLRG

SEQ ID NO: 502387 - protein, 419 aa, unidentified
MEIMYERVAAIDVGKKEIAVTVRVPGEGPGAPRVQKIRKFKTFYPVLAQMAAWLVENGVTHVAMESTGVYWRPVFHALCEADADFEILLVNAGHVKNVPGRKSDVKDSEWLAQLLEVGLLRASFIPPAEIAAIREVTRYRKKLIQSHTSELQRLGKVCEDAGLKIDSVASRLTTKSARDMIEALIAGQRDPRVLADLARGVMRKKIPDLSMALAGRFAAHHAVLAQAHLDHLDHLETMVARLDTQIEEMTLPFSAQIQALCTIPGISDRLAQVIISEIGVDMSRFKTADHLASWAGLCPGNNESAGKHGNTRTRKGNREIRTALVEAAWAAARTNTYLGARFRRLHRRFGKKNGGKAAVAIAHNLLIIIWYILRDGVEFEDLGPDYFTRPGSPATDRRKDQLVHELRALGFIVEVTPAA

SEQ ID NO: 502388 - protein, 397 aa, unidentified
MIAVGIDISKAKSTVAVIDSDGTVLASPFTMAHTQPEMEAFVTYLKGLGEPTTILMEYTGHYHYPVLKKLQDEGFPVCIVNPYQMKKYGDVEIHKAKTDKKDALRIAAYALEKSYKLVPYSSMEQKYEDLKFLSRQYNQRISYVAKLKVQLIALLDQTMPGITRILPLNSRNPEKCALLLFIKRFKSFDEIQRIGKARFLASYDVLAKKASERSASSKGLSIYELAVDSITTRGEDPYIWLSQNQCVDLLSATQNAADEIISQMRNIAETIPEYKVLRAMRGVGDRLGPIILAEIGDIRRFHSGKALNSYAGNDAPPYQSGQFESRNHHISKRGSSTLRKACYEVMQALKLTKPQDDPVYLFMLKKEQEGKPFNVAKMAGVNKFLRIYYARAMELYK

SEQ ID NO: 502389 - protein, 372 aa, unidentified
MHQSSTLYVGMDVHKESIAVAYVAKDHDAEVISLGTFGTRQCDIDTLIRKLQSKAKHLVFVYEAGPCGYWLYRYLAKKDYVCWVVAPSFMPKKAGDRVKTDRRDAMPLARLMRSGALPPVYVPAVDDEAIRDLSRAREDTLRDLKAATLRLKAFLLRHDIRYTGRANWRPAHLRWLSEVVCPTPAQQIVFQEDVQTVTEQSERLGRLELELHEQVKTWRLAPVVEALQALRGVQFTVAVTTVAELGDLTRFENPRQLMNYLGLTPSAYSSGGRRQQGGITKTGNTHARRALVEGAWAYRYPAKVSRHLQLRLEKLPTAIQAISWKAQVRLCQRYRQLMATGKHANQVVVAMARELRAFMWAIAKQVAGSPQA

SEQ ID NO: 502390 - protein, 347 aa, unidentified
MVSWEQNPQARLGELHCQTGLVLYTAMSKTYIGIDIAKNTFDACFIVDDIWQHHTFTNTHKGFIELLRWVQSCYYNTSLHLIIEATGIYWEKLAHWAVSHHHKVSVVNPLYIHAYAKSLGIRTKTDKQDAILLARYGTKENPPSWQPKSNNEIKLTVLLKQRDHHKRQLIKERTRQESQSIYVKSYTDDNIRHWRESMIQIDDQIWLLIDKTPELKHRASLLATIPGIGKKTLPYLLATIGDGSSFQSAKHLASYAGLSPRHHQSGISIHKQSAIGFSGQKELRSALFMPAVVVSFGRYPTFEKFVKRMEKKGKTKKQIIIAIMRKLLTISHAVIRQNRPFDKHIHE

SEQ ID NO: 502391 - protein, 482 aa, unidentified
MKKKNIYVNQSQELLTLFEEAGNSAEIMCVPIDYAKKDHVVMFCNGYGDILRKPFSVKNNPEGVSYLTEQVTRSCHNRSINPKHVFFGGEDVGSYAENFASTLRSGGWLVAGVNAHDAKKQRANMQASTDRLDLMGIATMLLNRRCNCSPAQSGIYRNLRTLVRHRRRLVVMTTEVRNRIHAIVDRLFPGFLDERKSGIAPFSKSSLYLMENRFSAQQIRGRKRSALIEALRRLGTPKPDCAAAKLQQHAAWVLNTPDEYVATLQLSLAQHIKHYRCLQENTDQMEKEIAVWLSQTQGAFLTTVRGIGIVLAAGVSAEIGDPFQQKPLNNLVSYAGIIPRIIQTGGPEGEIYTGKVARRSNRILKDYVVQSASHLGLHGPEDLMSDYKRRDAAGQHADFSIARRYLRMAMCLMRNSQVYLPPRLRKKDSKPEGRASYYLMTWPYLRDKWQKLDALKAAFAEDRPLGRWRNMVQGIYDIKLEL

SEQ ID NO: 502392 - protein, 383 aa, unidentified
MDSTKYIGMDVHKDTTSIAVMNSAGKVVMESILETKALTILQFIQGLRGNLLVTFEEGTWAAWLYDLLKPHVTKVTVCNPRKNALLKSGNKSDRIDAQKLAELLRNGSLSAVYHGENGLRTLKELSRSYLAVNKDLTRVMNRLKALFHSWGIACSGTQVYAPRHRSEWLEKITEAGVRRRAEFTYQQLDGLQALRQAVRRAFLAESRKHKATKLLRQIPGIGPIRAALLVALLQTPNRFRTKRQLWAYSGLAIETHGSGQYCYLEGQLRRVKKPVALRGLNRNHHHDVKWIFKSAAVKASSPSGPLHQFNEALLSKVIKPSLARLTLARKIAAITLTVWKKGVRLCAGINRHEVENARVLRERTSDSPGPEFCAEHREVHSEA

SEQ ID NO: 502393 - protein, 421 aa, unidentified
MTPPNGMVWAGIDTHTDTHTIALLDERGRPLGSETFAANPDGYDRLIDMLPGPGAVAAVGVEGTNSFGAALARRLAAAGYEVREVLRPKRNVRRRNGKSDPIDAVAAARSVMAGDDAGPPKSSDGWVEALRHLNAQRAQLVSAMTAISNSTNGLLVTAPEPVRERYRGLKGGARMNRLAECRPAGGLVEHSALVALKSAAKAWKALKRQSGLLEERMRAILEEHARPLLDMYCVGTVIAAALAIVAGDNPERIRSEAAFAKLCGACPLPASSGRTSRHRLNKGGNRQGNVALRRIAIVRLRYHQPTRDYAARKTREGKGKLEIIRCVKRFVAREAYRALIAIRNGGNGRGTSGERGARLRELRMNHGITQQQVGEALCVPSSRISEIERGRRDLPELEQRAIQWIHSITDPKQHAQTLDNV

SEQ ID NO: 502394 - protein, 387 aa, unidentified
MYKYFLGIDISKDSFDFSFTDETEKVLYKDHYQMDITDFTKLSEYLTQFSKDEILIVMEATGIYHLTLLSYLLEQGLNVSVVNPLFIHAFTKSMTIRKTKTDAKDAHIISIFAKRNYATIRLSSASDIETIKPIVREKEKLTNQISAIKTDIKSLVNQVFPEMLKNTNIFLKSSLNLLLQAPSKRIIRNLKEKKIASYLACDTNRGAKPKVDAKEILLMAKNSIGINNQSLEKILVSKIKQLEFLQTQLDEFNETIEKFVDEHHHDDMDLLTSIGGVGKPSAASFLTELGDIDNFVTYKQLTAFIGTDPTIYQSGTSVNVKGSISKRGNSHLRRILWHMARAATVWNETLKAYYDKKRNEGKTFKQSVIAVANKLIRIIFFYVKEQH

SEQ ID NO: 502395 - protein, 412 aa, unidentified
MTAINQFAAHVGLDWADKKHDVCVQFKNGKRIFQVVEHTPEALDIWLNELHQKVKGRIAIALELKKGPVVYALQKYPFVTVFPVHALSLARYRQTFWPSGAKDDPQDAELALELMLRYPQKIKAIEPDNGNIRLLQQLVEQRRLLVEDKRRFVNRLINTLKQYYPQPLEWFSHRGSLLLCELIIRWPSLQQLKRARRDTIRNFLNAKGGRAMALTEQRVANIDNAIPLTTDLSVIEANALMATALATQIKVVSEIIKTYDERIETLFDTLPDAGLFKSLPGMGPCMGPRMLAALGDNRDRFNSAEEIQNYAGIAPVTERSGQKSWVHWRWQCAKFVRQTFVEWAAKTVNSSYWAKLYYQRQREKGKSHQSAIRALAFKWIRIIYRCWKTRTRYDEAKYLLTLEARKSPLLKP

SEQ ID NO: 502396 - protein, 329 aa, unidentified
MTKLSKKVIGVDVGLKFLTVSLNDSNNQDQVYNIENSRGSILSFLKKISSDDYCFVIEATGNYSSRVLHLSLEKGFETSLINCMSIKHFCRMKNIITKTDAEDAKAIRLYGELFRPESYVSKSIEIEHLDQEIKLLNDLEEEKRRYTVKLKALRFNPYLNPNTEKHYERRLKQLEKEIKEVELRLPKLQDEEFKKVKDLIQSVSGIGEKTSLQLMTATSGFKNFDSAKSLVKYFGLAPRIYQSGKKSYSPGKCRTSKTHIRSLLYVCSWTAMKHNVHCRELYQRLLAKGKPKKLALIAVCNKLLRICFGVVKNKTAYQPDYQKNFKILT

SEQ ID NO: 502397 - protein, 409 aa, unidentified
MNTGTITAVGIDVSKHKSTVAARRPGGEVVLLPFDVEHTAEGLKKLITKLRQLDGEIRIVMEHTGMYWRPIAMTLKEAGFYVSVVNAILIHNFSDNSIRKVKTDRADAMKIANYGLTFWIDLQEYAGEDENRQLLKIQSRLYERTATTAGMLRNGLISLLDQTFPGANKLFRDDSRNSKGHVKWIDFVLRFWHKECVAALSLAAFTDTFQKWCKRTGYKFSASDAERIHAIARNAVATLPKNDSTKLLITQATNSLNAIYDSLQAIRTEMDRLASMLPEYELVMGMEGIGKVTGPQLMAEVGDVRRFSHKGALVAYAGVDASPYQSGSFDSKSRHVSKRGSPHLRRVLFVIMSMTLIRANTANPVFCFMDKKRAEGKHFYVYTVAGSAKFLRIYYAKVKEYLNALEETA

SEQ ID NO: 502398 - protein, 365 aa, unidentified
MKKISIVATKQSRNFSQQKLTIGLDLGDRSSWYCVLDEQGEVVLEQKLSTTPKAMKEGFGGMPRSRIALETGMHSPWVSRLLSELGHEVIVAHARNVRLIGESRKKDDRLDAQTLARLARIDPQLLSPVKHRSAKAQADLTVIRARAGLVRARTALVNTARGLAKSYGERLRGCSVRNMNPEKAEGLSAELQKALEPLLAGIEALSERIREYNEGIEQLAEQSYPQVARLKQVKGVGTLIALTFLLTLEDAQRFRKSRDVGCYLGLQPGRRNSGQSEPQMHISKEGDPYLRTLLVQGAHHILGPFGADSDLRRWGLRLAERGGKSGKKRAIIAVARKLAVLLHRLWVSGEVYEPLRNQRAMPAAA

SEQ ID NO: 502399 - protein, 356 aa, unidentified
MSVYLGVDFHARTQTVCWCDTADGLIHQRTLDHEHDDVRGFYTQFAVPAVVGLEATGYARWFHRLLEALGHRLLVGDAYVIRKCALRRQKNDRRDAELLLDLLLHGDFPAVHIPPIASQAVLRLLRYRQRLVEIQTKLRNGIQALALNHQLRLGPKLWSKQGQQQLLAIELDDTDVLQRENSLELLVQIRTRIRTLEKELTSRADQDARVRLLRTHPGVGLLTSLAVVHTLEPVTRFDRARRIAAYCGLDPRETSSGETVRMGHISKQGNRLLRHLLVEAAHRAVHSKADADLRNFYFRLMERKKNAAVAITAVARKLVLRLYRMLREDIDYTEFRRRGREARRARKTPSPAAGGC

SEQ ID NO: 502400 - protein, 346 aa, unidentified
MQYDAGIDVSLEQSSVCVVDAAGKIVKEAKVATDPHVLVTFFKGLGFPVTRIGLEAGPLSQWLYAGLIQAGFDVVLLETRHVKAALSAMVVKTDRKDARGIAQLIRMGWFRAVHAKSASSQEIRALLTARRLLLDKLRDVELSLRGVLRGFGLKLGKVTQRAFETRVRELVANHPMLQQITRSMLLARATLQREHNVLHKALLKIVRRDKICRQFMTAPGVGPIVAITYKTAVDDPQRIKKSKGAGPLFGLTPKRYQSGETDVIGGISRIGDAMVRAMLYEAANSLLSRTMRFSALKRWGLAVAKRRGMKRAKVAVARKIAVILHRMWIDGTSFRWSNKEKAAAHA

SEQ ID NO: 502401 - protein, 318 aa, unidentified
MTETICVGIDVAKASLEIALSAQGIVMTFPNTPEGHDQLASTLANYEIDLVVLEATGGYEMPVACVLQARGLAVAIVNPRQARDFAKAMGYLAKTDKIDAQMLAQLALVLSQQTDRDKIIRVLPSAQQQVLQAMITRRRQLVTLSVSKRQRLGSCHPEIRESITLMISFIQKQLKVIESALSKHIKAYYRSKLDLLSTVKCVGPATIATLIADVPELGKLTRREISALVGVAPFNRDSGFFRGKRTIFGGRAMVRRMLYMATLTAIRFNPVLCAFYKRLTEAGKPNKVAIVACMRKLLVILNAMIKTNKPWDESFHTV

SEQ ID NO: 502402 - protein, 357 aa, unidentified
MTTPQKYRSTLTLVAIDVAKVWNIVLLEEPNGKQRRFRVANTRNDHDRLVLFLRNQPGQCRVALEPTGDYHRPLAYRLLSEGFELYLVSSVAVARFREALFNSWDKNDSKDAAVILDLLKQEKLLRYYDPIVTGSHDLQEISKTYTQVTLAKTRLQHSILTHFLPLYWPEFGRYWHSSRANWFASFLLRFPVPELVRRVDRERFIQEAWELVGRKVNKRAKLEEIYQLAHETIALPIAPESFAVQAFRLQLARYLSLNQLRSQLETWAQEVLSENKDSQLLQSIPGIGPVLALMILAEAGDLRRFGHHRQFLKFCGLDLAKSQSGAWRGKERLSKRGNARLRYAFWLAGTVAVRMRE

SEQ ID NO: 502403 - protein, 462 aa, unidentified
MSKTKRPATLENLAVVHPNAAGLDIGAREIWACVPPGRDVETVKRFNTFTPDLQALADWLVACGVDTGAMESTGVYWIPVFELLEARGLKVYLVNSWHLKHVPGRKSDYLDCQWIQKLHSLGLLNGSFRPDGEMVTLRGYLRHRAQLLEHRAPHVLHMQKALQQMNLQLHHVLSDITGETGLKILRAIVAGERNPVKLAQFRNPACKSSEETIAQALTGSWKAEHLFTLRQSLELYDFYTQQVTACDAEIEKQFAAMKPRWDGPEEPPDVPRVKPGSKSKNQPKLNVRREIIRLTGVDLVAVEGISASLAQTILSETGTDMSKWPSDKHFGSWLGLAPHNDISGGKVLRSRTLKTHNRAGQAFRQAAASVIRSGSAFGAYYRRKRGQLGPMQALVATAHKIARTVYYMLKNRVQYHDIGAEAYEQKQKEREVAYLKKKAAKLGFDLLSHDSTAAIARAVAMV

SEQ ID NO: 502404 - protein, 409 aa, unidentified
MEVVHQRCAGVDVHLRFLVVCLSIVEGGQRRKEIRSFRNETADLLALRAWLLQERCGAVGMESTGVYWVPVYRRLEGFFELIVANAQHMKAVPGRKTDVQDADWIADLLQHGLLTASFVPSQEQQDLRDLTRLRVNLVQERTRLANRVHKVLDAAGCQLSAVLSDILGFSGKRILQALCAGESDPVHLARLMHPGVKATEEQVIAALTTEVREHHRFLLRELLELIEVQDRSISRLEVEIERHLSPFEEEMERCEHINGGSRQVLYVLMAEIGTDLERFPDASHLSSWAGVCPGQKESAGKRLSGRARKGNRYVRAALVQAAHGVRRSRTYLGERYRRLKKRRGSKRAALAVGHSILVIYYQMMNTGQEYQEKGEAFFERKDHGKVEQQLVRRLERLGYQVTLPEQPVA

SEQ ID NO: 502405 - protein, 340 aa, unidentified
MTIKTIGLDLAKSVFQAHGVDADGATVLVKKLHRKQMLPFFSKLSPCLIGVEACGTAHHWARTLSAMGHEVRLIPPSYVKAFVKRGKSDAIDAEAICEAVQRRTMQFVPVKTVDQQGILMTHRARSLLVRQRTQAANALRSHLAELGLVANPGVANLARLAEQALAGQNVLPSFARAALEIMLRQIVALGQEIAELDRQIAAWHAESEASRRLAAIPGLGVITATAVAATVTDPDQFRSGRQFAAWLGLTPQQQSTGGKTRLGGISKQGDRYLRRLLVVGATAVIRHTKDKSTPMAAWIRKLLEKKPFRLVSIALANKLARIAWVLLTRKEPYRPHQLGA

SEQ ID NO: 502406 - protein, 375 aa, unidentified
MTKHSEVFVAFDTSKLRNAVAIAEAGRAGEVRFLGEIENTAEATTKLVRKLEAKYERITFCYEAGPTGYELQRHIHGLGHECMVAAPSLIPKKPSDLVKTNRRDAVSLVKLLRAGELTAVWVPDRRHEAMRDLTRAREAAVIDLRAKRQRVSALLLRQGRCYPANKKTWTKVHMNWLAGQRFEQPERGIVFAEMMFAIRQAQERVERLEQAIRTAVPEWSLAEMVTAFMAFRGIDLVSATCLLAELGDLTRFPTAPEVMGYVGLGCSEGSTGDRIKRGGITKSGNRRARRTLVECAWSYQHPPRVGIAKQAKVAAAPAKVREIAWKAQCRLNRRYRGLLRRGKLKTVAITAVARELAGFLWAAARELSSPQRVAK

SEQ ID NO: 502407 - protein, 355 aa, unidentified
MNNTKYIGMDVHRESISIAVMNSAGKIVLECVVETKASVILQFIAGLRGDLHVTFEEGTWAAWLYDLLKPHVTRLVVCDPRKNASMKEGNKSDKIDARRLAELLRLNHLNPVYHGEHGLRSLKELVRSYLTITKDLGRVMSRVKAIYRSWAIPCTGKQVYAPQHRAEWLAKITEPGVRRRAEFYYQQLDALRSLRREVRRELLEESKKHKAWKQLCQIPSIGPIRAAVLLGILQTPHRFRTKRQLWTLGGLGIETYSSADHRYVEGQLQRSKKPVLIRGLNENCNHDLKNLFKGAAIIASTKPGPFQEFYAALLAKGMRAEMARLTLARKIATIVLVIWKRGVCFDAQFLKPQTA

SEQ ID NO: 502408 - protein, 423 aa, unidentified
MKVVYSICCGVDVHKTFFVATLITTDGIMPHYQKRRFSTFNNQILAFKAWLLENGCRDVCMESTGKYYIPVYNLLEDSIRVTVANPKWVRAVKGNKDDAKDSKWIGDLFRLGLVPGSFIPDKDTRILREFTRYRFKLVSCKSSEKNRYQNVFTVCNVALDAVVSDMFGVSASSITDYIVNSDTFDPEHCVSLLKKSLKKKANEVVESIDGFQMTAPQKQRAKFVREHYDYLASQIQKLDKVVDELVKPFEPAINLLCTIPGIRRDSAITVLSEIGTDMSQFDSSKRLCRWAGLTPGNNESAGKKKSVRITRAGVYLKPTLLEVAHAAVKSKASPYYRIKYEAISKRRGKKRAIIAIARMILTAIYHMISTGVVWNPSDLNQIDMPPELREKELQKSLRRAAKLLVAHGLVNPDAIQILGTVPA

SEQ ID NO: 502409 - protein, 428 aa, unidentified
MSDGMASSGRDAGAVAGALFVMGEEPGAIVAGFDVHRRQITIDALDTATGEVSRGQIESTPAAVQEWVWRFPGRVVHVAVEACTGWLFVSRAIERCGAIVHLAEPVETSALRGRKRRAKTDRADAKWLRQLLWDGRLPEAWLPPEHVRQWRSRARLRNTLVSERTSWTQRIRATLYHHGIAGAPDELRTLAGRQFLARLELPVDARERITVALEIIDLLDAQLAELERDLRALARRQTGCQALMTQYGMGEISSLVTLCELGDVTRLHASRQAVRMAGIDIGVHRSDRHAQLGKLTRQGSAPLRWALFEAAQSASHRTSPDYHDYHALKARGLSHTRATLTIARKLARRSYHILRALGPAALDPPDQRSDQAHPSPMRSKRAASSRSDRGTHAQRGGPPKTERPPSLHRNDRSTIKSPAANPRGRGPR

SEQ ID NO: 502410 - protein, 433 aa, unidentified
MHEVEDEPLFADRAAGIDIAKAGVEVTVRVPSEARAGARQQETRSFATTRRDLLSLADWLRSWGVTKAGMEATSDYWKPVYFVLESQGLDCELYHAAAVKALPGRPKTDRADSVWLARITERGSLPSSFVPPEPIRRLRTHTRYRRHLTQACTAEKQRVEKLLEDGHLKLSSVISSIHGVSGRSMLEAIIAGQRNPKVLAQLARGTMRGKIARLEEALDCSFFTDEHVAILGMMLAAIDSLTAQIGQLTARIEVLAEPYLRQIEQLDAVHGTGRISAQDVIAEIGVDMTIFPTAAHLVSWAKWCPQVAQSGGKRKGSNAAGRGNPYLSAALGEITISAGRTQSFLGAKYRRLVKRMPKRKALVATGNSVLTIFHALLSDPAASYHDLGPDYHQQRTGIRRQARNHIRNLERLGYHVTIQAINPDTGELLTPTA

SEQ ID NO: 502411 - protein, 346 aa, unidentified
MIETTIIGLDVGKLIFQVHGVSADGKVTIKRRLRRSGVLKFFARLGRCIVGLEACGGSHFWAREIEAIGHDVRLIPAAYVKAYVKRGKTDAVDAEAICEAVSRPTMRFVPIKTANCQAALMVLKTRDLLVRQRTQAINAVRGHLAELGIVAAKGLAKIGTLIAIVRDENDQRLPPAARTALKLLVDQIELLTDRIDALGREVVAEVRRDDRMRRLSTIPGIGPITAATIQALVPDPRVFTSGRHLAAWIGLTPKMHSSGGKEQPGKISKMGNPTLRSLLVVGATALLRHVRRGATISPWLTALLKRRPAKVAVIALANKMARIVWALLTKGGTFVQKHRTAERAAA

SEQ ID NO: 502412 - protein, 375 aa, unidentified
METIYIGVDFHARQQTICYLTTETGEFVTHELKHQDKDEVRTFYSQFVGCVIVGLEASGYSPWFEQLLEELGHEVWLGDATEIRRRARWRQKNDRRDAELILELLIHDEFPRLHRPSLESREILRQLRYRHKLVKMRTIIKNSLQALALQSGLSRRTKLFTKAGQQELRVAPMSPVMKQQQEQWLELLLVLNQRIVETTLWLKQQSLNDARIRLLRTHPGIGLLTSLGLVHTLDPISRFRNQRKVTAYAGLEPMERSSAERKRFLGISKAGSRLLRFLVIEAAHTAVKKDDDLKRFYRRLQERRGRPKAKVAVARKLLVRSFIMLRDEIDYAEFQRRAVAARLARQSSRPSVPDRLIGQPASSESQERVLSAAQK

SEQ ID NO: 502413 - protein, 420 aa, unidentified
MMSKQNVEIAAFIGLDWADQKHAVTLQESSSDQRQRFTLDHTPEALQNWIQSLRDRFGGKPVAIAVEQKRGALIYALMHVEFLHLYPVNPVTVAKMREAFYPSGAKDDPRDADLLLDILISHRRHLRVWAPDDALTRSIQLLTEDRRRIVDERTALTNQLTASLKMYFPQALDWFGDLHTARACAFLKRWPSLDQLKQASSSSIRKFYKAQGYRGDEKLEQLVGNIKKAQPLTRDSAVLLSCSMKVETLVQQIPLLTEAIERYDQKIAVLFNQHDDSTLFGSFPGAGAALAPRLLAAFGSNRDRFECASQVQELSGIAPVTEKSGEGLWIHWRLACSTFLRQTFHEFAGCSILQSDWARACYDQLRNRGKSHHAALRALAFKWIRIMFRCWKNRTPYDEILYCNSLKLRRSPLADELPAT

SEQ ID NO: 502414 - protein, 447 aa, unidentified
MAGVMIGIDPHKASHTAVALDARERRLGQLRVRASSRQLEGLLEWAGPWPRRIWAIEGARGLGQLLAQQLIACGERVLDVPPKLAARVRLLDSGQINKNDVNDAHSVAVAALRARELPELTAEDHTMVMRVWSRRYHDLGRLRTQAVCRLHALLRELVPGGVRKQLRTGQAIAITDSIVAESPIAQAKLALARDLLADLARIDAQRREVKRRVAGAVAATQTTITDVYGVGPIVAGTVLGYVRDIRRFPNRDRFASYNGTAPIEVSSGDRVIHRLSRRGNRQLNHAIHVAAVTQIRHPGSEGHTYYRRKREEGMTGKCALRALKRKISDTLYTRMLNDARHHDLASKDPGGHSGNDAASSATGSHPDTPALRTSHSRAKDNSRTATAGGVLAPRPAPDRRPTRRSATGVQVEPPPGPAPRARAGTTLTPASTGRQSQRRSRPTSPST

SEQ ID NO: 502415 - protein, 375 aa, unidentified
MSKIRFLGLDVHADTIAAAVAEPDGEVRPLGMIPNRLESIRKLIAKLGPAKELKACYEAGPCGYVLYWQLTALGVACQVIAPSLVPTKAGDRVKTDRRDAAKLARSYRAGDLTPVWVPDAAQEALRDLVRAREDARQDQLRARHRLNKFLLRHDRRPPEAVKKSWTLKYMTWIKEQVHFDQPALEATLLDYVHEVTHMAERIERLEKAIDVAIEKAPAEMRAVIEALQVLRGVAKITAVSIVAEVGRLSRFQKATQLMGYSGLVSSEFSSGNRIQRGGITKTGNAHLRRVIVEAAWAYQRRPWVGGALLKRQQGLDQELKDLGWKAQWRLYHRYCKLTARGKNKNQTVTAVGRELLGFIWAIGVRTEARFAACAA

SEQ ID NO: 502416 - protein, 311 aa, unidentified
MTIDTIGIDISKATLDIHRLSDGKAISFSNNPVGFRALSKFCAKSGVRRVVYEATGAYHSGLERALGAHLPLVKVNPLQARRFAQAQGVRAKTDAVDAKMLAEMGNAFALEPDEPIAKIQHDLKELRAFRAGLIKDRTGIICRLKTQTLSITRRQSKARLAQVDKQIAEINAEVDRLINSNDDLAHSMNILRSIPGIGAVCAATILTEMPEIGSMDRKQVASLTGLAPMTRQSGQWRGKSFIQGGRKIVRDALYMPALVAMRHNPDFKAKYQALIKAGKPPKVAITALMRKLIELANALIKADRNWVNKGA

SEQ ID NO: 502417 - protein, 350 aa, unidentified
MYFAGLDAHLKYVTVAVLDRLGTIVLETTVSTREPERLLAVLAPFRPLEVVVETCPFWPWLYDLLVPAGIKFHLAHAKRLRAIATAPQKNDRVDARLLARMLLSGLIPEAYPRPGDQRELLRLLRHRTALVRARTRLAGRIHSQLHQQRLLLSREQLLRQATRTWLRETAWPRLTAEQQAIVTTHLALIDHLTPLIQALERRIDTAAGANPPAALLATIPGIGPYRSLLLAAELSPLSRFPRVEHLASYAGLAPVTRSSGGHTRHGSIPQGANRWVRGALVSAIPSHVRSAPTSSVTRAYAQLTARLGWRVARVAAARKLLRIVYIMLRRGEPWRGAGRVEADVRDEVHA

SEQ ID NO: 502418 - protein, 356 aa, unidentified
MSRDIKYIGMDVHKEAVVIAVLNGTGKQVMESIVETQANSILQFIHGLQGELHVTWEEGTWAAWLYDLLKPHVQQVLVCNPRRNALLKEGSKSDKIDAQKLADLLRTGMLRPVYHGEHGLRTLRELGRSYHTISQDLNRVMNRIKALYRGWGIACGGTQVYAARYREEWLDKIEHKGVRRRAELLYQQLDGLQTLRRTLRPELLAESRKHKAAKLLRQIPCIGPIRAARLLALMQTPHRFRSKRQLWTYSGLGIETRDSAQYRFVRGQLQRTKKPQQIRGLNRNHNHEMKDIFKGAATRASCGVGPLRDFYVALLDKGMKPEMARLTLARKIAAIALTLWKKEERFDAGQLKTQAA

SEQ ID NO: 502419 - protein, 316 aa, unidentified
MEHTSSLPDVFVGIDVAKKHLDVHILPTGTRMTVARDAGGLDQLVTQLRELSPRLVVLEATGGFEAIVTATLGGAELPVLAVNPRQIRDFARACGRLAKTDALDAEVIALFAERIRPALRPLPDEATRLLGELAARRRQIVEMITAETHRRRAASAKRVQKRLDAHMAWLQKELSSLETDIDDAIRESPLWCEDQALLTSVPGIGKVVARTLLAELPELGRLDRRAMAALVGIAPMNRDSGQFRGKRTIRGGRGTVRAALYMAAWVGVRFNPVLKEFYQRLIAAGKPRKVAIVACMHKLLTVLNAMMKSRATWKHA

SEQ ID NO: 502420 - protein, 355 aa, unidentified
MDSKKYIGMDVHKESISIAVMNGAGKIVMECVIETKASMILQFIDGLRGDLQVTFEEGTSGAWLYDLLKPHVAKLVVCDPRKNASMKEGNKSDKIDARRLAELLRLNHLNPVYHGEHGLRGLKELVRSYLTITKDLGRVMTRVKAIYRSWAIPCTGKQVYAPRHRAEWLGKIGEPGVRRRAEFYYQQLDALRAVRQEVRRELLAEGKKHKAWKQLCQIPSIGPIRAAVLLGILQTPHRFRSKRQLWTYSGFGIETHSSADHRSVDGQLQRAKKHISIRGLNRNCNHDLKNLFKGAAIVASSKPGPFQEFYTALLSKGIRPEMARLTLARKIATIVLMVWKRGACFDAQHLKPQTA

SEQ ID NO: 502421 - protein, 355 aa, unidentified
MNGTKYIGIDMHKESMTIAVRNAVGKIVMECVIETKASMILQFIGGLRGDVQVTFEEGTSAAWLYDLLKPHVSKLVVCDPRKNKSMREGNQNDKIDARRLAELLRLDHLTPVYHGEHGLRTLKELVRSHLTVTKDLVRVMTRVKAIYRSWAIPCTGTQVYARCHRAEWLGKITEPGVRRRAEFYYQQLDALRVLRQEVRRDLLAESKTQKVWKRLCQIPAIGPIRAAVLLGILQTPHRFRTKRQLWNYGGLAIEMHSSADHRSVDGQLQRSKKNVLVRGLNRNCNHDLKNLFKGAAAVASSKPGPFAEFYAALVAKGMRPEMARLTLARKIATIVLILWKKGASFDTQYLKPQTA

SEQ ID NO: 502422 - protein, 334 aa, unidentified
MQNITLIGIDLGKHYFHIHCQDKSGKALLRKKFTRTKLMQFLATCPPSVVVMEACAGAHFMARCISDFGHETKLISPQFVRPFVKSNKNDFVDAEAICEAASRPSMRFVQPRTETQQAMRALHRVRESLIRDKGKTTNQIHGFLLEFGISLPIGDAVIKRLSLVLAEHEIPEYLSRLLVRLHTHYFYLVEQIAELESELSQSINADDTAQRIMTIPGVGPITASLLSSQLGDGKQFSCSRDFAASTGLVPRQYSTGGKSTLLGISKRGDKNLRRLLVQCARSFIMRLERKHGKLAEWVREQLNKKHSNVVTCALANKLARIAWAITTQKKEYQA

SEQ ID NO: 502423 - protein, 465 aa, unidentified
MGAGKMNRKQRKELGRRLQSANPGLEVVHPRAAGIDVGNGAHYVAVRPEQDAEPVRRFECFTADLHRMADWLEACEVKTVAMQSTGVYWIPLYEILEQRGFEVYLVNARHTKNLPGRKSDVQESQWLLKLHTHGLLNNSFQPTAEIRVVRTYWRQRGEHVRGASTCIQRIQKVLTQMNVQLANVISDLSGLTGQAIVRAILAGERDPRKLAELSHPRIRAGREQIAKSLEGNWRSELLFVLKQEMEMYDTYQHKIAECDWELEATLKQFGVPERASTEQPKIPNAKKTKRIQRNAPGFNLTSELHRITGVDLSRIDGVNAIVAQTIISEVGLDMTRWKTEAHFASWLGLCPDNRIRGDKVLARGTRHVINRAATALRMAATTLIKSQSYLGAQYRRLRTKLGAPKAITAMAHRLARLVFRMLKYGQEYVDKGTQYYEQKHREQQLHLLKKKAATLGFQVVETGVA

SEQ ID NO: 502424 - protein, 453 aa, unidentified
MGKVTTGDHPDLKMVNPSAAAIDIGSTMHMAAVNPSATDTPVRAFGTFTRDLHDLADWFRSCGVTSVAMESTGVYWIPAFEILEQHGFKVILVNARYAKNVPGRKTDVSDAGWLRQLHSYGLLRGSFRPEAEIATLRAYMRQRERLVEYAAAHIQHMQKALMEMNLQVHHVVSDITGATGMRIIRAIVAGERDPDVLASFRDTRCHSSVETIRAALVGNDRAEHIFALTQSLELYDTYQTMMKDCDHKLEAAIATLTVKASGAIAALPKARMKGKQVNAPSFDVRAALHGVIGVDLTQIHGLGPSLALKLIAECGTDLKAWSSAKHFTSWLCLAPGTKISGGKLLSSRTRRSSSRAAALLRLAAVTLGRSDTALGAFYRRLSARAGKQKAVTATARKIAVLFYNALRFGMTYNDPGAAAYDERHRTRVLANLHRRAQSLGYILSPTPKAEAVS

SEQ ID NO: 502425 - protein, 313 aa, unidentified
MAQVRTWAAFDVHVSGVVAATLDRDSGQLQVQRLPGRSEEVTAFTAALPGPVRATYEAGPSGFVLARRLEAAGVDCLVCAPGLIPRGPSDRVKTDRRDAERLVRLLAAGELHRVAVPSVAEEALRDLVRAREDLRGDLMRARHRLAKLLLRHEVRFEGPQANWTQAHLRWLAEVQMPEPASQTALEDYRGAVSALMIRREQLEGEIARALPESPWAQTAGRLVCMRGIDTLTAAGLCAEIGDFRRFEHPAQLMSYLGVVPSEHSSGERRRRGPITRSGSQHARRLLVEAAWHYRRPRGSPATSPVASGEQSRR

SEQ ID NO: 502426 - protein, 341 aa, unidentified
MRKTFFCGVDLHSNNAMYFITDQQDKPVFKKRLPNRLPVVLESLEPFRKQLKVVAVESTYNWYWLVDGLMDHDYPVVLANPAAIDQYDGIKEANDLTDAAFLARLARLDILPTGYIYPREDRPVRDLLRRRTLLVRQRTAIILSLQNLAMRQTGQRMDWRAIRNLNDEERTELLGDHDCLAFVTTEQADLIKLLNEKIKRFEEKVLEHAHLKPAYACLLTIPGVGVILALTIMLETGDIGRFETVGDYTSYCRCVRATHTSNGKNKGKNNRKNGNVYLAWAFVEAVYQALRTCPQAKRFYDRKRAQRNGALATKALAAKWSKAAYYMMKRQHAFDLTRVFG

SEQ ID NO: 502427 - protein, 393 aa, unidentified
MICVGIDVAKDKHDCFILSSEGEVLADVFTIQNNAEGFDTLLQTIRRCVCPGDKIKVGLEATGHYSYNILGFLLDKGLDTYVINPLHTNLYRKSLSLRKTKTDRVDARTIAAMLMSDVDLKSYTDTAYHNEELKSLTRYRFDKVRERAKLKQSVSRLVTILFPELEKLVSSLHSASVYALLSEFPGAKQISSTHMTHLKAVLKNASQGRYGQEMAETIRNAARSSVGSVMPAKSLELQHTIRLIRELDAEIEDIETAIQAIVDEMQSPITTIPGMGVRMGAVILAEIGDFSRFDSPDKILAYAGMSPSTYQSGQLSLSGAYSHMEKRGSRYLRYALYNATKHVCHWDPTFAAYLAKKRAEGKHYNVALSHAAKKLVRLIFAMEKSQRPYCAAA

SEQ ID NO: 502428 - protein, 430 aa, unidentified
MEDGAMRCSERDAFVGLDWASDHHDVVVVNGAGEIVEDFRFEDTAEGWAQFTQKLSGYPHPAVAIETSGGSTVERLLESGYAVYPVNPLAAKRYRERKAPSGTKSDRLDAWSLADALRLEGNQWRRLQPNDPLTLELRILCRDEIALIEQRTALVCQLRAALKEYYPTALEAFEDWTLRSSWAFVESFPTPEALVKAGKRKWEKFLQVRKLCRPQTYENRLKLFAQAQTFCGSPARTRAKSLLAVALAAQLRVLQDQLDKYRARIQELFQQHPDHELFGSLPGAGEKLAPRLLGELGDDRGRFDSAEALQCYAGTAPVNYQSGQMKRTRVRRACQKILRHTVHLWANLSRAECPWAEAYYRKKREAGQSHACALRCLGQRWLKILWKMWQTRTPYNPELHQRNQVKHGSWIIALMPEATRKTLQTAAPGL

SEQ ID NO: 502429 - protein, 335 aa, unidentified
MIGFDIAKNVFEVHGRSAAGALVHRCSLKRGKVEKFFAGIAPAVIGLEACGSAHHWGRVLSKLGHDVRLMPPAYVKPFVKRNKSDAIDAAACWEALGSPNMRFVPIKTVDQQAALSLHRTRDLLVSQRTQNANALRALLSEFGIVAGTGKAGLARLIDELRAGTLDLPADAVFSATVLADQRAALDAAADVLERRITAQVKADKKAVMLKTAPGVGPLTAHAVLATMPDPSLFKSGRHFASWLGLAPSISGTGGKTRTGHITKKGNTPLRRLLVLGATALLRRVRANPQKGSPWLRALLARRPAKVVAVAQAARTARILWAMLTHNQPYRAPAVG

SEQ ID NO: 502430 - protein, 328 aa, unidentified
MQGKVSSERTAMATVYVGIDVCKEWLDIHLHPLGRSFRVTNDTAGLRRLKRELDALDQMPRSALHIVMEATGKWHRAVQRSLHADGFYVSVVDPLRAQLFAKACGFLAKTDRLDARLLAIMGEALKPAQTPPQDQALEALQELVNARSAANGERTALSNRMKTAVTAFLRKELTRRLAALDTHIARLDAEIERSIGAEPEMRRRLDILISIPGIGAVTAASLIAGLCELGACSGKQAAMLAGLAPLACESGERAGHRAIRGGRPAPRNAIYMAALSASRHNPDLAHFAERLKKAGKPNKVVLVAVMRKLIVLANTLITKNRIWTPNPP

SEQ ID NO: 502431 - protein, 341 aa, unidentified
MFIIGCDYHPSVQQIAWVDTESGDCGELRLQHIEAAEQFYRELKKKGVSVRVGIEATGHSRWFERLLGELNYELWVGNPAEIRAKRVRKQRNDRFDAQHILKLMLENNFPRIWVPTAENRDVRQLVLHRHRLVGMRTRVMNQLQAIAMNEGIRRKRGLWTEKGRAQLESLSLPPWSTRRRQELLELLDRFDPNIDQLSQAIEQEGERMPEVQRLQTHPGVGPITALAFVLVLGTPDRFRCGKQVASYLGLIPCEDSSADSWRLGHISKQGNALLRHLLGQAAQSVARGDEQWRHQYAHLALRRNKQIAKVAMARKLAVRLYWMWRRQWDYQQLKKFGTHAG

SEQ ID NO: 502432 - protein, 351 aa, unidentified
MDTVILAIDLGKFNSVLCWYSPNATPTFRSVKTTPEDLRRELQRQPVSRVVFEACSASGWVHDLCGELGQPCAVANTNGVSWQWNNVKRKTDRDDALKLAQLTALNQLPTVTVPSPATRQWKSLIGLRKRLMSDRIRGQNRIRALLVSQGLPAPLGAKAWTKLGVAGLEQLAKPLADCGDLELWRGELTVLMERHRFLEDQLTAVEARLDRLAAASETVRRLETVPGVGTRTAEVIAAHLGDPKRFTNANQVSAYAGLVPKQYQSGETDRRGRITKRGPKLLRSALVECAWCCLRYNSWAKATWLRLQANGVGKKKAIVALARKLLVRCWGMLKRDEDWRGSPSLAAGLLV

SEQ ID NO: 502433 - protein, 407 aa, unidentified
MKTSYFLGIDAAKHKIRAALSDKENRLLWQSDLAVSAGALGQLLAEIKTHVSHPEQLLILIEATGMLHLNWSAALTRAGYAVAVINPLMARRLYRVENSIRDNKTDAIDARGLCTIGALHGQKLLAHYRFCLKPEQFALQRLQSVRKALRSSLTNLKKTYQSLLELSFPELGRLLELDGVGIRALLSQAPTPAAVTRVRRSSLEKNWMLRPKAKALQLLAADSIADPQLAAASAPALQLLLQSLASLEAQLHKLDQQIQSASLNLDQKSKALIESLPGIGRINAAKLLAFLPTQILHSGNNRKVAARLQAFMGNDPRLRQSGQWKGHTKMSKRGVEMLRTALFQCAFSAAQNDPELRAYYHRKRNQGKTHEVAISHLMRILTRRLVAVLRSGEPYSSNYNLTPKSVG

SEQ ID NO: 502434 - protein, 355 aa, unidentified
MSSEKYIGMDVHQATISVAVMDSTGKVIMESILETKASTILEFVGGLRGTLSVTFEEGTWAAWLYDLLKPHVAHVLACNPRKNAALNQGNRSDKIDARELANRLRLNDLKPVYHGENGIRMLRELARSYLTIVRDLSRVMNRLKALYRSWAIPCAGRDVYYTRHRSQWLEKIREAGPRRRAERLYQQLDMLQYLRQQARRELLAESRKHSITAKLRQIPSLGPIRSALAVALIQTPHRFRSKRQLWKYCGLALETRITGEYVYVHGERRRSKKQLSIRGLNKDHNHDLKGLFKAAATRASVIPGPFREFYQRSLAKGIKPTMVRLTLARKIAAITLTLWKKGENFDVEKLKSQAA

SEQ ID NO: 502435 - protein, 337 aa, unidentified
MSLYCAIDLHSTNNVPAIIDDDDRIPFQKRLPNDLSTVISALKPFKHDLYGVAVESTFNWYWLVDGLADNDFNTLLVNPSAIKQYEGIKHTNDDTDAFHLAHLMRLGILPTGYIYPKAERAVRDLLRKRLQLVRHRVTHMLSAQNQVWRSTGLNISSKPFKQADFLLLDLVVDDYIKMAIKSNLVMIHTLNQQIDELESTVLKQLKLKPEFLSLLTIDGIGKILGMTIMLETGDINRFESVSNFSSYARCLDSSRISNGKKKGANNRKNGNKYLAWAFVEAAHSIIRHNKTAHKFYQRKRAQRNGALATKALAHKLARAAYYVMRNQEPFQRERLFR

SEQ ID NO: 502436 - protein, 414 aa, unidentified
MENLLLVGVDVHRKTNTFCLMDASGAEVLPRFTLDNNRPGTQAFIRRVTELMEADGFTELQVAAEATGWYWFHFFQTLQRDELLKQWPVDLHALNPRLTANFKKSYVDLDKTDPIDAYVIADRLRWGRDIGTPFELDEPHLALRFLTRHRYHVVHNLAQEKAYCTAILYLKASEYDRDDKRAFANLFGTASRAVIQEFASVEEIAAMPFDELVEFIDVQGKRRFADPAQNARRLQLIAQDSYQLPAALQQPINLILGLILKQITALEHQIERLNQAIAERLEANPNTLQTIPGFGPVFAAGIMAEIGNLERFQFDQAKVAKFAGFKWRKTGSADFTADETRMTRTGNPYLRYYFCEAAFAVQRCDREYAAYFQRKLKEARTHQFKRATVLTARKLVRLVVRLLATNQPYRPRRL

SEQ ID NO: 502437 - protein, 344 aa, unidentified
MQPQEYVGIDLHRRRSVIVRRSAEGETLEVSHVHNDDLLAFERAVTAAGEHPEVVLEACYGWYWATDLLEELGCKVHLAHPLGNNWGNRRVKNDTRDAEDLADLLRLGRLAEAWIAPPKVRELRELVRYRAKLVCLRTNCKLQVYAVLAKEGVNLPMTDLFGVSGSELLETCKLATAYRTRVESLRDLIEVFDHEIAKLEGDVRHELRGHAGYQAIQQVPGVGPLFASVFVAEIGDVGRFRSPAQLASWAGLTPKHHESDTTVHRGSITKQGSRLVRWAAVEAAQRQANGTKLRADFVRITAHHGDSAGARKIARVAVARKIVTLVYYGLRDGTIRSKAISEAA

SEQ ID NO: 502438 - protein, 391 aa, unidentified
MLICGIDIGKFRHEACMIDETGRQLAKTFSFANTTDGGEKLLEYIKQNNSDNQVVVVGMEATGHYYLSLYCFLFDQGYQVNVINPIQSDAIRNLFLRKTKNDAKDSFLIAETIRIGRFSSAPLADEDILSMRQLCRHRMDLVDYIADQKRKIIGVMDRVFPEYQHIFSDMFGKTSTELLNKAVTPEELLAIDTNELCKLLKKNSRGRFGEAKVEELRNAAKRSFGITIGTTAFSMQLRQLLEMITLLEKQLIELEEEITQYLRKMDTYITTIPGIGDVLGAIILSEIGDVSRFAEPKKLVAFVGVDPSVKQSGEFTGTQNKMSKRGSPHLRRAFFLAANVASFRDPVLSAFYQKKKSEGKHHYTAIGAVARKLIGIVYAVLRDNKPYVPNC

SEQ ID NO: 502439 - protein, 454 aa, unidentified
MRKPQVIPDEDHEVIYERVAAVDVAKASGVVCLRTPDPARPGRFVNRIWDNVPAMRAQIAELGAELLRCRVQMVTLESTSDYWRIWYYVLESIGLAVQLVSASQAKNLKGRPKTDKLDAMWLARLTQWGMLRPSFVPPAAIRRVRDFTRARQDLVAERTRCLQRVEKLLEDAMIKVTSVAKDGMKAKSVVAMVAALAAGQRDPRVLADLAKGPLRAKRDQLAQALDGMFDSHHGMIARSLLDQVAFLDRQITLMEDQAIAALAGVPESWGVDADGQTGPQAGTSPDSPVLAAAHRLAEIPGISLWLAIVIIAEIGLNMTCFPTPAHLVSWMGLCRSAASSGTRHGKGKPKKGNSYARAAAGQAAIGAARTATFLGERYSRIARRRGKAIAQAAVARSIMIIAWHLLNDPQARYRDLGPDFYASRINRDKKIRNHIRGLQALGLTIAITGDEQAA

SEQ ID NO: 502440 - protein, 399 aa, unidentified
MDDDTFWVGLDLGLTRTSVCIMNGQGFPLNEFECDSEVAALTEALAAVAIDRIGGIAVEAGTGTYIVRKLRGAGFPVVVFEARKAHKFLALRRNKSDASDARGLADLVRIGQNSVSQVHLKTDECQRLRSFLVVRQRFVLMKLAVEGVLRCNFALHGRRLESSHTRKALLRRTETIFASLRSEEGIDLEPDLAPLVMVCDSVRAYLEKSDRDLQAIASSHPVCRLLMEVPGVGPICALSFYSAIGDPNRFRVASHVGAYLGLVPRRYQSGAVSRTLGITKNGNRLTRSHLVMAAAVFARRAPDCPLKDWYLALRGRAGPKRARIALARKLAVILLAMWKQGTHFELDRTGPSGVLSERGPTETGPVAPVGGDWRSQSGTETVTSRSHLRQGSGDNTPGA

SEQ ID NO: 502441 - protein, 361 aa, unidentified
MSKIRSVRGRREPVATLVRKTGGELGAPPVVQSTRTVGRAGYRARICKDGNMDKMFVGIDVSKDRLDVHIQPSGEEFAVARDDEGLKTLTERLQAERPALVVLEATGGLQVKAAGALAAVGLPVAVVNPRQVRDFARATGQLAKTDRLDARTIAFFASAVQPEPRPLPDKAAELLRALIARRRELVEFRVAERNRLRQSVIAWLRRDIERSIAMVTKWIEAIDAEIETHVKGSPIWHVQEDLLRSVPGVGKMVSRTLLAELPELGKLNRRKIAALVGVAPFARDSGLFRGRRMITGGRPTVRAILYMAAVTASRCNPVIAAMYQRLRASGKPAKVALTACMRKLLVILNAIARDQRPWQHA

SEQ ID NO: 502442 - protein, 376 aa, unidentified
MRWGTEVIGPLRADGSRSSCGVLPPTLSPGTAAQVTHDRTVARLPIAHTRQVTVTRIICGVDICSASLQARIGRNGAAGSFANNPEGIAALAAFCRTHQVELVAMEATGGYEQQPFALLSEQGLAVTILNPRAVRRFAEGMGVLEKTDALDAGLIAWFAEVKRSQPQSLSSTSQQQLRALVTRLRQLTQIRTAQRNQLRLVSSPAVLASFTELLALVARQIHELEAAIAELIAQDPLWQHLDQVFRSIKGVADRTVARLMAEMPEIGMLSNKTISKLAGVAPLARDSGKHQGKRAVRGGRASVREILFIVASVVGRHEPDFIAFQQRLSAAGKPRKVIRIALAHKLLIRLNAKAREVRQQFAAPQLERSGPVVVTH

SEQ ID NO: 502443 - protein, 363 aa, unidentified
MRDPRTVAVGLDVHKSSVRLAAVRGGEVVREVTLAFDPAAVEAELRAWPGARVCQEAGPTGFGLHRHLVAAGIDSAVVAPGLVPSRPGDRVKTDRRDARRLAALHAGGLLTAIFVPSPELEALRDLVRCREDARLDRMRGRHRLGKFVLRHDRRMPTTCWGVTRRAWLGRQVFELPGQQQAFDDYLFCVDQLDRRIGALEGEIARLATDGPHAELIGRLRCVRGIDTLTAVGLVCEVGNFARFQTAEQFMSFVGLVPSERSSGDTRRQGSITKAGSSHARRLLVESAWNARRRPMVGYELARRHRDQDPAVLERAWRCQQRLHRRWQRMAGRGKPHQKIVVACARELAGFVWAIATDQPLRMT

SEQ ID NO: 502444 - protein, 404 aa, unidentified
MIGCDLHEDSLMLKIATGLETPETRQWRNTSRDRQRMVADLQKRSQKAGTGRVVFTYEASAAGYGLYDQLTEVGFEAYVLAPTKIPSTLRQKKEKTDEKDALLLLNLVRAFVMAGNPLPAVWIPDAQTHDDRELVRTRLDVSNKIGLLKNQVKSLLKRNQVRRPAGLGKSWTRSFRAWLLAALVQPLNLTESPLHTGTRQALASLVRQLDFLEQEQERLDRAVSALVDTPRYLEAVRELTRLSGVGVLTALVFLTEMGDLTRFGNRREVAAYLGLAPSCFESGRSNDRKGHITRQGSPRVRRVLCQAAWTSVRRDPVEKATYTRIIEKNPKKKKIAVVAAMRRLAVRMWHYGQRGRDKQTLLASSAPSTLRSSPQVEIGFSEVTAGCPKGRRKGLGKGQAASRG

SEQ ID NO: 502445 - protein, 436 aa, unidentified
MKAVNYSSVHVNSVSQREIDSQLRGDTLIMGLDVAKKKEYAALEDETGKSAGVIRWKHPRETREFADYVDGLRPSRVRMVMEPTGSYGDPLRHLAYDRGWEVWKMAAKRVGDAKEIADGVPSIHDSKAAHILVWLHKQGLTERWEPKAVSRRKVGTLIRQLSRLQENWGRHLGYLEAEMARYWPEILQAWELKRATLLGILVNFGGPEKIVEDEEEVRTYMRKKGGPFLKKKRINEVIKAAQSSLGVTMLKSERVSLKNLAEHADRLRRDRKKFKQKLDRTIEKEEVRRIGEEVGLPTAALFWDKLGSFRDYEKVDQLIKAFGLNLKEKSSGTYNSPLHITKRGPSEARSSLYLATCRKINTDPLFQAWHRNKVARDGGEDNANKNVSVIALMRKYLKGLWHVARGKEFDSTLLFDVEKLKDQRPMVTANMNQVKS

SEQ ID NO: 502446 - protein, 443 aa, unidentified
MCGGPVQCLFPSIFTKGGQNLKLTYPICCGIDVHKKFLVATIVTSKGLEPHYQKKRFSTFNGQILALKAWLLENNCRDVCMESTGKYWVPVFNLLEDCINVTIANPKWVRAVKGNKDDQKDSKWIADLFRMGSVRGSFIPCKAIRILREFTRYRYKLTCCKSSEKNRYQNVFTVCNIALDAVVSDMFGKSATSILDYILDGDIFDPAHCVSLLQRTLKKKADDVVASIDGFQMTDAQKIRARMVKEHYDYLIGHIAKLDAAIDELAKPYESAISLLCTAPGVDRKSAITIISEIGTDMSQFDDSKRLCCWAGLAPGSNESAGKKKSVRITRAGVYLKPMLVQVAHAAVKDKNNPYYRIKYEAITKRRGKKRAIIAIARMILTAAYHMFLTGEVWNPCDLTQVDMPLELREKELQKSLRKAAKLLVTHGVVAQEAVAFRESVAA

SEQ ID NO: 502447 - protein, 444 aa, unidentified
MAVRKRAVLELAHPNAAGIDIGSASHYVAVPADRDDESVREFKSFTDDLERLADWLVACGIDTVAMESTGIYWIPLFELLESRGFTVYLVNARHVKNVSGRKSDVLDCQWLQQLMSYGLLSGAFRPKDEICALRAVSRQRDMLLSYQARHVQHMQKALAQMNVQLANVISDIVGETGQKIVRAIIAGERDGARLAQMKNVRIRASEAEIAKSLRGNWREEHLFALRQAMALYDAYGERLAECDQQLEALLAALQPEAAGDPGKNRRRSRARNAPKFDVRAYLFGMCGVDLTRINGIDTTTALKVISEVGPDLSRFKSAKHFTSWLGLCPGTKISGGKVLSGASKRTANRAAQALRMAAAALRSSQSALGAYYRRLCARLDRPKAITATAHKLARLIYTMLTKGTEYTDQGQDYYEERYRQRVMHHLAKRAEKLGFQLTPLAVTT

SEQ ID NO: 502448 - protein, 338 aa, unidentified
MYYTGIDLHKFTSYLTTVDSSGNIVKQADIKNVAHNFVQYFTGLGSENITTVESTMTWYWLNDLLTSLNIPMILAHAKYVKAIAYAKVKTDKVDSHTLAQLLRMDYIPAAHKIANDKRILRDALRARLKIVQRHTSITNSMQLLLAKYNLTSPDDLDEIPRYQYNQLCEVEALLKEQMLNLEKQLYPSLIPNDDIQRLLWIPGIGKMNAFTIMLEIDDISRFADVKNFYSYCRLVPSARNSGGKSKQRSSKDGSKYLKVAFSDAAIHAVQYYPIIRKYHNSLTRKKNKQIAKTIIAKELASIVYYVLKYKANFNNTFKGKELDHTKSLQWPRVASPYA

SEQ ID NO: 502449 - protein, 335 aa, unidentified
MEFTFFIGTDVSKNELDFAVMQGKQRLFHTEIENKVKAIHTFLKELLKLPGFDLSKAVFCMEHTGIYSNHLLVCLHKMKANICLEAATQIKNSLGNIRGKNDKVDAIRIAEYAYKNAETLRLWTPKREVVVNLSQLASTRSRLIQSRKILTTAIEENKGFIGKKIASESAKLCSKTLQAIKTDLLKTEKAIDCLVNNDPELKRLFDLITSVSGIGKITATQIILTTNEFKGISEAKKFACYSGVAPFTKESGMYKGKARVSHMANKKVKTLLHLAAMVAIQHNQELKAYYERKVNQEKKNKMTVINAVRNKLILRIFACVKQNRKYEKNYMKLVA

SEQ ID NO: 502450 - protein, 315 aa, unidentified
MSAAFKPTIKNGGEDEVSVYVGVDVHKRFCQATLMSEDGTILDETRFENTLDGATSLVNLARSYSSNIKAVVEPSANYWIKVYDKLEDEGFEVKLSNPSKTKAIAEARVKMDRLDAKTLAYLLRGKLVAESYVPTKKNRERRTLIRHRASLIKMRVEVKNRVHALLDKHDLSYNYTDLYGKEGLEWLHSLNLPATDDHILKSNLQILETLNEQIQDADIQIAKDAVNEEQAKLLMTMPGVDYYAAMILLSEIGDVKRFASPEKLVSWVGLAPQVHQSGETRWTGHITRKGSKRARWILTQCAQSTRQHNPKMRTF

SEQ ID NO: 502451 - protein, 296 aa, unidentified
MLADQVDHVIGVDTHRDAHEFAVVASSSGGVVARGSQRSNPRGYAAALRFAGAHSIGRRVWAIEGSGHYGAGLARYLARHGEAVVEVSRMPRSGQRLEGKDDRLDAVRAARAALGSEKLALPRVGERREALRMLLSTRRSAVEVRRQALTQLRSMIVTAPVDLREQLRGLPAQQLLARCSRLRGPRCGSPDEFAAVLVLRTLARRIQAATDEATAFKREILAHVRALAPELLAEPGVGPIVAAQLIVSWSHEGRVRSEAAFARLSGSAPIPASSGHTTRVPRHEVGRVSGSVGLVV

SEQ ID NO: 502452 - protein, 346 aa, unidentified
MALTIVETHAITGGVDTHADMHVAAALDPIGGLLGVREFPATAAGYGRLLSWLGGFGTVCLVGIEGTGSYGAGLARHITAAGVRVVEVDRSDRQDRRRQGKSDPLDAVSAARAAQSGRARGASRGRDGAVEAIRALMVAKRSAAGERTQTINQARALVLTGPDDLRARFTGHTAAALVAELASLRPRPGSTVGYATRIALRELGRRAEFPDGQLERLDELIGPHVAARAPGLLALYGIGPNTAALLLIAAGDHPERLRSEAAWAHLCGAAPIPASSGKTVRRRLNPGGDRQANHALWRIVFTRLGSDPATRAYVERRTAEGKSKKEIIRCLKRYVAREVYPHLRAG

SEQ ID NO: 502453 - protein, 426 aa, unidentified
MNSTIKFAATIGLDWADQKHDLWIQPADGSKAEHRQLEHTPEALHEWVAKLRERFGNRPVAIGIETSRGAVISALMAYDFIVFFPINPKALKDYRAAFAVSGAKTDRVDASLLEEFVRLHGDKLHALEPDTELTRKLAGLVQNRRLLVDERTRLVNQLHATLKTYYPLAQSLLSAQMNTSMAAEFLARWPELQSLKKAAVETLRAFFYKHNSRGSQLMEERLEAVQKAKALTTDPAIIEPARALVSALAAMLKPLHKVIAFLDKQIELAMDQHPDAAIFRSFPSAGPALAPRLLVAFGTNRARFASAAEVAQFYGLAPVVEQSGNSKTVRMRYRCPKFGRQSFHENAACVIRKEPWANCYYTQQKARHDDKHHLACRALAFKLIRIYFACWRDRQPYDPAKYLSALEKNGSPLLAKLEASTTTACE

SEQ ID NO: 502454 - protein, 313 aa, unidentified
MKKTICGVDVSKAKLDVCIEPGHRLASFNNDTVGIAELAAFCREHAVRLVVMEASGGYERRAFVELWEKGISCALTNPRNVRRYAEAMGILEKTDRIDSSVIARFAHAKNLAPTPLPSQAQQRLKALVTRLRQVTDDLTVQKQRRAGLLDNAEMLASLDQVIALLKRQSRSLEGEIASMIDDDPLWARLAETWREMKGVAGRTVARLHAELPEIGTLSNKAIAKLAGLAPIANDSGKRKGKRPTRGGRAGVRSILFLVAATAARYDKSLADFRARLVAAGKEKMVIRIALARKLLVRLNAKARDARAAYANAT

SEQ ID NO: 502455 - protein, 388 aa, unidentified
MPRQRKPNDLSRSLIPLEMDTTLIAVVELSLSSWLVAGIVPGVERQPLKKLKTDENALLTLFNRWRDEAVRSGHEISRIAVAFEAGRDGFWLARWLKAHGIEAHVIHASSVAVSREHRRAKTDRLDTELLKRAFVGWLRGERDHCKTAAIPSLREEDAKRPSRERESLVGEQSRLVNRMKATLIRLGIRGFNPKLRHAEQRLETLRTPEGEPIPANTLAELKRDMQRRRFICDQIRSIEQERLERLERTPDTEPHAMVRLLARVTGIGIETADLLVHEVLLRNMRDRRAVARYGGLTGSPDRSGGTNREKGMARSGNARVRRGMIQLAWRFLLFQKDSALAQWYRQRTEHSPKARKTMIVALARKLLIALWRLVREGVVPEGVAMRPA

SEQ ID NO: 502456 - protein, 523 aa, unidentified
MVTKSKSRSRRSRRYLTIVKPSGSLHPRVQKVGPEHFGIVAVDCAKARSKWMLADFYGRILVPPTVVEHNKQGFDSMFAEIRRASESHGLGDRLAAIERTGIYHLPVKRAFVSKKFDTRIVHPLTTRQYRLPADPGNQTDDTDLFAIHRATSNGFGLIELPLEEIHGPLRLLARYRRSLVRKNASLRNQIIALLDVLSPGYTGLFKDVFDNQAAVAIARTVKSASEVRALGSEGVAQILKKLDVRYQRRSLKKILDWANGVESTTEYAELYHTILVHLDDERCARLQQIAKLEQEMAGLLVRTAYVVLLSIPGVSIVTAAEFASEMGPISNYANDQAITGRAGIYPSRYQSDKVDRSDGPLVRRANRKLRGVIVMIADNLLACNRYFQTLKVRWVAAGMAEQAMCVRVAKRFCRIAYQMVAGGQVFRHPSCQKRDSILRKLSIFHAEHGSAMAQVMTDLQAATDHIPKSEHATEAKSLYEELQPSNRRQQSGPRRLGEILPVVLAKLGVTAVELSLKGENDRT

SEQ ID NO: 502457 - protein, 443 aa, unidentified
MNNIFIGDTITLPKGEAYMRITQTAEKIKLQRVMDVSVDVHKDTLNFFFESGGMEYSDTVSNRTEIIRRKLKSYHEIVSEHGSTSLRILCEPTGQYQNKLFRTARSMGFLTNFVNAESVAKFRVIETNDTGKTDTKDPRVIRTLGKLDKVIKHRIMPEGYLILRKLNKIYDEIDVAITSLRCRTDRLLIELFCDYSFKKDFLYTASGFALVNQYGCNPYLIIKDGYKRFCKVMTKAAPRIRKKTLSRLWEDAQSSVLNEQPEGYIKTLQSHLKQLIGDWIEQTERKNKTVEQMIEILNKLREEDPNIPPPTAGVINDKNMARLLGETGPLSDFGNWRMLMRYGGLNIRMKQSGKFQGQNRITKRGRPLLRKVLQHIVLPLVRKKCLYGQYYHRKKEIEKMPGNKAMTCVARHFLKKFYGWYKSGKAFDQTRFFACETQIKKAA

SEQ ID NO: 502458 - protein, 342 aa, unidentified
MEVSTVGLDLAKSVFQVHAVDAAGTAVIRKALRRGQVLPFFAKLPRCLIGMEACGTSHHWARELGKLGHEVRLMPPAYVKPYVKRGKTDANDAEAICEAVTRPSMRFVPVKSAEQQAALALHRTRDLLVKQRTQLVNMVRGLLAEFGIEMARGLHHALSLAARLSAGEAADVPALAQRVVTGLADQIGAVQVRLAALERELVTWHKQNELSQRLATIPGVGVVSATALAASVVEPERFRSGRQFAASLGLTPLQNCSGGKERMGRISRMGDRYLRRLLVVGMTSLVRRARAKPEAVDPRITAMLGRKPVRVVTVAAANRTARIAWAVMTRGESYRAPIAAAA

SEQ ID NO: 502459 - protein, 404 aa, unidentified
MAELWAGTDAGKAEHHCTAINADGKTVLSRRVPNNKTELLELLSDVLELADGDPVTWAVDLNAGGAALWIALLASHGQKLLYIPGRTVHHASAVYRGSGKTDAKDAFVIADTARMRRDLQPLEQTGEIAVDLRILTARRIDLSADRTRAINRLRAQMLEYSPALERAFDYSESKAALILLTGYRTPAALRRIGRARLATWLKNHGVRTNARARSTADAAVTAAEAQFTVVPGEKTYAKTVHALAGEVMTLDQEITELEALIEGRFREHPHAEVITSIPGIGDMLGAEFIAATGGDMAALGSPDRLAGVAGLAPVPRDSGKISGNLKRPRRYSRRLLRMFYLSAQVAAVYCPASKTFYRRKRDEGKSHKQAILTLARRSLNVLWALMRDGRPFEARLPASAATPA

SEQ ID NO: 502460 - protein, 594 aa, unidentified
MSNVCSLDRIGVGIDTARYGHRVSFLRPDHQAAAKPLTVLESRAGYQALHERLQQLHQQHPQAHFHVRVDAAGQNEANLEHFLRGLTLPITLSVGEPKRNKDYQKAHFPKRTTDDTESQAMARFAVVELPAATAAISPDMSMLREVAGRLQAKVKQSTQAINRLHNLLARVFPELATLTDDLTASWVLQLLDQYPTAQRLGQARLATLQKIPYLAPELAEQLHLIAQQSVACLSGAVAEALVRDLVAQVRHTQQAEEQMRRLLSAAYAALPPSAHLQVVTVPGIGVASAAAIIAQAVDINRFSTPQRFVGYFGVFPEENSSGVDKFGKPLPRGTLRMSRKGNDLVRHYLWNAARSAMVHNPAIRALYRRLRAHGKRGDVALGHCMRKLLQLVYAVWKTNRPFDGQHFAWETPSDHPLSATAPGTLVPPNDQPLSALAAPASAVTNETAVGHKRDLPAEKVVTTATATVAPTTTPVKPAPSAKRPKMDFAFLRQQVTMEQVLEHLGLLNHLRGRGLQRRGCCPIHRQPDDPQRTFSAHLGKNIFQCFHADCHAQGNVLDLWAAVHHLPLYEAALHLAETFHVPRNREEEPVKGTR

SEQ ID NO: 502461 - protein, 449 aa, unidentified
MQEPQEIQDEEYEQLVARVAAIDVAKASGMVCTRVPHASAQGRRVTKVWEVPATTGAIIELGGHLAGLGVEKVTVESTSDYWRAFFYLLEAAGLRVQLVNARDVKNVPGRPKTDKLDSVWLAKLTERGMLRPSFVPPAEIRQLRDYTRLRLDLTRDRSRHVQRIEKLLEDALIKLSTVATDIMGKSGRAMLEALIAGERDPKVLAGLARGRLRVKHAALVQALTGRFDDHHAELARMLLDQYDALTAQIDRLTARIEALLAAIPAAQGVDADGTTGPGAGADPGAAVLPAIQRLDEVPGIGRHAAQVLLAELGLDMGVFPTPGHLVSWAKLCPRTIQSGAKHRAGTTGKGNPYLKGVLGEVAAAAAKTDTFLGERYRRIVKRRGKLKALVAVARSILVIVWHLLADPAARYHDLGAGYYADRIDKGKKARNHIRQLEALGFTVTLAPAA

SEQ ID NO: 502462 - protein, 342 aa, unidentified
MNKVNTIGVDLAKNVIQVSVLSPLNKELTNKELPRTKFAEFLAKQPISLVAFEACSTAHHWARAARGYGHQVKILPAKVVSSFRQGHKTDKNDALAVAEAANRPNVKEAPLKELEQQGIQSIQRSRELLVQNKTCLSNHLRGLLMEFGVFVPKGFASLFKNIPDILEDGENDIPDMFRATLNLMYQRLLDLRDDVGLLDEQVKQLVKNNEACSNLTKMEGVGPISAILLFSTLGTGEAFKNGREFSAYIGLTPKQHSSGGKASLMGISKFVANKRLRSVLIQGARAYVHRMKSVTTKKDVWLVNLIERAGYGKAAVALANKNVRTAWALLTQGTEYKKELIV

SEQ ID NO: 502463 - protein, 398 aa, unidentified
MAMRVSKSVIGVDVAKIELVTYQADSDLLALIPNEKPAIKRWLKTLPRPAALAVEATNIYHVDLVELAYQAGFDVYIIDGFQLSNYRKGVGGRSKTDASDARLLARFLKNESECLRPWTPPPAVYGKLQSLLRRRASLIQAKTSLTQSWANDASLKASFAAFLKSIERLDLLVKKKLKDALREAGLLEQVARCQAVEGIGFLTATALVMAYSRGDFNSSDSYIAFLGMDLRVTDSGQKNGRRSLTKRGCSEIRRLLHNAAMSASRTSAWKEFYNHHRSRGKATTEVLVMLARKLARVAFALRANINPEGALWLDQNHRISHTSDAPTGLLLHRSGPGDASLGLRWSGFPVGADLSAKRTVHSLRKVPLPKPSRTSPLPHKRRADLSAPAQEWTGRRFA

SEQ ID NO: 502464 - protein, 391 aa, unidentified
MILVGIDVAKDKHDCFIMNSDGEILSKAFTFHNNLEGFNFLYEKIKSVSKPKDKIKVGLEATGHYSYNLLGFLLNKGLPTFVINPLHTNLFRKSLTLRKTKTDKVDSKTIAMMLMSDVALKPYTDTSYHNEELKSLSCYRFTKVQERAKLKTSITRLIQILFPELEKLVSTLHMISVYRLLEEYPGASYIASSPLTKLTNLLMEASHGRYDRNTAIKFREAAKNSIGSVMAAKSLELKHTIKLIRELTVEIDEIDAEIKKIMDSIASPITTIPGIGYSMGAMIISEIGDFNRFSSPDKILAYAGLSPSTYQSGKLDNCYSHMEKRGSRYLRYALFIVTQKVCIWDNTFAEYLSKKRAEGKHYYVAIFHAVKKLVRVIFHLEKTGQAYLKAA

SEQ ID NO: 502465 - protein, 405 aa, unidentified
MSELEKDLVFAGVDTHKDTHTLCLLDHMGRAIGTFRFAADAKGYDALAGKIGGPATCVGVGIEGTGSYGAGLTRRLLELGYCVYEVMVPGRARRKPGRPKSDPADAEVAARQVLARVNLSKPKDQSGWTEELRQLMIARDRLVQATSAMINAAKSLIVTAPEDLRRSLEGLSRKNLRSALSTLDPAAGGIILALGSLGKAWDLQDREADAIEERMKRVLEANAPALLTIYGCGTVSAAALAVAGGGNPERLKSEAEFASLCGVAPLLASSGKTERHRLNRGGDRRANRALYQIAVTRMSYDQRTKDYVGKRKRDGKSKKEAIRCLKRYIAREVFRALRNPLEIKGPSRKDLRPARQALSITLVEAGKALNVGFQRVSYAETGRLMNVRFLEEYDAWLKSQAKRES

SEQ ID NO: 502466 - protein, 409 aa, unidentified
MADSYDFYIGIDWGTERHQVCVLDAAGRRVAEQTIAHSGAGLAAWLAALAGYAPAERLAVAIEVPRGAVVDALLAHGCHVYALNPKQLDRFRDRQTVAGAKDDRRDAFVLATAVRTERGAFRTPPPEDPRLAPLRELTRLTRELGTESLRLTNRLREQLVRVFPQVLTLCPAADEPWLWTLLEQAPTASQAARLRPQTLRALLAAHRVRRFTTEELYACLHAPPLPAAAGTIAAASEHIAFLLPRLRLAFQQRGRCHRRLEKLLDALAAEAPGQPLEHRDVTILRSLPGVGRVVAATMLAEAWPALATRDYQRLRTHSGVAPVTRQSGKTRVVRMRRSCNGHLREAVFHWASNSLRLDPRCRAHYDRLRQQHGHARALRGVADRLLGLLVTLLRAGTLYDPARRHVAAA

SEQ ID NO: 502467 - protein, 442 aa, unidentified
MTTDKETRLERRSDRRLLVMPRVVTTHTRGRWEQVLLVGIDWADKEHVYCLMDDAGTTLATGTVEHTAEGLERFMNAVRARVQTPHDILIALETPHGPLVGALLDQGFTVYAINPKAVERHRERFRVAGAKSDLRDAWVLAALLRTDRALYHPLTPDSDVAQELRALTRDRADLVRTRTMLSNQLTACVKAYFPEFLTLFSDPDRPVALALLQAFPTREHLQAAPRAELETFLRRHRCPHSRKRAAAIHERMQAPGFHIASPIVRAKARLAATLVAQLQTLGEYLDAYEREIQRVLRLHPDGELYLSLPGAADVLAARMVGELGDNRDRYRDPNIAQCEAGTAPVTKKSGSTRTVHFRRACIHPLRETLWQFAFSSLRRCGWAQAYYNQARKRGKKHAEAIRMLGNVWLRIIIAIRRNRRPYDEEVLQKARLRHGTPGLCFA

SEQ ID NO: 502468 - protein, 473 aa, unidentified
MTRIAQLEPTRVTVGVDRHRDVHVAVALDRLGRRLGEIELATTRAGYQRLLSWAERFGAVEAFGIEGTGCYGAGLARHLRARRLLVIEVMRPNRQTRRRKGKSDPTDAEAAARAVLSAEAAGAPKAGDDLVEMIRVLRVARSTAIKARTQAINALRSLLVTAPPELRDELRALSSTRLVAKAAQLRPGEQLNPLAASNVALRRLARRCQALQAETQSLDAQLAHLTATASPQLTEAFGIGPDTAGALLVAAGDNPERLRSEAAFSMLCGSSPIPASSGQTRRHRLNRGGNRQANAALYRIVLVRMRYHQPTKDYVVRRTSEGKSKREIIRCLKRYVAREVYTLRRPRGLHSAHPDQRREPRPNRLTSIGASPHRVAAAAALLDADPTLQARSGGANDHPASAREVELVGSDPLRRRPAARAARRTRVEAHRQVPAEGEDPSRSRALLPLASHSPDARSDRALARQGLLRRAPA

SEQ ID NO: 502469 - protein, 439 aa, unidentified
MKNMGQVIIGVDPHKLSATIEVVDQQEKLLGAGRFSTDQAGYAAMREYAKSWPERVWAVEGANGTGRPLAQRLLQAGEHVLDVPAKLSARARLFDTGQNRKTDALDAHSIAMVAVRTEGLRVLKVDGQLEALRMLADRREALTRRRVQSVNRLQALLAELLPGQSKKDITTGQAKRLLASVRPRDIAGRTRRRIAAEELAELVAVEVKIKKATAELKTLVLERGSTLMDLQGVGPVVAARILADVGDIARFADRNRFASWTGTAPLDASSGEQNRHRLSRAGNRRMNHMIHIAAVTQLRLDTEGRAYYRRKRSDHKKPMEALRCLKRRISDAIYRQLVADTQRAAAAQLKAGPGGHCGASRDSSAVDLPPHIDTSDQPLPGPAPTTLPLSATPAQPRPGPAPQHPRRRARAVKVQRPTGRTTLTATSAGAYSKEPISTP

SEQ ID NO: 502470 - protein, 351 aa, unidentified
MSVSEPYAGRQIVGFDLHRRRSVLVRMTEAGERLETVRISNDPEYLREVMTRAGEAPEVVLEACYGWYWAADTLAELGATVHLAHPLGVKMFSYRRLKNDERDAADLADLLRMGRLPEAWIAPPATRELRGWVRHRAKLVGLRSNLKCQVHGILANAGITVPMSDLFGASGQRLLATADLATESRSRIDSLQRMITGLDFEVELFAKLVAGRLRTHPGYQAIQLIPGVGPILAAVFVAEIGDITRFRRPEQLASWAGLTPKHHESDTTVHRGRITKQGSRLVRWAAIEAVQRLPGHTRIGQVRDRVAARRGRNIGVVAAARELTELVFYGLRDHRVHALAVHSPARTPLPA

SEQ ID NO: 502471 - protein, 412 aa, unidentified
MQAIIERCCGLDVHQETVVACLLIGAAGARARKEVRTFRTVRRELEALRDWLKAAGVTHVGMESTGVYWRPVYAVLEGHVELIVGNARHIRNVPGRKTDVKDAEWIADLVRHGLIAKSFVPPAPLRELRELLRYRRKLVEAQAAERNRLLRLLETANIKLASVMSDVFGVSGRAMLKALIAGSAAPEEIAALARGQLRRKRAALIEALTGGVEEHHRFLLAMQLGRIAAIEADIAALDARIAERLLPYSAEMALLMTIPGVNWLVGAVIIAEIGTDMSVFLSVHHLAAWAGVCPGSYESAGKQKSGRARKGNMHLRTILVGAAISAARTKGSYLRDKFHRLKARRGALRAALAIAHKIVVAAYHMLAGGVAYRDLGDAYLDQIGERRTVANLKRRLERLGYHVALEPTAEAA

SEQ ID NO: 502472 - protein, 316 aa, unidentified
MAKTITTAGIDTSKARLDIAIHGRAEPWQVANSPAGWRQLAERLGEAGVSRVGIEATGGYERGVVEHLRDAGFTVLVLQPIQVRAYARLRLRRAKNDRIDAALIAASAATLDPPKIAPDKRLAQLARLLTFVEQIDSDIARLKTRLEHIDDARHRRMVRGDVARLDARRTAELKRIVSALRMHEDLARRFELVLSVPGIGERTAIALVVRLGELGRVSREEIAALAGLAPFDDDSGNRKGPRRTAGGRSQVRRALYNAALPACHRWNKPLIRLYAILMARGKLHKVALVACARKLLIYANTVVQRGTPWVNRPAPI

SEQ ID NO: 502473 - protein, 316 aa, unidentified
MNTIDHSEINIGIDTSQAVLDIFVRPQGQFQSFENTTEGIKSAISFIKPFKPARVLIEATGRLEMGFFCAADKARLPVCVCNPVQVRLFARATGRMAKTDKLDATDIAHFGEALKPELTQLKPEKLRHISDLLTVRGQCLEMSTMQKNRLKRMPKSVHKPINNVLKSIKKEIDYIDQQLGILIAEIPQWQARVDQLTSAKGVGKVLAYTLISELPELGRLNRKQIAALVGIAPMNRDSGCHEGKRYIRGGRHKVRTVLFVSMLSAIQCHPKLKPMYERLVAAGKPKKVAIIACMRKQLIILNTMVKNGTMWDENMV

SEQ ID NO: 502474 - protein, 341 aa, unidentified
MYYIGLDIHKKSISFCVKDAGGQVHQQGKVAATRPELDVWMKTLPQPWTAAMEATIFTGWIYDHLKPRAAAVKVAHPLMLRAIAASKKKNDRIDASRIADCLRCDFLPECYMDSTEIRERRRTLRYRSLLVRQVVQLKTRLASLLMETGVSYDRQQLHRLGFVSELLASEDVTKSIRPLLRVSQDSILRLRHIESALVRSLERDPLLAERVRRLQTVPCVGRITALTWALEMGDISRFRSIRQAISYCGLCGDEQKSADKTVRTPLSKKRNKHIQHVLVEAAKLAPRYDPDLASIYAREKQKGNANRATLAVARKILTYLLAVDREQRDFVPAPEFNGAAA

SEQ ID NO: 502475 - protein, 338 aa, unidentified
MNIVFLGIDLAKNVFQLCGLNQAGKPVYTKRTGRKELLQTLANIPACLIGIEASTGAFYWQREFEKLGHKVKVISPQYVKPFVRGQKNDGNDAQAIAVALMQPTMQFVPPKSPEQQDIQALHRARQRIVNHRTATVCQIRGLLLDRGIPIGSAVSSARRAIPLILEDAENGLSSRMRRTIAELYDLFNDLERRIHFFDKEIETVFRQSEACQRIAKVKGIGPKTATAVVAAIGKGTEFKNGRHFAAWLGLVPRQHSSGDRQVLMNMTKKGDKHLRTLFIHGARAIVRVATNNNDGHMNQWVNQLKERRGFNKTTVAVANKNARIIWSMLRNDTEYQVV

SEQ ID NO: 502476 - protein, 393 aa, unidentified
MICVGIDVAKDKHDCFILSSEGEVLADVFTISNNAEGFDTLLQTIHRCARPEDKIKVGLEATGHYSYNILGFLLDKGLHTFVINPLHTNLYRKSLSLRKTKTDRVDARTIAAMLMSDVDLKSYTDTAYHNEELKSLTRYRFDKVKERAKLKQSVSRLVTILFPELEKLVPTLHMASVYALLSEFPGAKQIARAHLTHLKALLNDASKGRYGRDMATELRDAARRSVGSVMPAKSLELQHTIRLIRELNTEIEDIESAIQTIMEEMQSPITTIPGIGFRMGAMILAEIGDFSRFDSPDKILAYAGMSPSTYQSGQLSLSGTYSHMEKRGSKYLRYALYNATKYVCLWDSTFEAYLAKKRAEGKHYNVALSHAAKKLVRLIYAMEKSRQPYNSVA

SEQ ID NO: 502477 - protein, 313 aa, unidentified
MAQMVATVGIDVSKDRLDVAVHPTEEQFSVTNDAVGWRLLVRRLRPLMARAVGIEASGGYERGGISALLDAGLPVHSVNPWKLRLYAKAAGVLAKNDRLDAGVIARFVATMPSREVRRDLAVEHLAELVTARRQLVDAVQQTTNQTEHLRDPSLRRLQARRVRQLERDVAQLDQLIAEAIAASPLLSARRDLLCSMPGVGPVLAATLLALLPELGSLPNRSIAALVGVVPYDFDSGRMRGRRHIFGGRAAVRRVLFMATQVAARFNPALKAFKQRLLATGKKPKVAIIAAMRKLIVTLNAMIRDNLPWRSVAA

SEQ ID NO: 502478 - protein, 425 aa, unidentified
MKKVTKFAKKVNEQVKETVLDKASWVIGIDIGKENLSCALMDINKTLVCRFEVEGSLDGYRDILDRVKRETRGNGKAVFAMEPTGHYWMVLGQFFEDHNQSYVLIHPLVVARSREVHRLSRGKTDSLDARLIGDLACDRSIIRTQIPEDYWATIRFYAREYMDREKDIVRDKNRITSYLETTLPEFVGIFPNPLGMSGRACLRVLANFREAIREDRNHFEKHIRDHLSGKRLMISRVRHLYDMLQRGDALGLRAGRQAMFRRIINSLDRLEMYERQQEAAKQSLLDSYDKSEYKQYLDSIWGTTPTVNALVLGFMGDPASYDGSSSLVKLAGCDPVPNESGKFKGKTSISHRGRNLLRKAGDRISFLLEKRNSVFRAFFNHLLSRQKNRLTKRQARVACVNKYFRIVWVLCNHQVPFNPALASAV

SEQ ID NO: 502479 - protein, 428 aa, unidentified
MRQVALDVHQGFCEVAVREDGKTRSAGRVATGRGALELFAGSLCLSDEVVMEATGPAMEIARIIRPHVARVVVANAQDVRAISHARVKSDRFDARTLAELLSAGMLAPVWVPDAETSALRRRVARRAALVRQRTRAKNEIHATLARCLLGRAPVSDLFGKKGRAWLSEQQLGTEEAETVAGCLRQIDFLDAEIAQVDRKLSEWAAGSQDAKRLMSIPGVGAGVAVTLMAAIGDISRFSSARALVAYLDLDPKVRQSGDEPARHGRISKRGNAQARSVLVEAAWVAMRQPGPLHAFGERIRARRGGQVAAVAVARKLACLAWQLLTKGEDYAYAQPSRVRAKLRRVELDAGAPPLRTRHAGRRVSASAAERDAERELTERAESAYRRLIADWKATRPAKRGAGATHGRAPSKPAERQAARQAPAQTPAL

SEQ ID NO: 502480 - protein, 356 aa, unidentified
MHPYRCRNAITLRVDTHKDTHVGVALDGLGRFQGTLSVPANPADYKKLVEWASEFGHLEHAGVEGTGSFGAGLARFLKAQEIKVFEVIRPKRRDQYRSGKSDPIDAEAAARAVLAGTATGEPKDADGEVEMIRTLRTTRRCAVKARAGAANQLQTLLVTAPEGLKSDLCGLSTARLVEKASRLRPGANPSNVEAATKFALRSVARRYQQLSEEISELDEQLDRLVTEAAPELVAVEGVGTDTAASLLIAAGDNPERLRDEAAFAHLCGAAPIPASSGQTIRHRLNRHGNRDANRALYVIAVCRMSRDERTRAYVAKRTAEGKSKKEIIRCLKRYIAREIYRILSSLPSRNSPISTP

SEQ ID NO: 502481 - protein, 337 aa, unidentified
MKRYLGVDLHRTQFTVCTRLENGRIYLRQWSMRELKLFAAQLRKADELAVEATGNTRLFYDAVEGYVARVAVVNPCQFKVISQSVKKTDKNDAELLALYLAKGLLPEVRMKERKQREIGHLAQTRDLLVKQRSALKAKINNLLSAEGINLKRESLSSNKALERVLSLPLSPLMLAEARVLVGQIRGMNQSVAELEELIEEEGPKLAGHKNLMSIKGVGPVSAAVLLSVIGNIGDFADPGKLAAYLGLVPRVQNSNETERSGRITKLGNKLARTALVQCALIAKRYSSFLQRFYQRIQRRRGGGKANIALARKFLGVIYHTLKNNWVFADFPNFVLAS

SEQ ID NO: 502482 - protein, 409 aa, unidentified
MEILYPRCAGLDVHKESVAVCVLTPGPQAEPDKQIQQFGTTTGELRRLRDWLGAHGVTHAAMESTGVYWKPVFNILESACQLILVNARHVKQVPGRKTDKADCAWIASLLRHGLLEASFVPEPEVRELRDLCRMRTTLVRECVQVGNRLRKVLEDANIKLDSVASNTLGMSGRCMIRALIEGRDDAGELAALARGRLRAKLPELEQALEGRVTGHHRFLLRELMRQLDFLEQQVARFEEQIAGGMPPFEWAAELLTTMPGVDRTAACALLAEIGADMSRFASSRHLASWAGLCPGNNESAGKRRSGKSHRGNRWIKGVMTEIAWAATRTKNSYSAAQYRKLAGHRGRKRALVAVANSLLQAVWYMLMQRQTYKSLGADYYDRLHRKDLERSLIRRLEKLGHKVILQPAA

SEQ ID NO: 502483 - protein, 327 aa, unidentified
MQAKLAYYEYKNKSNQSVNVGVGTGKFQLNIYIRPLDIYFTVSNDEKGIKEAIKKIQQHSPGRIIIEATGRLEMPFIIACANANLPFVVANPIHIKRFAGAIGQRAKTDKLDAQLIAHYGEAIQPKLSQLKPDTMQAMSDLVARRNQLLVMQTMEKNRLQILPKELAMTIKPILTVFKNQITKIENKIVALIESCPDYQAKNCILQSMKGIGKIASASIISNLPELGYMTNKQASALVGVAPMNRESGRYKGLRKIQGGRHQVRTVLYMAMMSAIQSNPVFKETYQRLVAAGKPKKVAIIACIRKMVVILNSMLRDGVMWEAPKATN

SEQ ID NO: 502484 - protein, 321 aa, unidentified
MSNKKSRRSAIGIDVSKQILEVAVHKSDYHFRFPNEPSKFPDLIAALIALRPARIVLEATGGLEKPLLQTLHAVGLPVVLVNPRQVRDFAKALGQLAKTDRLDARVLAHFADAIKPPLRPLKTTDDTELDALMGRRNQLSDILGAEKNRRGSAATDTARADIDAHIEWLEQRLKALDEQLKDQLKRSVTWQQKDKILQSVKGIGFVTSLALLADCPELGQLNRHQIAKLAGVAPLNRDSGKQRGTRHIFAGRAPLRAKLYMATLTAIRCNPVIKAFYQQLVARNKLKKVAIVACMRKLLTIVNVMIRENQLWNPKVQPVSA

SEQ ID NO: 502485 - protein, 404 aa, unidentified
MKKRNIFQNQSQEILSLFETVENRSKMMCVPIDYAKKDHTVMFCNGNGEIIRKPFSVKNSLKGKNYLVEQATKSCRHHGINLQYAFFGGEDCGSFADNFTCDLQVITALRSDDWIVAGVNPCDAKRYRENMQASTDRLDLLGICKMLLSCRGNCSPAQSGIYLNLRTLVRQRRKLVKMTTGVKNRIHTIVDRVFPGFLNEKKSGLWPFSKCSLLLMKDRFSAHQIRRRRRSTLVKLFTSQAIHQPDRCAEKLQQYATQVLTPPENHIATLQLSLKQQVKLFICLQENIEQTEKEIAEHLAQTQGAFLTSIRGIGIVLASGVSAEVGNPDKQKSINNLVSYAGIIPRIKQTGGIQGKTQVKKMGKRCNHIIKVVCFVQSASHILSYQFTKNWTYGTWGSTGNAQL

SEQ ID NO: 502486 - protein, 319 aa, unidentified
MAQNDLVVAGIDVAKDKVDVCVRSLSLKRTFASTAEGRRELTSWLRGRKVGKAVMEASGGYERDWAKALRNAKIEVRIVDPKRVRSFAQSAGRLAKNDTIDAEMIAWFAETFDEARGQAYDATREQLHQMVNARQAMKDMQTKLESQGEHALPATVQRMHARIMKTIAVELVKIEAAISAMVQATPHFTELAEIIESVPGIGRTTSAALIAAMPELGQANNKIVAALLGVAPYDDDSGRRRGERHIKGGRRRTRNVFYMACLGAATQHNPVLKAFYDRLVAKGKQKKVALVACMRKLISILNIMIERRQKWDASRYAVS

SEQ ID NO: 502487 - protein, 405 aa, unidentified
MTDIEQHDDVQVFVGVDVGKGAHHAVALDRKGKRLLNSALPNDEAKLRALLSKLKAHGPVLLVVDQPATVGALPVAVARDEGALVAYLPGLAMRRIADLHAGESKTDARDAYIIAEAARSLPHTLRSLKLADSQVAELTMLCGFDEDLAGQITQVSNRIRGLLTQIHPALERVIGPHLDHPAMLDLLERYPAPAQLAALTQKQLANRLVKLAPRVGKTWAAEILQALSEQTVVVLGTQAASIVLPRLARQLAALRVQRDEVAKEVERLVLAHPLHPVLTSMPGVGVRTAARLLIDVVSRAFASAGHLAAYAGLAPVTRRSGSSIRGELPSRRGNKQLKRAMFLSAFAALRDPVSRAYYARKISQGKRHNQALIALARRRCDVLFAMLRDGTFYAPPRTELLLTRT

SEQ ID NO: 502488 - protein, 423 aa, unidentified
MRHKQSAAGMQVLYARVCGLDVHKKSVMACLRVLDPKSGRVDITVQGFGTMSEDLLELRHWLKDAQVTHVAMESTGVYWQPVYNLLEDHFESWVVNAQHIKKVAGRKTDVSDAEWIAQLLQCGLLRPSLVPDRAQRELRDLSRQQTKLVQHRNAVNNRIQKVLESANIKLGSVASDVLGVSGRKMIEALISGEKDPSVLAELAQKKLRDKIPQLRRALAGELSDHHRFLLGELLVQHDFINQRIQVMAQRIDEVAPRPFVAAVQKLDAIGGVGERGAKALLAETGTDMTRFPTHKHFASWAGQCPGNHESAGKRKGGKTPAANRHLDAVLTEMAHAAVRKKNSYFKAQYHRLAGRRGKKRAIGAVKHSLLVTIYYILRDDKPFQDLGPNHFNSLNPQQRIRFHVRKLQELGQTVELSPIANAA

SEQ ID NO: 502489 - protein, 360 aa, unidentified
MFCERTSVGLDVHARSVVAAAIDGRSGEVFRARLTPSHAEVIEWVGKLPGPCAVVYEAGPTGFGLARALSAAGLRCQVAASSKLLRPAGDRVKTDARDALNLARLLRLDEVVPVRIPSAAEEAARDLVRTREAARADLMRARHRLSKLLLRHGIVYYDGKAWTERHDRWLHHQRFDAAPTQSAFEDVYEAVVLATARRARLDEKITALAADSEFSPLTRRLACLRGISTLTGFALAVEIGDWDRFTGASIGAYLGLVPSEYSSGTSRTQGAITKTGNTHVRRLLVEAAWHHRSTYRPGAVLRHRWDQAPAAARARAHAGNQRLHARWVGLNLRRKAAVIANVAVARELAGWCWSLAVLPD

SEQ ID NO: 502490 - protein, 389 aa, unidentified
MYFVGIDVSKYKHDCFIVSSDGEAPFGVFSFENNKQGFEMFLDRLNSLDSSEEKRIGFESTSHYTLNLKLFLEKHSYTFMEFQPALISQYGKALSLRKTKTDAIDSQTIARWLMTVEYKPYPSSFYHNYSLKSLTRLRFSLIKQRTFYLIRLTDILDHIFPEFKPFFNNNFSATALHILEKYGSPEKIAAFRTTSYDELRKISRGKFSMQKFLALKELAKNSVGVSNRIFEMELSCVLRLYRQIDEEITNIEAEIKTLTLELNRPCLTIPGVGVLSAAVILSEYGNISKFKSPAQMLSFAGLEPGYFQSGQSEHTGHMVKRGSSHLRCAILNCCLPLIQFNMTFAEFYAKKRAEGKPHRVALSHVAKKLIRLIYTLETTNQPFKADKLR

SEQ ID NO: 502491 - protein, 343 aa, unidentified
MENDIRIGVDVAKAVFEVAVSNRAGHVARRERLSRAQFLAFLAQQPRATVFMEACGSAHYWGRRVQELGHQAILLPPHHVRPYVRRNKTDRTDTKGILEASRNEEIRPVPVRTVPQQVLTTLHRLRSGWMRERTARLNAPRGLLRELGVFIPVGAREVVPAVWALIEDAESDFPAALRPIFAEAGHEIRAIEARIKQVERQLEAMAQELPMVEYLLTIPGIGLLTATALVAFVGDIRRFPSARHFASWLGLTPREYSSGLKRYLGRISKRGDGYLRTLLIHGARSVLLHSRQQQPDRLREWAFNLGKTHVHNKAAVAVANKLARVVWAVWTHGRPFTLLAKAA

SEQ ID NO: 502492 - protein, 355 aa, unidentified
MRYIKNIAAFVTDKIVFCGIDMHVQHWNLSFFCDGEVVEELRIGGDLVLLLFVLKNYSTARSVRIVYEAGFSGFWAYRQLRARGYDCMVTAPSLIPQNNSHVKTNKRDARALASYFAAGLLKAVYVPPIEVEADRRVSRRRSQLVKQLTRTKNHIKSFLHLHGLKTPVDIRSKWSKRYLTWLRELQWEQSSDAFTFRHLLLCYQRHREDLAIITQQLRQLSHASCYIDHFKRLCTARGVGLITGMTFLLEIFDFGRFRRAEEFASYLGLTPAQYSSGENVRLGHITRQGNAALRAVLVESAWTVIRHDPHLRAKYERLRQRGTNGKKAIVAVAHSLALRLRRCLLDQTDYVIGVC

SEQ ID NO: 502493 - protein, 366 aa, unidentified
MVPPRRLPIESQSDGVIERSQALACSSIIEGTTMEQYAGIDVSLESASVCEAKVVCEPEALIAWFTKLGVSMARIGLEAGPLSQWLYARMREAGLLVELLETRHVRDAFKAMPVKTDRTDARGIAQLMRLGWFRPVHCKSLPAQELRAILTARKLVQNKRHDLEMSLRGILRGFGLKVGQTTPRNFEARVRELAHGQPTLLVVADAMLLARAVLVEQLGKLQKRLVSLARQDTRARLLMSTPGVGVLVALTYVAAIDDPARFRSSKAVGAHFGLTPKKYQSGETDVTGRISKIGDASVRTALYEAANVILTRPVRGSLLKSWAMRVAKRTGMRKAKVALARKLAVILHRMLANGSAFVAGKAAAKA

SEQ ID NO: 502494 - protein, 329 aa, unidentified
MPDHLPDPIIFGADVSSTEIVIASANSNQAVKTIANNRKTIAAWVKQLPKDAVIGMEATGRYHCTLADCAVLRGHRVYVINPKHLSLYAKGVGQRGKTDPLDASVIARYVAREGGRLHPYTVPTATQRTLRDLLSQRAGIVKHCGAIRQCLLATESIGSAALKRAHKKALHGLQTLIAEIDVQLHVAVRKDAALEQKCAMLQTITGIGLLNGLALTHRFDRTPFANSDAVVAAYGLDPRPKDSGNKVGRRHLTKQGNAEDRRLIYLAAQSAAKTKTFKPLYVALRAKGFATTEAIVIIARKLLRIAFAVWTSKQPFNPDKLGFQACKKP

SEQ ID NO: 502495 - protein, 366 aa, unidentified
MKKNSTVATGRKQIFKQARLTIGLDLGDRSSHFCMLDEAGNVIVEDNLPTMPNQVRQVFSKIPRCRIALETGTHSPWVSRQLSQMGHEVIVAHARNVRLIGESSRKDDQLDARMLARLARFDPGLLGPVRHRSAKAQIDLTVIRARAALVSTRTALVNAARGLTKSYGERLRKCGTGQMDREIAKGLSQELRDALDPLLGEIESLNVRIAEYDRRIEHIATEVHPEVARLKQVKGVGTLIALTYVLTLDDPHRFRRSRDVGCFVGLRPGRRNSGQSEPQLHISKEGDRYLRTLLVQGAHYILGPFGQDSDLRRWGLKLAERGGKNAKKRAVVAVARKLAVLLHKLWVSGEVYEPLRNNPKGVSAVA

SEQ ID NO: 502496 - protein, 330 aa, unidentified
MKKWNVILGVDVSKLTLDICCAERNLHLKIDNCTKGFAVLKKWCKEKEIDLHTTLVIMEFTGGYEYRFIQFCQSLSIDYLRVPGLEIKSSMGMVRGKSDQADAYRIGLYGEDKSRRLEPSNPLNDNILILRQLLSFRKRLVRERAGLQSTLKEREHMYGVKKNDHITRIAKEKIKTNDKHIRQIEEEIMGTIKNDEAMWWNYRIITSIKGIGKVNGWMTIVYTENFTSFTDPRKYAVFVGVIPFANDSGTSIKGKKRVSHLAHKEIKQELNQAAKTAMTHDPEIRAYAERKLQNKAFPLVLNNVKFKLILRMFSLVKRGVKYVDNYKKAA

SEQ ID NO: 502497 - protein, 421 aa, unidentified
MEETEDREEIIERVAALDIGKAELVACVRVPSPTTPGRRAQEISTHSTMTRSLLALSDRLRALGVTRVVMEATSDYWKPVFYLLEAQEFEPWLVNAKDVKHLPGRPKTDKLDAVWLCKVAERQMLRPSFVPPVPIRRLRDLTRYRLDLVNTRTAEKNRVEKLLEDAQIKLSAVVSDIFGASGREMLGALIAGERDPKVLAQLARARMRVKISVLEEAFVGHFTDHHAFLLRTMLARIDETSADIAAVEAKVEELIAPFAQAVERLDEIPGVGPTAAHVMIAEIGLDMSRFPTAAHLCSWARLAPGVQESAGKRKGRGSTGHGNPYLARVLGEAAVSAARTDTFLGDRFRRIARRRGKKKAIVAVGRSILVIVWHPLSDDQARFYDLGPDFYDNRTGPDRKKRNHIRQLEALGYKVTLEPAA

SEQ ID NO: 502498 - protein, 409 aa, unidentified
MEVVHKKCAGLDVHKKVVVAAVLVEGRPKEIRSFGTMTADLLELSDWLIDCGVANVAMESTGEYWKPIFNILENNFEVMLVNAQHISKVPGRKTDVSDAEWIADLLRHGLLTASFIPPVGQRELRELTRFRSTFVKERATLVNRVQKVLESANIKLASVASNVMGVSGRAILESIVAGTASPEQMAELSKGRLRNKREELSRALEGRVKPHHRFVLTELLSQIDSLEETIARFNQEIEEYCRPFEEVVVLLDTIPGVARETAENIVAEIGTDMSRFPTANHLASWAGVAPGNNESAGKKHSGKAKKGNKPLGVTLTQAAHAATHTKNTYLSAQYHRLAGRRGKKRALKAVAHSILVISYYMIQRHVPYFELGGDYFDKRRPEATAKRLITRLEHLGYQVSAQQMAIPVS

SEQ ID NO: 502499 - protein, 350 aa, unidentified
MIRYVGVDVGKTRCRAALMNQQGNIEKEFFFENNQKGIQYLTSLLTSEDQVVMESTANLWLTLYEALDNKNIKVVLANPMKTKAIASARVKTDKVDAKILAHLLRADLVAESYVPPAQIREIRALIRHRLSLMKMRTMIKNKVHALTDKYGYRCEFSDMFGVSGLKWLRTLEMKELDCLILENHLSHIEAINLQIGKADGAIKEKACEDEDICLLMSLPGIDVRTALLLKSEIGPIGRFGDYKKLVSWAGLAPRVYQSGGVLWNGGITHEGSGVLRWAMVEAAQTAVRCDEKFGVFYGRVKARRGGQKAVVAVANKMLKVVWVMLTRRETYGGVNRRRYEEKLNNAGFGM

SEQ ID NO: 502500 - protein, 387 aa, unidentified
MAQVDDLSRSLVAFDQDASLIVVVEMSQSSWLVAGMVPGVDRQPLKKLEPDPDALLRLLQRWRSDAVTAGRTIERIILAYEAGRDGFWLARWLQARGIEVHVIHSTSVAVSREHRRAKTDRLDTAMLMRVFLGWLRGERGHCGMVAIPTVEEEDARRPSRERENLVGERTRIVNRMKSALARLGIRGFKPALRKAPQRLEAIRTPEGNAIPANTLDELRRDMARLAVVREQIKEIEHGRLERMEQAPEEGPNAMVLLLARVIGVGVETADMLVREVLSRKLRDRRAVARYAGLTGSPDESGSRRREKGLAKAGNARVRRGLIQLAWRFLMFQKESRLAQWFRARTEGAKGAHKTTMIVVLARKLLIELWRMATTGVVPEGFVLRKAA

SEQ ID NO: 502501 - protein, 324 aa, unidentified
MESKHYIGIDIAKAKFDMAFFDENNKPIHKVFDNTKKGFCQMMSFLKKKGIEKAHFTMEATNVYWQELAEFLEAKEDIIVSVVNPLQISSYAKCRMQRGKTDKIDALLLARFCQNERPEPWGPLNTASSQLLKMVRELEHLKELKQQEQTRLQTADKSVYKPIKAMITAASKQIKCLEKEIMAYIKANDELHEGFKLLKSIPGIGDSTAPWLLATLDNGERFGRGKQAACYAGLTPRPWQSGSSVKGKTSISKVGPSELRKILYMPALVVSYGRYKHYQSFVKRLEAKGKTKMEVIVAVMRKLITIAQAVLRTKTLYDATLHAG

SEQ ID NO: 502502 - protein, 438 aa, unidentified
MSNKVIFNLDELFISVGIDVGADFSWMSIALPNQQFVGKPYKILHSSIDSLTTAVSKIKEAEELYSLESRIFLESTGIYHYPLFCYLRDKGFNCSVINPIITKNSTNINIRKVHNDRFDSKKAALVGLKPDLKVSLMPSDLALNCRNLCREYYDLMDNRSAYVNKLQGELRMAFPQYLGIFSKVTINTSLTLLETYTSPSAFLEADKQEIIDIIKSTARFGLTYAQNKYNAIIQAATDANQFGYIIDSNIKRIRLYISFIRKYDEEINNILESLHELVDANEDADFVKQIHLIETFKGAGFLSAVSIMGEIGDFSAFSKPKQLFAYFGLDPAVKQSGKFEGTKVQMSKRGSAIARRVIHTLTLQSISISRNREAKNPVLREYYLKKCDSKPKLVAMGAVSHKVCNMIFAILRDNKSFEIITPQEHIKQYNASKCDMAA

SEQ ID NO: 502503 - protein, 429 aa, unidentified
MAESIMVACDLHDRTMLLLMAQGRGAAEKLSLPNTKAGRLKLRKLLRTRSTEAGGAQVVFAYEASGLGFGLYDELTAAGFTCYVLAPTKIARSSQQKRNKTDEKDAALILQVLRGHVLAGNALPEVWVPKPATRDDRELVRARLDLADKLSSVKTQVRCLLKRWQVARPPAVGKGWTKLHLAWLRGLTKDKVLSVGARQTLESLLRQLTFLQEEEERLDKALDRLVNDPRYTEQVYALARLSGVGVLTALVFLTEIGDLWRFHNRRQVGAYLGLVPVARESGEQSDRKGHITRQGPSHVRRVLCQAVWARVRSDKEDSSDVLAYQRIVAKNPQHKKIAVVAVMRRLAVRMWHAGRNATLAAARRRAQSSLGPDLRSGLPRPACGSRSPDGKAATPRQRRTKSPAGDRPPAAPPLGPQRSLRPAAPALTK

SEQ ID NO: 502504 - protein, 364 aa, unidentified
MFVAGLDAHTRYVVVSVVNRTGELLVKPTRVRVEDRQRLLALLAPYRPLEVVMETSSSWPWLCEVLSGADLTFVLAHARRLRAIAEATYKSDDIDAELLARMRLAGCIPAVYVTPAAQREWATLIRHRTALVRQRTMLVNRLHAQLHTRGLHLERGRLLTRSGWQWLKKDAWPHLSAEQRAVVRSHRRLLRELIPLIRAADRHIAAVAATIPEAQRLMTIPGIGAHRALLICAEVLPIARFRTPNHLASYAGLVPITKQSGQGPLRHGPVPGGANRWLRGALVRAIVSHVQHAPRSWLTQYYTQHKARVGWPVARVATARKLARAIHAMLRTQTGWTNDVTPIRLEVSSRETMPHHLVTASPPD

SEQ ID NO: 502505 - protein, 401 aa, unidentified
MRFAGIDIGSERHVVAIVDQSGAVVLKATPIMEDATGYKRLLELLGNASDCLVAMEATGHYWRNLFAALVTAGFKIALINPLRSSRFAEEELQRTKTDAIDAVGIARFAAQKRPEITQLPDPALQELRELVRLKERLVQEFGDRVRQLHRAVDLGFPEFSRHIRTLDSELATAVLGRYPTAAALRTVSVRRLARLCYDGSHYVGEELARALLEAARQSVGAHHGEPYQLQVRYACEDLDVLRRRLRSLDHDIERRLEQHEVGKLLTTIEGIGPQTAARIIAEVGDPARFHSARALASYVGVIPRVHQSGKRKFSSSAKVPLGNARLRRALWMPAITAIHHNPWLHAYYQHLRAAGKRPKVALVAIIRKLMTAVYSVAKHRRPFVLPPIFTPAAGGAEVPST

SEQ ID NO: 502506 - protein, 408 aa, unidentified
MTVVGIDVSKGKSMVAAMKPGGELVAAPYEVRHSDIELSHLALDVLCMEPDTRVVMEATGRYHEPVAALLHSEGIFVSILNPLLIKQSGAGSLRKVKSDPKDALKIAKYGLDNWSTLREYTPMEAIRQQLKLCARQCDLYNKNIVMLTNNLISLSDKTFPGVNELFSSPEKADGHLKWVDFYRSFWHCDCINRMSPDAFEERYKKWCKRKGYHFSTDAADALYAASCGLYTTLPRDNNAKLLVTVAADQLIALRENQSKLEAEMLNLCKQLPEYETVMAMYGVGKSTGPHLMAELGDVRRFPHRSSIVAFAGVDPGVVGSGKMQLSSVTTSKRGSPQLRKALFQVVSTYVKCKPENEAVYQFYAKKRDEGKPFFVCTTAAANKFLRIYYARVKECLNAAESATQVEEG

SEQ ID NO: 502507 - protein, 353 aa, unidentified
MKPNIDPNAAPLISIGIDIGKEIFHIVGLGTDGKIAFRRKIKRLALKEAFEKLPSCIVGMEACLSAHFVSRMLKTLGHEPRIIPAIYVKPFLKGQKNDYNDAEAICEAALRPNLRTVQEKNQDQLDLQACHRVRSRLVSRRTAAINQIRAFLIEQGIAVRAGTSALRKSLFEILKNRKDEISPRMANLIVGLYEDWLWLDKRIETITSEIKQLSQSEPNCRRLMSVPGIGPLISTGLVAAIGTGEAFERGRDFGAWLGLVPRQYSTGGRSILGRISKRGSKYLRTLFIQAAKVLLIRPQNWPRYSFGAWLKTAAERLHRNKLAVALANKLARIAWSVLRHDRAFDTHIEVGAI

SEQ ID NO: 502508 - protein, 398 aa, unidentified
MSRIWVGTDCGKTHHHCLILDSEGEVLLSRRVANDEPELLQLIADVLGPAGGTPVTWALDMTGGEPNLLIALLAVHGQELVYIPGVAVNRATDGYRGVGKTDVRDARVIADQARMRRDLLPVRLDDEAIVELRLLTDHRADLVAERTRATNRLRSLLNSMFPALERALDLGNTGPLRLLTGYQTPAAIRRTGARRLATWLRNRKVYPPDTLAAKAVEAAERQHTAVAGEKAIAKMVHTLAEEVMTLNEKIAETDQLIEGRFREHELAEVIISIPGIGPTLGAELLAAIGGSLDAFPTADRLAAFAGVAPAPRDSGKVSGNLHRPKRYHRRMQRVFYTSALVSIRYDPNSRKFYDRKRAEGKRHVQAVLALARRRINVLWALIRDGRCYQVTPPVTPAA

SEQ ID NO: 502509 - protein, 353 aa, unidentified
MAHPQPPRITVGVDTHKDLHVAAARDQLGRRLGTTMAPATSAGYATLLVWAQALGDVQAWGVEGTGSYGAGLARFLTARGQRVLEVNRPDRAARRRRGKSDPVDADAAARTVQAGEATGVPKAQDGVVEMLRALRAARQTAVKARTQAINAIKALLVTAPAELREPLDGLANPKLVAAAAALEPGTLTTPTAATMLALRGLAQRYQHLDAEISLLTSRLDQLTTRTASALRQLLGVGPDSAAALLIAAGDNPGRLRSEAAFAALCGASPVEASSGKTVRHRLNRGGDRQANAALHRVVIVRLRWHQPTRDYVARRTAEGKTKKEILRCLKRYVAREVFAVLPQLGEQLLVAAA

SEQ ID NO: 502510 - protein, 337 aa, unidentified
MTIKVLGIDLGKRYFHVHAVDKNGVLITRKKLKRKELILFLSNLEPCLIGMEACGGAHYLARKAEEFGHTPKLMAPKFVKPYLKSNKNDFLDAEAICEAVQRPNMRFVTPRSPEQQTLGAQVIFRESLVRRRNAAINQIHGFMLEFGIEYPKGRKTVLRLNEIIGQHEGELPASMIVMLYRIAQEYRNLCEQISEVEDDMSALVVNDDKGQRLLEVQGVGLITAACLLAWVGDAKQFKSGRDLAAWIGLVPKQSSTGGKATLLGIGKRGHTRLRCNLIHGARSALQWHINKPSRWNAWAKTLKATKKPNVVAVAMANKMARMIWVVLAKNERYEAIA

SEQ ID NO: 502511 - protein, 325 aa, unidentified
MKTESSELFIGVDISKERLDIANNSNSEVWSELNNDGGVSLLVEKLISLKPCLVVMEATGGLETLLYSSLVSAALPAVVVNPRQVRDFAKALGKLAKTDAIDAWILARFGALMRPEIRPIKDEQTRELASLVARRRQLLGMRTAEKTRLRQTADKWTKKDIKSLIKVFDKRISKLEKEISNNVKNTPGWKEKDKIITSVPGVGPNLSSYLLANLPELGKLNRREIATLVGVAPLNRDSGKFRGTRMIWGGRAQVRSALYMSALSASMYNPSIKMFYKRLIEKGKKPKVALTACMRKLLTIINTMVKNNSTWDQNYSLKLDFNHGC

SEQ ID NO: 502512 - protein, 363 aa, unidentified
MEQFIGCDAHKKYSVFVAVNERGEASPAIRVGHDREQYRQFLERLPAGSQIALEAGGHYYWMVDEMEAAGHRPRLVHPLEAKKRMGKTGKKTDKVDANGLGILLRNGTLPEVWIPPSELRDQRESLRLRMFLVQQRTRLKNRIQGALARYNIQMAEVSDMFGVEGRLRLGKRLAELPEHTRQSVELELVTLDFLEVQLADIEKRLEALMKVTAEADLLKTLPYVGRILSMVMTLEIGKVERFASAAHLASYAGLVPRVHASGGHTRLGQICGDVNHYLKWAFIDAGNLVVIHQKRLAGQHVVRLYQRVKRKKNHQKAVVAVARHLAEAAYWILKKQEVYRDPQPKPKAPAQAQAAHALSSTHG

SEQ ID NO: 502513 - protein, 322 aa, unidentified
MRYIGIDVSKATFVVAYSSDKGGEIRTFNNTTTGIKQFIGALPKDSSIHCVMEATGNYSAMLLYLLNVAGIAVSMENPLKIKNFARAMLSTVKTDKIDARLIALYGEKMNPQPFKIQGEAILRLRQKRTVIRQLTKQITAMSNLRGSLACLPVPDKGATHTVDETIKFLEKRRDRLQSELTDLVEVEFSRQLALLTTIKGIGITLATALIITTGGFTYFQNAKQVSRYLGICPTYEQSGTSVNIRGHINRNGDAYTRGLLYVAAWTASRFNTKCGETYTRLRQNGKPGKLAMIAVANKLVRQAFAVVAHDKAYSDGFVSNRP

SEQ ID NO: 502514 - protein, 412 aa, unidentified
MIHPKMQYTYVGIDSHKDSHTAVFMDCFFEKLGELTFENLPSCFDAFLDDAKRFQLDGTVLLFGLEDTSSYGRTLMLFLRANGQQVKHVNSLLVARERKNNNIVLKTDAVDAECAARVLLSKFGELPDAVPEDMYWILRSLVVRRAALVKQNVASKNMLHSFLTQHYPNYRSYFENIDCNTSLAFFERYPSPETLQNTTPEELAAFLEMHSGTFYSLDKANQILGTLQDTGVPFQEIRDAIVQSIVKQVQYHISEIAQLDEQLVAFLDKFDCPLLSMTGLDVVSAAQILSCIGDIRKFPTPAKLARYAGIAPVTYSSGKTDLQFANQRGNRELNSLIYNLAVRLTMTAGPSRKIMNSFCYDYYNRKRSEGKTKRQAMKCVERRLINIIWNMLTHGEEYVNPPTYNAPPKEKL

SEQ ID NO: 502515 - protein, 320 aa, unidentified
MTYQTFIGIDIGKYEFVACELALGKAETFPNNEQGWSAFFGAKYNLLRHALVVLETTGGYESGLLTFLVERKICVHRADTRKVKSFIRSFGQKAKTDSIDARALAQYGAERHPKLKLYVLGTTKQSTMKILEERRQDLKQMLVQEKNRLKAPLNGPVKANIEDSILSLERFIESISDQLDKLISTDEALKAKQELLKSIPGIGEVTSKSLLALIPELGHLDKKQVASLCGVAPHARQSGTRVWYSRTFGGRQNLRPILFMAAMAARKTKTPLGDFYERLVAGGKKKMVALVALMRKIIVIANAKLKAAMSPSERHNELMG

SEQ ID NO: 502516 - protein, 370 aa, unidentified
MEQYTEAFVGIDTAKNKHALAIADPGRDGEIRYLGEIDSAPAAVQRMIRKLAGRYEKLYFCYEAGPTGYGLYRQVRALGDDCIVVAPSLVPKRPGERVKTNRRDAVTLARLLRAGDLTPVWVPDAVHEAVRDLVRARTAASEDLRRKRQQLLSFLLRHGRIYSGRKHWTKMHLHWLAQQKFDHPAQQIVFQDAVDAIEDAATRLRRLDQQVAEIVPSWSMAPVVEAYQAMRGVSFGVAATFVAEIGDLRRFDNPRQLMAFLGLVPSERSTGERVRRAGLTLAGNKRARRVLIEGAWSYRYPARVSQTLQTRLEGLPKTVRAIAWKAQIRLCARYRRLTAAGKKRPLVIAAIAREMAAFLWAIAQHVAPAA

SEQ ID NO: 502517 - protein, 370 aa, unidentified
MNSITFVGLDVHKETITIAIAKAEGFYHEIGTIENEPKAIAKMVKKLGAPESLFFCYEAGACGYTIHRQLTNLGAKCVVVAPSLIPKAPGDRIKTDRRDAMKLAKMLMWGQLQPVWVPDEEHEAFRQLVRAREIAQEDVTRKKNQITKMLLLHGEKPPTGVKLWNKEYRRWVVKVRFKVSYLDVVFSDYLNTLQEAEDRVKRLEKLIEEVSKESKLAALIAALQGLRGVALVTACTIVAEAGDMSRFDSPTKFMSYAGLIPSEYSSGRNVHRGRITKTGNNHLRRIIVESAWHYRYAPRVGEELQKRQRGLTEEVKQIAWKAQHRLSKKFRKDIARGKNSNVAAVAVARELLGFMWAIAKQVNQPVLIAA

SEQ ID NO: 502518 - protein, 337 aa, unidentified
MRYIGVDLHSNNFMVCFLPEEGKQTFKQYKIGEIEIFKQCLDAEDRIAVEATGNTRFFYTQIVPLVAECVVVNPSQFEIIKQSFKKTDKNDAEALARFLSKGILPSSRMKEELEAQVNSLATTRDKLVKLRTTLLNKIHAHLKGEGYESRKEAYQHEANLKKVLDLNWSVTVRIELEVIIAQIRSLTDGITKLEKEISERGSQLEGHANLKSIKGIGSYSAAVLLSVIGDVNDFPDEDKLASYFGIVPRVSNSNQTQHHGSITKRGSKLARTALVQCTLTAKRFSPYLKQFYERIKARRGAGKAIIATARKFLGIIYRTLKYNWVFSDFPNFVLAEQ

SEQ ID NO: 502519 - protein, 343 aa, unidentified
MQTVSTIGLDIAKSVFQVHGVDANGLVVIRRQLKRRYVLAFFEKLPSCLVGIEACASSHHWSRELRALGHNVRLMPPAYVKPYVKRQKNDMADAEAICEAVTRANMRFVPIKTPEQQSGLVLHRTRHLFIRQQTSVINAIRAHLAEFGVTAPVGRKGIEELLRIIADPSDKRVPDVVRACLAALGSQLLSLKKQILDFDRMIMAWHRSNQTSKRLNCIPGVGPLLATALVASVADPKAFRSGRNFSAWIGLVPKQHSSGGRDKLGSISKQGDRYLRSLFVAGALAVIRYAKIHGTKHRPWVTALLTRRPTKVAAIALANKLARMAWAMMASGERYNYPAALKV

SEQ ID NO: 502520 - protein, 382 aa, unidentified
MAGTEPHAWGTGLMDDITYVGLDVHKATVCVAVAESGRGGEIRQVGVFENRPEILCKMAARLGKGGRRLSFCYEAGPCGYGLHRLLTGCGHSCIVVAPSLIPIKSGDRIKTDRRDAMMLAKLHRAGELTAIWIPDAAHEAIRDLVRARATAGQVLSKARQHLQGFLLRHDRIYRGVRAWTLAYRRWLTTVRFEHPAQQIVLQDYIHAVEDAEARRDRLTRQIEEMLPSWSMAPVVTALQAMRGVALVVAVTVVAEVGDFRRFANARQLMAYLGLVPSEHSSGSTIRRGGITKAGNALARRVLIEGAWTYRMTARVSRKLHDRLEPLSAAIRDIAWKAQVRLCARYRRLAAAGKPKVVVTTAIAREMVGFIWAIARIAQPALA

SEQ ID NO: 502521 - protein, 343 aa, unidentified
MQVSTIGLDLAKNVFQAHGVSAEGKVVLKKQLRRGQVLSTFAKLPPCLVGMEACAGAHYWARELRKLGHDVRLMPARDVKAYVKRDKTDAADAAAICEAVSRPSMRFVALKTPEQQGRLMQHRVRDLLLRQRTQTINALRAHMAELGLVAATGRQGLCLLLAILADAKDERLPQDARASLKLLASQIAALQAQIDTLDKRLHAQHRQCPASRRLETIPGIGVIGATALAATITDPKAFKSGRDLAAFIGLVPRNNSSGGKQRLGPISKQGDRYLRRILVVGAHSILKQARTRPDKHPWLARLMARKPGKLAAVALANKTARIAWAVLARGETYRAPTAPAAAG

SEQ ID NO: 502522 - protein, 386 aa, unidentified
MDVHTSNYTLCSLDPGYGVEKDNYFAEVQFTNNFVTNVVNYVTNLKKKLKDCEFVCGYEAGCLGYSTYKNLTKVGIKCVIMAPSTMAVQKGGKKVKNDRRDARVIAQCLAYQTYKEVYVLSEHDEAVRGYLRMRDSHNKALKRIKQQIIAFCTGHGLFSPTKSNWTVAHLKWLKDLKFNDPVEQEILNEYLSSLTFLSDKIKAMDVRIEELASEKQYCENIKKLRCIKGIETNVALTLLAEIGDFNRFLKPTDFAAYLGLIPGEQSSGDKVRGTGITKAGNSTLRRKLTESAKGYWRGRIGIKSATFKKLEKELPKEVTEYALKANTRLQRKFFNMTHVKGKNMNVAASACAREMACFVWGLITNHYDKAPAVPKTDEELLDLNLG

SEQ ID NO: 502523 - protein, 339 aa, unidentified
MRLYTAFDLHSNNSYLGINDENGNRVFKKKLPNDPAVIIESLKPFNADIVGIVVESTYNWYWLVDLLMAEGYKVHLANPVEIQKYKGLKYADDQHDAFWLAEMLRLDILPEGYIYPKEDRPIRDLVRKRGHLEKVRTSLIISLQNIISRNNGIRLKANHIKALRTDRVAPFLEQNEDLALAGKVSKESIDFLTRRIKSIEAVVEKKVELKEPYDRLLTVPGIGKILGITIMLETGPISRFEKVGNYVSYCRKVSSKWISNDKRKGKGNKKNGNKYLAWAFSEAAEMSRRYDENARAYFNRKAQQTNRMVAHNALAHKLARAAYYIMRDGVSFMPEKCFG

SEQ ID NO: 502524 - protein, 402 aa, unidentified
MRIETRPQDHPTATTAEIARLLVSFELSQSKWVLTVRAPGSAKLSRFTVAARDTEKVLSLLTAQRQQAERRTGRPVRIVSIYEAGLDGFWLHRWLEAQGVESHVVDAASILGPQRKRNAKTDRIDGEKLLRSLASWLDGEVGVCSMVVPPSVAQEDIRRLSRERGELVGERTRLSNRIGGLLANQGIAGFKPLQKDARQVLQTLRTGDGRALPPHLHTTIERILLRLELLCEQIKAAEAERDALLRAARVAAAPDTAPEAATAAPPEMAAAPLLLRLRGIGPEFTTVLSLECLNRDFDNRRQLGSFAGIAPTPWSSGGAEREQGISKAGNRRLRTILIELAWSWQRHQPDSTLTQWFHKRIKGQGARVKRIAIVALARKLLVALWRYVKHGVVPQGAVLKAA

SEQ ID NO: 502525 - protein, 372 aa, unidentified
MNYNTVYVGMDVHKESFTLCSCKYEDEKASHYQRTPASYKNVLRYLAFLRTIYGEDTRFVCGYEAGCLGYSLYHQLENFNVECVILAPTTMLEQRSKRRIKTDKRDAEIIARSLAQHNYSPVHIPTKMDNQTKEFIRMRDDHKAELKKIKQQILSFCLRQGYQYDGSGNWTAKHVKWLRSLKPAGLYKEILDEYLLTYTILTDKLNRLDQRIEELASKEEYKESVSKLTCFLGIKTHTALSVIVEVGDFQRFVSARKFAGYLGLVPGQHSSGDDRNGLGITKAGNTHVRRLLVESAQSYTRGKIGYKSRVLRSRQAGNSPQVINYADRANERLRRRYYKMVLKDGKKYNIAKTAIARELACFIWGMMTDNIY

SEQ ID NO: 502526 - protein, 300 aa, unidentified
MGYFAGLDVSLEETTICIVDNAGKIVREARAASEPEELVAFFRACGMKMERVGLEACSLTAWLHAGLTEAGIPAICIEARQAKAAMGAMPNKTDRNDARGMAHIMRTGWYRAVHVKSPSCRSWRALLTARRMVLNKRRDVENGVRALLREVGLKVGTPSRKDFPARVRDLAAADPVLVSLTESLLSVIEVMTREVERLTKRALDEVRDEPTCRRLMTVPGVGPLTALALRATIDQPGRFRKSRDVGAHLGLTPRRYQSGETDVQGRISRCGDELARTALYEAAHSLLIRCTKWSALRAWA

SEQ ID NO: 502527 - protein, 326 aa, unidentified
MTDLINGILGIDISKAKFDVALMIAGKVKKTHIFDNTAEGYKKLSAWLNKQGMATVAACMEATGCYGEALATYLYNEGCVVSVVNPAQIKSFSGAQLKRVKTDKADAKLIAQFYQDMHPNPWTPPPVHVRDLQSLVHRLTALAHMEAQEQNRLDTAASVIRPSIETVLATIRAETKAVKALIHDHIDGHPDLKNQSELLDSIPGIGEATIARLLAFIGDVTRFDHAKALAAFVGLNPTVHQSGTSVRGKPHLSKKGNSALRCALYMPAIVARRYNPILKTFADRLKKAGKPNMVIIGAVMRKLLHIIYGVLKSGMPFDPAWTAKHA

SEQ ID NO: 502528 - protein, 345 aa, unidentified
MPIVGGLDIHRKQITFDYLDTVTGQVRRGQISPADRAHLRAWLARFNGREDVAFAVEGCTGWRYVAEELAAAGVTAHLAEPADTAFARGRKRHAKTDKTDSRHLRVLLAEGRLPECWIPPAQILEYRALLETYHDLRAEHTAWVQRIHAVFFHQGAPALGEGVLRTEQGLAALRVAAAAHLSPAGQLQVATALEVLAAVEARMEVLRVQLRFAARHLTGARVLAAQLYGVGPVTALALTCWLAGAGRFSSSRKAVRFTGLDVTVWSSDRKGPPGRLSRQGPPMLRWAVYEAGKTHARASAPDHAYYAAVKDRKNSKRAALSEARKIVRQACHILTELGDDALTTA

SEQ ID NO: 502529 - protein, 442 aa, unidentified
MEKQHYLGIDVSKGYADFTILNKEKTIVEDNFQLDDTFEGHQKLFNFLKTHFATYPKLTLYCGVESTGGYENNWYNGLHKYQSTLNLFVARLNPLGVHHSSKAALNRITTDKISAKNVAEYLISYPEKVDYETEPFLATAKRVWTFISLLKKQKTQLYNELESILYIANPEIIPYCTDGLRVWVLKLLEKYPTAKHIARAKVESISKIPYVSKARAKDLVENAKNSVASGADETTKEIIISLVKQISSLKMNIDKHLKILESNIDLPNEIEILKSFDGIGTYSAVGLMLEIGSIERFSSSKKLASFFGIHPAYRESGDGKTAVRMSKKGRKQPRHILFNVTRYGIAHNEFIKDIYAKHLKKGMAKRAAMGAIMHKILRIIYGMLKNRKSFDPQIDRNNRMKIRVVKQSSETDIKRRLQEHDLMAPISKRQAKKRKEKELHPK

SEQ ID NO: 502530 - protein, 303 aa, unidentified
MLYTGLDLHRSFSYITTMNEKGEIVGQKKLPSNGEVVEFLKEFDDTMEVAIEATPSWYWLYDSLENKGFDVKLSHPLKTKAIAYAKVKTDKVDSITLAHLLRSNLLPLSYVPEKPVRLNRELLRYRASLVRVQARIKNNSHTILAKNNVSHSYSDLFGKEGIAFLYSLSLPENYKIALEGYLSVLETVKHEIRLASKRVQALAEENQDAVLLMTIPGVGYYSALMIESEIGDVKRFPSAKQLCSYAGLVPSTYASGNTCYHGHITKQGSRWLRWILIEAAIHAVERPGPLRRFYFKIERKKGS

SEQ ID NO: 502531 - protein, 339 aa, unidentified
MKISVLGIDLGKSSFHVFGVDEQGKAVMRQRMTRRKLREFMVNLTPCLVGMEACGGAHYWARVFERYGHEVRLMSPQFVKPYVKSNKNDFLDAEAICEAVTRPTMRFVPIKSVEQQEIQSLHRARELAISHRNAQANQLRGLLLEYGLVVPQGIGTLRQRLPEILEDAENGLTDGTRRLLAALGDELVRLDERVGEFDRQITALSRGHEVCQRLMSIPGIGPLIATALVAAVGDASVFKSGREMAAWLGIVPRQQSTGGRAVLLGISKRGDTYLRTLLIHGARAVLRVAHKRDDKRSRWAVALQERRGPNVAAVALANKNVRTAWALLTRGTTFEVQAA

SEQ ID NO: 502532 - protein, 345 aa, unidentified
MEIRTIGIDLGKTVFHFVGVNARGQVVVRKKGSRTQLLRFTSNLRECLIGMEACGGAHFLGRALREQGHDVRLMPAQYVKPYVKTNKNDYIDAEACSEAVTRPTMRFVPIKTDDQLDLQSLHRVRERWVVRRTAVINQIRGMLLERGITICKGRHHIEESLPGILEDADNKLSGALRVLLTQLRLEMQYLHGQIEETDKLIARICGELEQCRRLVAIPGIGPITATATVAAIGNGAAFKKGRGFSAWLGVVPGEHSTGGKQKLTGTSRRGNKYLRKLFVQGAHTVLLQKTKQSSGLSTWLADLTARKRKQVATVALANKMARMAWAVLFKGEAYRPPSVPQVIAA

SEQ ID NO: 502533 - protein, 412 aa, unidentified
MGTITNLFWRLQMISVGIDVSKEKSTVCILKPYGEIVSKPFEVYHVEQELSELATMLLRLNDEVRIIMEATGIYHLPVLSYFKEKGFFVAVINPFEMKEYRCQGLRRVKTDKQDAITISHYGIDHWYRLKEYKAQENIYTELKLLGRQYCHYMRMRVESVLELTHLLDYTMPGIKTLLQGWNEKNGKDKLGDFAEEYWHYDNITKKSEKQFIDSYLKWAKKKGYHQNQDKAIKIYALAKEGIPTVSSNTPSTKMLVQEAVRVLREVDHTLMTILTQMRSLAKSLPEYPIVRAMGGVGDVLAPKLIAEIGDVRRFHSGKALIAYAGIDAPPYQSGRLVGTERKISKRGSSNLRKIGYEVMRSLKTHKAPEDAAVYEFILKKEREGKSKRAAKIAGLNKFLRIYYARVMEVYRK

SEQ ID NO: 502534 - protein, 346 aa, unidentified
MNYYAGLDVSLKEISICVIDGTGTTVARGVSPADPEGVAGWFRARSLSPELIVHESGQLSIWLQRGLERLGLPVFCIDARRAHKSLSARPNKSDAADAEGLAQLARTGWFTPVHVRTEDADRLRAPWSARAQLIDLRKDLEGHIRGILKTFGIRLTGIGKGRQRQGFRDQLAAAGERDPILRTIADGFISVHTTLCQAAAELDRAVKEKAETHPVTRRLMTIPGVGAIVALNFVALIDDPSRFRKAENVGAFLGLTPRRHQSGEIDWSGRVSKCGDGVMRSLLFEAATTLITRVQKFSALKSWAVRLAGRRGFAKAAVATARKLAVLMLTLWKNETEFTWKKEAVA

SEQ ID NO: 502535 - protein, 346 aa, unidentified
MDQQHYVGLDVSLETTSVCVIDQSGAVIWRGKCSTEAEPISQLVRRYAPAAVRVGLETGQMSNWLTLQLRKHGLPVVCVDARHAKAALSLQLNKTDANDAHGLAQVVRTGWFREVAIKSMDAQALRMLLMARAQLVSQRQAVANNIRGLLKTFGFVIARGSNGPFSIRVREVMADNPTLGVIVEPLLLAWQAIREQVATLDRQVNLRAKSDSAARHLMTVPGVGVIVALAYIAVIDNPGRFKHATSVGAYLGLTPRRYQSGEVDKAGSISKCGDGLLRSYLFEAANVLLSRHPRSCKLKTWGLALAKRIGMRRAKVAVARKLAVIMHRVWQGDCDFDWGDASAVAE

SEQ ID NO: 502536 - protein, 388 aa, unidentified
MSQHSRFDASRSLTALEQDSTIIAVIEMSQTKWLVAALVPGVERQPLKKFDAQEEMLLKLLHRWRHEAGQAGRNIKRIVVAFEAGRDGFWLARWLRARDVEAYVIHPTSIAVSREHRRAKTDRLDTELLMRVFLGWLRGEKRHCSMVAIPTIAEEDARRPNRERQNLVTEQTRIINQIKAIFSRFGIRSLRPTKRKLAEGLEDLRTAEGTPLPQNTLSELRRHLARLRFVRDQIRAVEQERQRKLAVAPKGADAMVYLIARVLGAGVETADMLVNEIFSRHWRDRKAVARYAGLTGSPDESGSRRRERGLARAGNVRVRSGMIQLAWRFVRFQKHSALAQWFAARTADGRAGTRKTMIVALARKLLIALWRLATRGEVPQGVVLRPAS

SEQ ID NO: 502537 - protein, 342 aa, unidentified
MDYYAGIDVSLELSSVCVVDSSGKIVRETKVASEPEALLQHFADLGPVVRVGLEAGPLSQWLREGLVGAGVEVVLLETRHVKAALSAMPVKTDRKDARGIAQLLRMGWYRPVHAKSADAQEVRALLVGRKLLQAKLLDVELSIRGILRGYGLKVGEVSRGRFEARIRDLIEGHDMLATVIGAMLQARAVLWNEFTRLHRAMLKIARADPVCQRLMSAPGVGALVALTYRSAVDDPGRFAKSRTVGAYFGLTPKKYQSGETDIDGGITKVGDGMVRTALYEAAHIMLTRATRFSALKRWAMDVAKRRGMKRAKVALARKLATVLHRMWTDVSQFRWGKDIVTA

SEQ ID NO: 502538 - protein, 404 aa, unidentified
MRAIGIDVHGDFCEVAICEGGCLRSAGRVASRPEELEVFAASLAADDEVALEATGNALAIARIIEPHVARLVVASAKELHAIPDAKAKTDRRDARTLAKLLAGGLLEGTYLPDGELRALRRRLAHRVQLVRARSRLKNEVQAALFRNLVGAPAATDLFGVAGLRWLEALDLPADERETLASCLRTICFLDGEIARFERSIARYALSSPEIRRLVTIPGVGLLSAATFVAVVGDVHRFSSARKLVGYLGLDPRVRQSGSKRTRMGHISKEGPAAARAALCEAAHTAMRTPEPLRAFGGRVAARRGRQVAIVAVARKLATVAWRLLSSGQDYAYVNPAQVRLKWRRIELTAGEPSQKGRRTGVSVASEQERGLALAAEHAYRRLVADWQATGKKSKGAGAAVGRAS

SEQ ID NO: 502539 - protein, 355 aa, unidentified
MNNTKYIGMDVHRESISIAVMNSAGKIVLECVVETKASVILQFIAGLRGDLHVTFEEGTWAAWLYDLLKPHVTRLVVCDPRKNASMKEGNKSDKIDARRLAELLRLNHLNPVYHGEHGLRSLKELVRSYLTITKDLGRVMSRVKAIYRSWAIPCTGKQVYAPQHRAEWLAKITEPGVRRRAEFYYQQLDALRSLRREVRRELLEESKKHKAWKQLCQIPSIGPIRAAVLLGILQTPHRFRTKRQLWTLGGLGIETYSSADHRYVEGQLQRSKKPVLIRGLNENCNHDLKNLFKGAAIIASTKPGPFQEFYAALLAKGMRAEMARLTLARKIATIVLVTWKRGVCFDAQFLKPQTA

SEQ ID NO: 502540 - protein, 346 aa, unidentified
MLTDHVDVVIGVDTHKHTHAAAALNASGAVLAQLTVPADPKGYRRLVAFAEAHGRTRLWAIEGTGSFGAGLTTTLLARQEHVIEVDRPKRAPRRAGAKSDAIDAVRAAREVLSGDRAGEPRCRGLREAIRVLLITRAQAIDFRTRAIAALHALVVSAPDDLRQRLRTLTLSRLLETCAALRGSTRHSTEEFATAMAMRATARRALACQREASELETQLDALVRQVAPGLLDQLGIGPVVAAQVIVSWSHRGRVRSEAAFAQLAGVAPVEASSGQVIRHRLNHSGDRQLNRALHTVVMVRMRQDPTTKAYVARRLAEGKTHPGDQALLEALRRPPAVPRARSDAVAA

SEQ ID NO: 502541 - protein, 469 aa, unidentified
MKVRHRRCCGIDIHKKSVTVCVLPPAGQPHLEVKRRKFRTFTRDLKQLRGWLKNCQVTDVAMESTGQYWRSLWNVLEGEFAQLILVNPQHIKGLNGYKTDPKDAQWIAGLLEGGKLRNSWVPPRPIRELRDLTRQRVNVLEDLNRAKNRIEQLCQTGNIKVSSVATDLFGVSGRRMLKAIVEGKHDAGWMADYARGTLRGKRKDLERALEGTFTDDQRWLLDKELQQVEWLEGQVVALEQEIERRVVPFEEQIRRLVTIPGIERKTAWAILSEIGVDMSPFPDARHLASWAGLCPGDRESGGKRMSGRTRKANRYVKRAMCQAAWAASHTRDTCLSAFYRRMRMRKGAPKAVMALAHHLITVVYQMLSRAEDYIELGGDYYDRRNKPKVVARLLHRLSRLGYYAQLTPVEPLPIPDEPPAPKPTQARQTTAITARKRGRPCKCAERGIICKHITSLTLNSLIQQPSSGA

SEQ ID NO: 502542 - protein, 460 aa, unidentified
MLITRGFGQHMIPRINLLLQAPRILDRKGGDIMLKINPLSTLYVGIDVSSKSNYVCALDFYKNKYINSSFANNQPGAEELAQKILECLKEHPDLNTVVAALESTSVYSIHIANYLSSCEELLHLKPYVFVVNPKCTANYKKSYIGVGKSDPIDAFVIADYARAGNIETEPWRGSQFLALKRLTRHRLHLVECMTREKAYLVSNLYLKFSELQMLEKDDQPFCDIYGTTSSSILTEYLSPEDIVSSSEEELVSFLAEKSRNRIKDISKTANLLKKAARDSYRLDKALYEPLNVSIASSFNCIETFKKEIKVIDAAIEREIKGLNPNAFIILQSIDGIGPVFAGGIVAEIGDISAFHSSDALAKYAGLMWKSNQSGDFDGEDTPMSKAGNRYLRYYLGEAANSMRKHNVEYGAYYRKKYNEVPKHQHKRALALTSRKFVRLVYGLLARNQLYSGVSLDTSNE

SEQ ID NO: 502543 - protein, 373 aa, unidentified
MTASMDEEAPAMESMRWVGVDVHAKESVAAVLDQATGEISTHRIAGRPEDVLLWLTTVAQPFRAVYEAGPTGYGLVRRAEERGLDVVVCAPGHILKNATDHIKVDKRDAVRLARLLSAGELRLVRVPQPDEEQLRDLVRSREDVRVDLTRIRNRIGKFLLRRELYPPKHADSWGVLHRKWLQQLRFEDRASELVFQDALHAHEILVARREQLEQALAEIAANSPWSRTVARLRCLRGIDTLSALGLVAEVGDFRRFVHPRFLSSYLGLVPSEHSSGEKRRQGGITKAGSKHARRLLVEAAWQYRHVPRTSHHISQRQQGQDPRVIDIAWRAQRRLYKRWQRLHEERRKRSTVVAVAVGRELATYCWEIATLTG

SEQ ID NO: 502544 - protein, 331 aa, unidentified
MSKAHVPKKVVTVGIDVAKAHLDAAVSGSRQVRRFGNDPPGHAGAIEWIRSAKLQPLLVCMEATGGYEKPLAAALQAKGFPVAVVNPKRARDFAKGMGLLAKTDRVDARMLAEFAAAIARSDGLQRHVKAAPDARREWLTALVTRRRQLLTMQQAERQRIEQTPKALHPGLQTIIEVLQEQIHGIETQMEQTIREHYAALDRLLQSASGVGRQTSSMLVGGLPELGRLTRRQIAALVGLAPFARDSGKHRGRRKIQGGRFDVRRVLYMATLTATRYNPVIKPFYQRLLAAGKLPKVALVACMRKLLTILNAMVRDGREWNPKRAPVAQANA

SEQ ID NO: 502545 - protein, 438 aa, unidentified
MSNKVIFNLDELFISVGIDVGADFSWMSIALPNQQFVGKPYKILHNSIDSLTTAVSKIKEAEELYSLESRIFLESTGIYHYPLFCYLRDKGFNCSVINPIITKNSTNINIRKVHNDRFDSKKAALVGLKPDLKVSLMPSDLALNCRNLCREYYDLMDNRSAYVNKLQGELRMAFPQYLGIFSKVTVNTSLTLLETYTSPSAFLEADKQEIIDIIKSTARFGLTYAQNKYNAIIQAATDANQFGYIIDSNIKRIRLYISFIRKYDEEINSILESLHELVDANEDADFVKQIHLIETFKGAGFLSAVSIMGEIGDFSAFSKPKQLFAYFGLDPAVKQSGKFEGTKVQMSKRGSAIARRVIHTLTLQSISISRNGEAKNPVLREYYLKKCDSKPKLVAMGAVSHKVCNMIFAILRDNKPFKIIAPQEHIKQYNAAKCDIAA

SEQ ID NO: 502546 - protein, 343 aa, unidentified
MLRTNVIGIDLAKNVLQVCHISRQGELLSNKAVSRQKLKELLAKSKPSLVALEGCASCHYWGRYAESFGHEVRIINPKKVKAYVDGHKTDANDALAIANAALQIGIKYSKPKSMEQQTLMSLEANRQFLSKTIVSLGLHIRGIINEYGIVKAKGTKGLAALVTSTLYESDVLPVSLVTTLSMLWQQYLNLKEELSKLQKSMNSTTRQIEPCKRLMALEGVGETTASMLYATLGNGTQFTNGRQASAFVGLTPKQYSSGGKVTMLGIDKFGGVKDLRSMLYLGAMAYIYRLPESPKNQKQAWLIKLVDRVGFKRACIALANKTVRTAWAMLHYETEYQPKPLSI

SEQ ID NO: 502547 - protein, 343 aa, unidentified
MNVTTVGIDLAKNVFSVHGVDINGKVVIRKTVSRGKLLECFANLPPAIIGMEACSGAHHWARQLRSLGHDARIIAPRFVIPYRKNGKNDGNDAEAICEAVSRPAMRFVPIKSVEQQAVLSLHRIRSAVVAERTAQINQLRGLLAEFGLIMPKGRYPAQHHIPDILEDADNGLPGLARRLLNDIHQRILQLNQQILAYDREIENLAHHSEPARRLMTLPGVGAVTATALVASIADPKQFHNGRQLAAWLGLVPRQYSTGGKTRLGRITKQGDKYLRMLLIHGTRAVLAALRDKQDRTSCWLRELIARRGYKRAAVALAAKNARIVWAMLVRGEAYRISPAGQTA

SEQ ID NO: 502548 - protein, 420 aa, unidentified
MTTSDSTPAAAVLVAIDIAKVRNEVLIEAPGHKRRRRLLVLNTRAEHDHLIEVLQAYGRPVVCAFEATGNYHRPIAWRLAEAGFEVRLVSSLALARTREALHNSWDKNDPKDAQVMLHMLRIQATQVYQDPLRAGINDMQELSKTHEAIARAKTEIQHRILTHYLPLYFPESDRFRGNSRSDWFFAFLHAFPTPASITALTKEEFVTGAWDVVGRKVSKTQILMDIYETVRSSIGLPLPLDAPAIRMFRMVIDEARSLIRQRNEIEAQADELLRHSQDYQLLRQIPGIGPINALTIVAEADDLRRFGHHHQFLKFCGLDLSTQQSGQYRGQTRLSKFGNARLRRTLWIAGQVAIRQRENGFRHKFERYIARDRDNPDLRRKAMTAITAKMARVVHAVAKGGSEYRPFVEGRVPGGRTSVS

SEQ ID NO: 502549 - protein, 392 aa, unidentified
MLFVGIDIGKNNHVASMMDEYGKVVFKAFSFSNTTDGGNALLSKLSSYSSNPSDFEIGMEATGHYWLSIYSFLFEKGFLLHVINPIQTDGWRKGTEIRKRKNDTIDSVLIADLIRYGQFVQTRLADEDLFSLRTLTRFRTYLVESISDLKRKVVCVLDQIFPEYQSIFSDIFGKTSKEILLQFSSPIDFETISSESLAELLAQLSRQKIGAAKAEQLKAAASSSFGITFAKNSFTFQLKALIEQISFIENQVKETESEISNIMRKLDSPITTITGIGNVTGAAIISEIGDISKFDNPRKLVAFAGLDATVTQSGEFEASHNVMSKRGSPYLRKAIFQAALIASFHDPVLSVYYQKKKAEGKHHLTCVGAVARKMCNIIYAVLKNNQPYVPKA

SEQ ID NO: 502550 - protein, 368 aa, unidentified
MTQELNNCTTPVVIAIDPHKVSWTAAAVDASLRPLATLRVPVSDDGYRRLRRFAGRWSDTGWAIEGATGLGAPLTRRLNADGMDVVDVPAKLAARVRLLSTGHGRKSDDADAISVGVAAWTAQGLETTRMDAAVIALRAIVEHRDDLVKTRTQTVNRLHVVLTHLIAAGAPRGLTADQAANMLRRVRPRDVADRTLRGLAVDLVAEVRQLDRRISKAASDIESAVTESGSSLTELCGIGNLTAGKIVARVGSIHRFRSAAAFASYTGTAPIEASSGDVVRHRLSRAGDRQLNCCLHIMAITQISRDTPGRAYYQRKRKAGKSHREALRCLKRKLSDVVYRQLLRDAATALAADPGGQSGAALMSCAAG

SEQ ID NO: 502551 - protein, 403 aa, unidentified
MTKRFAGLDWASQVHAVCVIDARGSVVVDFEVNHDAAGFTELCRRLKAAHVTAIAIERPSGLVVDALLEAGFQVVPIHPNVVKATRPRYRSHGGKSDASDAYLLADLLRTDGHRFKPLTPECDEIRALRALVRGRDDLLATRVQLANQLRSLLESFWPGAAEVFADIDSPIGLAFIQRYPTPEAASRLGPKRMACFCAQHAYSGRRTPEELLERLHQAPAVALGEMEMEGKGELALSMALVLARVVEQIRLLTSRIEHAVQASDDGRILMSFPRAGKICAAQILSELGSVRERFDDVERLAAEAGVTPVTYESGKTKAVAFRWACNHRLRAALTCLADNSRHASAWAAAVYEKARGRGCDHPHAIRILARAWLRVIWRAWRDRQPYDVQRHTGAMLQLAAAGG

SEQ ID NO: 502552 - protein, 326 aa, unidentified
MQYILGIDVSKDKLDLVLITEPGKFHKVISNNSEGYKALDKWLVSRQVEQVHACLEATGQYGEEVAEHLYKQGHAVSVVNPARIKHYGESKLHRNKTDKADADLIAEFCLKEKPTLWQPLSPEIKHLRALVRRLEDLKTNCQQEKNRLSSGEKDEWVVKDLSTHVAYLETCIAATEKEIQNFIKQTPNLKKQQELLNSIPGIADKTSARLLAEIGDISTFESASQLAAYAGLNPKGFSSGSSVHKKTRISKQGRRELRSCLYMPGIVASNHNPVVRSLKVRLHDRRLANKAIIVAAMRKLLHIVYGVLKTQMPFDAEYHKQFNFSA

SEQ ID NO: 502553 - protein, 316 aa, unidentified
MTPSGTFVGIDVSKAQFDMAVRPAGEHWTSAHTEAGITMLVARLVSLRPTLVVLEATGGLEIALTGACATAGLPIVVVNPRHVRDFAKATGHLAKTDTLDAQVLAQFAEAVRPTPRPLPDAQTQELAARLTRRRQLVEMLVAEKTRRGQAPGHIQKQIQVHLTWLERRLRALDEDLATAIRSSPLWREKDELLQSIPGVGPVLATTMLASLPELGILSRQQIAALVGVAPLNRDSGTFRGKRTIWGGRAHVRATLYMAAIVASRCNPMIRAFYHRLCAAGKAKKVALTACMRKLLTILNAILRTRRPWQDRWAPEA

SEQ ID NO: 502554 - protein, 342 aa, unidentified
MSEIITVGLDLAKNVFQVHGADSGGRAVLRKKLRRAQVLEFFGQLPACVVAMEACGGAHFWGREIGKLGHEVRLIPPAYVKPFVKRQKNDAADAEAICEAALRPTMRFVPVKSEETQGAAMVFRVRELLIRQRTQAINALRGHLSEFGRIVPQGAANAARLIAIVDDPDSGLPADAIPTLNVLVAALAHLETEIAKLDAEITRRAKENELARRLMTVPGIGPLIATAIATLAPPAENFHKARDFAAWLGLTARQHSTGGKQRLGATTKMGERSLRRLLIIGANSVIIKRHTHAAARPGTWLGGMLSRKPPMLVRVALANKMARIVWALMARGGVYQSPAAAA

SEQ ID NO: 502555 - protein, 340 aa, unidentified
MKGTIIGIDLAKNVFEVYVEDSANQSGKRTRLSRKKMLPWFANRAAALIGMEACGGAHYWARELTKLGHEVRLIAPQYVKPWVQTNKSDQADARAICRAVQEPGMRFVGLASETQQAMQAIHRVRSRYMSNRTDLINQTRGILLEYGVAIPKGVASVRKRLVLLLAEDRWSAQVRQFLTDQQAELRYWDDKLDAVMAQITRENAQQPICQRLEQARGIGPLGASALWGKTAGQFYQHGRHFAAALGLVPKHTGTGGKVRLGGISKRGDRYLRKLLIHGARAVVSHIGEKQDRLSCWIRRLVARRGMNKAVVALANKNARMAFALIHKDEPYDVTKMCGAE

SEQ ID NO: 502556 - protein, 351 aa, unidentified
METRVTALPKLFIGIDIHKRSWKIHCSTDLFGGKSFTMPPEPEKLYEYVQKHFCDYQVTTAYEAGCCGYSAHRSFESYGWNSLVVNPADIHRKGKERYTKTDRIDAQLISRELKDGRLDGITVPDIEREELRSLFRRRNELVKDLRRIKCMIKMQLLYFGIKVPEEFDNDHWSHAFRNWIDSQQFNYPTAGETMASKMRNFRFIDKELRDVSNQLRAYCRKHFKKDYNLLRSVPGIGGIVAVGILSELGDLRRFNNLKHLAGYIGLAPGIYESGANSRSLGMNPRCHRLIRSYFVEAAWQAIRTDPVIQGYYRKHLGKDVKKIIVKVAHKLLSRTLAVIKTETPYEIGVVA

SEQ ID NO: 502557 - protein, 345 aa, unidentified
MSMVSGVVGGVDTHADVHVAAAIDANGGVLGIESFPADLRGYEALVGWLVGLGPVIRVGVEGTGSYGVGLSRFLHDQDIEVVEVDRPNRQTRRRLGKSDPIDAEAAARAALSGSAAVTPKRRDGPVEQMRVLLVARRSARRQRIATLNQLRQLVICAPDEIRVRFKDRYKTGLVTEAARMRPRKGNDPIIYTTNVVIRDLARRIQGLNTEMRSIDGALRGLIEQAAPSLLGLYGVGVDTAASLLVAAGDNPDRLHTERSWAHLCGVTPIPAGSGKTSGKVRLNRGGDRQANAALYRIVLTRMSGDDQTRNYVRRRRAQGMNTGEIMRCLKRYVARQTFKHLPRAA

SEQ ID NO: 502558 - protein, 413 aa, unidentified
MELVFWICCGLDVHKQTVTACLRIADKGGEVRKEIRTFGTMTEDLLVLHDWLRANGVTHVAMESTGVFWKPIFNLLEDSFTVLLVNARHIKAVPGRKTDVNDCEWIADLLAHGLLKGSFIPPREIRDLRDLTRYRKSLIDERVREVNRLHKLLQSANIKLSSVATDVMGVSGRKMLEALLEGNNTDPEILSELAKGRLRKKLPELKKALVGRFRDHHRFLLEQILTHLDFLDESIEKISEEVAQRTSPFESKIQLLSTIPGVNRRSAETLVAEIGLDMGRFPSHGHLASWAGMCPGNNESAGKRKSGKTRKGDQWLRRSLIEMSWAASRTKATYLNALYHRLAKRRGAKKANVAVGHSILVSAYFILKFDVPYRDLGEDHFDRLNSAQIQRYHIRRLEKLGFKVTIEPLETAA

SEQ ID NO: 502559 - protein, 322 aa, unidentified
MKQKPFLGIDVSKAKAECGLLWADSKYRSKVVSNHTDGFAQLRQWLQKYDAGQAHVCMEATGVYWEELALALSAQGMPVSVVNPAQIKAFGESCLVRTKTDKVDARLIAEFCRAMQPPLWQPPSPSEQALRALVGRLDALQRMRIQESNRLGVARDAVRSNIAAHLHWLDAQIKALTQQIDRHIDQDPDLRRKRDLLDTIPGVGGRTSALFLAFCSRTDAFANARQCAAFAGLNPQQHQSGSSVRHKARLSKIGHALLRKAMYMPAVVTLYKTAWGKAFRSRLKAAGKPPKLIIGAMMRKLIHVAYGVIKSNKPFDPTLHAT

SEQ ID NO: 502560 - protein, 410 aa, unidentified
MEVLHDRCCGLDVHKETVVACLRLVIDGKVVKEVRTFATTTASLIALSEWLTENKCTHVAMEATGVYWKPVWHILSDGDIELVLANAAHVKNVPGRKTDVKDADWVSDLLAHGLIRASFVPDTHTQEMRTLMRTRRQLVREKSSHILRIQKTLEDANIKLDSVVTDVMGLSGRKMIQALIAGEKDPAKLARLADPRVKASQETLRQALRGRVTKSHRFLLRLHLGQIDALDAAVAELDREVEASIEPFRTAVEQVSTIPGVKDLSARTILSEIGIDMGQFPSDANLISWACICPRSDESAGKRRSNRIRKGSPWLKSTLVQCAWSAVRTKGTYLQAQFHRIRARRGVKKAIVAVAASILTAIYHMLKDGTMYQDLGPNHFDRRSKEQQKNRLLKRLADLGYAVQLASSPN

SEQ ID NO: 502561 - protein, 405 aa, unidentified
MFDTEDVGVFLGLDVGKSAHHGHGLTPAGKKVFDKQLPNSEPKLRAVFDKLAAKFGTVLVIVDQPASIGALPLTVARDAGCQVAYLPGLAMRRIADLYPGEAKTDAKDAAVIADAARTMPHTLRSLELTDEITAELTVLVGFDQDLAAEATRTSNRIRGLLTQFHPSLERVLGPRLDHQAVTWLLERHGSPAALRKAGRRRLVELIRPKAPRMAQRLIDDVFEALDEQTVVVPGTGTLDIVIPTLAASLATVHTQRRALEAQINTLLEAHPLSPVLTSMPGVGVRTAAVLLVTVGDGTGFPSAAHLASYAGLAPTTKSSGTSIHGEHAPRGGNRQLKRAMFLSAFACMNADPASRTYYDRQRARGKTHTQALLRLARQRISVLFAMLRDGTFYEPRVPKDVELAA

SEQ ID NO: 502562 - protein, 346 aa, unidentified
MHRNAAGIDVGATEHWVAVPEDRDEEPVRRFGAFTADLYVLAEWLRQCQIETVVMESTGVYWIALFEVLEERGFDVKLVDAHDARQVPGRKTDVKDCQWLQELHTYGLLRGAFRPEDQICVLRSYLRQRSMLVAMASRAVQHMQKALEQMHLQLPEVVSDINGKTGMEIIHAILAGERDPQRLASHRDRRCKHDQATIAKALEGHWRAEHRFALQQALEQYEFLQQQLQACETQIEGCLQTFVTHVEVAPPQPTPARQRRARPRQAPSFDVHGYLHAMTGVDLTQMDGIDALTALKVISEIGLDMTRWPTGKHGASWLGWCPGNKLSGGKRYRMRSKPTANRAASA

SEQ ID NO: 502563 - protein, 341 aa, unidentified
MHYAGLDVASKGSFIYVRDRKGRKIEAREIETTRKGLREAFKKYETVGVMVAVEAGGSTRWVYDELTRRGIEVYVVNPNKVRAIAESKKKTDKIDAKILSELLRINALPERVYVAKDEERELRDLMQARYQVVKGYTNLMNYIRGLLRQEGIRLKAKELKMMEIFVKLSGDRNPGHVKEILERYKGTIEAMMEQKDKLEEKIKSYKSKEIELIKTIPGMGEISSRTIISAIGEIKRFKKAKALASYCGLVPSVRASGERVEYGHITREGRREVRRVGVQSAHAVLRSKTIESQPLRDWWENIADRRGKKTAVVALARKLITIIFYVLRDKKSYDYRLLKVA

SEQ ID NO: 502564 - protein, 351 aa, unidentified
MTQQTQPESITTIGIDLGKNTFHLIGMDARGRIMLRRKVSRGQLLQCVANLPICLIGLEACAGAHHVGRQLAALGHDVRLLPAQYVKPFLKGHKNDYRDAEAIAEAAQRPTMRPVPLKSAEQLDLQALHRVRSRLVGQRTAVINQIRGFLLECGIPVRQGPAGLREALPTLLSHRTDVLSPRMVHLIEDLAGDWRRLDERIETLTRDITAVARQDAGCQRLMGIPGVGVITASAMVAAIGTGAAFSKGRDFAAWLGLVPKQISTGGRTILGGLSKRGNRYLRTLFVGGAQVLLQRPRHWDGHGFGRWLAAAGTRLHRNVLAAALANKLARIAWSVLSRENGYNPEYVARMS

SEQ ID NO: 502565 - protein, 429 aa, unidentified
MQNESTPGARGPVFCGVDTHADSHWLCVLDWRGRRVLSRRFPADAAGYEALAGAIAAAGEPACVAMEGTSSYGAGLTRHLASLGMPVREALSPARTQRRRPGQGKCDEADAERAARAAMSGSRLGTPKSQDGWVDGVRCMLAARSGAVKARTSAINTARSLLTTAPEGLRSRFRGMGGPRLMEELPSVRSEGALGAALGALADLWAAARDAALDMELAIEASPEENCPALLAMYGCGPVSAAKLAVAAGDNPGRLRSEASFAAICGACPIPASSGKTVRHRLNRGGDRQANSALHEIARQRVMRDPETAEYAERARARGKSDREVMRCLKRYVAREAYRALMHPHEIRRPEDASELVAARRAAKVSQVRAASILGTSEKYISMLERGQRELKPIRRAYGAWVEAGLPLDWDRQAFEAERKMDSKKHLAK

SEQ ID NO: 502566 - protein, 358 aa, unidentified
MTNLAEKLDFSGHTISCGIDVHLKSWTVSLYLGKQYLKSFVQSPPSVEGLWNFLSTNYPQAHYECAYESGFCGFWIQRAFTARSVSCIAVNAADVPRTDKGTKNKNDRNDSRRIAEALQAGQLEGVYVPDPELEADRQLVRLNERYSNDLTRSKNRIKGLLRLMGIEIPQRFAKANWSRAFVAWLKEASCGEPSIRIVLDRQLSIMEAIRTQKLDTLREMRKLMGKARYRTISGLLCSIPGIGPVTAAVLIVEIGEISRFEKFDRLNSFVGLCPMQHSTGGNDRKGSITTRQHRRLRYLLVEAAWVAVRTDPALTICYSRWTARVGSRRAIIKIARKLLSRVRHVWNDRAPYVTGIVK

SEQ ID NO: 502567 - protein, 476 aa, unidentified
MHSKGKRAKNQVIINNSAGILSQAEIEKRIAAADTSLKAYTWRDLETGGKFTKNDKLTFISDDMLIIGCDIGSDTHYARAIDTRGRELSNGAFQFSNNAEGFRRAKAWAMQLAAKNNKQQIVLGLEPTGHYWFCLAAWMIYNRISVVQVNPYAVKQTKEVEDNSQLKDDRKDPKLIANLVKDGNYGMPYLPEGVYAELRRLSMLRDQLTEDRIRNVNRLHRELKFCFPEYMDAFGKPDGVFALEILKEAPFPEDILKLGAEGLKEIWHKAKLRGSSYNKADKIVKLAAESVGLKSTEGSREAVKWFADQIILLTAKLAEIENSLQRKCREIPYAENILEIKGIGETILSGIMAEMGDISRFDDAKEIQKLSGLGLVACSSGKHKGETRISHRGRKRLRYWLFQAAKSVVSHSEEFKMLHIYYTTRQSNPLKKMQSLIVIACKILRIIFTILKTGRKYDPVRMQKDIKHPDLPAMAA

SEQ ID NO: 502568 - protein, 419 aa, unidentified
MKLFVGLDVSSEKLDTCFLTDDDDLSILLEKTFPNDLNGATAIKDQIIKFTESMIFQKIVIGMESTSLYSFHPATFFQTDKELNQYELVVTVENPFKIKQFSRIFDEDKTDRIDAFRIADYLRLQRYSSSPLKEEKYMALQRLTRTRYQMVCQLTEAKQHFLENLTYKCNTLSRELKNGDSPTSVFGAAMIALMTEEYSLDDFSTMSLDALAELLQHYGKGRFKSPEKIAEAIKKAVRDSYRLGKLAQESIDIILACLVKSIQAFQKQIKILDQAIEDLVVILPEYQCLRSIPGIGPVYAAGLLAEIGQIERFEDQAKLAKYAGLTWKVSQSGNFQSERTPLTKTGNRYFRYYLIEATNSVRRHLPEFKAYYQKKYKEVPKQQHKRALVLTARKFVRLVDILLRNHQLYTPPRSVIEHE

SEQ ID NO: 502569 - protein, 347 aa, unidentified
MVTLGTDSHKQSHTLVAVDENGRQLGELRVAATSAGHREALGWARQWRERRWAMENCRQLSRGLERDLLVAGEQVLQVSPKLMGTSRRSGRQLGKSDPIDAMAVARVALREPNLPVARLEGKSRELKLLVDHREDLVGERTRIQNRLLWHLHELEPGLQIAGGGLTRRVVLKELGRRLQAHQGVVSEIAGDLVERLAELTMSVNRLQRRIEVLAGELAPSLVSLPGCAGLTAAKLMAETADVRRFHSSAAFAMHNGTAPIPVWSGNQQRHRLNRGGNRQLNVALHRIAITQIRLGGEAGAYVARRMSLGNSKTEAIRSLRRQLSDEVYRRLRLDRLERLAVPTTAAA

SEQ ID NO: 502570 - protein, 323 aa, unidentified
MGAVVNQIPSSFASPLFVGIDVSGPFLDIAYHGSAETFRLPNAPEGFAELINRLLPLKPKLIVLEATGKLERAVLQALCQAGLPAVAVNSTWVREFARSAGQLAKTDRIDARVIARYGAVMKPKVRPLTDEQTQQLQALILRRAQLIEMLTAEQNRRKRAHKSALPSIDEFIQFITQRIKDADRDIDSFLHTNELWRKNEALLRSTPGVGKTTAATLIAFLPELGSLNNRQIASLVGLAPFNSDSGTHRGERHTKGGRHFVRRALYMACVAAQRANPYLKAFCDQLRARGKKTKVAFVAGMRKLLTQLNAMMRDGTAWNPPKP

SEQ ID NO: 502571 - protein, 430 aa, unidentified
MVRRDLAILAIDLGEDKQVAAVMDHDGRVLGRRSVTVKAHALGGLLSWARDVVVREGFRGVVVGCEPTGHRWRSVMQLSAEAGMGFVCVQPLRVHLAREADDYTRDKTDHKDAVLIGKLISRLDCYLPERADADWARLRHLGQRRFRLVRERVAARQQIVDLLGCSWPAALACAAQPFRSTSWLVCLSAVMQRCDGDLAGLRRMGRDGFVAAAREQLALFGAKRLSRRVADRFFDALSDPAGVATQRRGALERVGLLLEDWRQTENRLSDVEQRMVGVLDAMELTDLVTSIPGVSAVGAATILAETGDLSRFASARSVVKHAGLSPVENTSATFRGVTRVSRRGRPTLRTAAWRAAWAAMPHNSVIGAKYTHLTTRDRDRLAPGQARVACAAAMLRWLHAIVTRGQPFNPDIAAGRIRAQQSPLTAAEAA

SEQ ID NO: 502572 - protein, 416 aa, unidentified
MNAVGIDVSSRKSTVAVLRPLGEVVCLPFDVTHDIAGLASLAEKLKAIDGETRVVMEHTGRYYEAVAKALHEAGFFVCAVNPLLIKEYGANSLRRVKTDKADAIKIARYALDNWADLRDFTPMDAIRYDLKTLNRQFQLASKQRTASANNLIALLEQSFPGIRKCFDSPVRSDGTQKWVDFAHSFWHVDCVRKQPFPAFCERYRKWCKRHAYLFKLSNAEEVYALAKRAVVLTPKSKVVKVLVQEAANQLSSISRSVEVYRAEMDRLAAMLPEYPVVMAMYGVGKSYGPQLMAEIGDVRRFERKQALVAFAGIDPMPNQSGDKNVRSNKSSKRGSPYLRKTLFNVIRTYLQCAPQDEPVFQFLNRKRAEGKPFYVYMLAAANKFLRRYYAKLRDYFASLDTLQSVDPIPATLKASL

SEQ ID NO: 502573 - protein, 337 aa, unidentified
MKVTLIGIDLAKTIFQVCGVNQVGKKVFNRQLRRNKLLAFLMQHPEATIAMEACSGSNYWGRLLEKKGFTVMLIPPQHVKPFVKGNKNDRNDAFAICETARRPAMRCVQPRSLAQTDTMLIHRILERRVSERNALMNQIRGLLNEYGVVVARGKEKLRNELPFILEDAENELTETARYYLHQQLIEWRDLDAAIAELDKAIAQQVKSSEQSSRLKKIKGVGNKISSAAEAFMGNGSGYRSGRHFAANLGLVPKEHSSGGKQRLGRITKRGNAYLRRLLIQGAWSVIRYADHSEDRLSRWAKQLIERRGKHKAAIAVANKLARIIWAMSYHQTEYRAN

SEQ ID NO: 502574 - protein, 400 aa, unidentified
MQAQTERVVIGMDPHKRSATIEVMTGDETILGGGRYATDEAGFAAMTDYVNRVQPHVEDRVWAVEGCNGMGHHIAMRLVAAGEHVIDVPPKLSARARVFATGQGRKTDATDAHSVALVGTRMAGLRPVVNDEQLAVLRVLVDRRRSLGEDHTRMVSQLHHLLLELIPGGAKRDLSAAQAKALLAKVRPRDVAGKTRRRIAAELINDLERIYTRKKAADKELRALVAATGTKLLDLKGIGPSGAARLLVEVADITRFPDRDHFASWNGTAPIDASSGDHVRHRLSRAGNRQINRVLHIMATVQLHNPTEGRAYYDRRKADGKTSMEAMRALKRRLSNIVYKTMFDDAITHAVAGSETGPGGQRGNDSDSSATGSHPHAGSTDKPLPGPAKTQPKTPLPAAS

SEQ ID NO: 502575 - protein, 343 aa, unidentified
MNDTIYNHYIAIDWSIVNMAIARMTKKSNKITLIDVPSNISEMKVYLKKLKGTKTLVVEETTTSQWLYAELRDYVDRMVICDPYRNKLLNEGPKTDKIDAAKLVHLLKAGLIKEVYHSTSKFLYLRRFVSGYEDLVKAGVRLKNQRYSLLRACGKRGFEQTGTKLVSGSDQLVLDCIDRQLEAHKQEKKDYEKEFARLSKKHPEISHQKSLPGIGPIHAVKIVARIVTPYRFADKGHFLSYAGLVKLGKISGGRSYGRKNSRYCRQVKSVYKISTLAAIGGNNPINDYYQYLIRDKGYPEYNARHKACRKLAILSLGVLKSGKKYQPFRRDNVESNKEAIQGL

SEQ ID NO: 502576 - protein, 356 aa, unidentified
MKYYTSTTRYHCGIDLHSRQMYVCVMDSQGNKLLHMNIRNNDFAFFLKKIEPWRHDMTVCCECLFCWYWLADACEEAGLQFVLAHALYLKAIHGGKNKNDRIDSEKLAHLLRSNLIPPGYAYPAAKRPVRALIRQRTSYVWQRVELLQRISTSQLARNQQPVSKFSNNRTKWLAALLEVTGDPRERFALEQDVQLVVHYDNAIKTLEKELLTLTRRNEPRDFALLRTIPGIGKTLGLTLLYEIDTVERFPAVGDFLSYSRLVKGTVSSAGKIKGLRGAKLGNPYLRWAFGEAAVLGKRHHEELDAFSRRLENKHGKFKGNAILASKLGRAVYYMLRNGTAFDMDQLTGRSRRVAHT

SEQ ID NO: 502577 - protein, 314 aa, unidentified
MAESLVFVGIDVAKAELVVAVRPAGTQWSVPQTEAGWAGLVPRLVALAPTLVLLEATGGLELPVASTLAAAGLPVAVVNPRQVRDFAKATGSLAKTDAVDAAVLARFAEAVRPVPHPLPDTATRALDALVTRRRQLVEMLTAEQNRLASAPPGLRPRLQAHIRWLRRELGAVTEALQQAIRAHPGWRVQDDLLQSAPGVGPIVAVTCLAGLPELGTLDRRAIAALVGVAPWSRDSGARRGPRRCWGGRADVRPVLYMGTLAAIRHNSVIRAFYQRLRQAGKLKKVAIVACMRKLLTILNAMVKHQTPWAAVRPA

SEQ ID NO: 502578 - protein, 402 aa, unidentified
MRVGIDAHKMKCTTVMFDGDSVTGSFDFQTTRQGVYEFMEKVPEGSIAVIESSTTGKVLSRMLSGKYEVHMVAPPERKVSIKTDRRDAERIVMEDMLNYLRRCYIPSQYIENIRFVVTQQIQIGRRIARVKNQVHALLEMNMIQHELDDMADIFGVKGLKKLSKIQLPRQDMIALARYLEELKMYVSHHRQLDTEIARIAASDNDVQLLMTIPGINCFTAVAIKSRIGDDVSRFATKKHLCSYAGVVPKANNSGEYVSEHNHVKQGDIVLKYALTCAVRGAVLANKSSSIKLFYQKISKKGVSPQKAQIAVARKVACLVWKVLSSKQPYTEQDDNMTKRKMKIMSSKAMRIMPTSVMPSKVSELVRNLTDDIDILGKYHEDSSYIIGKDLSNKNRLKEDILR

SEQ ID NO: 502579 - protein, 398 aa, unidentified
MNAIGIDVSKGKSKIAIIRPFGEIIAKPFDIAHHPDQLEELAQYIHSLDGESRVVMEHTGKYSEPIANFLCNAGIFVCMVNAKLIHDYGGDTIRRVKTDKVDALKIAGYCLDKWAKLSPFEPTDEHRKILKTYNRQLSEYTKIKIMLKNNLISLLDQTFPGANELFSSPAREKDGHEKWIDFVLAFPHCHCVASLSRQKFTTKYEKWCRKNGYNFCTHKAEHVYSFALNCLPTLPNNDFAKTLIIQTVNQLNHLCETVAVIKSEMSKIASALPEYDTVIAMHGVGKTLAPQLIAEIGDIRCYPKRSSLARFAGIEPPENQSGNYNQHSRRISKQGSPHLRKALFQVMCCVLQLAHKHEPTFQFIDRKRSEGKPYKVYMIAGANKFLRIYYARVNECYV

SEQ ID NO: 502580 - protein, 310 aa, unidentified
MADKPVVGVDVAKGWLDICVAGAVERIDNTAAAVLSWLDRVRPGLVACEPTGGYERTLLGVLAERAIPFVRVHPNQLVAFRKSQGLRAKTDRIDARLIFAFVCHRLSQRGLHTAILGDPALAALAARRRQLIDSLHAERCRLAMARLEVLRDSHQAVIAALSHSLNAIESELAATIAGNPQTAKLATLLRTIFGVGPAVATALIADLPELGLLSAKQIAALVGLAPHTNRSGKTQYREPIGHGRPGVRRALFNAARAAIRHPSPFRDFYHRLVNQNQRPGKVALVAVMRKILVCANAVARDQQPWKLARA

SEQ ID NO: 502581 - protein, 360 aa, unidentified
MASLQFKCKVMKKIAVGIDFAKEKFDMTAINVVERTSVHGQFKNSPMGARDMLRAVRKFARGIDSEDWMFCGEDTGYYSQRVTRYLTEKGYFMWLQNAYSIKRSEGVIRRGKDDKADSRCIAEYARRFEDKAVRYKLPPKELEDLKMLLSQRDLLVSAKTKLQNSTSEIPERKVQGSAVSLIKSANKRVCRVIDDEIKKLEDKMDEIIDSVEAIKENYDILCSFTGVARINTLAFIVYTENFTKFDFNARKIATYWGVAPFHRESGTSVHTSPHVSGFCNKKLKALIGNAATVAIKYNSVINAYYNRLLERGKCPMIAKNNVKNKIIHILTAMVRNKQKFDKEYFFTFDTSVKNVKPLAS

SEQ ID NO: 502582 - protein, 358 aa, unidentified
MAKSTQTTAVVGGVDTHKDLHVAAVVDDGDQVLGTQSFATTRQGYKLMLIWMRSFGDLQRVGVECTGSYGAGLMRYLQVAGVDVLEVTAPDKLDRRRRGKNDDFDAQSAAHAAFAEQRTVTPRSRDGMVESLRVLKVCRKTAVQARRIALQIIQTTIVCAPDRLRDLLRNMTRMQLIRTLAAWRPDLTAYRDVEEAYRIALKSLARRYLELHDEVADLDDMIEAIVKELAPELIARNSIGLNSAAQLLLTAGDNPERLRSEASFAALCGFSPVPASSGKTTRHRLNRGGDRAANSALHIIAIGRLRLDPKTREYVARRIAEGHSKLEAIRCLKRYIAREVFNIIARRHRQINQAQIAA

SEQ ID NO: 502583 - protein, 402 aa, unidentified
MNAVGIDVSKGKSMVAIMRPFGEIVSAPFEIKHTASDIHSLVELINSVEGESRIVMEHTGRYYEVLAHQLSKANLFVSAINPKLIKDFDNDSLRKVKSDKADAVKIARYALDKWQNLKQYNVMDELRNQLKTMNRQFGFYMKHKTAMKNNLIGILDQTYPGVNTYFDSPARSDGSQKWVDFASTYWHVDCVRKMSLNAFIDHYQNWCKRKKYNFSQSKAEEIYGKAKELVPVLPKDAITKLIIKQAVDQLNSASTTVESLRTLMNETASKLPEYPVVMAMKGVGTSLGPQLIAEIGDVSRFTHKSAITAFAGVDPGVNESGSYEQKSVPTSKRGSSDLRKTLFQVMDVLIKTHPQDDPVYQFIDKKRAQGKPYYVYMTAGANKFLRIYYGRVKEYLSSLPES

SEQ ID NO: 502584 - protein, 353 aa, unidentified
MKCDKYIGMDVHQATTVVVVLDAEGKLVLETIVATEAAAIIRLVQSLSGPLRATFEETTQAAWLYEVIRAYVTEVIVCDPRRNKLLEDGSKADKVDARKLAELLRAGLLRSVYHGHEATRNLKELVRAYETLSIDTQRTMARIKAIYRARGIRTPGRGVYQPKQRERWLELLTGAGIRQRVEWLYEQLDQLQPLRRKAKQAMLAESRRHRAVSLLRTIPQMGPIRCAFIVATVDTPHRFRTKRQFWSYVGLAVVTHMSSEYEMTAGRVVRRRKPVATRGLNHNCNRRLKEVFISAAIGGSLHEPYKPFLERLKENGMRAEMARLTLARKIAAVVLIVWKKGVAFDSTKLNCTT

SEQ ID NO: 502585 - protein, 309 aa, unidentified
MDIIVGIDVSKDSLDVAVSPSGASFRVGNGHDGIEELVRRLKAEKADLVALEATGGFETLAVAKLAACDICVIVVNPAQVRAYASAIGRRAKTDTIDAALIAAFVVATKPQIRPLRDAQTQALSALVDRRRQIVQMIVAEENRLRMALDKTTQKSIKRLLAALRREMDSIDADMDDHIRKSPLWRVREALLTSVPGVGRATARTLLAEMPELGSLDRRQIASLAGLAPWTRQSGKWKGKSFIGGGRTKVRAVLFMAALVASRHNPLLKEFRDRLVASGKPKIVAIVATMRKLLTILNAIIRENKPWQSA

SEQ ID NO: 502586 - protein, 335 aa, unidentified
MKKFYVGIDISKEKCNLCCRDGLEIVMEEESVNDVKALKKSLSAVLKTFSVAIDEVLVCAEYTGRYIYPLTVACQELDIFLWMDDPTRIKNSMGLTRGKNDVIDAARIAEYAYRYSDKAIRYCIPDAALVSMKSLLVDREFLLIDKKRYQSQITDQKRYMASGDFKHKCARWKKVIRAIDEQIKAIDAEIESLIAANPVLTRQKKLLTSIDGVGDRIAINMIAITGGFTRFQNARQFCSFAGLTPYKYDSGTSVRSKAKISKRANQTMKALLHLAAVGAATHMKESEYRDYFDRKIKDGKHVMCILNVVRAKIVHRMFSVIRRDTEYTKTYKPSV

SEQ ID NO: 502587 - protein, 340 aa, unidentified
MSFKIIKNNCCGLDVHKTWIYACIGITDSHQRTEYKQARFSSFTKGLNELCDWLAKYNCTDVCMESTGKYWIPVFNVLEKHNLWITLSHPKYTKPMKGNKTDRKDAKWICDLYMCGMVKPSFIPPADVRELRDLVRYRFKLTCMITSEKNRAHNCLTVSNLKLDDVFSDIFGKSSRSITEQILQHPGETFDVAPFVDGRCKTPIEEIQAAVDGAISKEQAVKLRQCLNHIDELEKHKSEIEREIFRLSEKYEAALDLIRTIPGFDKNPLTAIQVLSEIGGDMSVFPTAKHLVSWAGCCPRNDQSNQKIKSTRISRAGSYFKPVLVQIANALIKSDSVNLL

SEQ ID NO: 502588 - protein, 332 aa, unidentified
MYYIGMDLHKQDLVMAVEDEQGPVGRVRRIACRDTEAIRAAVERWRPFRAVVEASASYRWLYDLVSQRGEMVLAHPLRLRAITAARAKTDKLDAALLARLLRANLIPAAYVPPARYQRLRDLTRGRARLSYGATLAKNQMHALLARANVHPPLKTLFGPRGRRWLAALDLGLSGNLARDELVRRLEHYGREIAVLDAHLEAVASEFPEAEALEVLHGIGRYSALLIVAEIGEPERFRDGRQVGAYAGLTARVHQSGGHEHRGSISKQGSRWLRWILVQAAMKLVRRDERLANFYQRVRKRRGRNVARVAVARKLAGICWVRLRRWQREQAAA

SEQ ID NO: 502589 - protein, 407 aa, unidentified
MEVLYPRCAGLDVHKDTVVACVRCVTEPEHREVRTFGTTTSELFALGDWLESYGCTHVAMEATGVYWKPIWHMLEGRFELVLANAQHIRNVPGRKTDVNDAMWIADLLAHGLIRSSFVPPSRIQELRDLTRTRKQIVREMSQHTLRIQKTLEDANLKVASVLSNVIGTSGRAMLAAIIAGEADPERLADLAVGTARRKRAELVEALRGRVTEHHRAMLKLHLGLISALQGALDELDGAAGKLLAPIQERAALLTTMPGVSDIVAQVIVAEIGVDMSRFPTAGHLVSWGGLCPRNDESAGKRRSTRVRKSGTSLKTTLVTAAWAAARKKDSYLKAQFLRLKARRGAKKAIMAVAASMLTACYYMLRDGVEYRDLGSAHFDHRDKTKTIRRLIRRLTDLGCKVEVPHAA

SEQ ID NO: 502590 - protein, 422 aa, unidentified
MKNTAARKLKQVPEGYLIVGVDPHKKKHAAVVITQDLTIHDRFKFDNTKEGLEFLLQRVKAEMVKSGCRGIMFAIETGGHYWRNIAYYLDERGIPFRFINQYTLKRRREGKDLNKRKNDFRDSEVAAQLLCTGEFVESGIPQGVYAELRTAHNAYRRLVKERTRITNLVKGLLDSLFPEFVHVFKDPCALTALSVLSTCSIPGEIAGMTENEFIAVIEEQHHGRRLMRKKLGELRSLARASIGIEAGARSLSIEISFLVEKRKLIREQIQTIERTLKKLVDASEEGKYLLSIRGLHYIAVAGLLAELGCFKSYRSAKQMIKMAGSNPTESESGGKRRSRTPMSKQGRPVLRYCAWTAVIPMLRLNPDFRAWAKERRERPAHANPLNGREVVGAALNRLLRLAFALVKNETFYRSPHLVQVTG

SEQ ID NO: 502591 - protein, 407 aa, unidentified
MYYCGIDIAKHRHEMSVLDEAGESVLSLHFANSQKGLEKVLDALASLKIEPENVLFCMEATGHYWLALYCQLKELGYQLHVINPIQSDALRNLYVRKAKTDKKDALLLADLVRLGRAPVTQLASETTLKLQTLSRLRLEFVHQIGGLKNRALGILDRIFPEYPECFSNVFIRTSRELLKSYPEPELLAEADLSELTAFLNQHSRGRIHRDRAEQIQALAKGTFGIRLALDAFTLELKLLVEQIEFIEEQVGILEEAIEQVLEELRTDPEQPYRHVLETIPGIGTVLAAAIIGEIGDISRFPNAKALVAYAGLDATVKASGQFEGTRNRISKRGSPTLRNSLWLAAVSARRFNPELKAFYDAKRAQGKHSGVATGAVARRLTHLIYSIWKDNRPFETDYKWSPAGSND

SEQ ID NO: 502592 - protein, 375 aa, unidentified
MQNKVRFLGLDVHADTIAVAIAEPDGEVRSLGTIANRAESIRKMVKKLGSVEQLRACYEAGPTGYVLYWQLVELGVNCEVIAPTLVPMKAGDRVKTDRRDAERLARSHRSGDLTAVWVPDEGSEALRDLVRAREAAKQDQLRARHRLSKFLLRSGQRPAQGMKAWTQQYMIWVKQIRFSQVAQESTRLDYLTEVEHMSERVVRLEKAIMEAVKLASPEIQEVVKDLQALRGIAQISAVTIAAELGNISRFEGARQLMGYSGTVPSENSSGKRTQRGSITKTGNAHLRRIVVEAAWSYRLRPGVGPALHKRQEGVPEEIKEIAWKAQHRLHKRYSRLAAAGKDHRKIITALGRELLGFVWAVGTKAEAAVKQQRAA

SEQ ID NO: 502593 - protein, 412 aa, unidentified
MDVVYERCCGLDIHKKVVVACLVTPEDDRAGGAPRKEVRTFGTMTDDLLALSDWLAAAGCTHVAMESTGVYWKPVFNLLEGSFALLLVNAQHVKQVPGRKTDVKDCEWLADLLRHGLLRGSFVPDRPQRELRELTRYRTALLHERSAEVNRLQKTLEGANVKLASVATDIMGKSGREMLAALVAGETDGKTLAQLAKGQLRAKLPQLERALTGRMSAHQRFLLAQQLAHVDFLDQQLERVSAEIRERLRPFEPALAALEGIPGVGRRTAEVLVAELGTDMTRFPTAGHLASWAGMCPGNNESAGKRRSGRTRKGSPWLRAALVEAARAAAHTKRSYLGAQYRRLAARRGAKRAAVAVGHTILVIAHHLLRDGTPYQDLGVTYFDERDRLAVERRLVRRLETLGYSVTLQPAA

SEQ ID NO: 502594 - protein, 442 aa, unidentified
MAMRKREDSPEVFPNAAGIDIGGSSHWVAVPRTADDKPVREFGTMTDDLNAMADWLLACGVDTVALESTGAYWIPVYEVLERRGLAVWLVDARQMKYVPGRKSDVLDCQWLQKLMSLGLLRAAWRPGDKVCVVRAVARQREVLLTEQGSWVQRMQKTLVQMNIQLTEVLSDIMGATGQAIIRAIVAGERDPKVLARYRHGRIRRSADDIARALTGNWREEHLFVLKQALSMYDDLARHLGECDARLQTLVDESGRRHVDLGTGPKAGTRLRGNFDQRQRLANWAGVDLTRINGLGVSTVLTLLSEIGPDLSRFASVKHFCSWLGLTPGTKISGGKVLSSGTKRSANRARQALKMAAMTLSHSDSALGAFYRRLCARMDKPRANTAVAHKLARMVYFMLTRGEAFVDQGQQRYEEQQHQRSIAALKRRAAKLGFRIESVPATP

SEQ ID NO: 502595 - protein, 430 aa, unidentified
MNSTQNKKIRQVTEKTMVVGIDVGSEKHYFRAFDWRGIELTKKPFPFTNSMEGFNSFSNEIYSLMERFHLSETLVGIEPTGHYWFNLGQYMSGKSIKFVMVNPHHVHKSKELDDNSPSKNDCKDPRVIAGLVREGRYYYTYMPQGIYAELRNASNRRFTLVEEQTRIKNRLYRWISVYFPEYKGIYTQINAKGGLLILKEAPMPEDIIKLGIDGIIEIWKKAKLRANGRKKAMVIYNAALKSIGYREGLVEARMEIRDLLEDHEQNEKRLKQINDLIENLALKIKNVEKLLEIKGIGIITIAGFIAEVGDIMRFDNAKELQKLAGLELVADSSGKHNGMTRISKRGRKHLRYLLIQAAISVVGKCEEFKEIHNYYTTRNSNPLKKMQSIIAVACKLIRVFYAILAKGIDYDASKMLEDIKHPGETPNLAA

SEQ ID NO: 502596 - protein, 376 aa, unidentified
MREKLRFLGLDVHAETIAVAVAEADGEVRSLGTIANREESIRKFIRKLGSPEHLRACYEAGPTGFVLYWQLTQLGVECDVVAPSLVPKKPGDKVKTDRRDALKLARSHRSGDLTAVWVPDEDSEALRDLVRAREAAKQDQLRARHRLTKFLLRTGRRPPLGLKAWTERYLAWLHQIHYTQPAQEATLLDCLNEVQHMGERVKRLEQSILEVVKLAPAPVQAVIQGLQALRGVAHISAVTIAAELGNISSRFENARALMGYSGVFPSEDSSGERVRRGGITKSGNAHLRRIVVESAWSYRHRPSVGAKLRKRQAGVPAEITEIAWKAQNRLHKRYMTLMARGKEQRKTMTAVARELLGFIWAIGIKAEAACKQQLAA

SEQ ID NO: 502597 - protein, 371 aa, unidentified
MKQQSKSSNITVGLDLGDRRHRFCALDERGEVVEEGSICNERDSLRKLAGRYHGALGVMEAGAHSPWVSRYLKRLGWEVIVSNPRKVRAIYQHERKSDQRDALMLARIGRMDLALLYPVRHGTAEAQQDLLRIKLRDSLVRARVAVINSVRFTLKSLGYTVRNPSSARFHKVVMEEVPESVREMITPSVQALAELTARIKMLELEINTLAQMKYPQSAQLQQIPGVGPITALYFVLKIEDPNRFAHVRDVGAYAGLCPRRDQSGESDPQLRISKRGDAYLRRLLVSAAHYILGPFGPQSALRAYGLMLAADGTAQAKKRATVAVARKLAVLLLSLWKSQQPYQPFPGARLNGQQEDRRSGTIALHRMEATD

SEQ ID NO: 502598 - protein, 305 aa, unidentified
MHEVCILDDEGKQVGKHIQINNFKSSIEKFREHVESAASELDLIPRIGMEATGIYWYTIYCELSKHYEIRLYNPSQVRGFAAVNVRGSKTDIIDAKTIAGMLRFGEAPKICYGDKTRMELKEYCRFHFKLKSRVADLKKWLIRNMHLIFPGYDQMFSSIFTKTSRAILNEAPRPSDMLEMGEKLAKDSISPDFIEEDLLFEVESLLKLIEDMEDQIEEVEKRISAAWDKVKDKHYLQTIPGISDLMAATIWAELGDIENFQHPDQIVAFAGYDPKVKKSGNKEVVLGPNKRGSKLLRWVLGRAVV

SEQ ID NO: 502599 - protein, 341 aa, unidentified
MKVMIGVDPHKGSHTAVAIDQTESELARLKVRATRRQAEELLGWAAQFEERTWAVESAGGLGYLLSEQLLAAGEDVVDVPATLAARVRLLGSGRSQKNDPNDARSVAVAALRSPQVGAVDRADRVGVLRLLAKRNIDLGRARNRTACRLHALLAELVAGGIPNEINASSAEKLLADVATTSPIAVARHALAREHLDDLRRFDAQMAESKRRIATAVTASGTTLTELFGVGPVVACMLIGYTGDVHRFRSQGHYATYNGTAPIDVSSGGRVVQRLSRRGNRQLNHAIHIAAVTQIRHPHSPGRPFFDRKVEEGKTKKEALRALKRRISDVVYRHLLLDPKQA

SEQ ID NO: 502600 - protein, 348 aa, unidentified
MNAVHYIGFDVHKKTISFCVKTAAGEIVEEGSLLAQRAVLRRWAAARPQPWRGALEATLFSNWIYDTLQPYGGQLEMAHPAKMKAISAGKKKSDTIDARTIADLVRCNLLPACYVAAPQIRELRRLLRYRSLVVSEAVRMKNKMAGLLMETGALYVKEKLHRKKYFASLLEELEEVPESVVDLLRLSRGALEMFESTQKRLVRELLAYPELAERVERLMTIPAVGEITALTWALEVGDPQRFHSSSDAMSYCGLTAALKSSAGKQQRGPISKQRNRWLQTTLIEAAKLAPRWNPQLAALHARELERGHRNRATLAVARKLVAYLLAVDKSGQPFQVRAPSEVPTQKAA

SEQ ID NO: 502601 - protein, 425 aa, unidentified
MSKSDYNRQVARRQRIKKTTLIVGVDIGNAFNAVGFMNKEGNVLGSCAKLYNSREGFEQFINMIDGLKAKHHLRDVLIGMEPTGHYWRKLAYFAKDHGYEVRFVRTTALKHHRELDESSSAKSDQRDALTIANITREGKYIDTVIEDGVLRQLRTLSKARERLLRYSISAKNSLHAALDDYFPELHEIFWSMGSRSLWVILEQCPFPQDVMLMKVSTLQELIARSSRKKAGSALKAEKLTEASQKSIGVKQIGSADRYRVQMCLEEVKRTVLSLKNIDKQLKYLLKETSAASYLMSIPGIGPLSAAVFLGELGDPAHFHNARQIVKYAGYDPQESDSGSRIGRKFISKKGRWLLRKYLFFMSMRVVVLSNYFQEYYLRKLEIKNRVGQQPRRKEILCAVAIKLIKVIFALLRDKREFKDLVPAAA

SEQ ID NO: 502602 - protein, 337 aa, unidentified
MSVYVGIDVHRKRSQVAVVTGDGTVELNKNVVNGSEPMLRLIGDLPPGTPVAFEAAFGWGWLAALLEDYGFEAHLVHPLRCKAIASARLKNDKVDAATLAQLLRADLLPEAWIAPPAVRQLRALLRHRAGLVRLGTQQRNRIHAVVADFGFDRSGSYLSGPGRGWLAGLDLPPVSREVVADCLAVIDGLAPVIDRIDGELRQHAKADPRVKTLTTLPGVGQFTALVMLAEIGDISRFPSARKLASWAGLTPTVRGSDLHVRHGHISKQGSAWLRWVLNQAAQTAKRSPDFAATYSAIAKRRGKKIATIAISRKLLTRAWHLLADMQATSTNEPPRRP

SEQ ID NO: 502603 - protein, 483 aa, unidentified
MNQTKLHVGIDLARRANHKAVALRAAETGCAQAARSKAVSFSHDRDGFLALRDRLREQSGATSLEGVTVNMEPTSAVWETVAGFLRAQGAQVFFTRTDVVSALRKVHSKFAKTDRIDARTLAGIPRSFPERLVPVVEVEERIRTLRQLSAQRQRLVEDQTAWKNRLVAKLEMAWAPLMRLLNKDQRFSQLACAFFKRFARPAKVVAMGRQQFLTWCQSHALGRTAPDTLEAFWQGAVASAQMWDLLDETKAIALDWDILHGLILQDLRLIAVLDDEIQKTDAQIATACQDVPECGVLQGLPGVGKVISVTLTALLMPVARFANTKKCGAYTGFISRKKSSAGHEIEGLKITKTGNRRLKRDLALAADHAMRQDPQLAAFAIRLLEAGKHYNKVRVAVARKLAIRAFSLLRRYGSGQTNASYVWRDLHDRPIQKRQAKELAAALWDAHEARQKSKGSSPSPAHSWQSEDSIQRHLNELPEADHD

SEQ ID NO: 502604 - protein, 354 aa, unidentified
MSEKLNSEIAVIGIDIGKNSFHLVGQDRRGRIVLRQKWSRGQVEARLANLPPCLIGMEACVGAHHLSRKLQALGHDARLMPAKYVRPYSKGEKNDYRDADAIAEAVQRPTMKFVATKSADQLDLQALHRVRERLVGQRTGIINQIRAFLLERSIAVRQGLHFLRAELPGILAKRTDVLSPRMLRVIEDLAGDWRRLDERIDALSDEIMTLARQDKGCERLMTVPGIGPIISSAMVAAIGSGDAFSKGRDFGAWLGLVPKQMSTGDRTILGSISKRGNRYLRTLFVQAAWVVLVKIKPEGWERYGLKSWIEAAKQRLHHNVLAIALANKLARIAWAVLHKGRAFECVKTNAPRPA

SEQ ID NO: 502605 - protein, 364 aa, unidentified
MKILLYAGLDVHKETIDIVVYRENERSVYLERRIQNREGSIRKVFGRLLKEGSVVACYEAGCMGYRLQRMLEGMGVESVVVAPGKVPRRARDLIKTDRRDARRLAEQLRAGTLEAIHVPDVEDEATRDYIRSRDDVRLELKKMKQRLQMFVLRYGYVYESTRYWTGRHERWLQSLRFDLPMQKETFEGYYYRIQELKGRLQEMDKRIEQIAMSERYTERVSRLRCLKGIDYLTALAMVCEVGDFRRFGSAEAFMAYLGLIPRERSSGEVRRQGRITKTGNAHLRTLLIESSWHYRYRVAVGKRLREKREGQPAGVIAYADKAMRRLQEKFFHLHMNGKTSTVAVTAVARELAGFIWGMMVGQTA

SEQ ID NO: 502606 - protein, 434 aa, unidentified
MKIVYPVCCGVDVHKKFLVATIATTDKKGITQYITETFSTLNRDLYSFRRWLTEHNCFDVCMESTGKYWIPVFNILEEGSIRVMLTHPKFVRAIKGKKTDKKDSKWIADLFKHDLVSASFIPPPEIRALRELSRYRYKLVCTRSSEKNRYQDCMTISNIGLASVLTDPFGKTAGDIMKHILSSQVFNDKDIEKLIRGTAKKKTDLILESIRDNRIESDQRFKMNEVSNHLAYLEQSILKTEVELYTRITPYLPIVKHLADQLPGVTELSATLILAETGVDMSVFESDKHFVSWAGLAPSNDQSAGKKKSVRISKAGQFLKPILVQCALSAVKSKKQPYFADKYHKLKRRRGHKKAIIAIARMMLTCIYHMVLTGETFNPSDLKPACKPKPKKQVLSDETVFAYIAAQGYDVSSLTKFHPEEDSSVIVSSFVNTA

SEQ ID NO: 502607 - protein, 394 aa, unidentified
MYRLFVGIDVSKDSSSARGLDPGGQSCFALSFPMDSVGFSDLLESIRSHGRDFSEVMVAMESTGCYHLNLYTFLISQGIKTVVINPLIIANFAKLSLRKTKTDKKDALTIAQFLLIHKDAISQIALSQDVQDLRDLARERESLTVLIASLKNDIKRILQSTFPELESICEVFSETMLQFLREFPSARLIKAATPRRIAKVLCHSDRRKRISVSAEEIIQASKNSVASMSAAKELILPEKISTLFHLIEKQEKITKALIDLCKSTRIEDLEIITSIKGISDKTGATFLAEIGRFNDFDSPKKIIAFAGIDPTIHQSGKFIGMSKLSKRGNRHLRRVIFLMAKHVSREDTLFKQYYLRRRMEGLSFKEAVLATAHKLIRVIFAMLSNRTYFCAKEN

SEQ ID NO: 502608 - protein, 343 aa, unidentified
MNEVITIGVDLAKNVFQIHGVDAEGGVVFRRQLRRGQMLPFFNKQPACLVGMEACATSHHWGREIESLGHRVRLMPPSYVKPYVKRNKNDMADAEAICEAVRRPTMRFVEIKTPEQQSVLMLHRTRHLFVRQRTTLINALRAHLAEFGIVAGVGRNGLERLLNVIEDGGDDRVPPTARECLLALRDQLEMVKGQILDADRRILAWHRSSEVSQRLDDIPGIGPLIATALVASVPDPHAFKSGRDLAAWIGLVPRQNSTGGKDRLGHISKAGNRYLRMQLVVGALSVIRRAQQVGYTRRPWLTKLLQRRSTKVAAIALANKNARTAWAMMAHGTYYQEPVSQAA

SEQ ID NO: 502609 - protein, 353 aa, unidentified
MSEDKYIAFDVHQAMTVVSVVNTAGREVNTAILPTQAQALLGFVEGLRGRLHLTLEEGTYSAWLYDLLEGRVGELVVCDPRHNALLKEGSKTDRNDARKLADLLRTGMLRPVYHGSRSVRNLQEMAHSYQALVKDMTRVMNRIKAFYRSRGIDCAGRGVYSPKQRGSWLERLPAGASRMRGELLHDQLEQLRPLRRKARRALLAESRKHLVTARLRGIPGLGPLRVALLIAALQTPHRFRTRRQLWTYAGLGLIQQGSSEYRWVEGQAVRRAGALRPRGLNRNYRPGLKAIFKSAALAAIRQPGPFKDYYEPRAQRGVDPAILRVTVARKLAALTLSLWKKGGRYRAEGKKQA

SEQ ID NO: 502610 - protein, 343 aa, unidentified
MDQHIGLDVSLKDTSISVRQDGKRVWRGKCASDPKLLAEVIRKRAPNAKRVVFETGPLSVWFYHALTAEGLPAICIDARHAKAALDMAANKTDANDADGLAHLAEVGFYREVRVKGFDSMLMRTLITARRQLMKMRVQMSNQIRGLMKTFGLVVPKGAGSVFERNVLRLLESEDNLSRIILPLLKAWSDIRLRVAELSKQLVAMAGTDQRCRLLTSVPGVGTVTATAFAAAVEDSINFKNSRAVGAWVGLTPKRYQSGEVDYEGHISRRGDAKLRTLLYEAASVILNRSSETSTLRTWALALKERLGFKRAAVALARKLAVIMHAMLKTGELFDPNAGATVPA

SEQ ID NO: 502611 - protein, 343 aa, unidentified
MEKISTIGLDIAKNVFQVHGIDGDGTVVVRRQVNRKQLVAFFSRLQPCLVGMEACATAHHWARELVKLGHEVKLMPPRYVKPYVKRNKNDMADAEAICEAVTRPTMRFVAIKTAEHQSVLMLHKTRQLLIRQQTMLINAIRAHLAEFGIIAGTGRTGVEKLLAIIKAGEDDRIPAAARECLVVLYDQLGLVKHHILDADRRIMVAHRSNELSRRLADIPGVGPLIATALATSVPDPRTFRSGRDLAAWIGLVPKQNSTGGKERLGHISKAGNRYLRTMLVVGALSVIRRARQLGYTRRPWLARLLERRSTKVAAVALANKIARIAWAMMAHGTYYQEPDAQTA

SEQ ID NO: 502612 - protein, 370 aa, unidentified
MLDTTTFVGLDVHARSIKAVSLDVMTGEVRAATFGYDAGAVAGWVRSVDPKAKCVYESGVTGFDLQKRLSGLGVDCVVGAVSKMIKPSADRRRKNDRNDAEFLARMLSVGNVVEVWVPDDECEAARDLTRALEDARDDLSRSKQRLSKFLLRHGLVFDERTPTGRRKGNWTRAHWSWIESIRFAERADNDVLAYYVDAVRRAAEEKARLEGLVEAEARKPRWRRRVDSLRCLKGVDTATAADLVFEAGEFSRFRNARSFAAWVGLTPSEHSSGESDRRGSITKAGNKHLRKTLVEAAWHYLTCSGRPKGLARGQAPDRGARRHAAKGVRRLVERREALLARGVHGNKANVATARELACWVWAVGLMAEEA

SEQ ID NO: 502613 - protein, 317 aa, unidentified
MTELKSPLFIGADVAQDAVVVAAHGQSTSRSIGNTPAALKAWLKALPPGAQIGLESTGSYHERLALLAHRAGFTVYVLNPKDVRHYAHAVGKRAKTDHVDALLLARFIAHEHADLHPWQPPTREQRHLDKLLKRRATLVKAQGMLRQTLAHLSPLKTESKAMLASLAKLIATIDRTLEQAVAANPGLQAKADCVQSVPGIGLLTGTALVNLFSRLPSARADALVAFTGLDPRPCDSGKKRGTRRLSKRGPGELRRLLFNAAMSAAKTRVWKPFYERERAKGLPTTAALVCLARRLVRVAFALYRNNAHFNPEAIHCA

SEQ ID NO: 502614 - protein, 397 aa, unidentified
MYIVGIDIAKRKHEAAVIDGEGTVIIKPFSFTNNCSGYNRLLAMLTKAKLPLDEVSFAMEATGHYWLALFTRLQKEGFRVQVINPVQTNSIRSFYIRQAKTDPRDALLIAEVIRFGHFSESTLHPENIYELRELCRGRHAIVSMQADVKRKVVALLDQVFPEYETAFTNLFGDTSMAILQTCPTPKELSEMPFEELCHLIEVSSHKRFRMAKAQELQALARNSFGFAMAGDVFSTMIRLYAKHLVFLKQQVREMDRKIAEIMDTLDTPITTITGIGPTLGAYILSEIGDISRFSSAAKLAAYAGIDPTMRQSGEYNGVRNRMSKRGSPYLRHAIWLAASSAVLHDPALKLYFQKKRDEGKPYMASVGHACRKMVSIIYAVMRDNKAYTPCIPNEISA

SEQ ID NO: 502615 - protein, 437 aa, unidentified
MSDNKSLELRVSVDVGYRRHSVAIGLSNGEMLEEFEISHRPEGFEQFFSRIEKHQKERSCEVAVAMEGFNGCARPLDRMVRRRGYRLYNINNLKLARFKEIFPGAAKSDRIDARKGLELFQLSDHLPLAKEVLQEVKGTPQENEVLKRLTRRRRRLVDEGVRVISNLQTDLQAVCPGLLEITKSAGNQWFLNFLVSAPSLPQLARLRPSTLLKIPAVGRKYASLIEDWQKRAHFSEEVQWVSEMIQEDAQRCLDLDEKIKALKAKIKEVAKGSKIANILLSLPGFGTICTAELAAEIGTIERFSKEGSLALYLGMATLDNSSGKYQGSKQPKHVNTRAKAAMMVALDRHRKYVPQSQRYYEKKRSEGKKHNQAIRALGRHLSRIIYKMLMEEREYEMRPEKGNTKSKVSPRSLIKTQIRKPKISAKGKNNNIYQQST

SEQ ID NO: 502616 - protein, 315 aa, unidentified
MEGEVMVGIDVSKARLDVAVLPGEEVFSEEHDVRGIAALIERLKKIAPALVVLEASGGLETGLVAELVAAGLPAAVVNPRQVRDFARATGQLAKTDKLDARMLARFGERMRPQLRKLPDQQELALKALVVRRRQLVEMMVAEQNRLDRAPKALHRQLRRHIDWLRKQIHSLDRDLDHELRNSPVWREKETLLRSVPGVGPVVCSTLIAGLPELGTLSRRQIAALVGVAPLNRDSGTLRGRRMVWGGRGQIRTALYMSTLVAVRFNPALKSFYLRLRTAGKPPKPALIACMRKLLTILNAILKHRKPWTSPCAANL

SEQ ID NO: 502617 - protein, 326 aa, unidentified
MKIIDTRIFPTSNSGINRAMNWVARRTDDTPEILWVIEGAASYGALLTAAVTTCGFRVAEAPQLGRHLAAGKGKTDTLDAQRIAVDTLPVDEARLRTPRTHDGIRAAVRVLVTARDAMAEERTRDINALTVLLRTHDLRIDARRRLTNTQIYQVGCWRSRNEPLVQATARAEAMRLARRVTALDAELTGNLVELTELLQFSQGAALLAQPGFGPVATAICLMAWSHHGRIRLEAAFAALAGVNPIPASSGNTVRHRLNRGGDRRLNQALHMVALNRMTYDAETKAYDAKRQAEGRTTKEILRSVKRYLARRVYRTLSAADPVLIAA

SEQ ID NO: 502618 - protein, 345 aa, unidentified
MNKCHLNTELSSLEGTRSEFNRSKAVIKLGIDVHQDFYVVVEQMEGTNPKPAQRFQKQVFLHWAAKLSKSGSKVHAVYEACGFGFGLQRQLTALGIRCHVVCPQKLDERNKRVKTDGLDAKALCLKLDRFVQGNREALALVRVPTEAEEQKRAIHRQREQLVKARKGLEAQGRSLLVNHGMEPASNWWKGRTFAQLQVPEWMKELLQNSQPILLALEEKIRALTAQLQAAAISKQPRGLGLLSSVVIDREIGSWTRFKNRRQVGSYTGLCPGEYSSGNTRVQSCVTKHGNPRLRAALVETAWRLVRFQPNYKPVLKWRKILAKGALATGAARKKADRSSGAPAGR

SEQ ID NO: 502619 - protein, 312 aa, unidentified
MTEIVCGVDVSKRRLDAHIEPLGRFQSFANDADGIAELAAFCRQHAVQLVAMEASGGCERRAFLLLWEAGIACALTNPKSVRRYAEAMGVLEKTDRLDAGAIARFAIAKGLKPTQPPSPAQQRLKALVVRLRQVTDDLTVQKQRRSSAASEEMLESLDEVIALLKRQARRLEGEIASLIDDDPLWSCLDAALRSTKGVANRTVARLLAELPELGVYSNKAVAKLAGLAPLADDSGARAGRRHIRGGRAGIRSILFLVAGVVARFDASMEAFRRKLTEAGKPKMVVRTALARKLLVRLNAKAREARQKYALAT

SEQ ID NO: 502620 - protein, 520 aa, unidentified
MATSRTRRRPGARRFYHSVAKPSGLLHPRVQQVGPEHFGIVCFDCAKARSKFLLADFYGHVLIPPTTVAHHRPALDAAVAQVRQAFAAYQLADGLVAIERTGRYHRLVQRAFAAAGFETRILHPFVTKQYRQPVDPGNKTDDTDLSAIHRATVTGCALREAPRDEAWTTLQLLVRQRRDLVRKGAALNCQIREHLEAAVPGFAACFDKLWDSPVPWHLLHHFPSAARLGAAGLTTLCQSLRQAGIRFQQRTVQAALDWAAQAAPGDVAADQHRRIALDYYRDRQQKTQQIQSLERELAGRLAQTPYVLLLSFPGINVVSAADFGGEAGPIEHYANAKAITGRAGLCPSRYQSDKVDKADGPLVRAANRALRAAILGIADNLIVCNHHFGVLATQWAAQGKDPRHTRVKVGLRFCRIAFQMVAGRQVFRHPAIQGRHYILDKLTAFHRGHDTGMAEVLRDLQTAVAQVPPREHAAEARPLQEELQKIHDGRRRGPQLLGDILPMVLARLGVGVVQSAESGE

SEQ ID NO: 502621 - protein, 346 aa, unidentified
MRIIGCDFHPSWQQVAWLDAATGETGECRLVNGSGEAERFYRAVPEPALVGIEACGNSQWLVDMLQQIGHEVWIGDAAQIRASYVRKQKTDKRDAAHILKMLVEGRFPKLWTASAEQRDVRQLLLHRHKLVEIRTRVKNGLQHLALNRGLQKKSRLWSAAGQQALRELPLQGWAGRRRQDLLQLLKHLDQQMGELDQAVEEEAQRDKRAQLLRTHPGVGPITALAFVVTIGDVARFPRGKQVASYLGLIPRERSSGGRQRLGAISKQGNRFLRLLLVEAAHSANRLDEGFRRTYQQRCHRMAKGVAKVAAARKLAVRLYWMLRTNTAYPEIVQIESSPRVPLVGRR

SEQ ID NO: 502622 - protein, 385 aa, unidentified
MNQTSSCAISTNTLHCALELSKNSWLLAIQFPDREQPSLYPIEGGNTEKLMAKLAAARDCWAKVSGSPPAITVCYEVGYDAFWLARFLMGRSIECLVIDPGSLQVNRRGRRVKTDRVDVKMLLRTLIAWCRGERHVWSLVRIPSIDEEDLRRSHRERGRLVRERTAHINRIKGLLFGQGIRGINVKSQYKTLAVDNLVTGDGHRLPPRLACEIAREIQRLAMVQEQIAKIERERDTAPTRCEATERKRHLLLQLKSIGPAISALLSREVYYRQFANRRQVGSFLGLAPSPYNSGAEERCQGISRAGSGHVRAIMIETAWLWIRHQPKSALTRWFVERTAGQSTRVRKILIVAVARKLAIALWRYVEHGMVPQGAILNPPTTGNAR

SEQ ID NO: 502623 - protein, 408 aa, unidentified
MTIFVGVDWAEAHHDVHVQDEDGKRLSGGRLPEGVEGIARFHEMVGNHAEEPDEVVIGIETDRGLFVGALVAAGYQVFAVNPMSTSRYRDRHSTSGAKSDPGDAKVLADMVRTDRHNHRPIVGDSELAAAIKVLARAHQSMIWSRGRQTNFLRSTLREFYPVALVAFDNLTSGDALEVLRVAPTPTLGAGLSRSKIAAASKRGGRLRRVDQRSEEIQEALRTPQLQGSALVATAMGTSVSATVAVIATMNAQIAELAKELEAGFEQHPDAEVVRSLPGLGTILSARVLGEFGDEPNRYATAKCRKNYAGTSPITRASGTKRIVLARYARNMRLADAIYQWAFASLTASPGARAFYDYRRAAGDTHHAALRHLGNRLVGILHGCLIHHNAYDENTAWGHRAEIELARAA

SEQ ID NO: 502624 - protein, 354 aa, unidentified
MAVTIVEEARPVTCRTAITGGVDTHADTHVAAALDPIGGLLGVREFPATPAGYAGLLGWLGGFGTVALAGIEGTGSYGAGLARHVAAAGIRVVEVDRSDRQDRRRQGKSDPLDAVSAARAAQSGRAGGAPKGRDGAVEAIRALMVAKRSARAERTQAINQARALLVTGPDDLRARFAGLTAAALAEAIAALRPRPGDAAQYAVRIALRELGRRVEFLDGQLDRLDDLIIPLVTARAPGLLSLYGVGPDTAALLLVAAGDHPERLRSEAAWAHLCGVAPIPASSGKVRRHRLNRGGNREANHALWRIVITRMSAHPATRAYIERRTKEGLSKKEIIRCLKRYVAREVYHHLRAGG

SEQ ID NO: 502625 - protein, 325 aa, unidentified
MRQPQSQVKPQTQVGLDVSSQTLDAHIRVDGKAFSVPNTDAGFDQLCEILSVYSVSMILMEATGGYEDNVACYLQLQGFDVVVINPRFARRFAQSMGRLAKTDRIDAAILAQMAFMIDSGPDRDRYIKPVTDEQRKQLSRLSSRRRQVVDLITIEKQRLTHADDYARESINGIISLLNVELKRIESDILRYVKKNFSELANRLLSIPGVGEQAMIVLIADLAELGHVNRRRISALLGVAPFNHDSGKFKGQRRIRDGRQTVRNVLYMGVISATRFNPVIKAFYDSLLLRGKPRKVAIIACMHKLIRIINAMMRTGKSFDMSLHGV

SEQ ID NO: 502626 - protein, 340 aa, unidentified
MQIAVLGIDLGKNSCSIVGFDDGGAVVLRRRMRREGVIKLAGKLRPCVVAMEACCGAHHLGRVLRAQGHEVRLMSPEYVRPYVKSQKNDDRDAEAIAEAATRPTMRFVELKSEEQLDMQTLHRARDRLVGERTALINQLRAVLLERGITVAQGRRKLERHLAGLDAQGGLSQKMRVLIEDMRLQWCELDRRIAELDKELTEWVRNEEAARRLMTIPGIGVLNATALIAAIGQGESFARGRDLAAWLGLVPRQLTTGGRPRLVGISKRGNKYLRKLLIHGARAALPTLLESPTSLGAWLRGLMTRMHKNAVVVALANKLARLAWAVLRHGEMFRFAVSAAA

SEQ ID NO: 502627 - protein, 403 aa, unidentified
MNNVVGIDVSKGKSMVSVLRPFGEVVAKPFSVGHTGSELKELADYLKSLDGETRVVMEHTGRYYEPVARFLHDEGVFVSAVNPKLIKDYGNNTLRKVKTDKADSRKIARYGIDNWAELRQHTPMDTIRMQLKTLNRQQSLYSKTKTMMKNNLIALLDQTYPGVNALFDSPVREDGSQKWVDFATTFWHVDCVRNMSLTAFAERYRKWCKRHGYNFSQSKAVEVHAGAQDLIAMLPRDALTKTMVRQAIDALNAISASLERLKAEMQALAAQLPEYPVVMTMHGVGDSLGPQLMAELGDVTRFTHRNAITAFAGVDPGADQSGTHEAKSTRVSKSGPPELRRALFLVMDCLLKTQPQDDPVYRFMDKKRAEGKPYLVYMTAGANKFLRIYYGRVKEYLASLEGN

SEQ ID NO: 502628 - protein, 418 aa, unidentified
MQTDLSQFTAIIGIDWADKKHDVCIQAATSGQRQIYQVPHKVDKLDEWARSLYRQYGGPIAVALELSKGPIVSALQKYDFFVIFPIDPTTLANHRKTFTLSGAKDDPTDAEYALDLLLKHTEHFKALNPQSVEMRTLMILVEQRRRLMNDRVRLTNRLRNALKQYYPQALEWFDRIDTPLFCDFIKRWPSLAQARRARKATLEKFFHQHNMNRKALLKRRVTAIKSAVPLTTDDAVIVPFRLQALTLVAQLEVALESIRIYDDEIAALAPQHPDYDLFSTLPGAGPSLAPRLLVAFGEQRDRFANAAELQKYAGIAPVTERSGQKHWIHWRWQCPTFLRQTFVEWAAQTINKSYWAGLYYYQQRAKGSSYQAAVRALAFKWIRILYRCWVTRTPYDEAKYLKALKDRGSPLLKMAETA

SEQ ID NO: 502629 - protein, 343 aa, unidentified
MYYLGIDCHKRFSYVTALDDQNQVKFKGKLGNNEDDFKQLFARLGGKCKATIETGYDWGIMYDMLQKLGIEVVLGHAQKIKLITKNPLKNDKRDSMALAQLLKADLIPVVYAPTWETRLKKSVVRERMFYVKIRTMAKNKVHKLLYRNGITLDGYSDAFGKAGRKYIESAVLPGTEKQILDSELEMIDMVNSKVKLMESSIKVEMKENKYVDLIKTLPGLGEILSRVIALEIVDISRFANAKKLASYSGVVPSEHSSSDNIYRGPIIKNCNTHLKQALVEGAWAAIRASAYFRCIYDNVKSRRGGNKAIVAVARQMAEIIFHVLKENRPYIERYSVQNKMAAL

SEQ ID NO: 502630 - protein, 411 aa, unidentified
MEAAVITAVGIDVSKSKSTVAVRRPGGEIVLRPFDVRHTNSDLKKLTSTLKKLGGDIRIVMEHTSTYWRPIALTLKEAGFFVSVVNAMLIHDFSDNTIRKLKTDRADALKIANYALTFWDILPPFNNEEETRLLLKMQSRANERITATATALRNGLIALADQTFSGVNIAFAPNTKNANGHEKWVDFFLRYWHKDCVCQYSMEAFTESYRGWCKRKNYKFRTDTAHKIYLLAQESVATLPKCESTKMLITQACKSLNAVCEAKQSTQLEMQRLAAMLPEYEVVMQMEGAGPITGPALMAEIGDVRRFKNKKALVAFAGIDAPPFQSGAFESKSRHVSKRGSPHLRRTIFIISNIILTRSNPENAVYCFMDKKRSEGKHYYVYTVAGSAKFLRVYYARVTEFLRSQPSYDAY

SEQ ID NO: 502631 - protein, 341 aa, unidentified
MSLIKAVGIDLAKLVFSIHGVDANDKCKLRKTVKRNKLLAEITKLPPCIIAMEACSGAHYWAREFTKLGHDVRIMASKFVIPYRQNEKNDANDAEAICEAATRPKTRFVSIKSEEQQAVLCLHRIRQGAIKDRTARINRLRGLLSEFGIIIPKGRYPLQNAISGILEDAENSLPFLARELLNDLWQSIKGLNEEILKYDRKLYALANQMKDAKRLMSIPGIGEITATAVVATVNDAKHFDTSRSFAAWIGLVPRQNSTGGVVRLGRISKRGEKHIRTSLIHGARAVIANCKNKTDRTSLWVKDLVERRGFKRATVALAAKNARLIWALLHSEKEYQVDYVK

SEQ ID NO: 502632 - protein, 323 aa, unidentified
MSSFVGVDIAKNTFDIATHLPNGKHKTKAKLANDAKGFKEFEAWLLKQAEPSALIVMEATSVYHLELAEFVYNKGYRVCVVNPATTHAYAASELRRIKTDKSDAKLIADFAREKARKLKLWAPEPLKYRQLKAMVRRLDDLQEMEQMELNRLEVSDEKVKDSINSVLRHIEKEIAETHRAIKNHIDDDPDMRQMRDLIVTIDGIGEKTIERLLAELGDLRQYDDPRKLVAAAGLNPKLQDSGLLKGRTVISKIGSARVRAGLYMPGLVALRHNEAIIAMKDRLKANGKAPKQIICAAMRKLLHFVYGVLKSGQPFDPKLALAR

SEQ ID NO: 502633 - protein, 455 aa, unidentified
MVDEAIFILFVQEKKKSFLATMTLINFVAANQKYYAFNLLSVFIMVFWSVQYLLQHLLVQTQLSDQLLQPLILILQLPQTPQFRHARPGKFFLPVNGIDYLLPLRLTVRNVLTRRITMNIVFLGIDLAKNVFQLCGLNQAGKPVYTKRTGRKELLQTLANIPACLIGIEASTGAFYWQREFEKLGHKVKVISPQSVKPFVRGQKNDGNDAQAIAVALMQPTMQFVPPKSPEQQDIQALHRARQRIVNHRTATVCQIRGLLLDRGIPIGSAVSRARRAIPLILEDAENGLSSRMRRTIAELYDLFNDLERRIHFFDKEIETVFRQSEACQRIAKVKGIGPKTATAVAAAIGKGTEFKNGRHFAAWLGLVPRQHSSGDRQVLMNMTKKGDKHLRTLFIHGARAVVRVATNNNDGHMNQWVNQLKERRGFNKTTVAVANKNARIIWSMLRNDTGYQVV

SEQ ID NO: 502634 - protein, 383 aa, unidentified
MEQVRKKADIKKVKNQTREKDNQREKNKRQSKEEFAGLYIFVGIDVHKKSWHVTIYVEDVLYKSYSMSPPSSKQLISYLKDNFPGGEFYLVYEAGFSGYGLYDDAKEAGMECIVVSPADVPMSNKNKKFKTDSHDSKNLAKQYKSGLLEGIYVPDAELREYRALVRLRNKLVKDRTRIKNYTKSNLMFFGKEILEEDGDNITSWSRKYFHLLSELQYRTDTGSKVIERLKDTTQYYNEQIIRVDKEILELSKHPRFAEDVKILRSVPGISTLTAMVILVEIGDFSRFEDTHKLKSYVGLIPEEHSSGETEIKSGITKRGNKFLKRVIIEASWVAIRKDKTLLKKYTKATKRMRGSKAIILVAGSLLSRIRSIMRQRVLYRVAV

SEQ ID NO: 502635 - protein, 426 aa, unidentified
MSITQNEKISQVKNTTLVVGIDISSETHYARAFDWRGLELSKIFKFESTSYGFENFSEWLAEICKTNQKDNIIIGAEPTGHYWFTLAEYLKEHDIKFVFVNPMHVKRTKELDDNHPSKNDRKDPKVIAKLVIEGRYLIPYIPEDIYAELRIMNENRMRINREMIAIENRIKRWFAIYFPEYKNVFGNWECDSSIEVLINAPLPADAVNMGAEAINGLWRAKKIRAVGMKRANLLVETAKSSVGVKHGASAARCEISMLIEDYLRKKEQMQRVVEILETLCIQVPNAEKLLNIKGVGILTVASFFGEVGDIRRFDSPKQIQKLAGLAITENSSGKYKGRSCISKRGRKLLRYTLFQAVMSMTMHLPEFRELHRYYTTRDKNPLKGKQSKIALCCKVIRIFYALLIKGTEYDSQKLMKDIVRPELMAA

SEQ ID NO: 502636 - protein, 453 aa, unidentified
MGKTTSGDYSNLNTVNPNAAAVDIGSTMHMAAVNPESTDMPVRAFGTFTRDLHDLADWFRSCGVTSVAMESTGVYWIPAFEILEEHGFDVILVNARYAKNVPGRKTDVSDAGWLRQLHSYGLLRGSFRPEAEIATLRSYTRQRERLVEYAAAHIQHMQKALMEMNLQLHHVVSDITGATGMRIIRAIVAGERDPGVLTSLRDVRCHSSVETIRAALVGNDRDEHVFALTQSLELYDTYQAKMADCDGKLEAAVAALTIKASGSIAPLPKARMRSKQVNAPSFDVRAALHGVVGVDLTQIHGLGPSLALKLVAECGTDLKAWPSAKHFTSWLCLAPGNKISGGRLLSSRTRRSSSRAAALLRLAAVTVGRSETALGAFYRRLSSRVGKQKAVTATARKIAVLFYNTLRFGLTYRDPGAEAYDQRHRSRVLANLKRRARSLGFELAPNTDTAAVS

SEQ ID NO: 502637 - protein, 396 aa, unidentified
MFIVGIDIAKRSHEAIVLEDSGKVAHKAFSFKNNVSGFQRLLDILLSLSADPNDFLIGMESTGHYWLALYSALRKHGFSVCVLNPIQSNALRNLYIRQVKTDQRDCLIIADVLRFGRYQQCNVPPSELYELRELCRARSFLVDTTADLKHKVIALLDQAFPEYETLFTNIFGLTSSELLLNCSTPEEILAIDTDKLAKILETPSRKRFGRAKAEQIKETAANSFGVILEFGSAGFLIKQYMEHIRYTESQIAQLEEKIAELFSHFDTQLTTIPGIGPTLGATIFSEIGDISRFPSPAKLAAFAGIDPSVKQSGEFQSSHAHMSKRGSPYLRRAIWQASVIAAMHAPAIRAYFEKKRSQGKSYMVAIGHVTRKMNNIIFAVLSVNVNEKVSQALMKK

SEQ ID NO: 502638 - protein, 353 aa, unidentified
MQSMYYIGLDVHKKSISYCVKDGSGRIQKDGSGRIHAEGAIPATRSDLDRWMRTLPQPWTAAMEATLFTGWIYDHLKPHATALKVAHPLMLRAIAAAKKKNDRIDANKITDCLRCDFLPECYMASTEIRERRRTLRYRNLLVRQAVQLKNKIAVLLMEAGVSYNKQKLHKVGYFRELLATNQDIDDGLRSLLRMCRETVVRLGRTESALVRSLGRDPLLVERVERLMTIPAVGPVTALTWVLEVGDVRRFSSIKKAISYCGLCGAEKSSAEAIKRTPLSKQRNKHLQSVLIEAAKLAPRRSPELALVYDQEKQKGNANRATLAVARKLVAYLLAVDRRQKEFLTVERENRTAA

SEQ ID NO: 502639 - protein, 427 aa, unidentified
MGRLKIVYPVCCGMDVHRDFVIACIATTNSQGVTDYLSKRFSTYSGGLRDLAAWLAENNCKDVCMESTGKYWFPVHNILERSCNLVVSHPKFVKAIKGKKTDKKDAMWIADLFKHDLVRGSFIPPEEIRQLRDLCRYWVKLTAYNTGEKNRAQNCLTVSNLKLDSVFSNVFGKSASAIISYMLEHPGEQFPVAPFVHPRCKSPIEDIQAAVDGAFSPWQAEKLKVIRTHMDDLASLKQSLEALIFKLAEPFMRQIELLLTVPGISEPMTAIRIIAEIGADMSQFESSKHLCSWAGLTPQNNESAGKKKTTRIGKAGHYIKPLLLQCAIAACNPRSKRYPHLLTKYQQLYKRRGMKKARVAIARRLLTAIFHMLLNDEPYTPFVVSTNPAILDYRVLTPDQALALLRSRGYIIQEPSIVLTEGIAPSG

SEQ ID NO: 502640 - protein, 460 aa, unidentified
MEHVPVIGIDLAVTAASELAVASGATIEASRKVASTPRGLTEGIRQAAKGRAVAIVVESTAMAWFVAAVAALRSGVEYRLYRVSGRKSAALRAFYRSHTKTDHIDARVLARMPAVDDSLLTYSLPAPSELAMKRLVVARHKLTTETTKLQNRVRSLLAWAAPGVVKAAGGTVSTGLVRVLGRWSDLTALAKARVATIALQGDWGTERAEAVRTAAAEAVAFYEGHVDFSAVGLELELSLAQLGFLASQVDRLEERIAALHTQLYPKDRLLTIPGIGPVVAGVVRAVVGDLSRFANQASFRAYTGLVPRENSSGEVRQRGRISKAGPSVLRWALYLAGDAARHCDPALAELYRRLMVERGRTHTQAVCAVASHLAGRIYAVAHQDRDYVWRDLEGNEITKEEARAIAQSLRVDSETRTRLRARREGGPRTPYARQPEVPQDVTQPSGDKLIEAALELATKA

SEQ ID NO: 502641 - protein, 402 aa, unidentified
MNAVGIDVSKGKSMVAIMRPFGEIVSAPFEIKHTASDINSLVELINSVEGESRIVMEHTGRYYEVLAHQLSEANLFVSAINPKLIKDFDNDSLRKVKSDKADAVKIARYALDKWQNLKQYSVMDELRNQLKTMNRQFSFYMKHKTAMKNNLIGILDQTYPGVNTYFDSPARSDGSQKWVDFASTYWHVDCVRKMSLNAFIDHYQNWCKRKKYNFSQSKAEEIYGKAKELVPVLPKDNITKLIIKQAVNQLNIASATVESLRTLMNETASQLPEYPVVMAMKGVGTSLGPQLMAEIGDVSRFTHKGAITAFAGVDPGVNESGSYEQKSVPTSKRGSSDLRKTLFQVMDVLIKTHPQDDPVYQFIDKKRAQGKPYYVYMTAGANKFLRIYYGRVKEYLSSLPES

SEQ ID NO: 502642 - protein, 311 aa, unidentified
MEREIFVGIDVSKDRLDGFVRPAGEAFSVARDAEGVKALAVRLGQLDAGLVVLEATGGFEQVVAAGLAAAKLPVVVVNPRQIRDFARAMGRLAKTDRIDAEVIALFAERVRPPVRALPDHQARLLDELVTRRRQVIEMIVAEANRARLLENRRLKKRIERHRAALQEELSEIEQDLDETIRGTPIWQETDDLLKSVPGVGDTLARTLIAELPELGTLDRRKIAALVGLAPFNRDSGHLRGKRTIWGGRASVRAPLYMAALVASRHNPTIAAFYKRLRTAGKPAKVALVACMRKLLTILNAILRDRKPWQTA

SEQ ID NO: 502643 - protein, 341 aa, unidentified
MDTVSLVGIDLGKHCFHLHAQDGSGRMVLRKKLTRNQMFALLGNFPSCTVVMEACAGAHWIARRLQALGHEAKLISPHFVKPFRQGNKNDFADAQAICEAASRPSMRFVSPRNEAQQVVSALHRVREALVRERTGTINQIHAFLLEFGISLPRGMAVIRRLPAVLETQALPPKLVAVLERLQAHFKYLDEQIGQLEHELLTQLHEDERSERLLEIPGIGPITASVLMSELGDAHQYGSARQFAASIGLVPRQYSTGGKPTLLGISKRGDKELRRLLVQCARVIMLGIERRTDSLGTWVRSLLARRHSNVVACALANKLARIAWAILAKGTHYRSAPAALAA

SEQ ID NO: 502644 - protein, 423 aa, unidentified
MNTSILCVGADVHLKEITLRAVDKLTNDEVIAPFNVANNLPGAQSAASRLAEVATRLGYTHIEIGYEATGMLWIPFHRFLSTCQLLEPFDLQQVCFNPKLVADFKDALVLRGPKDDERDAFDVAARVQVGHWPDSYVPDDFWQGLRRLTRYRFKLSRNLSQEKMRFQSYAFLKCSDWKRVKAFSDVFGATSVALLTEFTATELREMNHDQLADLIARRGRGRFYDPDATARTVQQALCTSYPIDPQMDEMVTATLATAWEHIRAIKRLMKRLDQQISRCIEPVPNPIITVKGLGPVITAGLLAEIVDISRFPEHKHLAQYFGISWTKRSSGGFVSQDSRMTKVGNPYGRYYFVIGADKLRLFNLEYKAFYWRKYNEVSKHQHKRALVFTARKLVRLVHALLTKNVPYVRPRTTIVLEEADLLQ

SEQ ID NO: 502645 - protein, 355 aa, unidentified
MTSIKYIGMDVHTESTSIAVRNSISKIVMECVIETKASTLLQFLDGLRGDLRVVFEEGTWATWLYDLLKPHVTEVLVCNTRKNAVRKGSKSDRIDARKLSEQLYMNNVKSVYHGEHGLRMMKELARSYLTIIKDLTRVMNRLKALYRSWGIPCAGKEVYARRYRAEWLAKISEAAVRRRAEHYYQQLDALLPLRQEARRDLLIESRKHKIWKLLRLIPAIGPIRAAILIAVMQTPHRFRTKRNLWTYSGLGLETYDSAEYRAVQGQLERSRKQATVRGLNKDYNHDLKDIFKGAAMRASTAPGPLRDFYENLLAKGRKPTMARLTLARKIAAITLIVWKKEVRFDANYLKPQQAA

SEQ ID NO: 502646 - protein, 345 aa, unidentified
MEITTVGLDIAKRVFQLHGVDAAGKAVLRRKLQRSEVLAFFKALPPCLVGIEACGTAHYWAREIRELGHEVRLMPPSYVAPYVKRGKTDAADAAAICEAVTRPTMRFVPIKTAEQQAVLMLHRTRDLLVRQRTMLVNALRGHMAELGVIAPQGIARVADLMAVLLGEDTTNVPALAREALRGLAAELEALDRRVKEIEVAIVTWHKDNEASRRLATIPGVGPITASAIVATITDPLQFHSARHLAAWIGLVPRQHSSGGKQRQGGISKQGDRYLRRLLVLGATAVIRHSRSKSTAEAGWLKSLLERRPARLVSVAQANKTARIVWALLVRGEAYRMPAAVPGGAA

SEQ ID NO: 502647 - protein, 455 aa, unidentified
MAKQKIHKTPAIETVNVGAAAVDIGSREHMAAVSPEVTDAPVRAFGTFTHDLHDLANWFKSHGVTSIAMESTGVYWIPAYEILEQQGFEVILVNARYAKNVPGRKTDVSDASWLRQLHSYGLLRGSFRPTAEIATLRAYLRQRERLVEYAAAHIQHMQKALMEMNLQLHHVVSDITGVTGMKIIRAMVAGERDLDVLASHRDVRCRVSTETIKAALNGNDRAEHIFALTQSLELYDFYQSKMLECDRRLEATLAALGADTAHDPSELPRPRTKTKQVSTPSFDVRAALYGVLGVDLTQIHGMGPSLSLKLVGECGTDLRAWPSAKHFTSWLCLAPGNKISGGKVLSSRTRRSSSRAAALLRLAAVTIGRSDTALGAFYRRLAARAGKAKAVTATARKIAVLFYNALRHGMTYQDPGASHYEERYRDRVLGNLKRRAKSFGYDLRELPPEEEMTVS

SEQ ID NO: 502648 - protein, 391 aa, unidentified
MIYVGIDVAKDKHDCFIINSDGEVLFKAFSIANNRNGFNDLYQKIESVMEDVTKVKVGLEATGHYSYNLLGYLIDKGLPTYVINPLHTNLYRKSLSLRQTKTDKVDARTIASMLMSDVNLKSYSDTSYHNEELKSLTRYRFDKVKQRAKLKSSVSRLVCILFPELEKLVPTLHMASVYTMLSEFPDAKQVANAHLTRLTNLLSESSKGRYGKETAITFRNAARTSIGSNMPAKSLELKHTIKLIQELSSEIDEIENEIKLIMDEINSPILSIPGINYRMGAMIIAEIGDFNRFDSPDKILAYAGFSPSTYQSGQLDGAYSHMEKRGSRYLRYALYNAAKYVCNWDPTFAEYLAKKRAEGKHYNVAISHAVKKLIRVIYHLEKTNQQYIKAV

SEQ ID NO: 502649 - protein, 428 aa, unidentified
MKPIYRRCCGIDVHKKSVSVCVLPPEGQQGTVRRETFRTFLRDLKRLRTWLKNCKVTEVAMESTGQYWRPLWNVLEGHIASLVLLNPAHVKGLAGRKTDRRDAEWLARLQEREQLRGSFIPPVEIRELRELTRTRVHWLEDSNRMKNRIAQVCEAGNIKISSVATDLFGVSGRRMLAALIENQRDPGWIADYARGPLRNKRDQLEMALEGTLTDHQRGLLTRLMRQVTAQDGEIAELTREIEMRIAPWEEMIQRMTQIPGIERVSAWTILAEIGTDMSVFPDVRHLASWAAVCPGNRESGGKRMSGKTRKGNCYLRRILCQAAWAATRKKGSYLGVLYRRVRGRRGHQKAIMAVAHQLLTVIYHMLKDNQPYKEPGTAYYDEKRKPEITRRLVQRLERLGYQVMLEVPVTLADTRDFVSNPPESGPPK

SEQ ID NO: 502650 - protein, 433 aa, unidentified
MQDVQDEPLFVQRVAGLDIAKTEVEVTIRVPSDTQPGRRQQETRTFGTTRKELLALADWLRCWGVTKAGMEATGDYWKPVFFLLESRGFDCDLYNAAQVKALPGRPKTDRADSIWLAKIVERGMISSSFVPPEDIRKLRTHTRYRRHLTQARTAEKQRVEKLLEDGHLKLSSVISDIHGVSGRDMLSGLAAGQRDPRALAQLARGTMRGKIKRLEEALECSFFTNQHAAVLAMMLTTIDHYTAQIEQLTAKIEALAEPYLHQITQLDAVPGIGTICAQDIIAEIGVDMTVFPTASHLVSWARWSPQVKQSAGKRKGSNATGRGNPYLGAALGEATISTSRTQSFLGARYRRLAKRMPKKKALVATGNSMLTSVHALLADPDACYQDLGADYYEQRMHARRQARNHVKSLERLGYKVTIEALSPDTSQPLTATA

SEQ ID NO: 502651 - protein, 339 aa, unidentified
MSKVLKNFVGIDISKTWFDAAIISSNNFAEVIHQQFAQTPEGYHKFHQWLYHHEVLLNNETLLCMEYTGVYNTGLVQFLVKEDAQFWVEMPLRIKRASGLERGSDDRSAACKIAWYALRYCDQAKLWKPCDTSIGRLKHLIAQRERLVTSIKHLTVPVEELKQCGCTEDAKLLERIQKPVIRSLQKAKEKIETMIAKIVQQDEQLCKKVKLAQSVNGIGMVTAISLLVYTKGFTAFNSAKEMACYCGVVPFNKTSGSSVRYKPSVSPFANMKLKKLLHLCAMSAIQNDAELKLYYQRKILEGKNKMSVINAVRNKLIHRVFAVIRDERLFEDKYTERCA

SEQ ID NO: 502652 - protein, 411 aa, unidentified
MVMIGVDAHMRTHTFVAVDELGRKLAERTLSATSEGHLDAIEWAARWPERTFAPEDCRHVTRRLEGDLLRAGEAVLRVPARLMASERRAARSRGKSDPIDALAVARAAVREPDLPVARLDGEARQLRLLVDHRDDLVAERTRIQSRLRWHLHELFPELVVPPKALRRQHVLDSLEERLCAESGTVAVIARGLVIRTRELTIRANELEREITVIVRRLAPTLPLVAGCGTLSAAKIVGEVAGADRFRSRAAFARWNGTAPIPVWSGNSRNQRLNRGGNRQVNAALHRIAITQWRGVAARHHIRQAMTLRQRGSLRSRTRRRHCLPKMGWRRLRRSKLLHSLRNQAGSIGPSPDNHASDGPCFTVTESQHSSQQTRPRASHADARRRRRPAGQQPGRARMRRCGTIRHELRQY

SEQ ID NO: 502653 - protein, 344 aa, unidentified
MSLIKVLGIDLGKSSFHAIGRDESHNPIFRKKFTRRKLIEFLQQLPPCLIAFEACGGAHWLGRKCQSMGHQVKLLPPQYVKPYVKGNKNDFIDAEAISEAVTRPNMRFVAVKSEQAQTISAIHKSRQGYVKERTACMSRIGALLLEFGISLPQGHSTMRKLFNWLAQQTETVPPLLMQELIEQHDYYLLLSERINIQDNKLKQLIANSELGQLLKTIPGIGDMTASYCLATIDSASEFKNGRNMAAWLGLVPAQYSTGGKPKLLGISKRGNKTLRTLFVHAARAVLSRPDKTGKVFGKWLTELRASKPFNVACVALANKLARIVWAVMKSKQAFNPQELNPNLQ

SEQ ID NO: 502654 - protein, 458 aa, unidentified
MGRKGKRTKGIEEAHPFAGMSQVNPNAAGVDIGAVEIVVCVAGENNTQIVKAFGNYTVDLQSIGTWLKEHKIKTVAMESTGVYWIPLFEVLESMGFKGLLISSRSLRRVPGRKSDIEDAQWIQTLHSYGLLESSFRPQADLVALRTMLRHRAQLLEHRAPHIQHMQKALLQMNVQLSQALSDVMGETGQAIIRTIVKGERAPQLLAAFRDPGCKKSAEEIGKALTGTWRDEHLFVLKQSLELYDFYTQQLEVCDQEIDRQYALIRPDWETGELPPIPKKKQKTHSKNAPENAKEIRLHLKRINGVDLSLVDGFGVSLAQTVTMEVGSNVSEKFPTEGNFCSWLGVAPKHEISGGKVLKNKTLKTKNRAGQAFRMAAQSVKNSDSVFGVMYKRFRARQGPAQATVSTAHAIARVVYRMLKYKVEYETISVNEYEKKYEEQQVKYFKKKAAKLGYQLVPA

SEQ ID NO: 502655 - protein, 365 aa, unidentified
MKKISTMQTSGKNIFEGHLTIGLDLGDRSSAYCVLNEAGEIVLEHKLATTPEAMKQVFGSMPRCRMAMETGTHSPWVSRLLTALGHEVIVGHAQKVRLITKSRRKDDRLDARTLARLARIDPGLLSPVKHRSAQAQLHLTEIRARAVLVSARTALVNAARGLVKSYGERLRKCGTEQFRRETTSGLSTGLREGLEPLLREVESLNERIQEYDRRIEKMANQTYPETALLKQVKGVGNLIATAYVLTIEDAHRFRKSRDAGCFVGLQPGRRDSGESEPQMRISKEGDEYLRTLLVQGAHYILGPFGEDCDLRRWGQKLSARGGKNAKKRAVVAVARKLAVLLHRLWVSGEVYEPLRNSQKMMNEAA

SEQ ID NO: 502656 - protein, 355 aa, unidentified
MTNTIPMDVIIGVDTHKDVHAAAISGAGVHLATTTVPASSKGYGALEAWAKSMGAVQAFGIEGTGSYGAGLSRFLRERGHTVVEVNRPNRQLRYQQGKSDAVDAESAARAVLAGHAAGQPKSGTGAVEMIRHLKIARDTAVKARTQAMQTLKAIIVCSPDALREQLDQVSGKMTLLRRLVALRPGPLTSTLASAKASLRAIARRWLLLDAEIKQHDTHLQTLTAARAPELLKAHGIASGTAAEMLLLVGDNPERIHSEAAFAKLCGVCPIPASSGKTIRYRLNRGGNRQANAALYRVVIIRMRGHQPTLDYNRRRTAEGKSKSEIIRCLKRYVAREIFGYLCPRPALAGAAATSS

SEQ ID NO: 502657 - protein, 339 aa, unidentified
MFYAGIDLHKQSITVCVVDKHLNVQIRKRLMCANESAIIAFFTELGLFRAVVEATASHEWFVKLIESLAEKVVLAHPGKLRIIAESTRKSDRLDAQILAEFLALDIIPTSYRATPRQRDHRCLVRQRNTIQRWITSVKNRIRRIMSNYNADRQDLFSKAGQEFVSTYSLSAADRFSMDQLIAEWNFFRQQLQAANQALKGFASAAPIREQHQRELLQSIPGVGFVTTEVVLSEIADIDRFDSQKQVVAYAGLAPGQRESAGKSKELHIEKSGSRHLRWALVEAAWQLVRRVPRWKTIYERLKKRLKAKKAIVAIARRLLGMMVAIMKSGEPFSVTHQPS

SEQ ID NO: 502658 - protein, 460 aa, unidentified
MPGSQQNTRGRTAGRLSTINPDAAGLDVGATFHVVAVPGDRDDRPVRTFRTFSGDLHQLADWLTAVGITTVAMESTGVYWIPVFEVLEAQGFEALLVNARDVKHVPGRKTDVNDAQWLQQLHQHGLLRGSFRPRDGVVRLRAYLRHRERLVDYAAAHIQHMQKALTQMNVQLHHVVTDITGVTGMRIIRAIVAGTQAPAALAEFRDARCAASPETIREALTGNYRPEHVFALRHALELYDVHQAKIAECDTEIAAVLGTLNEARAMPEAPLPAVRHTKARNEPKFDARPALYTLLGVDLTQIHGFGPYTVLRLVAECGDDMSKWPTAKHFTSWLCLAPGNKVSGGRLLSSKTRRSSNRAATLLRIAAVNIGRTETALGAFYRRLAARIGKPKAVTATARKLATLFYTALRFGLAYADPGASYYEERYRQRVLDTLRRRARHLGFALVADPAAAEAPDGVS

SEQ ID NO: 502659 - protein, 343 aa, unidentified
MFYAGIDLHKQSITVCVVNEARKIEKRKRLMCANEAAIVAFFKEVIQELGPFRAVVEATASYEWLIKLIEPLADKVILAHPGKLRVIAESTRKSDRLDAQVLAEFLSRDMVPASYRPTPRQRDHRGLVRQRSSIQRRITSVKNRMRRIMSNYNADRPDLFRKVGQEYVSSYPLSAADRICMNQLTSEWLFFLQQLKSANQALVDFAGTAPIREQHQRELLQSIPGVGFVITEVVLSEIADIDRFDSQKQVVAYAGLAPGQRESAGKMKELHIEKAGSRYLRWALVEAAWQLVYRVPRWKTIYERLKKRLKAKKAIVAIARRLLGMMVAIMKSGEPFTATHQPA

SEQ ID NO: 502660 - protein, 358 aa, unidentified
MTNLAEKLDFSGHTISCGIDVHLKSWTVSLYLGKQYLKSFVQSPPSVEGLWNFLLTNYPEAHYECAYESGFCGFWIQRAFAARSISCIAVNAADVPRTDKGTKNKNDRNDSRRIAAALQAGQLEGVYVPDPELEADRQLVRLNERYSNDLTRSKNRIKGLLRLMGIEIPQKFGKANWSGAFVKWLKAVSCGEPSIRAVLDRQLSIMEAIKVQKLDTLREMRKLMGKVRYRTISGLLCSIPGIGPVTAAVLIVEIGDISRFEKFDRLNSFVGLCPMQHSTGENDRKGSITTRQHRRLRYILVEAAWVAVRTDPALTLCYSRWTARVGSRRAIIKIARKLLSRIRHVWVGGAPYVTGLVK

SEQ ID NO: 502661 - protein, 351 aa, unidentified
MDRYVGVDGHSRSCTFGIVSASGRRLESKVVETNGRALVEAVRLIPGRVHVCLEEGTQSAWLYELFKPHVAEVVVSMPSKAKGAKDDKRDAWARAQELRLGAVETRVFKAPQHLAALRSAVRAYGFAVTDVVRAKNRLKAVFLGRGIVADAGVYDPERRDGWLAKLSGPYRQLAEVLSRQLDLVVPAWDEAESWLLTESKSHPIIRKLLTAPGMGPIRTAQVVAIVAVPDRFRTRQQFWSYCGLGIVTRSSADWRPGRNGGLERAQTLSTRGLTRKRHPLLKAVFKGAAMTVITQLPNDPLHAHYQRMIEKGIKPPLARLTVARRIAATVLSMWKNQEVYDSKRHAVVEQP

SEQ ID NO: 502662 - protein, 333 aa, unidentified
MKLLQRWRDEAGRAGHTVQRIAVAYEAAGDGFWLARWLRAHGIEAYAIHPSSVPVSREHRRAKTDRLDTELLMRAFLGWLRGEKRHCSMAAIPTLEEEDARRPNRERGTLVGEQTRLINRVKAILARFGVRSFRLSLRQAADRLESIRTAEGTPLPDNTRAELYRFLERLNLVRAQIRAIEQERLRRLAAAPAAANGPHAMVRLLARIIGIGVETADMPVHEMLSRKLRDRRAVARYAGLTGSPDESGKRRREKGLARAGNARVRRGTIQLAWRFLRFQKDSDLARWFQARTTDGRRTTRKTMIVALARKLLIALWRFVTAGEVPQGAIVRAA

SEQ ID NO: 502663 - protein, 365 aa, unidentified
MNAIHYIGFDVHKKAISFCVKTADGQIVEEGRLQAERTVLRRWAAGRKQAWHGAMEATLFSAWIYDTLKPYAQQLSMGHPAKMKAITAGKNKSDQIDARTIADLLRCNLLPACYVLSPQLRDLRRLLRYRNLVVQQSVRMQNKVAGLLMESGTPFNKQKLHQKKYFSDLMKSLEEVPESVKDLLRMSRGSMEMFQSTQKQLVKRLLSEPALEQRVERLMSIRAVGPITALTWALEIADPHRFASIADAVSYCGLTAAFRSSAGKLQRGPISKQRNAWLQPVLIEAAKLAPLWNPQLAAVHARALERGHANRATLQVARKLVAYLLAVDKSGQPFQVRTPPPPASAKARKKSARKSKKAVALAPAA

SEQ ID NO: 502664 - protein, 430 aa, unidentified
MTKPQLTPTQGILVAIDIGKTRNEVLIEIPGQARRRRLTVLNTRADYDRLIDLLSGLGQPVTCAFEATGNYHRPLAWRLLQAGFTVRLISSLALARTREALHNGWDKNDPKDAQVALHMLRIGASQHYHDPLAAGLNDIQEVSKTHEAISKAKTEVLHRILTHHLPLYFPEIGRFRHNSRSDWFFAFLDRFPTPGSITALSKEAFIAAAWGVVGRKVAKERLLGDIYETARASIGLPIPIDAPAVRLFRLVIAEARSLIEQRNALEAMAIELLHESPDYKLLCRIPGVGPITALTILAEAGDLRRFGHHRQFLKFCGLDLATHQSGAFRGQTKLSKYGNARLRRALWLAGQVAIRQKENSFRDKFERTIARDRHNADLRRKALTAITAKMARVVHAIIKSGADYRPFVEEPVPGGRTSLSMGREGATATL

SEQ ID NO: 502665 - protein, 353 aa, unidentified
MKPNTESAAAPLAVIGVDIGKEVFHLVGFGADGKIAFRKKIRRLGLKEAFEQLPPCIVGMEACLSAHFVSRMLRALGHEPRIIPAIYVKPFLKGQKNDYNDAEAIAEAALRPNLRIVKEKSQDQLDLQACHRVRSRLVSRRTATINQIRGFLIEQGIAVRSGARALRNSLFTILENRKDEISPRTTKLILGLYEDWCHLDERIDTVTEEIESLSRAEPKCQRLMSVPGVGPLISTGIVAAIGTGEAFERGRDFAAWLGLVPRQHSTGGRSILGRISKRGSKYLRTLLIQAAKVLLMRPHNWPRYSFGAWLKTASERLHRNKLAVALANKLARIAWSVLRNDKAFDTHLVTEAI

SEQ ID NO: 502666 - protein, 348 aa, unidentified
MNLKRIGLDTSKAVFTLHGVGQDERAVLRRDMRRAEMEAFFAKLPPTHVALEACGGSHHWGRRLAAMGHTVQLIPPQYVKPFVRRGKNDRNDAEAISEAAARPDMPSVPVRSAEQQAEAIVLSARELLVRQRTQLVNAVRGHAAEFGVVAAKTISQLPGLLEAVAAAETVPATAKEMLAFLGEQVAQLDDQIADLERRMKQQHKANPVSQLLAEVPGIGPIGALSLALTIDPGRFQSGRHFAAWLGLVPKEHSTGGRQRLGGISRAGNERLRQLLVLGAMAVIRFAKPGSKSASAWLLALLERKPRKLAAVALANKMARVAWAMMATGEAYRGSKKVATPAAGAAAAA

SEQ ID NO: 502667 - protein, 394 aa, unidentified
MKLIGIDIGKNKHFFCIMDQQTGEIISQPVSFSNDKEGFDFLIQKIKSYSKDSVLIGMEDTGHYHFALLKYLLNLQYTVALINPKTTDFNRKIQGGITKNDKLDTINICDVLDTPERKKQYRITKVNSFDLYEQKQLTRHHHNLKEEENVYKNRLQKCIDIVFPEFNNLFNSKYGTVYMNILKMFGSAENIANTDIRTIRKCFEIEGRGNRISLTPERLKECAESSIGISSSAEVIQIKHLTAQIELIEEQLTEIDKKIEEFSIQNNSPILSIPGISHFSGTSILAELGDISNYSKPSQIIKFAGVAPLHYESSQFNAQHTSITKKGSKYLRKTLYQIILPVIRHNQVFYKYYQLKISQGKGHRCAQGHCVRKLLRIIYHLLKTNQQFDPQLLR

SEQ ID NO: 502668 - protein, 373 aa, unidentified
MNYSTVYVGMDVHKETFSLCCYTNEKEQAEYPQKVDGHYSKVINYIEAMRFHYGDDALFICGYEAGCLGFTLYHQLTDHNVKCVILAPTTMLQQKGKKKVKTDKRDAALIARCLAHHDYSPVHIPTEQDEQTKEYIRMRDDHKLALKKVKQQILSFCLRHNYRFYGTTNHWTQAHLKWLRSLKPEGLYAEILQEYLLTYDNLTDKLERFDKRIEELASNETYQENVHKLSCFIGVKTVTALAVLTEVGDFKRFASAQHFASYIGLTPGEDSSGGDQNRLGITKAGNRHVRCLLVEAAQSYSRGQIGFKSKALKARQDGNDPGIIAYADKANERLRRKYYRMVLKNNKRTNVAKTAVARELACFMWGMITGNVA

SEQ ID NO: 502669 - protein, 393 aa, unidentified
MLLETRIDAPTAIRTQIAAIFVSLELSRSNWLITSLSPGNGEKMSKHGVAAGDMAGLLKLFAELQRKALARTGQSYPIITIQEAGLDGFWIHRALQQEGIESHVVDAASIAAPRRRRRAKTDKIDGEALLRVLLAYKRGEPRVCAMAVAPSPEEEDRRRLSREREVLIGERISHVNRIKGLLFAQGICGYAPLRRNRRAQLAALRTGDGRALPQRVKLQIDRELDRLELLLAQLKAVEAERAALLAELTTRVDDEKPSHPLAMLLGVKGIGAEFAASLWLECFYRSFANRRQLAAYAGLAATPWQSGSIAHEQGVSKAGNPRVRTKMVQLAWLWLRHQPQSALARWFHEQGKRERKNWRKSAIVALARKLLVALWKYISAGVVIEGAVLKGTA

SEQ ID NO: 502670 - protein, 375 aa, unidentified
MKNKVRFLGLDVHAETIAVAIAEPDGEVRSLGTIANRAESVRKLVKKLGPAEHLKACYEAGPTGYVLYWQLAELGVACEVIAPTLVPMKAGDRVKTDRRDAERLARSYRSGDLTAVWVPDEGSEALRDLVRAREAAKQDQLRARHRLGKFLLRMGQRPAVGMKAWTAPYMAWVRQVHFTQLAREATMLDYLYEVDHMGERVKRLEQSITEAVKLATPAVQEVVKGLQALRGIAEISAVTIVAELGSITRFENARQLMGYSGAVPSEDSSGQRTRRGSITKTGNAHLRRIVVEAAWSYRHRPAIGPRLRKRQEGVPEPIKEIAWKAQVRLTKRYARLAAAGKDQRKIITAVGRELLGFIWAIGIKAEAAGKLRLVA

SEQ ID NO: 502671 - protein, 394 aa, unidentified
MDVEKKAWAGVDVGKGFHWAHVVDASGEALLSRRVENDEADLLALVEEVLRLAGNVVWAVDQPGGTAALLLALLWEREQKVIYLPGLAVDRARDGYRGESKTDRRDARVIADQARMRGDLGELSPGDGELAELQLLLSRRRDHVADRTRAVTRLRETLLVLFPALERALNLNSAGPLELVARYHSADAVRRAGRKRIAAYLKKRGVAKADTLAEKVVAAAKGQSATLPAQDVAASIVAELAAEVLSLKGRLNALERELERRFYARPEARVLASFPGMGPILGAEFLVAVGDVCAFSSADRLAAYAGLVPAARDSGKRVGNHRKGRGGNRVLKRVFYQSAFASLRSVPESRAFYDRKRREGKRHTQAVIALARRRVNVLWAMLRDGTTFETRSAT

SEQ ID NO: 502672 - protein, 387 aa, unidentified
MPQPNDLSRSLVALDQNSTIIAVVELSHSSWLVGGVVPGIERQPRKKLEPHPERLLALLHRWRDEAVKAGRTITRIALAFEAGRDGFWLARWLETRGVEAHVIHASSLAVSREHRRAKTDRLDTELLKRGFLGWLRGERGHCSMARVPTIAEEDAKRPNRERDCLVGERTRIVNRIKSTLARLGIRNFKPTLRKAAERLATVHTPEGTPLPPNTLAELQRDMARLGVVVSQIRQIEEARQKRLEQQHETGPHAMVRLLARIVGVGVETADMLVHEVLSRPMRDRRAVARYAGLTGSPDESGAQRREQGLARAGNARVRRGMIQLAWRFLMFQKESALALWYRARTADSRRGTRKTMIVALARKLIIALWRFVTTGEPLEGVILRPAS

SEQ ID NO: 502673 - protein, 345 aa, unidentified
MTEAYDGRQVVGMDLHRRRSVLVRMSMDGRKLETVRIENSPAALRRVLARCGERPLVVLEATYGWYWAADVLAAAGAEVHLAHPLGVKAFSYRRVKNDERDAADLADLARMGRLPEAWIAPPGARALREVVRYRHKLVRQRTSCKDQVHAVLAKLGIPVTHSDIFGRGGGLWLGQLVLPEPYAAKVASLRALIGVLDGEIARLGEQAAGMLAADPGYAALRELDGIGPVLAAVIIAEIGDVTRFRRAGQLCSWAGLTPRHYESDTKVIRGHVSKQGSKMLRWALVEAIQHQPAGTRPRAAREAIIARRGKEARNIAKTAAARVLLTQVFYALRDGHVRRAQDPAA

SEQ ID NO: 502674 - protein, 355 aa, unidentified
MDNLRYIGLDVHRDTVSAAVLNREGQLVMQSVVQTRAPAILDFLTGIRGTLHVTFEEGVHSAWLYDLLQRRVARVLVCDPRKNRLLKSGNKGDLIDARKLAELLRNDALSPVYHGELSSLEVQRCTRSYTMLTEDTTRIMSRVKAVFRGQAVPYHGKSIYRPDRRESYLAQLPTEGLRKRVELLYQELDAVHRLRLRAKREMLAECRKHPAMKWLQSVPFLGKVRTAVLIGRVQTPHRFRTKRQFWAYCGLALETHDSAQYHVVHGQVERKPRFVQIRGLNWNHNHDLKDVFKSAATMAAVREGVFRDYYCGLLAKGIRPEMARLTLARKIAAITLKIWKEGETFNAEQVKPQAA

SEQ ID NO: 502675 - protein, 391 aa, unidentified
MIYVGIDVSKDKHDCYIVNSDGVVLADVFSVENNLDGFDLLLQRLKSVAPDLLNVKVGLEATGHYSYNILGFLLDKGLATFVLNPLHTNLFRKSTSLRRTKTDRVDARTIAAMMSSGIVLKSYTAISYHNEELKSLSRYRFDKVRQRAKLKQAVSRLVTILFPELEKLVPSLHIASVYALLAELPGAKQVASCQLTHLTNLLSAASKGHYDRSKAVVLRNAARRSIGSTMPAKSLELQHTIRLIRELDAEINEIEAAIKQFMDQIASPILTIPGISYRMGAMILAEIGDFARFDSPDKILAYAGLSPSTYQSGKLDNAYAHMEKRGSRYLRYALYNAAKYVCHWDASFCAYLAKKRAEGKHYNVALSHAAKKLVRLIFALQRSGQPYCPTA

SEQ ID NO: 502676 - protein, 321 aa, unidentified
MITHLYIGVDVSKNWIDVCMSPDSDKAVVRYTNDAKGHALLIECASLLADKVHVCMEHTGGYNLPLATACFNAGMAVSVIDGSKLVHFRKSLGRAKAKTDQADAVLLQRYARAQKPSLWYPLPDEYRTLRELVRHRETLVDMLTAWGSRTKQAVESEFVMAQRKANCEIFRLQLKELGKEIAGHIKRHPGLQKSLALLETIPGIGNVSAFRILAEAGPIANYKSVKEFAMAAGLSPISVGSGQKAPKGKLPVYGNGDLRTAFFFPVVASKSHKIGVWHFMQRIEKNGAKAKLTVITAGMRKLAHIVWGVLTTQTKYDRTKM

SEQ ID NO: 502677 - protein, 341 aa, unidentified
MSDYSYFGGIDLAKNHFSIHVVNSQGKVILHKSVTRSKLLPTLANMPPMRIGLEACGGAHYWARTLHGLGHDARIMAVKYVVPHRTKGKNDLNDAVAICQAVQHSSTRFVPVKSPEQQTILSVHRMREHWVRERTALMNRIRALLSEFGLIIPVGRSSLMKQVPLMLEDAENELPHLARTVIADAYHHLEALNQRIADTEQVFDAFAKVSDNVQRIMKVRGIGPQTATAILASIGNGTQFDKSRDFSAWLGLVPKQYSTGGKPRLGRITKHGDKYLRTLLVHGARTVMANLRDKQDRLSQWCRSILERRGMNRAIVALAAKNARIIWSLLHNQTEYENYAA

SEQ ID NO: 502678 - protein, 436 aa, unidentified
MRNQKVKGKRKSVRPKVDWKALEVIEPDAAGIDVGGQEHWVAISPERDAEPVRSFGCFTADIHQMADWLVEKGVRSVAMQSTGVYWMPVLEILEQRGLKMYLVNARDTKNLPGRKSDVQECQWLLKLHTFGLLNNSFQPSDEIRTARSLWRQRGLLTADAASAIQRIQKVLTEMNVQLSTVLSDLSGVSGMQIIQAILDGDRDPWKLAALARPEVKAKREDIAKSLEGNWRPELLFILRQQLELYQVYQRKITHCDEQLRCHLESFASKVDLSTHPLGAKPKGKKGSKNAPAFDLRTELYRITGVDWAQVNGLDVLTAQTVITEAGADLQAFPSEGHFASWLGLCPTNETSSGKVLKRRTRKVVNRAATALRNAASTLLRSQSYLGAQYRRLRTRLGAPKAGHRHGPKTGLLVLPPDQARPAICGQRRRVLRGSLS

SEQ ID NO: 502679 - protein, 341 aa, unidentified
MRKNLYCGVDLHSNNAMYVITDEKDRQLLRKRLPNELPVVLETLAPFWARLRVVAVESTYNWYWLVDGLQEKKYPVVLAHPSEMDQYSGIKEADDLTDAAFIARLARLNVLPTGYIYPKEDRPVRDLLRRRTLLVQQRTGMVLSLQNMALRQSGQAFGWRALRKLSVEERAELLGGHDCLAFVTAEQVDLIERFNEKVKRFEQKVLEHAQLRPAYACLQTLPGVGTILALTIMLETGDIGRFQTVGDYTSYCRCVRATHSSNGKNKAHNNAKNGNPYLAWAFVEAVHHALRTCPQAKSFYDKKRAKRNGALATKALAAKWSKAAYYMMKRQEPFDVTRVFG

SEQ ID NO: 502680 - protein, 411 aa, unidentified
MKVFCGIDWAEGHHDIALVDESGRLIAKKRISETVAGFAELTAMLAAAGDTAEDPIPVAIETPRGLLVAALRATGRPVYAINPMAVARYRERHTVSRGKSDHADAMTLANILRTDLHAHRRLPADTHLAQAIALLARAHQDATRHRTKASNELRSLLREYYPAFLETFADKTASNLATADARATLAIAPTAAAATKLSKARIAAALRRAGRQRRIDTTAARLHAALREPQLRQAKLVEQAMGRQALALLAVLDTECRNVDELGEAVDEAFQQHPDHAIITSFPGLADNTGARILAELGDDRTRFTDARAVKAYAGSAPITRASGRSICITHRRVKNDRLAAAGWAWAFAALAHDDHANSHYRQRRDHGDRHPAALRHLFNRMLGQLYYCLQTGQHYQPHKAFAAPQPDLGV

SEQ ID NO: 502681 - protein, 332 aa, unidentified
MRFIGVDLHPTSLTACYLTEAGTETLQTYPLTQWPQFHESLQPTDRVAVEATGNTRHFVGQLAGVVAEVVVVNPSQFEVIRKSTKKCDRHDARALALFLSKDLLPTARLKSELAAAINSLAQTRDRLVKLRTTLQNKLHALVVARGEQSRKSAFSSERGLGAVLEREWSATTRVEVEVIVAQIRSLNESLKRLDAELKASGAQLEGFNNLVTIKGVGERAAAILLSVIGDVADFDSEEKLASYFGVVPRVANSNETVQHGRITKRGSKLGRTTLVQCTLVAIKYSTYLRAFYDKLKAKKGAGKAIIATARKFLGVIYRTLKYAERHWCNARW

SEQ ID NO: 502682 - protein, 358 aa, unidentified
MLKYSLGIDVSKNDFHACLSVIDRKQQVKVKASSKFTNQPRGFKELLSWINRHKKEPDIPLVVTLEATGVYYENCALFLFKAGFDVAVVLPNNAKNYMKGVGLKTKNDKIDAAGLARMGAEQCLELWQPMDEFFFTLRALTRHHQSLQELKTNINNQLHADLHSIYSSKTVIKHLKKLIVGIEKQLEEVEQEIHRHLYSHEETAQKLDHIIAIKGLGYMTVAAILAETNGFALFKSIPQLVSYAGYDIVERQSGDRKGKTRISKKGNSHIRRAMHLPAFNMVRYDVGDFKPFFERILKKHNQKMKAYVAVQKKLLVLIYTLWKKDEAFKPKRQSQTFGNEEMVPSFVLADGQNEVAPA

SEQ ID NO: 502683 - protein, 450 aa, unidentified
MMREPQEIDDEEHEQILERVAAVDVAKASGTVCIRVPHPSGQGRRRTRVQTIDATTNAVLELAGYLVAEQVQKVTLEATGDYWRIWFYLLEAAGLDVQLVNARDVKAAPGRPKTGKLDAVWLAKLTERGMLRPSFVPPAEIRRLRDYTRLRAGLTRERTRCFQRLEKLLEDSLIKVSSVASTLSTVSARAMIEALIAGERGPRVLAGLARGAMRVKHAALVEALTGAFDDHHAELARMLLDQIDALSAQIDRLTARIEEQVAAISAAWGADADGATGPGAGLGEGAPALPALDRLDEIPGISRATAQGIIAEIGLDMTRFPTPGHLVSWAKLSPRTVQSGAKNRAGKTGKGDPYLMAILGETAAAAARTDTFLGERYRRIVRRRGKLRALVAVARTILVIIWHLLASRTARFCELGASYYANRIDKDKKARGHIRQLEALGFTVTLAPAA

SEQ ID NO: 502684 - protein, 298 aa, unidentified
MIIIGVDFHPEFQQIAWVDTDTGEFQEKRLVHPEEAENFYRALAGKKVRVGMEASGHARWFERLLSELQFEQWIGDAAVIHSKRVRKQKTDRQDAQLILQLLLEDRFPQIWVPSWENRDVRQLLWHRHRMVQARTRIMNQLQAVALNEGLRCKKRLWRERGRQQLESFRLAPWASRRRQDLLELLDRLNPTIAELTQAIEQEAEKCPAAQQLRTHPGVGALTALAFVLIIGEADRFHCGKQVASYLGLVPLEDSSGKRRRLGHITKQGSSILRFLLLSERRCFANGLNRSNLWPAVPT

SEQ ID NO: 502685 - protein, 346 aa, unidentified
MVAIGVDTHKASLAACAIDELGRPVSQHSFANAPAGHRAFLRWLAALSSPRRIGLEGAGSFGAGLAGRLAEAGEDVREVPATLTLRERRRTGRPGKCDLIDALAIARVVLREERLPQATGAVMHRDLRLLVDYRDQLIAEQTRVRNRLHSDLQILMPGYAERLGRRGSLARTSSLERARQLLAPLSGVAAEIALLRLARLEALAVEIAALKRRIATGLATSHVALTSIAGVGPVTAARLLGETGDPRRFRSAAAFAMACGVAPIPASSGNTQRHRLNRGGNRQLNRALHTVALTQTRESGPTRTFLERKRAEGRTWWEGMRSLKRHLADVVFRAMLRDHCERDLTT

SEQ ID NO: 502686 - protein, 349 aa, unidentified
MKELKQVLGVDVAQKELVVTLGRMYDDSSIELFAHKVFRNTDAGFKALSEWVGKLSNDKVPVRFVMEATGVYHQKFAYYLDEKGSEVSIVLPNKISNYMRTLDNKTITDKTCSEAIAQFGLERKLDRWSRPNKIYKNLQQLTRERDQIVAQRAMAKNQQHAEQAEAEPNENSLNRIKARIKFLNGQEKEIKQDIENWISKDPILQNEINNICTIPGIGRLTAVIILAETNGFELIRNKKQLVSYAGLDIREKQSGTSVKGKPRISKKGNRHLRKAMHLPALTAVRWNDNYKNIYARLVSKHGVKMKALVAVQRKLLEMVYIIFKNKCVYDKDHEHKINEQKNSVHTQMA

SEQ ID NO: 502687 - protein, 345 aa, unidentified
MKIVGCDLHTRYQQIAMLDEETGELVERRLEHESGEARAFYAALSAAVRVGIEATGHTRWFERMLGELGHELWIGDAAQIRASMVRKQKTDARDAAHLLDLLLSDRFPRIWRPTLEERDLRQLVWHRQKLVWMRNAVGNQLHALAMGEGVCRKKKLFTKKGRVELESLKLGPWASHRRQELLKMLDELDPSLQQLDRAVQQQAEQNAEAVRLMTHPGVGPVTSLAFVLTIGPVGRFERSKQVVSYLGLNPREHSSGGRQRLGAISKQGNPMMRSLLVEAGHTAARLDAELRQDYQRLKLRRGSGVAKVAMARKLAVRMYWMLRTQASYAQLVRMQGSPRGTLVGQ

SEQ ID NO: 502688 - protein, 403 aa, unidentified
MEVTGPREMAWVGIDIGKTHHWMCALDAGGTVLLSVKVANDEAELLALIATIGEFADELVWAVDIVGAPSALVLALLAQAGHSVRYASGRVVAAMSNAYTGEGKTDAKDAYVIAETTRIRRDLSVIDHDTDLVRNLAVLTGHRADLIADRVRMINRLRDLMTSVFPSLEGAFDYASCKGALVLLTGYATPQRIRRIGETRLAGWLRQRKVRDSAGVAARAVTAARAQTTVLAGQDLAATIIAELATNILGLDERLKSLDAQIAETFDQHPQAAIIQSMPGFGPFLGASLLVGTGDLRAFPTAGHLAAAAGLVPVPNDSGRRSGNLHRPKRYSRPLRHVFYLSAQTSMMRPGPNRDYYLKKREHGRTHSQAVIALARRRVDVLWALLRDDRTWTAAPPPIAQAA

SEQ ID NO: 502689 - protein, 342 aa, unidentified
MIYVGVDLHLRFCSMTVLDASGAVLRQVRVPNDSASLQAFFKSCRPVGSEEKIQAAVEACGFWPAFLDIVEPLVDKVVLVHPAKVKAIASAKLKNDRVDSAVLAHLLRADYLPEAWKADVATRDLREVLRMRVSLGQDRTRYKNQVHSTLHQHGLRVPVSDLFGKDGRAWLATVALRPSARQAIETSLRMIELLDREVQTLERQLRQAAKDDADVRCLMTIPGVGAFTAMVLKAEIGDIHRFPDKRSLYNYAGLIPVVRDSAERKYRGSITRAGSPILRWVMTEAAITACRCSLSAQSWYQRLAEKKHPHVARTALARKLLGAVWALWTRGVCFDERIFAAM

SEQ ID NO: 502690 - protein, 358 aa, unidentified
MRYLGIDVHVASIVFHLLDDTGQTLEQGKIDTSVQALSALVTKLGKDELLVGQEVGKMSYFVHDVLTELGVKVLSFNAHHLRMIAASRKKTDKRDAYWLAKALQTGMTPHPVYIPTGEVRELRALLSRRAALVTERRRWLLRARSYLQAAGHKTPAASRSVKRLIDLSVSEPEGMDGYRYQALSLCQRMEETLTLELGKIEQELMGRAQKIDAIARLKTIPSVGDRVAVMLYAWIGEVTRFGSARELGSYVGLVPSVRQSGNSMQMGGITKQGSPQLRSVLVQSAHILMFRCRTVEARPLQAIAARIHSSRARRKIAVVATARHILRIAYYILRDGTVYDHTRLQGNAAQEEAESSAA

SEQ ID NO: 502691 - protein, 425 aa, unidentified
MNVTPVVEEVKTSKMLTVCCDVSKDTIEVYSRFGEEGHRFELEETLENRTRAIEAGLKRYMELAGQHGYASVCVVCEPTGGYERKLLGVARRRGCQTAYVSGEAVNKARVIESNDTGKSDKKDPRIIQTLASMGKTLQVRLLPGAYAELRELNRQYEDESNTIVTIRNRMHDVLKNLFPDLDVAGDFLFSATGRAIQKHYGFNPIRIFGQPWPNVLATIRKEVRSGSIKKAELVWKAAQASVLHLISNGERELLEARLKELFDDYDTHQGRKQRLREQMLEVYSRTEEAGKLVGIADVSQFQVARLIAETGPLRDFRDYRPLQRFLGLNLRQRQSGKYQGQDKISKKGRALGRKVLYQMVFDSLIGERKLYGEYYRRKKEKSGSGTRAIVCVMRKALKMIMGVFRSARAFDARRVFTPMEKKEAA

SEQ ID NO: 502692 - protein, 433 aa, unidentified
MSNFFYNPVIGIDVSADFSYAAILGPNGDIYKKSFKIKHDLNGFNHLVNEIKKVEEEFNMKTAIFMESTGVYHLSLFHYLNKNFDNTFVINPLITKSNKNGDIRKVKNDKKDALTIATIGKFQNIKLSQKLNLDIFLLKNLVREYYKLTDTCSTFKKKLSADLRIIFPGYSTIFSDSTSKSSIELLSQYSTPQSTLEAPKEDIIKIFLNNSKKGIVWSENIYSKLINVANEAKIIGLPLDGLAVKIASSITLIKTIQSEIDILLEQINTFIQSETFPESIRNNIELIDSIPGIGQLTAITLIAEIGDIDGFIKPKYLVAFFGIDSSVNESGKFKGDDNKISKRGTRIGRRALYAVALASIRNNRNGVPINKVLLDYYQINLKGKKPKIALVAIMHKIINYIFAVLRNQTPFEQRDPKIHKQMFLENNSLNKVA

SEQ ID NO: 502693 - protein, 394 aa, unidentified
MKLIGIDIGKNKHFFCIMDKDSGEIVSQPASFSNDKEGFDFLLQKIKSYPKNSVLIGMEDTGHYHFALLKYLLDLQYTVALINPKTTDFNRKMQGGITKNDKLDTINICDVLDTPERKKQYRITKVNNFDLYEQKQLTRQHHNLKEELNVYKNRLQKSIDIVFPEFNSLFKSKYGTVYMNILKTFGSAENIANTDIRTIRKCFEIEGRGNRISLTPERLKECASSSIGISSSAEVIQIKHLTAQIELIEEQLTEIDKKIEEFSIQNNSPILSIPGISHFSGTSILAELGDISNYSKPSQIIKFAGVAPLHYESSQFNAQHTAITKKGSKYLRKTLYQIVLPVIRHNPVFNKYYLLKISQGKGHRCAQGHCVRKLLRIIYHLLKTNQQFDPQLLR

SEQ ID NO: 502694 - protein, 352 aa, unidentified
MAKTPPLRQCLGIDVSKDHLQVCISNLEADQRIRVVASTKFSNNGKGLNELIVWVKKHRILELDFKVILEATGVYHEQATYFLHEKGFDVSVVLPNKAKSFARSLNAKSKTDQIDAKILAQMGLERKLDSWKPASQNMLTIKRLCRERTTLQDHKTAALNQLHARKSSHLPEKSSQNRSLKLIKFIEKQIKEVEECIKQVVKTDPDLREKVDKICKVKGLGLITVIAVIAETDGFALFKNKAQLVSFAGYDVVQRESGTSVKGTTKISKKGNSYIRRALYFPALTAVKYEPQFKDFYQRVFEKSFIKMKGYVAIQRKLLVLIYTLYKNDEPYDPQYLINKHLQKNRQELCPA

SEQ ID NO: 502695 - protein, 401 aa, unidentified
MDWADKSHQLYVCDESARKIKEQEVQHTVGELVELGRWLDESRQNGIELWGAIEKPHGRIVDFLLDHGVMTYPINPKALDRARDRFRMSPSKSDAFDARVLAEFLRTDHAHLRALEPDSIAAQELKMLTRDHQRLGRQKIRLINQIKITLKEYYPRALEVFGDLETQIALDFLNNYPTPQALSKLTQRSSMRFATREHHLGEARAKELWDKLNPIQLPVPEHVVRAKTKLLLALVVQVQASIKAVDSYNEEIQSFFAAMPPAQLAKTLPGAKSATTVATLWAELGDAPSRWSSFRHLQAQAGAVPITNSSGKNRLVQFRSACNKHLRQTLYWFSFNSLSRCEWAKKYYRDQRAKGHNKHQALRALGAKWLKIIFVMWKDHKPYDENYHLANIARQRMRQAA

SEQ ID NO: 502696 - protein, 324 aa, unidentified
MLGIDVSKDSLSVSLLHPLTHKLQWEETVPNTKAGVQLLLERTSCDIPWVMEPTGRYSLSVACQAKAAQRQVLLARPRKAKAFLAAIQSRAKNDRIDSRGLALYALAVPLRPYPIKSDSIEQLDQLLTARKGIAGAIASLGQQKKELPYAADALLPAILALKTQRKSIDQRIAALTSHSEISPLVAALDAVPGIGLITAASVASALTSKEFAHPDAFVAYIGLDVRVRDSGQRKGKRGLSKQGDPELRRLLYLAASASLNSKLNPFASQYQREQAKGLTKTAALNAVARKLARMCWSIARHGTTFDSDRVYQQPEKSKNVNPPS

SEQ ID NO: 502697 - protein, 334 aa, unidentified
MKKRYFIGIDVAKASFDFCLLSSSGACLWRGQFCNDAHGIEGFLAQLRAGGWKLCQIHFALEATGVYGQKLLSALHQGGLAASVLNPAQVKYFAFSVLRRTKNDQVDAEIIARFCRERKPLATRALRPIEEQLKLLVHERESRVGEQTRERNRAKKDPFQIALPTLIRRQRQQRLQQMEKETAQLDAAIDSLIASDECLKTQSKLLCSIPGIAAVTAAKLLSELAAKEFQSARQLAAYAGLTPSEFRSGYLLYGKTHLSKIGNAFLRKALYLPAAVARRWCKPLKPWIAILESRKLHDLAIRGALMRKLLHIAFGVLKPQKPFNPLLVFIPKTL

SEQ ID NO: 502698 - protein, 462 aa, unidentified
MKIRLGVDVACRAAHQASLADEQGRFLLVGHRFRTDPDELDTLWARLPKDAERIEVVMEPTRNAWVALAAWFRRRGATVVMVPPEQSADLRDYYNKHTKTDRLDSKVLARLPLLHPEGLHREDSLGPGDELKRAVKIRSGLVHRRTACMARLDALLEILGPAWIAALGSDMTLTALRFLARYANPVQVKRLGKARLAAFFRRSSRQAWADERADAVIEAAATTLRLWGADGGELDFDALAADIAAEARLALTLTDEINGFDKRIGALYDKADPAGIVRSVPGAGRVCAPQILGRLGDPTRFANLAAVRSFAGLVPAADSSGQADGHRGPTKAGDCCLREALFIAADHARKVDPTLAVRYQRLMLAGKHHDSAVCTLAAVLLTRIAACLRAGTHYLLRDTDGRVITEAQGRAIVAERYTVPPEVRAARRKVTPHKHPRRNERNERAKTGVATRSKASPVPQPA

SEQ ID NO: 502699 - protein, 350 aa, unidentified
MKIVAQNQDVAMGIDVAAKHLAITMLVEGEVVTQTTIRHNRAAIESFLSRFPDCRIRAVYEAGCFGYWLCDTLRELGVMAIVTPPSLLARAPGAKVKTDRRDSLLLAEQLASGRLKAVAVPSKEERAARQLVRTYDQVKRTRKQTMTRIRSFLMLHHIEAPKTIGKAWTRRYVEWLDGLTFEEMPGGEYLRRSLQALLGTYRGLTEEATALKKEIGRLAKTKKYEKAVTVLEATPGVGTLSAMIVLTEVRNARRFPTSQEFASNLGLTPWEHSTGEQQHRGHITKAGNRHIRAVLVECAWTWIRYDKAAYAVFRRIARRREAKRAIVAMARRLAVKIYWQLRGIRFGEVA

SEQ ID NO: 502700 - protein, 341 aa, unidentified
MQITTIGLDIAKNVFQVHGIDATEKVVVRKQLRRGQVMKFFAALPPCLVGMEACATAHYWARELTKLGHEVRLMPAKDVKAYVKRNKNDAADAGATCEAVRRPTMRFVGVKSAEQQGQLMQHRTRDLLIRQRTQAINALRAHMAELGIVAAQGHEGLKKLLAIIADETDERLPVDARASLIVLAAQLQALQTMIGAIEKRIIAQHRASEESKRVASIPGIGFLGASAITATVTDPNAFRSGRDFAAWIGLVPRQDSTGGKHKLGPISKQGDRYLRRILVVGAHAVLKRARLHPQKYPWLTQLLARRPFKVVAIALANKMARIAWALLAKGETYRVPRLAAA

SEQ ID NO: 502701 - protein, 314 aa, unidentified
MTSEAGIFVGIDVSKAWLDIAVHEQETYFRAKNDDQGIVDLIEKLKQLTPALVLLEATGGFEMLLVAGLAQAGLPVVVTNPRRVRAFARSTGRLAKTDKLDARLLAHFAAAVRPPVRTLPTEAEEQLTGWLTRRHQIVEMLTVEKNRLHTVRPALKDDIEEHIRWLKEKLSKLDEEINHFVQTTPMWKEKDAILQSVPGVGRITSSTLLAMLPELGKLDRQQVAALVGVAPLNKDSGRKQGKRRVYGGRADVRSVLYMAALSAKKHNPVIRNFYERLIHQGKQKKVALTACMRKLIVILNAMMRTNQPWRVQAI

SEQ ID NO: 502702 - protein, 340 aa, unidentified
MNLTTLGIDLAKTSFSLVGMDQHGKVVLRKTLSRAKLLPFIAQCPTCLIGMEACSGAHYWAREFTKLGHKVGIIASKFIAPFRKGGKNDNNDAEAICEAVGRANIWFVPIKTAEQQAQLCVHRVRQGLVSERTALINQLRGLLSEFGIVMPKGRYPAQREIPLILEDANNGLPMLARQMISNLWDRIKIANEQVLFYDRELHKQAHHHPVAKRLLTIPGVGEQVASAVVASVPDPSLFKDSRQFAAWFGLVPRQHTTGGNVRLGRITKQGDRYLRMCLVHGARSVLANLKDKQDKISCWARELIARRGYLRAVVAMAARNARLIWTLMVKQEVYKVIAAN

SEQ ID NO: 502703 - protein, 314 aa, unidentified
MEVILGVDVSSQTLDACLQSPKHVKPMFKTVAYTPEGCKKLLAWAVRHEVTRCAMEATGGYELAIAQRVMQAGIKLYIANPNRIRHFAKGDGILAKTDKVDAFVIAEFARKSNLPAAFETSPVQIEFKQLVARRIELKKDLQAEKCRMRLAAGAVLQSHENLIEAINIEVEKIDRLIDAIVAQNPDIAKKVQVLSQQKGVGKATAQALIALVPELGRIDRRKIASLVGLAPIANESGKMKGKRFISGGRYEARRCLYMPAWVATQYDPEFAAFYQRLIDNGKKPKVAITAVMRKLLVRLNAKMRNHLLESTKNT

SEQ ID NO: 502704 - protein, 314 aa, unidentified
MSTLVFVGIDVSLARLDIAVRPGAVWSITHDEAAIATVVAQLHTLSPTLIVLEATGGMEIPLTSALATAGLPVVVINPRQVRDFAKASGHLAKTDALDAQVLAQFAEVMRPQPRPLPDAEARALAALLTRRRQLVEMLTAEKNRLLSASSPIRKRVRTHIAWLDRELARTNSDLTQAIQQSPVWREKDQLLQSVPGVGPVLTSTLLASLPELGTLTHKQIAALVGVAPLNRDSGTLRGRRTVWGGRAQVRAVLYMGAIVAARFNPVIRVFYQRLQRAGKAKKVALTACMHKLLTILNAMLKHRTPWQEVGVHHA

SEQ ID NO: 502705 - protein, 343 aa, unidentified
MQKVTTIGLDIAKSVFQVHGVDASGNVIIRRQLKRRYVVAFFEKLPPCLVGIEACATSHHWSRELQALGHRVRLMPPAYVKPYVKRQKNDAADAEAICEAVTRANMRFVETKTSEQQSCLMLHRTRHLFIRQQTAVINSIRAHLAEFGIVARVGRNGVEDLLDVVADSGDQRVPELARACLTVLGAQLRMLKAQILEFDRRIMAWHRSNATSKRLDEIPGVGPALATALVGSVADPTAFRSARHFSAWVGLVPRQHSSGGKDKLGSISKQGDRYLRSLFTTGALAVIRYAKIHGTKHRPWLAALLARRPTKVAAIALANKIARMAWAMMIKGERYKEPAALAA

SEQ ID NO: 502706 - protein, 443 aa, unidentified
MIELHLGGCKQNNQNRRFIMNLTQNDRLKQVTFDTLIVGVDVGSKTHFCRAFDWRGFEISHRVFKFSNTGMGFLTFLRWTEELMNKTEMKKVIVGCEPTGCYWLTIQKFLQDHDIQLVTVNPFTVNRSMELDDNSPEKSDLKDPKTIAHLVKDGRYSTSYLPSGVYAEIREASVCRDQIMKQHIRLSNQIQGWLQKFFPEYLECYADWDSTSGLMLLKEAPLPEDILKIGAGGINQIWRDAKVRAAGIKRAQILIEAAQNSVGLEAGEAARLEIWVLVNDYILKAEQLKRLDEYLEEKVREVPNVEKLLAIKGVGMSTVIGFIAEVGDIGRFTDPKQIQKLAGLEIVKKSSGKKKGQPRISKRGRRKLRRTMYESARALMNWNPTFQDVFLYYRNRTRNPLGGMQAKIAVACKAIRVFYVVLQTGCDFDEEKFRKDIIRPEAS

SEQ ID NO: 502707 - protein, 382 aa, unidentified
MRTIGVERPDTKVGVILGVDTHLDFHVAVAIDHLGRRLGESSVPTTVKGYEKLLRWAEGFGPGRCAGVEGTSSYGAGLARHFKAKAIEVLEVERPKRRRRSSRRHVEKSDPSDAESAARAVLAGEASGAPKSADGRVEMIRVLRASRRSAMKARTQAANQLQGLRVTAPDELLDRLRGLSTKTKDLVSVAARFRLRDDPRDVPSATKSATKFALRSVAHRYEALSAEISELEAHLDRLVAQAAPELISLPGIGTENAATLLIVAGDNPQRLGSEASFASLCGAAPIEASSGKVVRHRLNRGGNREANRALYMICLARMRRDLRTQEYVARRTAEGKSKREIIRCLKRYVAREVYRVLISCGSLTSPIGAKDGGQVAAGNGFT

SEQ ID NO: 502708 - protein, 423 aa, unidentified
MPYRMAGIDVHKKMLAVVVADVEVEDEYQFERRWYGSNPEQLRVLSEWLIEQQVEEVVMESTAQYWKPVWGALERFWKAMCQSREGAGRMSGTLHLAQALSNRGRRGRKTDFRDAERLVKRLLSQELVLSFVPDAEQRLWRTLTRTRYQRTRDKVRLQNQLEALLEEAHIKLSSLVSDLLGASARRMLKALADGETDPAALAALADQRLRATPAQLHDALGACTELNPVYRRLVKLTIEGLQFVEQQISQLEREIASLLQRHQDAVERLAVVPGLGVDSAQQIIAEVGAKAATFPSAEKLSSWVGACPGKEESAGVNRSRHSPKGNRQMRRILNQAANAAVKRKGSIFEIVYRRLVPRLGHNKTIGVIAHRLCHLIWIILHNDVRYEERGPAVSKQSQQRHTARMIRKLRMLGYRVEPIGGPA

SEQ ID NO: 502709 - protein, 339 aa, unidentified
MVYVGLDVSLNSVAICVIDSDGKVVREGTTIADPPSIAHFLGPWSDAVERVGLEAGPTSEWLTANLLKLGFPTVSMEARQVKAALSAMPVKTDRNDARGIAQVARTGWFKPVHVKSIDSQQARTLAAARKHIVRSVAAAEQVIRGLLRPFGLKVGVVSRKSFASRVRELVVGNAMLVSIMDPLLAARDALIREYARLHRLVLNVVRTDAACRRMMTMPGIGPVSALTFRSTVDDPHRFRHSRSVGAYLGLTPRRYQSGEIDRVGRITKVGDGETRTALFEAANVVLRPSTRWSPIKAWAVRIAQRQGTKRAKVALARKMAVVLHRMWVDETEFRWTAAA

SEQ ID NO: 502710 - protein, 346 aa, unidentified
MKINRVGVDLAKNVFQLHGADHRGKAVWKRRLSRGKWLAVLCDTVEPGTEIGMEACAGAHHWARQLMQRGYPVKIIPPQFVKPFIKSNKNDANDAQAICEAMSRPNMHPVKVKTVEQQDLQAMHRIRDEIKSHRIAKANQIRGLVTEYGLVAPQQLPALRRAIPDWLEDADNGLSFLFRQLLQGLWGDLSVLDKRMAELDRQIAVIAQEDPTARRLQQLRGVGPLIATALVATVGDGKQYRKGRDMAAALGLTPRQHSSGGKDRLLGISKRGDAYLRCLLVHGARSAVRTARDKEDRLSRWVIDLQSRRHANVVAVAMANKMARMAWVMITRGVDYDPDLAAASVN

SEQ ID NO: 502711 - protein, 338 aa, unidentified
MHYVGLDVHKHKVYGVVMTEQGKIIKEGTFRNKKEGYTAFLQDTKEASIALEALAFSHPPYDLLEEQGYTVKLAHPLKTRAIAEAKIKTDKIDAQILAHLLRSDFLPTSYLPPPDIRELRDMVRQRAYLVKLRTELKNKIHAILAKHWIEPPYKNIFTQQGKHWLDTLKLPSIQTYLPILEKLEEQITDSSTQITTQAQGNRDAQLLMTIPGIGPYSALLLVAEIGDITRFSSSHKLCSYAGLAPSTRQSGQMVHHGHITKTGDKWIRWVLTQCIHIHIKYDTHLTQFYHHIAQRRGKKIAIVATASKLLRVIYWMLKNQEEFHPLGLSRTGSSSFYL

SEQ ID NO: 502712 - protein, 349 aa, unidentified
MELETIGIDLGKTVFHLVGLNRAGEVVIRRKCSRLQLLRFTSNLRVRLIGMESCGGSHFLGRALRDQGHEVRLMPAQYVKPYVKTNKNDYIDAEAIAEAVGRANMRFVPIKSDEQLDMQSLHRLRDRWVARRTSVINQIRGLLLERGITFRKGRRHAEACLPGILEDADNGLSGLLRMLLMQLQDELRQLQSQIDEADARIAKAAREQEPCQRLMAIPGVGPLTATAVVASIGNGAEFRKGRSFAAWLGLVPKQESTGGKQKLLSISKRGNHYLRRLFVSGARAVLQCRDKQPLGLSAWLGQLASRVHSNVAAVALANKLARFAWAVLAKSEAYRPPLSVVSTEALACN

SEQ ID NO: 502713 - protein, 332 aa, unidentified
MEQIIRIGLDTSKHVFQVHGVDASERVVLRRQLSRGQVEKFFAGLAPTVVGLEACGASHHWGRVLGDLGHTVRLLPPQYVTAYVKRGKNDRIDAEAICEAMSRPSMRFVPVKSADEQAAAMLLSVRDLLVKQRTMLVNAIRGHAAEFGVVGAKGVARVVDVLERARESLPMLAWDQLAVLAGQLEVLDIQLGKIEKQLRTWHRENERSRRLASMPGMGPIGAMTMVLRVPDPTVFRSGRHFASWIGLTPREHSTAGRQRLGKISREGDEALRRLLVVGATSVIKQAQRGRGPAWLLALLKRRPVKVAAVALANKMARIAWAMMVSGEVYRAR

SEQ ID NO: 502714 - protein, 313 aa, unidentified
MNQSMVLGCDLSKDWVDVSSADALEQRAQRVANRPGALQRWVRSLPARCQVGMEATGTYHLVLAQRLVQAGHTVYVINPRWVHAYARAVGQRGKTDRSDAALIARYLQAEAAHLHPYQPPSPQQARLRWLLLRRQELVKLRSATRQSLGQEAAAVLQQFDRLVRELERQVRELIDSDPRWRQLARQLRQIPGVGPMVAAHLVQVLTRLPFARADAFVAHTGTDPRANDSGQKRGRRRITHHGDSALRQMLFMAAMAACKRPEWRRLYESYRDRGLPSTGALVALARKLARVAWHMFKHPEPYDPCKLAMPAST

SEQ ID NO: 502715 - protein, 343 aa, unidentified
MKLIRVGVDLAKSVFQVHGVNRKEKAVWRRRLTRESWVKVLLETIEPGCEIGMESCGSAHHWARKLQEKGFTVRLIAPQFVKPYVKSNKNDANDAEAICEAMSRPGMRFVAVKSVEQQDIQAVHRIRSGLIEQRTAKANQIRGLVAEYGLIAPKQLSHLRVALPLWLEDAQNGLTDRFRRLLNALWGDLLALDARVKELDREIVLIAQSNPLTKRLEQLRGIGPISATALAAAVGDGTQFANGRQMSAALGLTPRQHSSGGKERLLGISKRGDAYLRTLLIHGARSVVRTAEGKTDRLSLWVTRLAQRRHPNVAAVALANKTARMAWAMLKNGTDYEPNRIAA

SEQ ID NO: 502716 - protein, 425 aa, unidentified
MSDDVMIAVDPHKASNTAAVLDPVSKTVIDSARFANTRDGYTQLTAFADRWAQRRWAVEGCFGAGRSLAQRLVADGETVLDVPAKLAARVRVYSRGHGRKTDKHDAVSVGLAALDGTGVLPVTSDDALVSLRLLCDRRDELTAQRTQAVCRLHRLLAELTPGGMRRELTANKAQALLARIRPADDVGRVRVHIARDHLADIRALDARIKYIGTQIAALVAASGTGLTGLFGVGPVIAGRLLAEVGDVARFATKDAFASYNGTAPIDVSSGDQIRHRLSRAGNRRINHALHMMAVTQIRYPGTPGRLYYEHKRCEGKTPKEALRCLKRRLSDLVYRQLLADRRGTIEACGSPTTPPPTRSISTSPAARSHPAAPPSRPPRRPAPRGSSRSTGKTAASSASRSSTPVPASTTTSSTKQKSTAKTAAP

SEQ ID NO: 502717 - protein, 340 aa, unidentified
MEQVTIIGIDLAKRVFQVHGAASDGKVVFRKKLSRAQLLPFLAGQPRCTVAMEACATAHEWGRAIGALGHAVRLLPPVYVKPFVKRQKNDVADAEAIAEAASRPTMRFVAVKTEEQQARSMIFRTRDLLVRQRTQLINALRGHLAEHGVVAPQGPAHVKRLADAIEDEQSLVQPIVRDVGRLYLQQIAIYGEKITELEETLRREAARSETTARLQTMPGIGPITAIAIETYAPPLETFRRGRDFAAWLGLVPLQKSTGGKQKLGRTSKMGQHDIRRLLIVGAMAVVRWATRKGPPEGSWLARILTRKPPMLVAIALANKMARSAWAMLTKKEDYRDPAAA

SEQ ID NO: 502718 - protein, 286 aa, unidentified
MNTPNSNSTFGLFVGVDIAARSFSVALLLPTKPPQKALDYPQSAQGYASFLQHLQHTHSNPSQIRVVMEATGTYWVTLATVLHQAGMVVCPVNPKQAHHFFQALPRRAKNDQLDAQGLAQLAQALEPISWNPPPEIYYQLQQRLAQRQSLLDLRQQVKNQLHSLSALPMQVPEVVGRMQALIVTFEHQLSQVQKEVEELVEQEGEWQKSIVLLTSIPGFGLLTACLVVVYTLNFGLCNSVEAATHYAGLAPMERTSGTSVRGRSQLGHFGHTRLRTTLYQGFNPLT

SEQ ID NO: 502719 - protein, 310 aa, unidentified
MDAIYVGIDVSKDRLDVHVLPSGQAFAVARDGKGLNELVEQLIGVRPRLIALEATGGFETIVAAAIAGAHLPLAVINPAQVRHFAQAVGKRAKTDPIDAAVIARFAEAVKPEPRELPDEAARLLSELVGRRVQVIEMLVAERQRERRASAVRVRKSLARHIVALEKELLEIDRDIDTMVRGSPVWREKEDLLVTFPGVAHRTACSVLADLPELGRLTRRQIASLVGYAPFTRQSGRWRGKSMIAGGRPHVRAAIFMAAFSAIRCNPVMRVFYQGLLARGKPKMVALISVARKVLVTLNAMLRDKKQWQPA

SEQ ID NO: 502720 - protein, 356 aa, unidentified
MKLTTVGIDLAKSVFQIHGVDERGKIILKKQLKRSQMMAFFVNLPPCLIGMEACGSAHHWARELQKLGHTVRLMAPQFVKPYVKTNKNDMADAEAICEAVSRPNMRFVPIKTVEQQAILSLHRVRQGFVKARTAQSNQIRGLLAEFGLILPKGIGQIAQRIPELLEDADNGLPGMFRQLIDRLLAHFNDLHRQVLELEAQIKAWHRDNPASRRLAEVPGIGPITATALVASVGNARDFGNGRQLAAWLGLVPRQHSTGGKSVLLGISKRGDSYLRTLLIHGARAAILAAQRKTDMTDRWLTNLLQRRNPNIAAVALANRNARIVWALLAHDRNYQSAYASTIKSVCGGATGILYFY

SEQ ID NO: 502721 - protein, 349 aa, unidentified
MKQISTIGLDLAKNVFQIHGADAEGAPIFNRKLRRAELLGFFEKLPPCLVGLEACGGSHYWAREIAALGHDVRLIPPIYVKPFVKRGKTDDADAEAISEAVTRKTMRFVPIKSADQQAAAMVLRTRALLIRQQTQAINALRGHLSELGVIAALGTAKVAALIEIVRDEEDVCLPKAARLALAEIADQIEALTRQIDKLERGIVGEAKRDEDMRRLTTIPGVGAITAASVKALIPDPDGFKSGRHFAAWLGLTPKPHSSGGKERLGGISKMGNPTLRSLLVCGATSVLRRVKGNDKAPRWLVALLARRPFKVVAIALANKMARIIWALLTKGGTYRNTGAASGAAHACAE

SEQ ID NO: 502722 - protein, 385 aa, unidentified
MSVSARTVMPSERAPSTIFLGLDVHKESVTIAVLPSDAAAPTRVDKLAYDLKKLHRYLEKLGPVASLRACYEASGAGYVLQRELAAWGITCTVIAPSLIPTKPGVQRKHDKYDASQLARLFRAGELTAVHIPTEAEERVRDLVRCRSTFQREILKSRHYVLKFLARRGLVYREGTPWRQPHYEWLRRLARADSSLAAEDRIVFGEYLALLEYKLSRRDELDRQIVALALTPALAPKVARLQCFRGLDTHGAMVLATELADWRRFGSARELMAYFGLVPREHSSGERHRRGSITKAGNSHVRHVLVQAAWSYRFAPKVGVALKRRQEGQDPRVIAHAWKAQHRAHKVFHRLSAARPPQIAIVAVARELVGFLWAVMREEPAPLAVG

SEQ ID NO: 502723 - protein, 349 aa, unidentified
METPIKQAAGIDCGMQDLVVSFGLLTSNGSFTCKLTRTFSNTAQGFKQLLKWVKEISTEDVPLLFVMEATGVYHEKLAYYLIANECRVSIVLPNKVNAFAKTCISKKQDDQQASKVLAEFGCVKHIDQWQPPHPLYAALKQLTREKYQLQQELTLIKNQLHAEQVKAITTDASIKRMKARCRLIEKQITEVEREIIELANQDITIKEKIDKVCTIPGVGLQTAVTVIAETNGFNLIRNSRQLVSYAGLDVIQKKSGTSVRGRMHISKQGNPHLRHCLYFPSFSAVRHNKPMHNLYDRIVEKQAIKMKGYVAVQRKMLMLIYTLWKKNETYDPSIKFLEQPVEAALTELD

SEQ ID NO: 502724 - protein, 348 aa, unidentified
MEHYAGIDVSLELSSVCIVDAKGKIVRETKVPSDPAALIGFFRGLRIPVGRIGLEAGPLSQWLHAGLTAAGFETVLLETRHVKAALSAMTVKTDRRDARGIAQLIRMGWFRSVHCKSTGSQEVRALLVARKQLLGKLLDVEFSIRGILRGFGLKMGVVTRKNFDARARELCVGQAMLEKIAEAMLAARATLQKEYSRLHKTMLAIVRADAVCRHLMTAPGVGALVAITFKTAIDDPTRIRKSKAVGALFGLTPRKYQSGETDVTGGVTRVGDEMVRTALYEAANALLSRVTRFSALKRWGMDVAKRRGTKRAKVALARKIGVILHRMWVDGTSFRWTKEGKATQHVNA

SEQ ID NO: 502725 - protein, 361 aa, unidentified
MEYVGIDVATKSCSASVLDEAGGIKKCLDEFTNEEAGWKALTGSIEPDAQIVMEAGTAAYPLYEFLRREGYQVTMANPRSVRAIANSKSKTDEKDALTLAHLLRLGYVPRAYVPSPEVMRNRELLRACVDVGQQATQTKNRIHSILTKSGLRPEYGTARDLFVTKKRMEWLRSVRFGDHRDAVLQSLLIRLESLRKQRDMLMSEVARTGLSSREVNILMSIKGVDYYAALLIVSEIGDIKRFRSAEALCAYAGLVPSVRQSADVVSHGRITKMGPGRLRWILDVVAQVVVRHDNPMRVYYRRLVKRKKKRSVALTAVSRKLLVMMYAMLTRGERCRWEDRHLTDVKIMKMRRACARKVSAG

SEQ ID NO: 502726 - protein, 425 aa, unidentified
MDFNENQKINQVTENTLVVGIDIAKRKHFACFVDDRGRVLQKSFPVLQSSDGFQWFYQRILTAMKEYEKTEVIVGIEPTGHYWLNLAYFLEERGIPLVMTNPLHVKKSKELDDNLPTKHDRKDALVIARLIKDGRFSYPRILKDMEAELRVGSTFRGKLTEELSAVKNMIIRWLDRYFPEFTQVFPSFGKMAMAVLECTPFPSDLHQKQADEVLSLYRKIEGLKSPQRPKAVRLIEVAAYSIGVTEGREMARIEIATLVRRYHQLEQDIERITGHLVELVKTSVEYEWLSTVPGLGDTTIVDLLAEIGSFSYYEDPRQLIKLAGLTLRESSSGQHKGQKRISKRGRRKLRALLFRVMMPMIRYNEAFRKLHEYYTNRQVNPLRKKQSIVVLCGKLLKVLHGISTKHKAFDAQRMMKDIPSLAETI

SEQ ID NO: 502727 - protein, 351 aa, unidentified
MKKNITIGMDLGDKNHSICVLQGANKIMECEVTNTAKAVDKFFKKHQGATVIIETGTHSPWISRLLEKLGMKVLVGNTRKLRAIWDSSNKSDVRDAEMLARIGRMDPHLLGPIQHRGEQAQMDLELIRGREVIVSARTKMVNHVRGAVKAMGQRIPKCSTDCFHRRAREALKDSDLLAAEEPVLKMIELLTKKIHEMDKRINVMACESYPATERLQQVNGVGPLTSLAYVLTLEDGKRFHKSRDVGAFLGMTPRRDQSGGTDKQLRISKAGNGELRRLLVGCTHYILGPFGPDCDLRRFGQKLMLRGGKNAKRRAIVAVARKLAVLLHRLWISGAIYDPLWNTKMHTQAVA

SEQ ID NO: 502728 - protein, 345 aa, unidentified
MPIVGGLDIHRKQLTFDYLDTVTGEVGRGQIAPADREHLRAWLARFAGRDDVAFAMEGCTGWRYVAEELAAAGVAAHVGEPADTAAARGRKRHAKTDKTDSRHLRTLLAEGRLPECWVPPAQILEYRALLETYHDLRREHTAWVQRIHAVFFHQGAPALGEGALRTEQALAALRAAAAAHLSPGGQLQVATALDMLAATEARMEVLRTQLRYVARHLTGAKVLAARMYGVGPVTALALTCWLAGEGRFSSSRKAVRFTGLDITVWSSDRKGPPGRLSRQGPPVLRWAVYEAGKTHARSSAPDHAYYAAVKDRKNSKRAALSEARKIVRQACHILTELGDDALTVA

SEQ ID NO: 502729 - protein, 343 aa, unidentified
MEYYVGLDVSLKQTSICVVDQTGSVVREGVVDSDPEAISVYVRSKAPGAVRIGLETGPTSTWLWTELKRFGLPVICIDARHAKAVLKMQINKNDRNDAIGIARIMQTGWFKEVHVKDIDSHSVRALLASRALLVKIKRDLENHVRGLLKNLGLVIGRATFNVFAARAEELIEGRPDLVAAVRPLLEARNAVEQQVSELDRKVMKLARRDAQVQRFMTVPGVGPITALAFKATIDDPARFARSRSVGAYVGLTSRRHASGEVDWSGRISKCGDAMLRSYLFEAAGVLLTRVPKWSTVKAWGMRLAKRNGLRKAKVAVARKLAVILHRMWIDGTEFNWSKKEIAA

SEQ ID NO: 502730 - protein, 433 aa, unidentified
MCVALAASPRVPRLGCPIGAEAGRVRPGVPPICGGSDVHQAPLRACRRRVDTDGQVPQAVRELATTDKAVRIWRPWWTAEQGPVVALERPGGYGRPVSHVLVGTVAGLVGHAPERRRRPGHQTDKADARGRAERLAHGRMRPSCISPPPLQALRDLTRPRVALIQARTQAKNRVVNGLEATQSTLTSVVSALFGRRGRRRLAARVAGERAPNTLAARARGVWRRHQSQRALARTGPCPDHHAGLSQGAVERSARRDRQRTDLEPPLGARMAPVAPPRAQLTRLPGVEATAARAILAALSPERRHCGSAARRASGAGVCPGPDERAGTRRSGRTRQGHRSLRRGLGPCAGAARNPPTVLGHTCRRLDGRRGGTHAAMAVAHHMLVMVYHRLREGTDAEEARDDRRQDRPEERQQKRAVKALERLGSRVTLERMA

SEQ ID NO: 502731 - protein, 349 aa, unidentified
MVVIGVDSHKRTHTVVAVDEAGRKLAERTAAAATADGHLELLGWCRTWPDRTWALEDCRNLTRRFEADLLKAGEAVRRVPTKLMAGARRSAREPGKSDPIDALSVARAALREPNLPVARLDGSERELRLLVDYRDVLISDRTGHQSRLRWFLVELGIPEPPSRRLTVPVVLAGVDLQLVGRTEPCARIARDLIVRISEMTKAIDDLARQIGELTETLAPSLMGLFGCGSLTAAKLVAETAGIGRFRSRAAFAAHNGTAPIPVWSGNIVRHRLSRGGNRQLNSALHRIAITQLRCPSLGQAYVTKRLAAGDTKTEAIRALRRRLSDEVFRRLQTDEAARARHERVGRAAA

SEQ ID NO: 502732 - protein, 339 aa, unidentified
MKKKYFIGIDVSKHTLDVAFIIHQSLSLSQPVWKQFENTLEGLKQMQQWLVEMNIPLSEQTVVVIENTGIYHRLLWQFFSHLQIDLCIENAAQVKWSLGIARGKNDKVDSRRLALYAVRNADRLKPTPTLHSAIMPLKDLLTVRNKLLVQTRSFETALKELKHISISAAEPAALKKLLEPALKGMHQSLKQTEQKIKTVLKEDDAVHNTYKLLNTIPGIGHITAVYLICCSNMFTMCTSGKQLACYCGVVPFDYQSGISIKGKHHVHKMANKELKRLLHMCALTSIKNHKEFKDYYERKKEEGKHAMSILNAIKNKLVLRAFAVVKNERPYVDNYAKAA

SEQ ID NO: 502733 - protein, 344 aa, unidentified
MVTTIGIDPHKATHTAVAIDGSENVLGEITIRADKDQTRKLVDWAGSVDGDGRLWAVEAATGLGYLLSQQLMAQGETVVDVPPVLASRIRVLSSGKSQKNDENDARSVAIAALRRDGLAEVHREDEAAVLRMLAKRHRELTALRTQAVCRLHAMLAVLRPGGMGHRLSAKQASRMLGGIRGLDAVGEQRRLMAKTHLVDIRRLDRDLDANKARIRQAVAAADTSVTDIYGVGPVVAAFLIGYTPPIERFTTPDRYAAYNGTAPIEVSSGGKVRHRLSRRGNRILNHAIHTAAVTQISHQTPGKVYYDRKIDEGKTNKEALRALKRRISDAVYRQLRQDAERRDG

SEQ ID NO: 502734 - protein, 469 aa, unidentified
MVAVMIGVDPHKASHTAVAIGAAEEPLGELRVRACAVQAERLLAWAAAWPQRTWAVEGAGGLGHLLAQQLLAGGERVLDVPPKLGARVRLLAAGDTNKNDPNDARSVAIAALRSAGVREVRPDDHAAVLKIWSKRHRDLGRARTQVVCRLHAVLCQLIPGGVSKAITAPAAARLLESIRPAGAVEAARAELAAAFLKDLRGIDTRIRETRKKLSAAVAAAGTSLTGLFGVGPVIAAAVIGDVRDVSRFPGRDHFAAYNGTAPIEVSSGPRKIYRLSRRGNRRLNHAIHMAAVTQIGHRHSEGRAYYDKKLAEGKTPKEALRSLKRQVSNAIFACLQADARRAAARAGGPGGQQGNDSAASAAGSHPRHRLFGQATPGPGHHTTTAVGTRAPGPASTPGRAGHSPVAATPPPATPQVQVERPQPSEDERPGGTARRRPHSAARKARDQGSLVKPLRPKSASHAKKTHGTP

SEQ ID NO: 502735 - protein, 439 aa, unidentified
MILIREVADAPVIMGISKPAGLKSPCGEVKIMNPLFVGIDVSSRNNVAYLMKPDGSRHSSFSVQNNLGGAKLLSERIVSALGSMQLSDVVIGLEATSIYGDSLVYALREDGSLGRFQRKIHVLNPKQVRKFKEAYPDLPKNDWVDAFVIADHLRFGRIAKEVYMDDYRYQALRTLTRARFDVIQNLTREKQRFANYLFLKCSGIAQNKDIQNTSATTIALMERFETVDELANADLNELTAFISEAGRGRFADPDAIAKTVQAAAKGSYRLPRTVNDTVNQAMAVSIASMRALKEQVKVLDKAIEQQFEIIPNTLTSIPGIGKVYSAGIIAEIGDVHRFESQASVAKFAGLVWHKHQSGDFEAEHSQMIKSGNRYLRYYLLEAANSVRRCDSEFRRYYDLKFKEVNKYQHKRALALTARKLVRLVFRLLKDNRLYIQPEG

SEQ ID NO: 502736 - protein, 389 aa, unidentified
MQIIADRPEAPSAIRSDLGAIFISLELSRSTWLITSLSPGSGEKMSKHSVPAGDICVLLARFSELRQKAFARTGKSFPVIVVQEAGLDGFWIHRVLQNEGIESHVVDPASIATSRRRRRAKTDRIDGEALLRALLAYKRGEPRVCAMVKAPAPEEEDRRRLCRERKVLIAERVKHVNRIKGLLFSQGVSGYEPRRRDRRRRLDELRTGDGRPLPKHLKAQISRELDRLELLLEQIKAAEIERDALLAAQQVAAPASAAMLLDIKGIGPEFAAILWSEGLFRHFDNRRQIASFAGLAPTPWRSGSVDREQGVSKAGNPRLRSTLIQLAWLWLRHQPQSVLALWFEERVRRNGGRLKKTTIVALARKLLVALWKYVTAGVVIEGAVMKAAR

SEQ ID NO: 502737 - protein, 368 aa, unidentified
MIYNVGCDIAKDEFVACLLAYELTTQESVVHSRKTFKNNLSGAKAFLKWIARHTKGSSAQVRCTMEATGIYHETLALHVFERATHIHLSVVLPSKAKSYLASRGLRSKTDKIDAYGLALMGSERKLDHWRGIDPFWRELRQLTRTKVSLQHQITELSNQLHAQTHSGIQVREVQKTLKKLIKTLRSEKERLGQLIEKHLASRPELADRMDMVESIPGIGRQTMAIILAETLGFENFTRMSQLMSFSGYDVIINQSGKHIGKEKISKKGSPYIRAAMFMPASTIVRMKPKPLYDLYRRLLGKHGIKMKAHVALQKKLLSYMYTLWNKQEYYDETKITEQQELHQKRIASPSIDEKATVDTSLAVAHDVL

SEQ ID NO: 502738 - protein, 315 aa, unidentified
MNTTTEPVRSYVGVDISKEALDVSLSAQGSERHHNNAAGIAGLVKRLGQMPGPVHVICEPSGGYEQALLEALWAAGLPVSLVNAARVRSFARAQGLLAKTDAIDACVLRAFGELLRPAQTAAPAPSRRRLAALVQRREQLVDLIPMEEQRLTQTREAVLKKLTRHLLTELHKQVQQLEELIKAQIDDDATLRGQNARLQQVKGVGKVTAATVLAELPELGKLNRRQVGALAGVAPYNRDSGNLRGRRTIRGGRIKVRRVLYMAATVAVRFNPILKTFYQRLLSVGKPKKVALTAVMRKLIVLLNHLLKDPQFCLA

SEQ ID NO: 502739 - protein, 400 aa, unidentified
MLSIGIDVSKGKSTVCGMKPGGEIVYAPFEVQHTREGMSELVSLLRSSGEEVRAVLESTGSYHCPVVSALLENGIFVSVINSLRMKRFCSQSIRKVKTDRIDAMQIALYGLAYWQELQPARLPEDTYRELQLLARQYYQMTSMLIKAKVDFNAICDQVLPGMQELMNDHAGRHKLSDFVLRYHHTTHILEMGETRFRKDYCKWAEKKGYRNCERMAALIFATAQNGIPVLPNAPSTQIVITEAIRVLHTVEASRDAILTQMQALAKTLPEYSLVREMPCIGDTLAPRLIAEIGDVRRFHSKRALIAYAGIDAPPYQSGKFCANNRHISKRGNRYLRKTGYEVMQSYVMHKPANDPIFTFIEKKRSEGKCGKLAMVAGLNKFLRVYYGKVTELYRSLPAIE

SEQ ID NO: 502740 - protein, 429 aa, unidentified
MTRISVGVDVSKNRSTVCIMDQDGKVIMRPFLVWHSTEELDFLADTLKRLNGEVRVIMESTSIYQYPIALHLKEKGIFISIVNAYKVKKFANTDFRGGKTDKKDSRTIASYGISYWDKLVEWQIPKDTYFNLDLLNRTYMNAKKHRQIILQELQHYIDCAMPGMDKELHSLNLSTKKDFMLDFVEKFWHRDEIVNMTEAEFTEVFTAWAKKKGYRPVEGKAAKIYAIAKSCIPYYPANPTVKTILQCIVDKLSGVNRTLVTIVTKMIEEAKKLPEYQIVREMPGVGDPLAARFFGSAGDIRRFKNSKALVAYAGIDSPPDESGDFSSTHRHITKKGSKVFRDTGYEIMMALRAQKRTWEKVRKNPEVYDYMLRKEAEEKPRKVAKIAALNKFLRIVYARIKELYDNMALAERAKAKTKSKTKAKTKATA

SEQ ID NO: 502741 - protein, 397 aa, unidentified
MYIVGIDIAKRKHEAAVIDGEGAVIIKPFSFTNNCSGYNRLLAMLTKAKLPLDEVSFAMEATGHYWLALFTRLQKEGFRVQVINPVQTNSIRSFYIRQAKTDPRDALLIAEVIRFGHFSESTLHPENIYELRELCRGRHAIVSMQADIKRKVVALLDQVFPEYETAFTNLFGDTSMAILQACPTPKELSEMPLEEFCHLIEVPSRKRFRTEKAQELQALARNSFGFAMAGDVFSTMIRLYAKHLDFLKQQVREMDRKIAEIMETLDTPITTITGIGPTLGAYILSEIGDISRFSSAAKLAAYAGIDPTMRQSGEYNGVRNRMSKRGSPYLRHAIWLAASSAVLHDPALKLYFQKKRDEGKPYMASVGHACRKMVSIIYAVMRDNKAYTPYIPNEISA

SEQ ID NO: 502742 - protein, 336 aa, unidentified
MSYYCGIDLHSNNHVVVVIDEEDNKLVDKRIDNDLNTTIALLLPYKKELKAVAVESTFNWYWLVDGLIENGFKVELVNTTAVKQYDGLKYSGDHQDAFHLAHLMRLNILPTGYIYPPEYRQVRDLLRRRRQLVRHASTHALSIQNQIWRSLGYKQTCTAIRRKGFVLPFEKDGYLYHSANSNLVLMRTLDTQIKLVEQQVLEGVSLKNEYKLLTSVTGIGPILGLTIMLETGDIQRFDSPGNYASYCRCVNSIRESNGKKKGTGNRKAGNKYLSWAFSEAAHYMVRFNNQAKGFYERKRQKRNGIVAIRAVAHKLSRAVFHMLKNNEAFDIDRVFH

SEQ ID NO: 502743 - protein, 365 aa, unidentified
MPELTHIGLDVHKETIAVAVLRPGTSECDECVIANTPAALRKLLSRYPDRAALRTCYEAGPTGYDTHRLITSLGVPCAVIAPSLIPRRSGVRVKTDRADARNLARLHRAGELTAVRVPSPAEEALRDLVRAREDLKSDRRIARQRIRSFLLRYGRRYPAPGARWSFRFEVWMRALTFEEPAAQAAFDHLVSAYSVRDAQLAAIDKQIEEAALCGPLAEPVARLRAFRGIDTLSAVTIATETCDFRRFPSAGAYMAFTGLVPSEHSSGASRHQGSITKAGNAHMRRVLVEAAWAYRHRPAVRGNLAKRLEGQSPEVAAYSWKAQCRLNSTYRKLAAKKSPNKAAVAVARELSGFVWGAMTGRMGAC

SEQ ID NO: 502744 - protein, 414 aa, unidentified
MKKRTYRSINVNKINFSQVKERLSKEPVVFAIDIAKEKQYALLSNAKGTVSELIWWNHPEQTGHLITALIDLDCQIEIVIESTGTYGDALRYQFRNRGFEIYQINAKRVSDAQEIYDGVPSMHDAKSATIITRLHREGLSKLWIELSDDERTLNALRREYDMHQSQYQRNQNRLEAYLSRHWPEVGYLLSLDSVTLERLLIEYGSPERISSDAKNAAKKMRLWGGHLLSNSKIELVITSACKTLGQPCIESEFCYLQALAAEMQHSRLQQKQAKQALEASIKSNSDLKEMGALIGLVTTAVLLSCHLDPRQYDCARSFQKALGLNLKEKSSGRHAGQLKITKRGSSIARSYLYFATLRLIKNNAVAKAWYLNKVDSRAKNKTVIAVMRKLSKALWYVGRGEKFDADKLFTVSQA

SEQ ID NO: 502745 - protein, 372 aa, unidentified
MNYNTVYVGMDVHKESFSLCAYTIETEKASHYQKTEADCKNVLKYLEFLRTIYGDDANFICGYEAGCLGYTLYHQLTANNVKCIILAPTTMLEQRSKKRIKTDKRDAEIIAKCLAQHNYSPVHIPTAKDEETKEFLRMRDDHKLALKKVKQQILAFCLRHNYRYDGNSHWTAAHLKWLKALTPEALYKEILDEYLLTYQTLSDKLERLDKRIGELATQDEYKEAVKKLCCFIGVKTHTALSVLVEVGDFKRFASAQHFASYLGLVPGEDSSGDDQNRLGITKAGNRHVRLLLTEASQCYARGQVGFKSKELKASQSGNTPAVIAYADKANERLRRRYYKMVLNKCKKHNVAKTAIARELACFMWGMMTDNIA

SEQ ID NO: 502746 - protein, 309 aa, unidentified
MSLPSCVVGIDISKSFLDCFLHPAGTVRRFGNDSQGHQALIGFVAKHQAFGVLEATGPYDRALCRRLHQAGSAFHRANPRKARQFARAAGFLAKTDRVDARMLALYGATMSLAPEAAPDAARQVLRTLVERRDQLVAMRKSERIRLAQPHCEDIEESLRQMMDVLDRQIAALDARINTLVTHVETLVADQAILRSAPGIGLQTASVLLAYMPELGSRDRRAIAALAGLAPIACDSGAMRGKRSIWGGRKRVRDALYMAALAACRSGPFKGISQAMRYAGKPPKLVLIAIARRLLVALNAAMRDRKPFQA

SEQ ID NO: 502747 - protein, 309 aa, unidentified
MKTRFIGIDIGKAQLHLAHSESDDVTVLDHDAQGLQELLAYCKEARLVVAEASGGLEADVLEALHQARITVALINPKQARDFARALGRRAKTDPVDARMLARFSQRMRPCPQSPPEPAQIALKALLKRRRQLVTMRASEKCRLAQSRTEWTQSVRRHLAFLTEEIVELDRRIDDLVQHDPAVAARAALLQSVKGVGPVLAVTLLASLPELGTLSHKQVAALVGVAPYSNDSGQKKGKRAIAAGRAHVRSVLYMAALSACRCDSPLRPFYQRLLEAGKPPKVALTAAARKLLTWLNAIVRDQQLRLPHPV

SEQ ID NO: 502748 - protein, 332 aa, unidentified
MWYIGIDVHKKMCNACIKDLEGNIQKELEFPNKSTGTDKLLEAIKGREAKAVIESTGNMWLRLYLSLEEAGVDVVLANPKKTKAIAEAKLKNDKVDARTLADLLRAKLIAHCYVPPESVRELRSLVRHRITLTRDMTRVKNRIHAILDKYELEFTGTDLFGKAGMMWLRGITSKLTELDQFIFDAELRHVETLKGLIKEVETRIAKESAESEDVKLLMGIPGVNYYTALLLTSEIGDFSRFSSANKLVSWLGLAPRVHQSANTIYNGRITKEGSPRVRWALVQAARSAVRWDDHYRTKYQRIKERRGDGKAIVAIAREITVAMYHMINRKEG

SEQ ID NO: 502749 - protein, 349 aa, unidentified
MIRNQPRDAVVFGVDIGKNIFHIVGIDEAGRPIQRVRVRRDTLLQFFARAKPAIVGMEACPGSQWLARKLNVFGHTVRIIPAQFVKPYLKSNKNDTLDAEAIAEASTRPTMRFVDVKSIEQIDVQALHRARDMMVTQRTRMISQMRAFCLEYGATIRQGAGVFKLDLPRVISDTSNDLSPAIRRLLAELFDDMMRLEHRIGEITREIEALVAQSDVARRLMTIPGIGPLSASALLAAAGRGHQFKKARDLAAWLGLVPGQYSTGGKSTLMGISKRGNGYVRRLLIHGARSCVLHLDRAKSRLGVWVDQMQRRMHINKVVVALANKIARIAWVILNRPGALYERVDPAFT

SEQ ID NO: 502750 - protein, 340 aa, unidentified
MADTSSKSVHTHASVDSRVPAAPQAPIPEVFIGIDVAKASLAVDAYPLRHPLSVGNDAAGIKTLIDFLLPLAPQRIVMEATGGYERCLAAELLSAGLAVVVVNPRQVRDFARGIGQYAKSDPIDAQVLAHFAAVVKPKPRTAQTMPDEILAELVGRRGQLILQRDQERNHLEHVRFKKVRASIEKVLKLLEAQIDELDALIADRIDSDDGLKADNAILQSVPGVGPQTSAMLLALLPELGKLNRRQIAKLVGVAPFDNESGKFKGRRSIWGGRAMVRSMLYMAALVARKHNPVIRAFADRLAAAGKAKKVVITACIRKLITLLNSLLRSRQSWHINPKNA

SEQ ID NO: 502751 - protein, 484 aa, unidentified
MKAKRANASRRSHRKQYGPIRPAATMPVVHPHAAGIDVGSVEHWVCVPEDSVPEGQANVRSFGGFSADLDHLVEWLFVTGIKTVALESTGVYWIPLVQKLEAAQIEVILVNARHLKYVPGRKSDVKDCQWLQQLHSYGLLNGSFRPTHDICALRSLLRHRQNLIESCGREVQHMQKALQQMNVHLHHAVSDLVGATGLRILDAILAGERNAKTLVELRDDKLCKKTTREELEKALEGDWREEHLFSLRQALETHRHLLKQVVECDEQIKKALAQVEMPEHKEPEGPIPQNPKAKQNAETKPKKRFHRNKTGPSLKLDLTEELKRLCGVDLTQIIGLSVLSVLTIISEIGLDMSRWRNAKAFCAWLGLCPRNKISGGKVLDSRTAHVVNRVAILLRIVAPTIGKTDTWLGIFHRRMRARLGPAGANTATARKLACLIYHMLKYKEEHIDVDHMVFTEKIRTQRINRLRKQAEELGMQLTEIQQAA

SEQ ID NO: 502752 - protein, 466 aa, unidentified
MRDAIGIDPDSTGFISALVSAGSGHAKTKGFLATEAELGKFVKWVKGQGDIIVAIEGSNGLSKPLEKALRAAGVVFYSFKPADTDKFRKAVLGQNKDNEKDAEGVARFAMALEAQGKLDRYRRVWFADVELQLLTRRYERKSSAKTAEVNGLWKLIRHASPDLYLALGGKHPEVEFSENTLQNLGILILLGERPNLGEWKELSKEELLVAMGGNRNGRREWIQELRKVAGTFPAVSPAVALMIRDSARNVMRLKREEADISKMLEELTKNSPEMQMLKQKRGIGTVTAATLVAEIVDIRRFVRENNLAGYAGLGRWEHSTGDTTREVASQMFNRRLKDALMTAARNYVHFNPDSHLTGYYRNLIKGGMKPLEATKRVARALVRVIFRELYALQQADADPVEAEEAKEGESDVASGATRSERSHSSDTSPSSLRSKEPPRSGKVKVRKAGRSRTERRRKTSVSKKIA

SEQ ID NO: 502753 - protein, 338 aa, unidentified
MYVCILDQAGTVLVHKNLPTTPEAFLRVIAPYRAARVVAGECMFTWSWLADLLARAGITFVLGHALSMKASHGGKAKNDKLDAQKIAVLLRGGMLPQAYVYPAERRATRALLRRRCPLMRQRAELLAHRQNTNSQYNLPEIGKKVADKANREGVEAHFPDPRVRKTIEVDVALINPYDQLLGEVELASTRTAKAPDVQTFSRLQSVPGIGQILALLRLYEIQDISGCPRVPDFVSSCRLLKCAKESAGKRLGPAGKKIGNVHLRWAVAEAAVLFLRHNQPGKAYFTKLEHQHGKAKALTVRAQKLARAGYYLLAREQAFALTRFVPASPLRGGTEPAV

SEQ ID NO: 502754 - protein, 359 aa, unidentified
MSVYVGIDVHRRRSQVAVINQVGGVLANRNVPNGAEPVLSVIGGLPAGTPAAFEAAFGWGWLLELLEDYGFAPHLVHPLQCKAIASARLKNDTVDAAIMAQLLRADLLPEAWIAPPQVRQLRALLRHRIQLVRLRALLRNRIHAVLAGHGQDRPGGCGSGPGRQWLAALVLPAAHGEVIEDDLALIDALPQLIGRLDGEIRQRARSGPRVKALTQLPGAGPFTALVLRAEIGDISRFASARTLAAWAGLTPTVRGSDRTVRHGHISKQGPVWARWVLCEAAQTAKRHPDFAASYQAIAKRRGKKIATTAIARKLLTRAYHLLTGAPITTPPAATTPAPASARRQAKAEVASPGRARITA

SEQ ID NO: 502755 - protein, 384 aa, unidentified
MSKHNILFIGLDTHKVSTEVAHIEDQRGAKTVHQGKIKTTKAAITKLARQYQSKYPCATLHFVYEAGPCGYWIYRLLTSLGHCCYVVAPSLIPKKPGDKVKTDKRDAMKLAKLLKDEELTPIYVPEPEDEAIRDLSRARETAMKDLKDAKFQLKGLFLRNNITCKVNDNWSNQHLRWLTELVLPHPSQQIVLQEMIQTITERIKRVERLVNELAHQAKLWRYYGVVQALQAMRGIRFLVAVGTIAELGDLRRFDHPRKLMAYLGLVPKENSSGDNRKQGGITKCGNGRARRLLIEGAQTYKHNANVSTELQKRQETLPKVVIDIAWKAQLRLCRRYKRLMQRGKHRHIVVAAIAREMLAYIWAISREVILVPVDPSTRISRVPA

SEQ ID NO: 502756 - protein, 383 aa, unidentified
MKAVCGLDVHKDSIFLCILHSDGELFEQVFGVLTFQLEEMRKLLQKHHVFEVCMESTSIYWIPIWRVLSPHFTLRLVNPYFIKQLPGHKSDVKDAQWIAECTLKELVRGSFVPPEIIQQLRQYDRRIFDLNAEIVRKVSKVDGVLQRCNIRLSNYVSNIECKSYRDVVRRLSEGVTNPNELMKLVHGRIVNRHGAETILASLTGVVSQAEIDVLRQLHEEIGIAESHRNECQQRMLEICEKHFPEELERLQKIPGIKERAATSLIAEIGTDMSKFETANHLASWSGLRPRNDESNKKIKSRKITHGNVYLRNTIIQCAWAASRQKDCFFSRFSYHQTIVRRKNKMKVIVAVARKLLVAVWHVLHDKTDYVDFKPDREESANNG

SEQ ID NO: 502757 - protein, 352 aa, unidentified
MIVLGADTHKRSHTVAAVAAATGELRGEQTVQVGRRGFDVLLRWARGLDGERAWALEDCRHVSGSLERFLIARGERVLRIPTHLSATARKHARQRGKSDPIDALGVARVALREGLESFPVAHLDGPELDLRLLVDHRERLVRQRVGLNSTLQWHLHDLWPELELPGSSLFYGRWAPRVARRLARAEQTMRVRIARDELRRIRELSQTIKTLEAEIAQLVTAIAPQLLTEPGFGPLTAAKLVGEIAGAQRFATPAKLARAAGVAPIPASSGNTQRQRLDPGGNRQINAALHRVIVTRARCHPQTQDYIARRRAEGKTTREAIRCLKRYLARHVWRLLQPPHPDRGTPPSPSIS

SEQ ID NO: 502758 - protein, 418 aa, unidentified
MNQLKYDFFVGIDLGQWLHMASVVDAKGEFLGETSFPHSREGLSGTIDWLLEVTSQDTARIAVAIEKPHGAVVELFLDNAIAIFSINPKQVDRFRDRHSMSGAKDDRRDAFVLADSLRTDGHRFQRLHLPPPEILAMRGLLSIRDQLVKNHVALSSQIRELLTRCWPHLVSLAPKDKALDAFFCELLQLFFESSPNPLSSHTIETLAQKHRIRRLKPEKILDTLKQKPLRVAPPTTQVTSEHIELLLQQLLLVRQHRRASDQHLDKWFKRVKALTDEPCSDPAILASLPGVGAYVLACVLCYAHHPIRLRNLNAFRTLGGIAPVTKKSGKRGQLRPTILMRRARSLPLNNALHHWARTAVLHDSHFKEHYDRLRDRGHSHARALRGVMDRILPIAIAMLRQGTLYDPSRWTTQKANRG

SEQ ID NO: 502759 - protein, 307 aa, unidentified
MAAVGIDVGKASLDLAVDGQSEVARYPNTPAGIAKVIERLQRLKATRIVVEATGGYEEPLLEACCDAGLWIARVNPRQARDFARATGELAKTDAIDARLLALMARLFADRLRPYLAPPPWQREMRQWLRRRAQVVVTLQAQKQQAAMAPASVRKLAARTIAALAREQAAINHAIQALIKQHATPAVRSSKGLGPVFQATVLALLPELGHLDRRQIAKLVGVAPMNRDSGQGSGQRRIRGGRSPVRVALYMATLSAVRWDPLMKAHYQQLRERGKLGKVALVACMRKLLGIVNARRRDELRAEGLAAA

SEQ ID NO: 502760 - protein, 383 aa, unidentified
MSGLTIGIDIAKRVFQVHAIDNETGEVIAKKLRRSEFLSYFEKLPASLVGLESCGSAHHWARELTRLGHRVKMMNAMYVKPYVKRGKNDAVDAEAICEALTRPTMRFVPAKSVEQQSVLMIHRTRALLVRQRTMLINALRGHLAELGIVAPQGIERVSELIGRTLGAEIDEAKVPKLVREMIVIYAEQIKKINEQIKDLERKLRLWHRTSEDSRRLATIPGIGFITATALVATITNLSSFQSGRAFAAWLGLTPKSASTGGRVRNGRISKAGDRHLRALLVLGATSVIRRVRAGQPTPLYAWANRLLAKKPARLATVALARADSHHSGSYPAAVKNPRQSSVVTASMASRMASQRLVTVRAAVFFRRALTFEKAISIGLKSGL

SEQ ID NO: 502761 - protein, 336 aa, unidentified
MTIIRIGLDTSKHVFQMHGVDENDQPVLRQQIRRSEVEKVFAKLPPTRIGMEACGASHYWARVLRRLGHEVLLIPPQYVKAYVRRGKNDAIDAEAICEAMGRPRTRFVPVKSAGQQAALTMLGVRDLLVKQRTMLINAIRGHAAEFGVTVAKGPKQVAALLQRLATGEDVPALAREIIGVLASQLDGLNIKLKAIEARVMAWHRQDQTSQCLATIPGIGPIGGVSFALKVPDPKAFHSGRHFAAWIGITPREDSTAGRQRLGRISKAGDEDLRRLLVLGATAVIQQAKPGRASPWLMGLLARKAKKVAALALANKMARIIWAMMVSGETYRRTTAV

SEQ ID NO: 502762 - protein, 350 aa, unidentified
MIIIGCDYHPGFQEIAFVDTETGDCGEQRLENCEGAEKFYRDLASQGKKVRVGMEASGHARWFERLLAELNIELWRGDAAVIRAKRGRKAKTDRQDALHILNLLLTGAFPKIWVPSWENRDLRQLLWHRHRMVQARTRVMNQLQAVALNEGLRCKKKLWRKHGREQLEAFRLAPWASRRREDLLKLLDRLNPTIEELSEAIEQEAEKYPPAQRLMTHPGVGALTALAFVLIIGEAERFECGKQVGSYLGLVPLEDSSGERRRLGHITKQGNSLLRFLLVEAAQVTSRKIPEWHSKYVHLTMRRGKKIAKVAMARKLAVRLFWMIRKGWNYEQLLKFGSNVEQPGHRHGVK

SEQ ID NO: 502763 - protein, 362 aa, unidentified
MKTNTQSNSKIMLFAGIDFHKRYSVVHVVDSSGAAVKKGRIEPNSLAGFAAFFAGFAPGSVRAVFESSMNWGYLYDLLHEVEAVADVTLANPYKTKIIAEASVKTDKIDARWLATLHRGGLIAKSHASSLEARRLKELLRQRSFFVRQRTAIRNRIHVLLGTQRNLEMPQVSDLFGKKGMEALRKLRFDQPHRQLMLQQDLDLLREFDTRIKEDEKAVADAFGGGEDYGLIRSVPGIGAVLGAVIATEIDGIGRFCSAKKLLGYAGLAPTTSSSGGKTYQGRMIRACNHWLKWAFVEAAWVSVGCDAYFGGLYRAARARGKGANTAITIVASRMATIVFHLLKEHREFTPFPPNESKPPAAL

SEQ ID NO: 502764 - protein, 416 aa, unidentified
MGSIRVCFKVVCGLDVHQAEVVACLSIQDSRGRLRRVTRRFRTVYSDLVQLRDWLVSEHCEAVGMEATGHYWKPIYSVLEGHTQLIVGNPNQMKGLKGRKTDQQDAEWIADLTRLGLIKPSFVPPPAFRALRDLLRTRRGMIQARTTLQNETLKLLEVGGVKLSTFMSSVFGVSGMAMLRALARGECVAGQVHLLAKGKLRSKMADLRLALEQPLPPHLQQILAIQLERMDQLETHIQSLDTRIEERMAPYEAERRLLIEISGIGHASANVILAEIGVDMGVFTTPDHLAAWAGLAPGSYETGGKKRRAPALKGNVYLKTMLVECAGAAVRTKGTYFSAKFHQLRRRGMDYAKAIVAIAHKLLIVIHKVLAGRTPYKDLGAAYCEQRNRTRTIRNLTRRLESLGFAVTLQNLQIES

SEQ ID NO: 502765 - protein, 365 aa, unidentified
MFTERTSAGLDVHARSVAAAAIDGVTGELFQAKLTPSYDHITSWLTDKPGPVAVAYEAGPTGFGLYRHLIAAGIRCEVAAPSKIQKPAGDRVKTDAKDALHLARLLRLDEITPVAVPSAEQESARDLVRAREDCRGDLMRARHRLSKLLLRNGIVYYGGDAWTGKHQTWLRCDASPQLTARTGRATALTFDNDYEAVMATLARRKRLDAAIEEMAAGSEFTPMVRRLGCLRGIGTLTGFALAVEIGDWHRFTGNSIGSFVGLVPTEHSSGQSRSQGSITKTGNTHARRLLVEAAWHHKPRYVVGKAMRDRWDLAPAAARIRGDEGNRRLHDRWVRFIARNKKNTIADVAIARELAGWCWSLAVLE

SEQ ID NO: 502766 - protein, 458 aa, unidentified
MPFPIGQMPLQEVAAYMKVLHERVAGTGVHKDMIKVAIRSPGAKPWTRKTEILTFRTFYGVLRAMARDLRRRGVTHVVMEASGVYTEPVYYALAEEDFAEVLVINPAHAKALKGHKTDARDCARLAEYLECGLLQGSYIPPPELKEVRDLTRYRVKTVQARTSEIQRLGKALESAGIKLGSVASGITGKGPTAMIEALIDGERRGAVMADLAIGRARTSAKLADLSMALEGRFTDHHALMCRLHLDRIKVHDAAAEDLDTRIRAKIAPWQREIDLLKTIPGFGDIGAWAWIAEIGPAPHQWFATSASLASWVSLAPGNYISAGTRKHSRTGDAGRYIKPMLVQGAWAAIKARGRLQARYNRLVRRLGGPKNPGAKKKAIVAIAHTLLKIAYSVLKSGAPYQEPGEDFYTRRESPAQRQGYLHSQLQELYPGCTITITISPPAAPRRSPRSAATSPAPP

SEQ ID NO: 502767 - protein, 419 aa, unidentified
MNTLNTTSFTAFIGIDWADAKHDICIQSADGGEREFDVIPHQVERIDEWAHTICRRFGSPIAVAVELSKGPIVYALQKHDCFVIFPVNPSTLAKYREAFQPSRAKDDPTDAELAVDLIMRHPERFKPLQPQSVEIRMLASLVEQRRNLVDDKIRITNRLRVALKQYYPQMLEWFDHIDTPLFCDFLIRWPTLLQVKRARKSTLRKFFHEHNMRFEHVVERRLNAIKTAAPLTLDEAVVVPHRLQALVYVEQLRVMLEAIKRFDIEIESVAKQHDDYALFTALPGAGPSLAPRLLVAFGEQRERYKTAADLQKYSGIAPVTERSGKKHWVHWRWQCPTFLRQTFVEWAAQTINKSYWAGEFYRQQREKGSTYQAAVRALAFKWIRILFRCWQTRIPYDEVVYLKALERRGSPLLTAAKVA

SEQ ID NO: 502768 - protein, 347 aa, unidentified
MRFYTQQHKFYCGIDLHTKNMFVCILDASGNVRVHQNIHTNQEAFLRIIAPFREDIVVAVECMFTWYWIADLCIQENISFVLGHALYMKAIHGGKAKNDKIDSLKIATLLRGGMIPQSYVYPARMRATRDLLRRRNHLMRKRAELFAHIQNTRSQYNLPDPLGCIAKPQNREGIVERFNDSSVQKSMAVDLEMIEAYDHILTQLERDIIACAKEHDLRSYALLQTISGVGRILGLVLLYEIESIERFPSVQDFVSYCRLVKCIKESNGKKYGSSGKKIGNAHLKWAFSEAAVLFLKGNEPAKKYLQRLARKHGKAKALSILAHKLGRAVYFMLKNKEAFNQKKFLGL

SEQ ID NO: 502769 - protein, 351 aa, unidentified
MVYIGVDLHRKKSQVAAIDPDGKLVFNRKVRTGPAEMQQLIDELRPQPIQVAFEATFGWGWFADLLAELGIPAHMAHPLATKAISSARVKNDAVDAKTLAHLLRTNLLPEGWIAPPEVREARRQVRMRAGLVRVRAKLKAQVHALLGEHGLQPDVVDLFSNKGRELLRELQMPAISRSRLEACLRLIDEVSLEIVIAEREIYQTIKEDERVKRLLPIPGIGPIIAATILSEIGDITRFSSPDKLCAWAGLTPSEHSSADNVRRGHISKQGSRWLRWVMVEAAVHAFRDVELRQLFIRIARRRGAKIARVAVARRLLTLVYYALRSETGCRSYPVSSNPKVEARSMAVMASH

SEQ ID NO: 502770 - protein, 335 aa, unidentified
MQSYGIDLAKEKFDVSFFDLTSKKVSNQPSHKVVKNNLKSIGRFLETLPSDAVLVAEHTGVYGDTLLKCCMDCNVKIAFVGGYVIHRYRATPDRAKTDVLDCALLREFGERYPDKLKYKTFPEEALYELRQLARHREMLVEQRKQLITADKSEDCRPVRSLVVKRSMDRIKEMLDTEIAETEKEMLKVINGHDSIHHNYELVKSVDGVGLITAVELLVKTENFTKITTARQYSAYAGTAPYEKSSGKMDKGAHISKIGNRRSKTLLYICAESARLHNKEIKLYYERRTLIDKKPRHYVLNAIANKLLRIIFTLVEKGEYYDANFIRQDPRVVKYN

SEQ ID NO: 502771 - protein, 354 aa, unidentified
MVQNLSGAVAVIGIDIGKNAFHVVGLDGRGAIVLRQKWSRGQVEARLANMSPCLIGMEACVGAHHLSRKLKALGHDARLMPAKYVRPYSKGQKNDFRDAEAIAEAVQRPTMKFVATKTADQLDLQALHRVRERLVSQRTGIINQIRAFLLERGIAVRQGLRFLRAELPRILATSLDVLSPRMVCVIEGLAEDWRRLDQRIDHLSEEIAALARQDAGCERLMSVPSIGPIISSAMVAAIGTGDAFSKGRDFAAWLGLVPKQISTGDRTILGKISKRGNRYLRVLFVQAAWVVLIKPKSWQRHGLKPWIEAAKKRLHRNVLAIALANKLARIAWSVLAHGRNFETRKIDEAAAQPV

SEQ ID NO: 502772 - protein, 342 aa, unidentified
MYYIGLDVHKKTISYCVKDVSGRIQQEGKVGSSRRELDGWMKTLPQPWSVGMEATIFSGWIYDHLLPHAAQIKVAHPLMLRAIAAAKKKNDQIDASKIADCLRCDFLPESHMMPQEIRDRRRTLRYRHLLVRQMVQMKNRVSGLLMETGVEYNKQRLHKVSYFRELLSTNTEVHPSIRPLLKLSRETIERCQKTEYALVSSLQRDPVLADRIKRLRTVPGVGPITALTWALEIGDVSRFRTIKNAISYCGLCGDERSSADKVMRMPLSKQRNKHIQRALVEAAKLAPRQSHELAVIYDKEKQKGNGNRATLAVARKMVSYLLAVDRQQRDFISGEERRTGAA

SEQ ID NO: 502773 - protein, 314 aa, unidentified
MITSEEINVGVDTGKTQLDIYVRPSGEAFSVANSPNGIRDAIQRLQALKPTRVVIEATGRLELPFVIAAQQARLHVSVVNPLQMRRFAAAAGRYAKADHLDARIIAHYGEAMRPEPTALKAAKVQLISDLLARRSQLLDMATMEKNRLSILPKALHGSLNRHIKQLQAEISKIESLLDKHIDQEPEWQVKRDLLMSVKGVGKVLTYTLLSDLPELGTLNRKEIAALVGVAPMNKESGNYQGKRRIRGGRAKVRKVLFMAIMSAMQSNPKLKRQYNAMKEAGKPPKVAMVACMRKLITILNTMVKNGECWNPELA

SEQ ID NO: 502774 - protein, 359 aa, unidentified
MQAKVKTISFQGQNIYIGIDAHLKNWTVTAMTENSLTKTLSQDPDAGILYTYLQRNFPGGNYFSAYEAGFCGFSVHRKLQKYGIQNIVVNPADIPTTDKERKQKEDRRDSRKIARSLKNGELNGIHVPDLETEELRSLVRYRKTLVKEISRNKSRIKSHLYCFGIDIPLTLAQASLHWSGRFTQWLETVQLSTCYGDIVLQSTLQTVKHLRSELLKINRQLRALEKESKYSFKIKLLRSVPGIGLIVAVTLLSELETIIRFKRLDKLCSFVGLVPTTNSSGDDEKVGRITRRSNKPLRSLIIEAAWIASRNDPTLAQCYIELCKRMKPNEAIVKIAKKLLNRIRYVMKNEKEYVHSVVQ

SEQ ID NO: 502775 - protein, 429 aa, unidentified
MNYNTQNAKIASITEKTLIVGIDVGSEIHYARAFNWRNYEYSKKPFAFSNDEAGFSSFKEWMDDIAEKHGMVAVIPGMEPTGHYWLNLGAYLQEQGMKPVHVNPHHVKKSKELDDNNPSKNDRKDPKTIAGLVNEGRFSYPYIPTGIYAEIRNLSNLRIQTQEEITRIKNRIARWFSIYFPEIKDVYRNPDAVSGLMVIKQAPLPCDIKELGVDGVNKIWRDARLKGAGIKRATTLVTAAEHSIGNTEAPRSARKEIRNLLNDYEIYKNRLDELMEEIEKTLSEIPYIDKLMEITGIGIKTVSCFIAEVGDIGRFDNPKQVQKLAGYAIVADSSGKHNGESRISHRGRKRLRYTLYEAAISVIGKNKEFKEIHSYYRTREKNPLKKMQSVIAVACKLIRIFYMILTKGADYDGRKMLNDIVRPEIQLAA

SEQ ID NO: 502776 - protein, 375 aa, unidentified
MGEITRVLIARVGVDLAKLVIQVHAVDAAGRRVLSRALKRDQFIGWCQQLPAGCLVAMEACSSAHHWARRLGALGLHARLIPANFVTPYRMEGKSGKNDMTDAAAICEAASRPTMRFVPVKTCEQQGVMSLHRVREGFKEERTACINRIRAVLGEHGLVFGKSPKALRAVLADVIEDAGNELSPRARLVVQRAFEHWRELDEHMRWCDQQVGTHVRSSPEAKRAAKITGIGELTASAMVAGVGDFKQFKAAHQFGAWLGVVPSQDSSGGKTRLGRITKRGDDYLRTLLIQGAKSAVMSAGKRDDPISRWLVQLVARVGWQKACVAMANKNARILWAVMTRELGFDPRHVSIKPDAKQTALEKINPAHSALASCPA

SEQ ID NO: 502777 - protein, 474 aa, unidentified
MGKGSGNGMTRGDRRRNARRERLRGLLPRDGAVIGIDLAEDKQALAVVDHDVRVLARKTVKVKAFRLGEALDWAVAAAKVKGFAHVAVACEPTGPRWMQVQRLCAERGLPLVCIQPLVSHIAREQQDYTPHKTDESDCVLIARLATELHCYVPEELDETWAHLRHLGRRRAQLITAATASVQRIQDFLSVAWPTVTGACAGPFGSVTWLAALQVVTARCGGDPARLAAAGLEEFTAAVRGAVPGWGGKKGWGKIIGRVFAALTDTEGVVAWSRRGLLRRVADELGDLQRTRAQLRAVEADMVAVLGELGLSRLGDIPGLTAVGAAAILAETGDPRRYDSSSSLVKHAGLSPSENASGVFSGQAHISRRGRPGLRLTVWRAVWPMLQLNPVMAAKYAAMTQAAGTAAAQAGAGSRQATAAAAAARARRARARVACAASLLRWIYFIVVHDTSWDPAAASGPAACQHAARPPAEAA

SEQ ID NO: 502778 - protein, 360 aa, unidentified
MFSERTSVGLDVHARCIVGCGLDTVSGAVARRRLTPTVEGVSAWLAELPAPVAVAYEAGPTGFGLARQLTAAGIRCVVAAPSKLQRPPGDRVKTDSRDALHLARLLRMDQVVEVRVPTVEQEAARDLVRAREDVRGDLMRSRHRVSKLLLRQGIVYYGGHPWTGPHEVWLRGQRFTAPGLQLAYDTAVETVLLTVDRRARLDRAITEMAADSEFTPVVRRLCCLRGVSILTGFGLAVEIGDWQRFTGATIGAYLGLVPTESSSGAQRSQGSITKTGNTHARRLLVEAAWHHRKAYRPGLTMQARWDQAPAAARARGHEGNHRLHHRWEVFTDRKKRPVVANVAIARELAGWCWSLAVMDD

SEQ ID NO: 502779 - protein, 340 aa, unidentified
MPLYGGIDLHANNRVVVLLNEQDQVVYEKRLPNHLPTVLDLLDPYRAEIMGFVVASTYNWYWLVDGLMEAGYRVHLANPAAMQQYSGLKDTDDHSDARWLAHLLRLGVFPEGYIYPKAERAVRDLLRKRAHLVRQHTANVLSVQNIIVRNTGTRLSIKRIRELTKQELEGLLPEVDQALAVTSRLAVLDCLSHQIKTLEQTVHKRLKHTPSYEQLLTVDGIGTILAQTIALETGTIGRFPTVGNYASYCRCVDSSKIRNGKRKGQGNVKNGNRYLGWASMEAAQFALRFHPSAQRFYQRKLAKSNNNTTLARKAVAHKLSRACYDIMRDRVPFDALKAFG

SEQ ID NO: 502780 - protein, 352 aa, unidentified
MSNATRWVGIDLHRKRSHVAVIDEQGELTVSRRIVNDRDTFLELLGDPQDGGTHVALEATYGWEWLAELLEEAGYDLHLAHPLRTRAIAAARVKTDAIDAKTLAHLLRTGFLPEAYIAPRELRDLRELLRHRATLTRMRSAVKNRVHAILAKHGIANEHSDLFGKGGREFLDKLQLRDAPRRRLDSLMSLICDFDREIEATTREVEELAKADDRVDVLTQIRGVGRYTAMLIIAEIGDINRFPTARHVCSWAGLAPSVRSSDGKARLGHITRQGSPALRWALVEAAQKITTGSGPLRDKFERIAKRRGRKIAKVAVAREILTLSYYGLRDGEIRCLARRSRAGAKEKLAGAA

SEQ ID NO: 502781 - protein, 359 aa, unidentified
MTHPGQTTKEGVHIVVIIGIDPHKGSHTAAALGSGAEVLAQLRVPANKAMLSRLLHWASAWPERIWAVEGASGLGLLLAQQLVNAGELVGDVPAALAARARLLHTGHGRKTDALDAVSVATVAMHSRGLHQVAREDHATLLRLLADRRDELTQERRRAVNRLHRLLRDLCAGGAPTELGAEDAAALLTTIRPVTAVEQERKGMARALVADVRRLDRDLRINRKRCAEAVAASGSTLPQIFGISDVLAAKILGHTGDITRFATAQHYASYTGTAPVEASSGDIRRHRLCRAGNRSLNNALHLAARVQVMHPGLGQEHYRRKVAEHKSSREALRSLKRQLAKVVYRVLRADHDRLVAQRLT

SEQ ID NO: 502782 - protein, 404 aa, unidentified
MAVRKRLEIEFPNAAGIDVGASSHFVAVPADRDERPVREFAVYTEDLQVLADWLKACAVDTVAMESTGVYWIALYELLERSGFRVLLVNTRHVKNVPGRKSDVLDCQWLQQLMSFGLLAGAYRPDDEVCVLRAVMRHRDNVIQGQARQIQHIQKALVQMNLQLSEVLSDVMGVSGQAILRAIVAGERDPRVLAKLRDARLKADEAQIAKALQGNWREEHLFMLEQALALFDAFQVQLAGCDAKLEALLNRLRCGDGTPQGKSKAKSRAKNAPKFDLRTALYRWCAVDLTRIDGLEVTTVLKVLAEVGPDLSRFASVKHFCSWIGLCPGTKISGGKRLSGQTRCSSNRVKQALKRTREAVTRFKIIGVDNPYVWWTGRPVRGFPQTQPGCVSSEIKKPGRLWTKL

SEQ ID NO: 502783 - protein, 438 aa, unidentified
MSNKVIFNLDELFISVGIDVGADFSWMSIALPNQQFVGKPFKILHNSIDSLTTAVSKIKEAEELYSLESRIFLESTGIYHYPLFCYLRDKGFNCSVINPIITKNSTNINIRKVHNDRFDSKKAALVGLKPDLKVSLMPSDLALNCRNLCREYYDLMDNRSAYVNKLQGELRMAFPQYLGIFSKVTINTSLTLLETYTSPSAFLEADKQEIIDIIKSTARFGLTYAQNKYNAIIQAATDANQFGYIIDSNIKRIRLYISFIRKYDEEINSILESLHELVDANEDTDFVKQIHLIKTFKGAGFLSAVSIMGEIGDFSAFSKPKQLFAYFGLDPSVKQSGKFEGTKVQMSKRGSAIARRVIHTLTLQSISISRNGEAKNPVLREYYLKKCDSKPKLVAMGAVSHKVCNMIFAILRDNKPFKIIAPQEHIKQYNAAKCDMTA

SEQ ID NO: 502784 - protein, 361 aa, unidentified
MRYVGIDYHKHYSVLCATDERGQELKQRRIKGNTAAGFAQFFSELGEQNKVVMEACWNWGWLYDLLGQIDQVGEVVLAHPYKTRLIAEAQIKTDRIDAQILAKLLRGDLIALSHAPSAATRARKHLLRQRLFWVRLRTMLRNRMHAILDRQHGLERPQLKNFFSRRGQTWLEGVELPCAEDQPLLKQDLEVAALLDQKIKELDRAIGQSQSVEEKLLESIPGIGPLFSSVIATEIDGIERFHSAAKLAAYAGGVPTTHASGGRVFHGRLLWQCNKWLRWALIEASWTAIQFSGYFGAIYRNARARGKNKHVAITMVAHRMAKIIWLLLKEKRPYTETLPDRSEDQVTVAPRRKALSLASSC

SEQ ID NO: 502785 - protein, 443 aa, unidentified
MIKSQDGNKLAIVNPNAAGIDIADTEMQVCVPEDRDGENNRRFGSFTQDLNTIVDWLKDCRITTVAMEATGIYYLSLFLKLQDAGIDVLLANPQDVKNLSGRKTDAADAEWLMVLHRYGLLKPCYQPGNVARQIRNLTRQRSNLIRMAEKEVQYMQKAMEQMNIKLSTVISDITGLSGRKIITAILDGQRDTYALASLAESNCKASQEEIALSLEGTWDEDLLFMLKQSLDAYDFFLSQVSDCDTEIEKLLSLYGARIDSANAELVRCKRKKSRSKNAPKMDIENFAYQLWGVNVFEIPGLKDTAVMHLIGELGHDFIDKFESAEKFSSWCNLAPNNKISGGKILSSKIMKRKNPVGQIFRTAAAPLARDKGEMGNYYRRMKAKSGALQANVATAHKMAKIFYTMVKNKVAYDASKVGLNERELTERKIAKLERALTRLKNAS

SEQ ID NO: 502786 - protein, 361 aa, unidentified
MSRSGLAGAVHRVVAVVPPAAQVKVGVEAAGHYHRPVLDYGWPVGWEVLEFNPAHVAEQRRVAGRRRVKTDVIDLEAITELALAGRGQVITERAVRIGELAAWAAHRSRRVATRTATKNQLLGRLDRAFPGLTLALPDVLGTKIGRLVAAEFADPARLCALGVNRLIRFAAVRDVAVRRPVAERVVSAARDALPTRDAVVARRVLATDLGLLADLDTQIENAERQLAALLPVSPFATLTSVPGWGVVRAANYAAALGDPDRWPGSRQIYRASGLSPMQYESAGKRRDGKISREGSVALRQALIDLGIGLWLTDPAAKAYAAALKSRGKPGGIIGCALAHRATRIAHALVRDHATYDPSRWS

SEQ ID NO: 502787 - protein, 341 aa, unidentified
MAKNVYFVGLDIACDDFVASIYQSPKQSVITKEGIENTFDGFNLFIPWLKEHGLSKTNCIICMEATGVYNEAIAHYLVTRGFRVSVEPPLKVKRAFDPVGHKTDPVDSKQIAEYAYRYSDELRFWQPKDEIIEKIKHLLTAREQFTKQSTAIKNAMKAYEKHIVQVPLIVKAHRQTLREIKKHITEIDKELDRIIRQNPSISNMSNQLKSIPGFGLLLSASLITLTGAFSDISHYKTLAAFLGICPYQHQSGKSIYRQPHMRSFGPAYPRKLLTLAARSVATHNDVFKKYYARKLAEGKAKQLVLNNISNKLIKLACALIKNNSRYTVTYRSINPMFLNIS

SEQ ID NO: 502788 - protein, 377 aa, unidentified
MKKHSTAKKNQKALTKTKSTICHMAGKARLTIGLDLGDRSSRYGILEEAGEVASEGQIPTTATGLKGLFGKMPSSRVALEVGTHSPWVSRQIAALGHEVMVANPHKVKLITQSARKNDRIDAQKLARLARVDPKLLSPIRHRGEQAQADLAVIRARAELVEARTGLIHCARGLAKPMGERLQKCAADQVEESLAKPLSEAVRMVIGPLLKSVETISEQIVVYDQKIEEIAKGYPEVELLTQVYGVGALIALTYILTIEDAERFQHSRDVGAFLGIHPQQRESGNSQPELGISKTGDRLLRSYLVQAAHGNLRQGAPDSDLRAWGLGKVGAGGKRAKRRALVAMARKLAVLLHRLWVTGEVYDPLYNRKAAQVAKAAA

SEQ ID NO: 502789 - protein, 341 aa, unidentified
MESQIWTVGVDTHKAGHSAALVDGLGGVEGVLDVEANRRGYGQLLGWARGRAGERRWVVEGTGSYGAGLASYLNQQGEVVYEGDRPLRRKRDGSGKSDQLDAIKVAREALAREHHALPRQRGRREAIRVLMTTRQSAISASVHGLNQLYALVVTAPEPLHERLIPLRGERLIGACLRLQPRGEVETMVTASAMRQLARRLRALQAEAAEYEKQLARQVAALAPNLLAEPGVGPISAAQLLVSWSHAGRIRDENAFAAMAGVAPIQASSGKVVRHRLSRFGDRQLNRALHTVALSRSQNHLETKAYIARRTAEGKSTREIRRCIKRYLSRRFFRLLQRLDNP

SEQ ID NO: 502790 - protein, 484 aa, unidentified
MSKPKKHSKKLGGKKIATGQGKRGRKRKGMCLEDRPLLEANAAGIDIGAREIFVAVPPDRDEHPVRVFATFTEDLEKMAKWLVSCGVTTAAMESTGVYWIPPYDVLEQHGVKPCLVDARGMKNVPGRRTDWHECQWLQFLHSVGLLRAAFRPDGEVCAVRSLMRHRSDLVQMTSQHIQHMHKALTQMNVQIQHAISDITGVTGLAIVDAIIAGQRDPVELAKLRDPHIKASEETIRKSLVGNWRPEHLFTLKQSRQMYGHYQEQIIACDEEIEKLLVAFQPRADPKEKPMPPDRKRKQRGRKKKNVNPKTGFDFRTESYKLFGVDLTQIPGLMTMVFTLFSEVGRDMSRWKTAGHFVSWLALCPDNDISGGRVLWRGVRRVHNRAGDLFRMAAYSLHHDKSPLGDYLRRMKSKLGPAGATTATAHKIAIIFYTMVKKQVEYDGTLWAQRDAQREKRFEAKLKQQAQQLGYKLVPIEEKPCCVTG

SEQ ID NO: 502791 - protein, 308 aa, unidentified
MPQAVIGCDLSRAVIDICELPSGRIGQIANTPEAIAVWLDTLDRDIRLVFEATSGCDGDLIAALATRGHPFSRVNPRQAREFARATGTLAKTDRVDARVLAQMGAALDLPATIPLSPARSRLADFLRRRRQLVDMRKAEKLHRHSAGQPEIVQAIEAMIDLLGKQIAELDRQIAGFIAQDQALSEQARLLTAVPGIGPTVLATLLGELPELGTLCRRKIASLAGLAPHARESGTWRGARRIWGGRRKVREALYIAALNASRRIPVLTAMRDRMRAKAKAPKTILIAVARQLLVILNAMIRKRQPIALG

SEQ ID NO: 502792 - protein, 354 aa, unidentified
MSDDKYIAFDVHQATTVASVLNAAGREVNAAIVPTQAQPLLGFLEGLRGKLHLTLEEGTYSTWLYDLLEGRVAELVVCDPRHNALLKEGNKTDAGDARKLAELLRAGMLRAVYHGSRSMRPLQELAHSYAALVEDTTRVMNRIEAFYRSRGIKCAGRGVYARGQRARWLERLAGGASRLRGQLLHDQLDHLRRLRRKARVALLEESRKHTVAARLREIPGLGPLRVALLMAYVQTPHRFRSARNFWTYAGLGLVRRGSSEYQWVGGRVVRRAKAVNPRGLNPNHRPELKEIFKSAALTAIRRPGAFKDYYEPRARQGVDPAILRVTVARKLAALTLSLWKKGGHYRAEGLKPQA

SEQ ID NO: 502793 - protein, 345 aa, unidentified
MKHYAGLDVSVKDTSVCIVDETGKVCREMKVSSHPDDLVQFLLDPAWRFERVGLEAGPLSQWLFIGLAEAGFPVVCIETRHAKAFLKAQVNKSDRNDARGIAQMMRVNLFRPVNVKTPTSQKRRALLTARKILQDKAVAIENDIRGLLRNFGLKVGVVGVGKFDERIRELVEGMPELIEIMEPMLAARQKLREMFTSLHHKLLSIVRDDGVCRRLMTILGVRPVVSLAFCATIDIPARFKNSRAVGLSLGLTPMLNQSGESLRVGRVSLCGDEMMRALLYEAAQVMMTRVQKWSWLKAWAMNVAKRRGRQKAIVALARRLAVIMHRIWIDGSVFRWTNKAILADA

SEQ ID NO: 502794 - protein, 447 aa, unidentified
MTKRKQQATGKQAEQVFPHAAGIDIGASSHWVAVPAALDTEPVREFGPMTDDLEAMADWLMQCGVDTVALESTGVYWIPVYEVLEQRGLSVWLVDARQMKYVPGRKSDVMDCQWIQKLMSLGLLRAAWRPGQAVCAIRAVVRQRDVLLTEQASWVQRMQKALVQMNLQLSEVLSDIMGVTGQAIVRAIVAGERNPAALARHHSKRLKASREEVRRALTGNWREEHLFVLQQALVVFDALGERVIECDRKIEALLAPMQRHAIALRPLPKARVKHAPTFDARQALANWAGADLTRIDGLGVSAAMKLLAEMGPDLSRFATVKQFCSWLCLCPGTKVSGGKVLAAGTRRSANRARQVLKLAAMSLARSDSALGAFYRRLCARMDKPRANTAVAHKLARMVYFMLTRGEEYVDQGRERYEAQQRDRSIAVLKRRAAALGFQLEPTASAAT

SEQ ID NO: 502795 - protein, 419 aa, unidentified
MSFKILKNNCCGLDVHKTWIFACIGITDSHRRTEYKQARFSSFTKGLQELCDWLAKYNCTDVCMESTGKYWIPVFNVLEKNNIWVTLSHPKYTKPQKGNKTDRKDAKWICDLYMCGMVKPSFIPPADIRQLRDLVRYRFKLTCMITSEKNRAHNCLTISNFKLDEVFSDIFGKSSRSITEQILQHPGETFDVAQFVDGRFKTPIEEIQAAVDGAISTEQAVKLRQCLNHIDELEKHQAEIEREIFRLSDKYEEVLNLIRTVPGFDKNPMTAIQVLSEIGGDMSVFPTAKNLVSWAGCCPRNDQSNQKIKSTRISRAGSYFKPVLVQVANALIKSKKHPEFTTRYRRIKARRGHKKAIIAICRMILTAIWHILTDLKPYTTEGFLESRPVNDSKILTTSQALNLLKQRGYVIKDDIVSVP

SEQ ID NO: 502796 - protein, 368 aa, unidentified
MNTDKYVGLDVHKDTTVVAVAEGGREGECRIYGTIASDLHALEKVLRKLGGDGVTLHVVYEAGPTGYVVYRRLRQLQIDCLVVAPSRTPQLKGVRQKTDRRDALMLARLHRAGELTGIHVPDAVDESIRDLTRARADAVHDLTRAKQRLKSFLLRQGYRYSGKANWSEAHQRYLRELVLPLPALKAVLEEYLLTIAQRVAQVERLDDLIAAQVPQWRLYPAVQALMCLRGVQLNAATVVVAELGDLHRFQHPRHLMAFLGLIPKEHTTGDSRKLGSITKTGNAHARWILAEIVQHAFLPPKVSSHLALRQQGQPVAYRELAWKMQTRLHQRGRHLLGRGVMKPKVTIALARELCGFVWALLRQVPVAQ

SEQ ID NO: 502797 - protein, 387 aa, unidentified
MEVRIVSTPSAGTDNEPVHCYVAIELSKSSWIVGFQTPLTNKTSQYQVKACDASALLELIERVRTRVARELRRPIEVMSCYEAGYDGFWLHRVLKAHGIHNHVLDPASLQVNRRARRAKTDRIDADRMVRALIRYLRGEPEACSVVRVPSVEQEDARRLHRERRRLIAERVQHVNRIKGLCATQGIYHYAPLRKDRLARLDDLRTGDGRALPTRLKAEIARELKRLEVLLEMIATVETERDVILTSAASTHLNAGKIKMLAKLKAIGPEFATTLVGEVFCREFVNRRKLGSYVGLGSSPFRSGSLDRDQGISKAGNPTARSMMIELAWTWLRYQPGSALSIWFRERVGNLKGRPRRIAIVAMARKLLVALWRYLQTGLVPTGAVLKA

SEQ ID NO: 502798 - protein, 376 aa, unidentified
MSRLRFIGLDVHAKSITVAIAEANGGEAQCWGEISNDPDAVRKLVKKLGPVQNLRVCYEAGPTGYVLYWQLTQLGVECEVIAPSLTPIKPGDRVKTNRRDAMKLARLHRSGDLTKVQVPDTELEGLRDLVRARECALQDKARARNRLSKFLLRHGRRAPTGVRAWTQKFWEWVQGVHFELPAQEFTLLDYIHEVEHTQFRLQRLEQSLVEAIKVAPPRLRELVQALQALRGVAELTAVTVVSEVGSFSRFAGARQLMAYTGVVASEASTGDHVCRGGITKTGNAHLRRVVGEAAWAYRHRPIVGKLLRQRQENLNPRIVEIAWKAQQRLHGRYRKLMGRGKKQQTVITAITRELLGFMWAIGVQVESQPKMRSTAA

SEQ ID NO: 502799 - protein, 339 aa, unidentified
MERKYYVGADLHKDQTWFYVMDSEGKKVISRSIGNENENLEKFFMKVPKPFDIGVEATYNWYFFVDIAEKYAEKVRLANSSELKAFAKRHKKSDKIDAQLIANLLRRGDLPEVYIPPKAIRDIREILRYRMSIVRERTENISRLKALLARNGLPSEGNYTTYKGLKEIRRSGKELLDAVIEGYINKILELTKIKTKITKVIEEIAEGDEDIRNLRTIPGIDTYSATLIKSEIGEIERFKSFEKLKAYAGLISQTWQSSKRTIYGPLNKNRNKYIQWILIEIVQHFINSDEERKRKFERIKRKKNYNIAKISLAKDLLLIIYKVMKEKRVYYERKEEYVA

SEQ ID NO: 502800 - protein, 359 aa, unidentified
MAALTLVAQTRPFVIGVDCHARTHTYAIIEASTKRQIACEQFPTTSAGMSRALGWVGRRTDGDMACLWAIEGIGSYGARLARAATDAGYDVAEAPRMNARARRGIGKSDPLDAAAIGTAVLNLEESQLRTPRRDEGTRAALRILSAARDQLTRDRTMNVNALIALLRAHDLGIDARQSLVSAQISTITRWRERQEPIELSIAREEAVRLARRVLEVTAELAANQKRMTELIQQSPAAPLLEIVGAGAVTVATVLTAWSHPGRVRSEAAFASLAGVNPLPASSGNTVRHRLNRGGDRRLNRALHTITMTRMVHDPGTREYVAKRTQEGRSYREIRRSLKRYIARTLYRQLNALYATAEPG

SEQ ID NO: 502801 - protein, 335 aa, unidentified
MDRQYVGIDFHRRRSVIVRKNAAGEQLSSVRVANDPLVIAAAVAEAGPSPEVVIEATYGWYWIVDWLQEQGATVHLANPSGLNWGTRRVKNDERDAIDLIDMLRLGRLPEAWIAPPATRELRELVRYRAKLVALRSGLKAQVHAVMAKEGVLPTATDMFCRAGNVQLNEMQLGEAYTIRVESLRDLIEIYDREVAMLETNIRDRLRGDRGYRAIQAINGIGPTMAAILVAEIGDVTRFRSAAALCSWAGLTPKHKESDLTVHRGQLTKQGSRLVRWAVIEGTVRYHGGGKLAADYHQIAERRGKNKATVAIARKVLTLVYYGLRDGEIRCLAKTA

SEQ ID NO: 502802 - protein, 460 aa, unidentified
MKKNHTYRSTDVEQVDVAALLKALPVGCLVAIDVAKTKFVAALTSAAGAVVKLVRFEHPRQTRRFLELLTSLKDANLEPRALMEPTGTYGDAVRHQVHELGVPVHMMQPKHTHDIAEVIDGVPSMHDGKATVALARLFSVTSPRQWEPESEARRNLRAVLETRAPMAKTLELYHGHLEALLARHWPEFQLDIDVRAQRSWMPLLQKFPGPEAVVGFEKEATKLLWNASRGQMGRDRIERLVRSAKTTTGVPMMAEERNRLRHVIDAIVREMTQVDAVDERIQQCVERDDVAKCLAVVVGPACAAAIVSIVGCPTTFATARALQKALGLNLKERSSGEKKGRLGITKRGNAHVRQLLYLAALRLICTDPIVRAWYRARRSYKSESKTSAVVAVMRKVARALWHVARGKTFDARLLFDARRLVFDLPAPSADPSEESRFDGARQAPHRAAMKPKGGDSHANA

SEQ ID NO: 502803 - protein, 364 aa, unidentified
MSSLSQRSLTHLGMDVHKDSISIGILRPDDSMDVERIFHDEDSVRRFIARMGKPRQLVACYEAGPTGYELHRLLQRLQVPCHVVAPSLIPKAPGDRVKTDRRDCRRLARLHRAGELIAIRVPSPEEEAVRDLCRARGDVVIDLDRARRRLGAFLLRHGQIWRGGSNWTLKHEQWLLGLRFEDAALASTFAHYRSIVEERRLRLQALESDLVPYCEQDPYAEGVHRLCCYRGVDTIGALTLVSEVCDWRRFAKASSFMGFVGLVASESSSGGHTHRGHITKAGNVHLRTQLVESAWAYQRGPYVGERIRRAQERCSPATRERAWAAQVRLCGRFRRLATRKNVKSVVAAAVARELAGFLWGEMTA

SEQ ID NO: 502804 - protein, 460 aa, unidentified
MKDVLMKLKNSSKNKAKRIKKHLEQINLYAAGIDIGSREHFVSVPESLDDQPVRNFSCFTVDLENMADWLVRIGITTVAMESTGVYWIPVFEILEARGLQVILVNAHHVKNVSGRKTDVKDCQWLQQLHTYGLLAGAFRPEDEYCVLRAYMRQRGTLVSTLSTHIQHMQKALRLMNILLDNVVSDITSKTGMSILRAILSGERNAERLASYRDRRCKNSVEVIAKSLMGNYRKEHLFSLKQSIELYDVYHEKLRDCDQEIEQQLTQFEKQPDLTEGQRPTKKRNKKHERNAMQFDVANYLYDLCGTDLTDIDGLDEGSVLKVLSETGIDMTKWKTSSHFVSWMGLSPNNKISGGKVLSSKTVKTRNRAKQAFKLAAWGLSNSKSGLAAHYRRLRARIGAPKAINATARKIAVIFYNMLKHKTAYISQSQEEYDNVHKQRVLKQLQQKAVQFGLELVPLER

SEQ ID NO: 502805 - protein, 419 aa, unidentified
MSFKVLKFNCCGLDVHKTWIYACIGITDSNNRTEYKQARFSSFSKGLHQLCVWLAKYNCNDVCMESTGKYWIPVFNILEQHKIWITLSHPKYTKPMKGNKTDRKDAKWICDLYMCGMVKPSFIPPADIRELRDLVRYRFKLTCMITGEKNRAQNCLTVSNLKLDDVFSDVFGKSSRSITEQILQHPGEKFDVSPFVDSRCKTPIEEIQAAVDSNISKEQAVKLRQCLDHIDELQKHISEVEQEILRLSDKYEAALNLIRTVPGFDKNPMTAIQVLSEIGGDMSVFPTAKHLVSWAGCCPRNDKSDRKIKSTRISCAGSYFKPVLVQIANALIKSKKHFEFTTRYKRIKTRRGHKKAIIARCRMILTAIWHILTDLKPYTSDGFLESRPVKKEKVLTTSQALNLLRQRGYLIKDEPSPVS

SEQ ID NO: 502806 - protein, 424 aa, unidentified
MQNTAAKKRKQVPEGYLVVGVDPHKKRHAAVAITQDFTTQAKFKFDNTREGLEMMLDRARVEMVKSGCRGVIFAIETGGHYWRNIAYYLDERGILFRFINQYTLKRRREGKDLNRRKNDYRDSEVAAQLLCTGEFVESVIPQGVYAELRTSHNAYQRLVKERTRITNLVKGLLDGLFPEFTQVFKDPGGLTAMSVLSTCPIPRVIAGMTEDEFVATIEARHKGRRLMRKKLRALHYSGRTSIGIHAGARSVSSEIAFLVDKLELIRQQIRIMEGTLVNIVDETEEGKYLLSIRGLNYIAVAGLLAELGCFKLYRSAKQMIKMAGSNPTESESAGKKRAKTPMSKQGRPLLRYCAWTSVIPMLRFNPDFRAWAKQRRERPVHANPLSGREVVGAALNRLLRLAFALVKNQTYYQVSKPELTLVAV

SEQ ID NO: 502807 - protein, 366 aa, unidentified
MEKGITFVGLDAHKVAINVCVVLPGGAAPLVWECANEKAAVRRMVRKVQHQAPGEVRMCYEAGPCGYALQRWIKDCGVVCVVVAPSLIPRKPGDRIKTDRRDARKLAELYRAGLLTEVHPPTEEDEAVRDLCRAREDAHEDMVRARHRVSKLVLRRGWSWQEGRRAWSQGHRLWLRSLRLEHREDQVVLDDYLLALEQVEVRLKALDDQIEQVSHEERFAPVVGRLRAFRGIDTLTAMTLIAELHDFMRFESARGLMAFLGLVPSEHSSGGKEQRGQITKAGNGHVRRLLIEAAWHYRHRPSVASLKKRREGVPKEVIALADKAMTRLHRRFNRFLERGKARPKVVVAIARELTGFVWAAMRTRTA

SEQ ID NO: 502808 - protein, 429 aa, unidentified
MRTESTPGARGPVFCGVDTHADSHWLCVLDWRGRKVLSRRFPADAAGYEALAGAIAAAGEPACVAMEGTSSYGAGLTRHLASLGMPVREALSPAGTQRRRPGQGKCDEADAERAARAAMSGSKLGTPKSQDGWVDGVRCMLAARSGAVKARTSAINTARSLLTTAPEGLRSRFRGMAGPRLMEELPSVRAVGALGAALGALADLWAAARDAALDMERALEASLEENCPALLAMYGCGPVSAAKLAVAAGDNPGRLRSEASFAAICGACPIPASSGKTVRHRLNRGGDRQANSALHEIARQRVMRDPETAEYAERARARGKSDREVMRCLKRYVAREAYRALMRPHEIRRPEDASELVAARRAAKVSQVRAASILGTSEKYISMLERGQRELKPIRRAYEAWVEAGLPLDWDRQAFEAERKKDSKKHLAK

SEQ ID NO: 502809 - protein, 311 aa, unidentified
MGTCFIGIDVSKTHLDVAGLPDESSWEVDNNKTGITRLIRLLEKLDPERIVMEATGGYEKNVMFALEEAGLNVVVANPRRVRDFAKAVGKLAKTDRIDALVLARIAETLRPEVREPHDRFIQELACLVKRRSQLKDTITAENNHLEMASGFVKRDTKSHVKGLEKRVAKFEEYIMETIQSDPVCLKKYKIMTSVPGIGVQIAAALLAHLPELGKLNRHEIAALAGVAPFNRDSGRYRGKRAVWGGRAPVRKALYMAALVGTQHNPVIKKFYERLINQGKPPKVALVACMRKLLIILNSMVKNDQHWRPCFS

SEQ ID NO: 502810 - protein, 424 aa, unidentified
MKVTYKTCCGVDVHKSFLVATIITTTGGIEPSYQKKRYSTFNNSILEFKQWLLDNDCHDLCMESTGKYWIPVFNLLEDEINVTIANPKWVKAVKGNKDDTKDSKWIGDLFRLGLVKGSYIPCKKIRILREFTRYRYKIVSCRSSEKNRYQNALTVCNVALDSVVSDIFGKSSTSIIDYLLEQSGNSINHEEIASKLLKSLKSKEDAVIESIEGYQMTDSQKYRMHLVRAHMDYITAEINDVDREIEKLISSDPDFENAIQFLMTIPGVKRDSAITVISEIGINMTQFSSSKRLCCWAGLTPGSNESGGKKKSVRVTRAGVYLKPALVQCAHAAVKSKKSPYYKKKYESLMKRRGKKRAIVAIARMILTAIYQMLSTGESWNPSDLYKIDIPEALLEKQKAKAIKQAMKLLQREGLYPPPEPIAS

SEQ ID NO: 502811 - protein, 382 aa, unidentified
MNYNTVYVGMDVHKESFTFCAYTIDAEKGSHFQRTEADYKNVLKYLEFLRTVYGNDANFICHYGDDVLFICGYEAGCLGYTLYHQLIEHHVNCVILAPTTMLEQCSRRRIKTDRRDAEIIAKCLAQHNYSPVHIPTATDEETKEFLRMRDDHKLALKKVKQQILAFCLRHNYRYDGNSHWTAAHIKWLKSLKPEALYKEILDEYLLTYTTLSDKLERLDKRIEELASKDEYRESVKKLCCFIGIKTHTALSVLIEVGDFHRFASAQNFASYLGLVPGEDSSGDGQTRLGITKAGNRHVRMLLTEASQCYARGQIGFKSKELKSRQAGNSPQVIAYADKANERLRRRYYKMVLGKSKKHNVAKTAIARELACFMWGMMTDHIT

SEQ ID NO: 502812 - protein, 406 aa, unidentified
MEVIYPRCAGLDVHKQTVVACVRIAGDGPPLQEVRSFASTTSGLLALADWLDSFGVTHVAMEATGVYWKPVWHVLEGHFELVLANAAHVKNVPGRKTDVNDAMWLADLLAHGLIRASFVPPAAVQELRALTRTRKQFVRERSAHVLRIDKVLEDANLKLGVVLTDIMGKSGRAVLQAIIDGHHDPAYLASCVGRVKASRQDILEALRGRITAHHRFMLKLHLDHIDALNKAIAQIEKEVGLGLETFRQAATLLSTMPGLSDIAATVVVAEIGIDMSRFATPAHLLSWACLCPRNDESAGKRRSTRLRRGGKWLKTTLVQAAWAAVKVKGGYLQAQFHRLRARRGAKKAIIGVAASMLTAAWHMLRDGTEWHDLGAAHFDRADAQKTANRLIRRLQQIGYNVQLAPA

SEQ ID NO: 502813 - protein, 342 aa, unidentified
MEQVTIVGLDLAKRVFQVHGATADGGIAIRKKLSRGQVLVFFADLPPCVVAMEACATAHYWAREIGALGHNVRLVPPAYVKPFVKRQKNDAADAEAIAEAASRPTMRFVEPKSPQQQARTMVFRKRDLFVRQRTQTINALRAHLAEHGLIAPQGMSKLANIRRLIDEAAAEVEPLVVETAHTYLEQIDDLSSRILKLEATLKQEAARTDASSRMMTMPGVGPITAMAIKTFAPSLSVFRRSRDFAAWLGLVPRQHSTGGKQILGRTSKMGQRDIRRLLIIGAMSVIRWATRKGTTPGSWLHSILQRKPPRVAAIELANKMARTLWAMETRKEDYREPRLTAA

SEQ ID NO: 502814 - protein, 417 aa, unidentified
MNTMIMQPYAAFVGIDWADTKHDVCIQSADSLRREFAVIPHKVEEIDEWARSLHRRFSGPIAIALELSKGPIVYALQKYDYFVIFPINPSTLAKYREAFQPSRAKDDPTDAELALDLILRHPERFEPLQPQSVEIRTLAALVEQRRRLVSDRVRLTNRLRNTLKQYYPQTLEWFDRINTKLFCNFIERWPTLMQVKRARTTTLTAFFRAGNTRNPALLETRLASIRSSQHLTLDEAVIAPNKLHALMLVGMLRVILDAIKTYDQTIAELAPQHDDYDLFSSLPGAGPSLAPRLLVAFGEQRNRFKNAAELQKYSGIAPVTERSGTKHWVHWRWRCPNFVRQTFVEWAAQTINKSYWAGEYYRQQREKGSGHQSALRALAFKWIRILYRCWQTRTPYDEATYLKALQRRGSPLVAKAV

SEQ ID NO: 502815 - protein, 343 aa, unidentified
MQVSTIGLDIAKNVFQVHGVDEEGKVVITRQLRRGQVIVFFKKLAPCLIGMEACATAHHWGRELTELGHTVRLMPASYVKAYVKRSKNDAVDAAASCEAVTRPSMRFVPIKTIDQQAALMLHRSRSLLIRQRTQLINALRAHLAELGLIAAKGKDGVKGLVTIVIDGANSSQLPEPMRQALQPLVMQLAALQEQIGQIERSIHAQHRASDDSRRLETVPGIGVIGATALAATITDPSVFKSGRECAAWIGLVPRQNSTGGKERLGGISKQGDRYLRRLLVNGAMAVIRQARLHPDKYPWVTKLLAKKPAKVVAVALANKMARIAWAILAKGETYRAPALATAA

SEQ ID NO: 502816 - protein, 311 aa, unidentified
MNKETIAFEQFVERGCGIDVHKDNVVATISGKGIKTETRTYSTYTNSLKELKAWLLENKITEVAMESTGIYWKPVYNVFEDSLHVILVNARHIKNVPGHKTDKRDSKWICKLLLSGLLKGSFIPPKEIRELRDLVRLKRKYTQQITSDKNRLMKTLEDANIKLSSVVSDVFGVSATKIVNDLVNKDELCIEDLLAHCHGKIQKSKEEIREALTGKLTSHHRFVLQAIQRGIADKEELVEVIRQEINKKAEPYKNELELLDTIPGIAGEGAIAIISEIGVNMDAFPNEHHLASWAGLCPGNNESAGKKKVVE

SEQ ID NO: 502817 - protein, 363 aa, unidentified
MVTAAEHVYSTWQFKKQQEEKMERRHIGIDLHRNNFTCCVRLENGRNYLSTWNLEALPQFVKKLRATDEVAVEVTGNTRLFYDAVAPQVARMVAVDPNQFRVISHSVKKTDPNDARNLALYLSKGLLPEVRMKEKTQAQIASLTQTRDTLVKLRTALKNKVNNILSARGINLEREALSSEKKLSEVLAMRFDPMVRIELKVIVEQIRSLNHSIAELEKTISEEGQKLPGHKNLTSIKGIGSLSGSILLSVIGNIHDFPEEGKLAAYFGIVPRVWNSNETERSGRITKRGSKLGRTALVQCALIAQRYSPYLKRFYEKTKARRGAGKAIIALARKLLGIIYRTLKNNWVFQDFPNFVLAEEAAA

SEQ ID NO: 502818 - protein, 337 aa, unidentified
MKYSGIDLHSNNSVVTVTDEEDRVIAEKRLPNDLAKIVGFLLPWRDELKAVVVESTYNWYWLVDGLQEAGFAVKLANTGAIKKYDGLKHSGDEADARQLAHLLRLGILPTGTILPPEQRALRDLARKRMQLVRSRTSHILAVENIVARQRAMKINSNQVKRLTADEVDQMGLPADVALAVKSNLAVIITLNAQIDVLEKRLQEKIRARKEFILLSSVPGIGRILATIILLEMGPIERFAGVGNFASYARCVDSRHMSNNKKKGEGNTKNGNKYLAWAFVEAANFALRFNAEAKRFYERKKAKTNTAVATKALAHKLARACYHMLKENKPFDVARCFA

SEQ ID NO: 502819 - protein, 335 aa, unidentified
MKHYAGIDLSMETSHVCIVDAEGRKVAAQCVDSTPEAIASLLERHGPMERVVIETGRMTPWVARGLRELGVAIVCIDARQAHQSLKAMKANKTDPHDAAGLAQLARTGFYKEVHVKSPTSHGVRSVITARAHLVEARVRLDNTIRGLCATFGIRPGAGQGARFLVRVQAAVAIPGLGEAVTSLLRARTGLVDEIRRMDRELKAISIASRACQALMSIPGVGVQTSAAFAAAVDEAGRFKRSRTADAYFGLVPRRHQSGELDWTGRITKQGDGTVRKLLYEAANSILTRTRQTFALKTWALRIAKRRGLKKARAALARRLAVIMHAMLRDGTLFEA

SEQ ID NO: 502820 - protein, 346 aa, unidentified
MERSYRIPGGRTMNYIGLDIHKKNTQACMKNEAGKVLLTGRFPSRPKDLNAFIEKVEEAGGPASFVIESTGFCIPVYDIIAGRGHQIKVAHPLKVKALTAGRAKTDKNDAEMLAELLRLNAIPESYIPPAELRELRELTRFRRSLVRNSTEIKNQIHAFLASRGIETPPEHRSPFSKKHQDWLRSLHLFQIDDLLDIYLLLLTKIEKVEGEIERSNQRKDDVELLKTIPGVGDVIANTLVAEICDIRRFSSPENLFSYAGMVSSIHQSGEKGWAGPITKQGNARIRHIVVEAAYSHVRCSKDSDLTRFFERKKSEKGTKKAIVAMARKLLGVIYQMLKKREVYHAH

SEQ ID NO: 502821 - protein, 398 aa, unidentified
MTESSDYESAQVFIGVDVGKDTHHAVAINRSGKRLFDKALPNDENKLRSLISDLKQHGQILLVVDQPATIGALPVAVARSEGVLVGYLPGLAMRRIADLHAGEAKTDARDAAIIAEAARTLPHALRTLKLADEQIAELSMLCGFDDDLAAQTTQASNRIRGLLTQIHPALERVLGPRLDHPAVLDLLQRYPSPEKLASLGEKKLAAQLCKLAPRLGKRLAADIAQALAEQTVVVPGTNAAAVVLPRLALQLITLRKQRDEVALEVEQRVLAHPLYPVLTSMPGVGVRTAARLLTEVACRAFASAAHLAAYAGLAPVTRRSGSSIRGEHPSRRGNKALKRALFLSAFAALRDPLSRAYYTRKMSQGKRHNQALIALARRRCDVLFAMMRDGTFYTPQAS

SEQ ID NO: 502822 - protein, 327 aa, unidentified
MRQPQSVTEKVRTAVAFDVCKAVLDVHIHVGAKAFQVPNTYEGFDQVASILADYDVSLVLMESTGGYEDPSACYFQSLGYDVAVINPRHARNFAKAMGKIAKTDRLDAAILADFATVIDSRPDRARYIKAPSDDERKFLSQMVARRRQIVDLISTEKQRLSHADEYSRASINRIISFIECQLKEVNKDISLYVKKNFSGLSNLLSEIPGIGEQSVGILVGDVPELGRISNRQLGAVIGVAPFNHDSGKRSGKRCISGGRQNVRDVLYMGAMSATRFNPVIKAFFDRLISKGKSKKLAYVACMHKLLRIINAMVRNGTRFNPDLHVVA

SEQ ID NO: 502823 - protein, 433 aa, unidentified
MRLDPRAFVKVNVPHIQSRKEVIVMPNSLLVGIDVSSCDNKVRLLDSSGKSVSKFTVSNNQPGAKTLAYKIVSAMTLNRFDSLVIGLEATSVYGEPLVHFLKQDADIGSFKPRIHVLNPKQVNAFKKAYSDLPKTDDVDAWIIAENLRFGRINQEVYMDDRITALKKLTRARYYAARNLTREKNHFLNSLFLKFSSLTQEKVFSDTFGTTSLAVVEEFLSVDEIAYMPIEELSAFVNEKGKGKFDVPEDVAKLIQKAARSSYRLPKTVNDSVNQVLAISLVAIRALKDQLKLFDKAIEEQMKVVPNTLTSVKGIGSVYAAGIIAEIGDINRFKNQAALAKFSGICWSKYQSGKYTADNTHLISSGNRYLRYYLMEAANKVRVHDPEFKRFYDLKYRETPKTPHKRALALTARKLVRLVFALLHDNRLYIPPKE

SEQ ID NO: 502824 - protein, 401 aa, unidentified
MYILALDVSMGKSYVVIYHETTCLFEQEILHDKTHFNALLQEIYALPERQQIVFEATGVYSRVIETFCQKNHFTYCLLNPLEAKRQLNSDLRSVKTDKRDAHRLAQTHGQFLRKQKQSEIYEQTRYLARFYQQIESDIKHMRMNLHTALQLTFPELETLFTNRLSKLALNLVELFLHPDYLAHLSQTKLKNVLKKNTDKKISNQKALAKAQTLLSLAQNSYPAEPIQSISVQKVVYYARQLKQLLMTKEQLTKQLVETAKRTIEFDFYQSIPGIGELSAGLIIGELGDIRRFSTHKQLNAFVGVDTRRYQSGKYIAQEHMNKHGNPKARKNLYFIVMNMIRQQAAGPNHIVDYYYKLKTQPSPKKHKVALIACINKLLKCLYSMVRHSSTYDYSYTVSNDQ

SEQ ID NO: 502825 - protein, 454 aa, unidentified
MVVEGSHGNRGMLPSSTSIRLLIFLPSPERTSKNSEGRESVDVVHPRCAGVDVSKRDAKVCVRIAGTGRASAKSTVTTWGAVTNQVLALRDHLIAEAVTLVVMEATSDYWKPFYYLLEDGPFEVMLVNARHVKNLPGRKTDVSDASWLAQLGAHGLVRGSFVPPEPVRQLRDLTRTRTAITRERAREIQRLEKLLEDAGIKLSSVASDITGVSGRAMLGALIAGERDPAQLADLAKRRLRSKIPELTEALTGRFGDHHAFLAQLHLDLIDQHTTAIDELTARIEVVIEPFRGARDLLVSIPGISTGVADVIVAETGADMARFPSAGHLASWAGTCPGSNESAGRIKSTKTRPGNPYLKGALGIAAMSAARSNGTYLSAKYRRIAARRGPMKAIVAVEHAMLIAIWNMLSTGAFYSDPGHDFYARLNPDKAKSRAIDQLRKMGYAVTLNPLAATG

SEQ ID NO: 502826 - protein, 320 aa, unidentified
MGYKLQTAIEMEAVRFEQVVSRGCGLDVHKEVVVATIDGEGIRKVTREFGTFTSSLTELRDWLLEHGITHVAMESTGVYWKPVYHILEPTGMKVWIVNARHIKYVPGHKTDKKDSAWLCKLLLAGLLKPSYIPPREQRELRDLTRYRKKLIESVSANRNRIERILEDCNVKLSSVLSHTGGVVGTKLIDKLINGKVITAEDIDRVYHHKLQASKEELLEACNGYITEHHVFMLQTIRDDIVSTESIISKIDVRIREMLSPYDNILELLKQVPGLSTKTVEDLVAEIGLDMNVFPNEKHLCSWVGIAPGNNESAGKKKADA

SEQ ID NO: 502827 - protein, 485 aa, unidentified
MKVAGQDDKRKQAQADGGRANSGAPRRNRKQRRELARQIQAEDISLEVAHPDAAGIDIGNESHYVAVPPSRDPEPVRRFGCVTAELREMVAWLKQCGIRTVAMQSTGVYWIPVYDLLEEAGLEVYLVNARETKNLPGKKTDVQESQWLMKLHTYGLLRNSFRPAQEIRMMRTYWRQRNDLVRSAARQIQRIQKTLTQMNVQLANVISDLSGVTGQAIVRAILAGERDGRKLAALRDGRIQASEEEIARSLEGNWQEDLLFILKQEQQGYQFCQKQIAACDQRLERYLKQREDRSEGAPLPEEKRKGRRKKKRGNAPRFDLREGLFRMTGVDLTQIDGIDVVTAATVVSEAGWDMSKWRTEDHFVSWLRLCPDNRISGDRVIGKGRLPTNNRLTQAFKIAASTLLQSKTYLGAQFRRLRTRLGAPVAIKAMAAKLARLAYRMLQYGMQYVDRGAEFYEQQHRHRQIVFLKRKAAALGLEIIEPAAA

SEQ ID NO: 502828 - protein, 335 aa, unidentified
MTITTIGLDTSKTWFQVHCVDADGRTVLRRKLARSKVLSFFANIPSCLVGLEACGGSHFWARELAKLGHDARLMPARYVRAYVKTNKHDAADAEACCEAVQRPGMRFVPVKTEEQPSMLMIHRARDLLVRQRTAAVNALRGHLAEFGIVAARGTAKAHELMRLAGDDERLPAMAQEALRYIVAQIHDIEIRLKSFEQRILSLAKENEVCKRLMTVQSIGPYIATAIAATVGDPRNFASGRHFAAWLGLTPKQHSTGGKEKLGGISKRGDSYIRRLLIHGARATVARVRSGQMKSAWLSGLLGRRHFNVATVALANKTARVAWAVMSTEQTYRRAA

SEQ ID NO: 502829 - protein, 418 aa, unidentified
MLKLGLTKNIIMSTTKKICCGLDVHKETIFAAINANGKAGEVKEYSTLTCQIRAMSEWLKANGVTDIAMESTGIYWIPVWNILEAAGFRLTLVNPYFIKQMPGRKSDIKDSQWIAQLLAKDMLKSSLIPCHQIRTLRAYSREYVKRQQSITRIVVGMERTLETANIRITSMVSKIESKTVLNIIELIIKGETDIGKLLEKVHGRTKNRKGALVGQSLEGFVLAEHRFLLEQQLEEYRLYHKQAEELQKQMLAICKEHYAKEMELLKTMPGTDDQSVMQLIAETGADMGAFETSNRLSNWAGLCPRNDESAGKIKSKATTKGNKYLRRIIVQVAWAASRTKNSSYYNKYNQLAIRKGRKKALVAVARKQLTVVWNILKYDQPYDINKQPVITAEQIQAKKKYYQKELDKLSLITITTAQ

SEQ ID NO: 502830 - protein, 428 aa, unidentified
MKYNQNHKISQIAENTLVVGVDIAKKKHYARAFDFRGMELDKVIKFKANGGGFESFINWTESVAKAHGKKKIVVGIEPTGHYWYTFGRAVIDRGLMLVQVNPYHVKKTKELDDNTPSKSDYKDPKTIAFLVKDGRYQIPYMPDGKYAELRKANNLREEWVQKKIKVKNKITRWLDIHFPEFLNAFSSWEGKTALMTLEKIALPEKIASKTAEEILCIWRQEVRRGVGIKKAEKLVKEAQNSVGIREGAQMAEYEIKLLIKEYMEIREVLEDMERKLEKIVLTIPGANRFLEIKGVGIKTVAGFFAEIGDIRRFTSAKQIIKLAGLNLRQNSSGQHKGETTISKRGRSRLRALLFRAILPIVATNEVFNKLHHDNISQKERPMKKMQSLIALCCRLIRIVYSLITKDQEFDPDKLIRDIHRDDALQGAA

SEQ ID NO: 502831 - protein, 344 aa, unidentified
MDVAIGVDSHKSSLAAAALDELGREVDVREFPNDAGGHDALLRWSKAQGHARVIGIEGAGGFGAGLARHLIEAGGSVYEVPAFLTHRERKRNPSKGKSDPADAVAIARVAARGEGLSSPQRTDVLVDLKLLSDHRDQLVRARTRLINRTHTGLVISHPGYEKKIPKLNSKKNQAAALTLLRGDRTVRADLIRDCISEIRRLSKKIVDVEKQLAGKVRESGTTLTALQGIGFVVAAKILGEVGDPSRIRSKGAFAMLTGTAPIEASSGLTKRHRLNRGGNRQLNYALHMMARARLRHDDDSKAYVARRQLEGKSDKEATRCLKRHLSNVVFRQLVVDLKALPEAA

SEQ ID NO: 502832 - protein, 396 aa, unidentified
MISVGIDVSKGKSTVCILKPYGEIVSKPFNITHTQKDLSELSSMLFRLNDEVKIVMEATGIYHLPVLTYLQEKGFFVSVINPYLMKSYRNESLRKAKTDKIDSRIIANYGIDHWFKMKEFQTSGEIYEELKLLGQQYRHYMKLHLLSLAELTHLLDLTMPGIKNLLASWNETNRKDKRSDFVERFWHYDVITSMSEQEFTEEYILWAKEKKYVPSQEKAKVIYTLAQESIPTLPSETSSIKMLVTEAVRVLKEVDATLGLILSRMQEIAKTLPEYSVVREMGGVGNTLAPKLIAEIGDVRRFRNGKALVAFAGIDPPPYESGQFVGCNRKISKRGSASLRKVGYETMRSLKMRSRPEDPVYRYVVKKESEGKSKKNIEISRKIYRSCLKNHFCNTF

SEQ ID NO: 502833 - protein, 421 aa, unidentified
MARTVEIVYPVCCGMDVHKNFLVACIAVTDEHSHTEHHIKRFSTFTGDLRRLAEWLASYNCRDVCMESCGKYWIPVFNALEKAGINVCLTHPKYVKAIKGKKTDKKDAKWISELFKCDLVRSSFIPPPDIRQLRDLCRYYVKLTGVASGEKNRAQNCLTMCNFKLDDVFSDVFGKSATRVLDALLEHGNGDFEIDGLISRKCKSSPEKIRAALDGELDPMQAEKLFLIRQHINGIDSIKAALETQILMLAAKYQPLIDLLLTVPGISSPLTAIRILAEIGADMSVFETAKQLASWAGLTPQNQESAGKKKTTRIGRAGAYLKPLLVQIALAVSKSDKHPELKNKYLALKKRRGGKKAVIAIARKLLTAIWHMLSNNEAYNADLYQKADMPPAVRVITADQAVSFMRSKGFLILDEETGEVA

SEQ ID NO: 502834 - protein, 404 aa, unidentified
MFYFGIDWSQAHHNLCILNEAGARVSRMEFEHSLSGFERIETERCKLGVAASECLVAIETAYNLVVDFLLEHNYVIHIIPPQATDGYRNRQRSSGAHDDDSDATLLAGILRTDRDTHRRLRPNTTLTQQIAAQIRLIETLRRSIQRQENQLCAALLRTYPTALGLFGEVTTQIGLEFLIAYPTAQAAHGLSLDSFKAFCQDHHYSRTDLPPKRYAHLIETVPLASPAAVLAYQDHVRVLAQVLLPQVRCRSQALTQLGLLFEQHPDAPLFASLPGAGNLLAPGLLVKFGDHRDRFPTPVGVQALAGTCPVTERSGKKKLVKFRHGCDKEFRRIAQQFARASLLESSWAAAYWDELRPTCASDSHAYRVLANRWLAVIWKMWHDSKPYDEAYHLQQRALRRKPRA

SEQ ID NO: 502835 - protein, 345 aa, unidentified
MHIASIGIDLGKTTFHLVALGGQNKVLLRKKFSRTQLLAYTANLPASLIGLEACAGAHFLGTALREQGHQVRLIPAQFVKPYRKSNKNDFLDAEAIAEAVTKQNMRFAQLKTQEQLDWQAMHRVRDRLVQRRTALINEIRGFLLERGITFAAAPIHLRKNLPAVIEDAEQNLSPRLRWLLARMWQEWKQIETDIEGITDEIERISNEDALCRRLRQIPGFGPLVSTATVAAIGNGAAFRRGRDFAAWVGVVPRQYSTGGKQKLYGISKRGNIYLRRMLIHGARAVLFRVKYDTGGFGQWVHRLAQRAPRNKVVVAIANKLARIAWAVLSSGRDYRHQPLPQPAAA

SEQ ID NO: 502836 - protein, 498 aa, unidentified
MSSKTNIYPRSNPQVNALFDQAGHPAKVMCVAMDYAKAKHTILFCNGLGDRLKPNLVVDNSAAGATKLLEEVRACAKKKKIGCQHVFFGGEDLPSYAENFVYKLVREKFLVIGVNAWEAKKQRENFQASSDSLDLLGIARCCLNRRGRTIEELPEAYPNLKITTRDRDKTVRLRTGVSNRIHSYVDRLFPCFLSLSKSGLEPLSKASLELMEQDWFSPAQVGRRSRQTLAAWLERRGVEQPQEKANQLKQLAGEVLGPAPKQTVMLQRTLAGLVGVYCGLETSIGMQDREVASWLAKTPGAWLTSISGIGITLAAGWMSELGQPSQWRPVRQLCSYGGVVPRTKQTGGPDKQAVVIGVHPRANKRFKNVVLLAVEKVRQWGPEELRQAAQELEARGAHTDFAMAKRLVRLAKYLVTTGNVYRPKALMDPQTPKATLAAYYQGLWEKLVAKWKDKADLAEVFAPENPLGKWRKMVQELYALELRLPKQKAAGKASALTP

SEQ ID NO: 502837 - protein, 342 aa, unidentified
MNVTTIGLDIAKSVFHLVGAQANGKPVLKKQLRRNKVLAYFANLTPCVIGIEACGGAQYWARELRGLGHDVRLINPKYVKRFLCGNKNDYNDAAALCDAVVHPKTRLVAVKTPAQQDLQALHRVRQGAMQQRTVWVNRARGLLGEHGIVMPKGIGAFRRRVPELLEDGDNGLSGLFRELLAQLYAQVRALDEQVAAYDRRLAQLARADETCQRLVELPGFGPVISTAMAASVGDGRAYHNGRHLSASLGLVPRQHSSGGKTRLLGITKRGDKSLRAQLIHGARAVVYHAANKDDALSRWINRIRAESGTNVATVALANKLVRIAWVIVRRAEHYRPALAARA

SEQ ID NO: 502838 - protein, 334 aa, unidentified
METYILGIDISKKTFQSALTLNGANFFEQEVENSPKAIAAYFQELKKKFSFSSSQLIVCLEHTGIYSYPLLDFLVQHRITACVEPALQIKQSQGMTRGKSDKVDAKRIAQYAYKNRQGLRFWKPQRPVIQKLKALFTLRERLVKTRVQIEMPINESAEFIEKPIQKTLIKNCQRTLKALSLDILKIENEMEKLIEQDAALKQQVQLAVSVPGIGNLTALNVIIASGEFERISEAKKFACYAGVAPFEHSSGSSVRGKTRVSKMANMTVKKLLHLAAMSAIQHCQEMKAFYQRKVDEGKNKMSVINAVCNKLISRIFACIKNKRMYQKEYRHALV

SEQ ID NO: 502839 - protein, 333 aa, unidentified
MSRFWVGIDVAKRKLDVALLDEAGKVKSKVLANDPIGFAALQTWLKERGADTASTHVCMESTGVYSDGCATALADAGWKVSVVNPALPKDFGKSELKRNKTDAIDAGLLARYCSKMDPPAWQPPPLEYRKLRSLVERRQALQDMHQQEANRLESSLEAAARVSISEHLTWLEARIAEMERDIDDHIDGNKETLGKDAELLASIPGLGRTTAAKVLGLLGDLRRFESGKALAAFIGVTPRRHESGDSVRGRSSISRAGHTSVRHALFMPTLVATRYNPTIKAFRDRLVAAGKPKKSAVLASMHKLVHIMYAVVRKGINFDPRFGQLALDVQDGI

SEQ ID NO: 502840 - protein, 344 aa, unidentified
MGALFYLGIDVSKNTLAVILLDQKEKIIWSNSSILNTLGGFQKLLDQATKRAAQKSGGEDYVIAAGMESTGVYGELLAYFLYDNNNEGRITPYVLNPAAVRSYSKACLEPNKNDPTDARVIASYLSVAIAKGQVNPWKAPSEEERTLRALSRRREELVRLLTMEKNRLEKLDNMASPSEEVVESVERLIQYLDAEIRQVEEDIDEHIDASPTLKKNAELLRSIPGVGAVSVATVLGEAGDMSRFEGIKQFTAFVGIAPVEYTSGTSVMKRSRISKRGNRWIRHVLYMATMIAVRVNPVLREFYKRLVERGKNKKVALIASMRKLLHLIWGILRNQRMFEPEYGG

SEQ ID NO: 502841 - protein, 338 aa, unidentified
MRAYAGIDLHSSNNYIGIMDQDYKRLFGRRQPNDLNNVLKVLEPFKADLEGVVVESTYNWYWLVDGLQEHGYRVHLANPSAIKQYEGIKHTDDKWDSFWLAHMKHLNILPEGYIYPKEQRPVRDLLRRRLFFVRHRTANILSLQSAITRNLGIKISGNDIKKLNLDDAGNLFDSSNLVFMAQNNISTIKHLGKIIKGIEKQIKSQVKLRKEFVMLQTIPGVGNILAFTIMLEVGDINRFAKVGNYSSYCRCVGSKRLSNGKKKGENNKKNGNKYLAWAYVEAAHFAKRYIPKAQRFYQQKMAKANGAVATKALANKLARASYFIMRDQVSFDEDMLFR

SEQ ID NO: 502842 - protein, 509 aa, unidentified
MSKKRHAKVNAAGHIRGLQGLSFLELTEGLTTEEMLIVPIEVAKKVLWALICDGVGNILQPDFDFNSLLEGLNEFVAVLRHAIEEYHPRLVIIGLEPTGIYHEPILRHLKTVFQVELARQHGDAGLVVRLCFVDTAAVAGNRSEKRLRHFKTDHVDLACIADLLLRGEGFPARLPDHFTLQLRVESSLVRHRETQMLHLRPLMSRLLDSFWPGLILRPDPKGKPSDAGTELEPLFKNFWGSQKARAFILACPNPYQVLRLGAPALRELIKRQTGVERFGLELAHKIVAFARRAPLPPESVVEAQIPALQSHLALFNRYQADIETAVGRIELCLADSPAQHIVNIPSGASPRLVARFVAYFGHVSYYAHAGQVWSKAGFSPIVYQSGGKFYHGEMAKDGSPGLRAAISVLARSLASHCAYFGTTFMDACERGKATPEAYVITAHQVVRVCFALLRDDVPFDPPTIDDYAAFQAAWRARQPGFRRWLRQRLAPPKRHIPKAGQRKKKRRRR

SEQ ID NO: 502843 - protein, 348 aa, unidentified
MDATTVAVDVAKTVFEVAIANRQWHIVARHRFTRRQFTHFLVTGPSTHVVMEACGTAHYWGRIAQQHGHTVTLLPPAYVRPYVRRNKTDRTDAEALLEATRSGQIPSVPVKSVAQQALVALHRIREQWMATRTARINALRGILREQGVLLPAGAGPALRAIPALLEDTVTALPLSRMISLIYEEVRQLEASIGALERELRAVADSDPIATRLREIPGIGLLTATALVGTVGHIHAFRRARQFASWLGLTPREYSSGAHRRLGGISKPGDVYLRCLLTHGARAVLHAARRRTKAQEPLTRLHQWALTVQARRGHNKATIAVANKLGRIIWAVWTRDVEFDPRPALPAAA

SEQ ID NO: 502844 - protein, 410 aa, unidentified
MKLCVGIDVSSKDLVTSMISEETCEVVFQGNFVNDLKGATELKTIIINTANSNHLDQVVIGMEATSIYSFHPAMFFQEDQDLKKFDTQSVVIDPKKTKRYHDVFAEDKNDQIDAFYIADFLRVGRYSTGIVRQENYIALQRLTRSRYELVQSLVRAKQHFIENLYYKLNKLVISDELNTSVFGSTMMSLLTEDMTTDDLLNTSINDLADYLNEHGRGRFANPEALAKTIQKAVRASYRLDKVIANSVDTVLSVYAEEIKAFQKIIKGLDKAIEEVMKVIGKEEEVLRSIPGIGPVYAAGILAEIGQIDRFDNEAKLAKYAGLSWKEKQSGNYASDNTPLKRTGNAYLRYYLVEAANRVRIQDPVFGKYYQRKYKEVKRTPSKRALVLTARKLIRVIFFLLKNHQIYQEKR

SEQ ID NO: 502845 - protein, 414 aa, unidentified
MELLYTHCAGIDVHQNSLSVCVLTPGSEATAAPRSEIRQFGTKTGDLLGLADWLEQLQVTHVAMESTGVYWKPIWNILEAQFTVILANAQHIKNVPGRKTDTADCQWIAQLLRHGLLKASFVPPVDIRQLRDLCRTRTSLTREKTAVVNRLQKTLEDANVKLAAVVTDILGVSGRAMLKQIIAGKSDAEALAQLARGPMRKKRAELQQALTGKITPDHRFLLNQHMEHIEYLEKAIASMVVAIERKAAPFEATMTRWKSIPGIEQLAAWSLVAEIGANMDQFPSARHLVSWAGLCPGNHQSAGKRLSGKTRNANPWLKGLMTQVAWAASHTKNTYLSQQYRRLVVKRGKRRALLAVANTVLTIVWHLEKHWTLYRDLGPDYFDRLKGEQTQRYHVKRLEKMGFKVTIEPTKQAA

SEQ ID NO: 502846 - protein, 382 aa, unidentified
MRKYTTAKTGNTTGNAVGNTIGMDMGDKSHKAVVIDGGGNEVGREEVPNTREAVGEFLGRHRGATLAIETGTPCRWVAEMARGLGLDAVVANARKVKLITKSSRKNDWNDAAILARLARTDRTLLHPVALRSAGDQRLMRLAKARETLVRCRTAVVNEIRGFCKAEGARLRKCEAEAFAKLRADLPGEAADVTGPLFEQLAGLDAGIKSYDGILREALKRIRGADAGRVMQIPGVGVITAAVFLASIGDVKRFGGKPRDAGPFLGLVPRQGQSGDDDPQLRITKEGNAMARRLLVIAANYIMGPFGKDSDLRRHGMRIAERGGKNAKRRAKIAVARRLAVTMLAMLMKGTDYRPLAEEAPPGAGAPDGGVAAATGGRDAEGT

SEQ ID NO: 502847 - protein, 426 aa, unidentified
MAYRIAGIDVHKKMVAVVVADVDVAGTWQFDRRQLGTSPAQLRGLADWLVEREVVEVVMESTAQYWRPVWEALERSWQPRMQQTDPAPRAGTLHLAQAQSNEGPRGRKRDVPDAERLVKRLVAHELTLSFVPDVTQRLWRTVARRKYQSTCNRVQLQNRLECLLEEMHIKLSSLVADLIGPSARRMLRAIANGDTDPGAVVALGSRRLHATPDQLRDALGACTDLHPVYRRLLALTLDELEVIERHIHELDEELAQLLRGHQDAVERLAAVPGLGVDSAQQIITEVGPTAATFPAAKRLASWVGACPGHDESAGINHSHRAPNGNRQMRRLLNQAANAAVKAKGSIFQLVYRRLVVRLGHAQAIGAIAHRLCRLIWKILHDGVTYEERGPAVTKHRAQRRAAKMIRELRSLGYRVERDLPPASALA

SEQ ID NO: 502848 - protein, 352 aa, unidentified
MDLYAGLDVGLNETSICLVDREGKTIREWKIATDPAGAAEALAPYAAELRRVGVEASSLGLWLYRGLHDQGLPMVMAEARHMSVSLSTMRNKTDRNDARGIAQMMRLGWFRAVHVKNVETQKLATLLTQRKFLNRKLIDLENHIRGALRAYGMLIGPVGRKGYDGRVRELIAHTDYVFIRLIESMLDVRAAVLEGYDRLHRILLQVVQHDGVCRRLMTVPGVGPVTALAFKVGVDDPHRFRRSRTVAAHFGLTPRHIQSGTIDIEGRISKRGDRMVREALCEAAASLLNRVKRYSALRAWGQRIAKRKGAMCAIVAMARKLAGILHRMWIAEADFEPLRGAKITQKLKLKPA

SEQ ID NO: 502849 - protein, 351 aa, unidentified
MKIVAMDLGKNKTVVCIYDQKSGKHKYQTVRTGPQEIHDLIVEQEPERVVFEICSAAGWVYDIARGLGIEVEVANTNGQAWRWKNIRRKNDREDALKLAQLSAMEQLRTVHIPNRKVRQKRALIQYRQSLVARCVQIKNSIRAILDKEGLTMAGGKSGWTKESIGELKLMSLPLEECDVDNLWRGSLRVELEMLSKATELIKQVEGKLDGIAKKDSGVQILRTINGVGPRLAEAVVAYIDEPGRFKKGKQVGCYAGLTPRQYQSGDSNRVGKISGQGNKVLRALLVEVCWLGLRHNEWMRRTYQRILRGSASRKKIAITAVARKLLIRCWAMLRDGTEWRKENKSALDIAA

SEQ ID NO: 502850 - protein, 386 aa, unidentified
MKESKRIIGIDIHPRCFAAAALTVNKRKIWLHARVEMTDLDHWLEKNISLGDVLVLESGSNSFSFAKKVIAHGAECIVLDSVKVGKISKSYLKTDKEDAVKIAKIYLSGLADEVWQPDQKTVMRRQVLSKYTQNKKTIIKTKNMIKCFLTENGVQFPKGKKLYSEKSRNMLLSHSELEMTQKLLLALLYEDLDHALKTKKTLAKIMAQDLISDENAMGLIKLCGIRTICAFALVAAAGDIKRFPTPKKFAAYLGLVPSVQQSGDNKRHGSIGKGGRKETRTFLVQGAQALLKSSDIYGGGFKRWGRALATRKGTNVAVSALARKMAIAAWYQMNGYRTNIHIPERNLNVKIQKISVEIGKDVLREIGYDKPMDFRAEMTKKLVDVA

SEQ ID NO: 502851 - protein, 370 aa, unidentified
MNDYCTYVGLDAHKKEISVAVFFSGESTPLESKIVNDARSVRRLVRRVLAKSGDSVLFCYEAGPLGYTLYRRVLAAGGACQVVAPSLIPKKPGNRVKTDRRDARELGSLLRAGLLTEVEPPTEEEESIRNLCRCRESVKRDLRRCRNRLNHFLLRLGFSYVDGSKWTLKHYQWIRGVSFDHEADRLVFSQYLFSVEQLEEQLRSLDRHLARFAEQEPYREPVARLRCFRGIDTVTAITIVSELYQFGRFLKPRQLMSFLGLTPSEHSSGDSRRPGSITKCGNAHVRRVMIEAGWHYQHRPAVGVALRKRRQGQPEHIISIADQAQQRLHDRFWRLTLKGKPKNKAVTAVARELAGFIWAALYAPCPVASP

SEQ ID NO: 502852 - protein, 446 aa, unidentified
MVIGGPEIRASRRKVIDVKQKSNSLTKGDRVGKTIKARGPVQRDAREVMAELVVKLSQKLEPQSTRKSEEDPRKAGLPGPNRDRLTVGVDLGDKWSNFCILGLDGEKLTEGELRTTPQDFAEFFQAMAGARVVMEVGTHSAWARDVVARSGHEVLVANPRQMEGPKQRKRKNDRVDAHKLARVGRMDPQSLFAIEHRSVEVRQDLVTLRARHAVVAVRKDLINTVRGLVKSMGTRLPKCSTESFAKKVEGALPAEVRDALLPLVRLVEALSNSIKEYDERIEKLATEKYPHTKLLRQVKGVGPLTSLAYVLTLQDPQRFVKSRDVGPYLGLVPKQEDSGDSQPQLRITKMGDMMVRQLLVGSAHYILGPFGPDTDLRRYGLRLSERGGKNAKKRAVVAVARKLAVLLHCLWVSGEVYEPLRHALPKATRKKAERPTAAEASGRAAA

SEQ ID NO: 502853 - protein, 391 aa, unidentified
MLYLGIDQHAKQITISLRDNTGTVVLNRQVSTEPTSCLAFLTKLRERAEGQGYVAIVEVCGFNDWLLDLLPKYGCVQTVLIQPDTKRKVKTDRRDAKALSELLWLNRDRIQNKQSIHGVRQVVLPTVIDRENQRLTSIRQQVGRQHTRTINQIKHILRRHNLQWQMPTKTFPSKKAIEWVKVVELPSCDRSEMNWHIDELKRLATKIESLDAQILARAEGDKDVELLRTIPGVAYFTALALSCRIGDPKRFSSGKGLSNYWGLTPSTADSGDAKGRRGHITKAGSKVARWLLGQIVVHVLRKDPLMKLWYKPIRNRRGSRIARVAVMRRLTVIIRNMLVEGQDYRDCRNAMFERRKKQVENKVENRSKATKKGPLPTASAMNTQPVTTSAH

SEQ ID NO: 502854 - protein, 328 aa, unidentified
MQSGVPTKVLMLGDNLMTDKLIVGVDVSKAWLDIAVADKGMVERIDNTEKAIEQWLARVRPGLVAFEPTGGYERVLQRCVRGRGILFVRVHPNEIIAYRKSRGIKAKTDAIDARLIAAFADEVLSRRGLKPNIAGDETLRELAARRRQMLQTIGAETCRLAIADTKAVRKSLKVVIASLSRSLKAIEAEIRLHLKADENASQLSGLLQTVTGIGPVVAMTFLADLPELGHLSGKQIAALIGLAPLTRRSGTSVTRDHTGHGRPAVRSVLFNAARAAIRHPSPFKAFYERLTIENQKPGKIALVAVMRKILVTANAIARDRQPWHFANT

SEQ ID NO: 502855 - protein, 391 aa, unidentified
MECRDAQPNDLSRSLVALDQNSTIIAVVELSQSSWLVGGVVPGIERQPRKKLEPSPERLLGLLHRWRDEAVRAGGTITRIALAFEAGRDGFWLARWLAARGVEAHVIHPSSVAVSREHRRAKTDRLDTELLKRGFLGWLRGERGHCSMVRVPTLAEEDAKRPNRERECLVKERTRLVNRMKGALARLGIRNFRPTLRNAAEHLAALYTPEGSPLPPNVAAELERDIARLGLVIGQIKQIEEARRQRLEEQPENRPHAMVRLLARVVGIGTETADMLVNEVLSRPMRDRRAVARYAGLTGAPDESGAKRREQGLAKAGNARVRRGMIPLAWRFLRFQKDSALARWYQARTADRRAGTRKTMIVALARKLLIALWRFVTTGETLEGVVLRAAG

SEQ ID NO: 502856 - protein, 347 aa, unidentified
MSITMIGLDTAKSVFQVHAVDGAGQVVTRRKLRRNELIAFFEKQAACTVVMEACGAAHHWARALTGLGHEVKLIAPEAVRPFVKKGKKNDAADAAAICEAASRPGMMFVPIKSLEQQGVLALHSARSLLVKQQTMLANAIRGLATEFGLTVGLGMGKLGELMALVDADEAVPERGRQALSTLFDQCHALDECIETFEAEIVAHARRDDTARRLATIPGIGPITSSLIAATVADIGVFQSARHFAAWLGLVPRQHSTGGKTRLGRITKAGNREIRRLLVLGATSMVHRAPGWNSAAGAWTRGVLERRPVRLVTVALANKMARIAWAVMTRKEVYHAKGRVAAAADAMA

SEQ ID NO: 502857 - protein, 351 aa, unidentified
MNETKTHWAGIDVAKDTFDISMVLAHQHFPQTPLCAIPAETFERTAKGVRHAVKWLDAQLKKAGESGQPIRAVMEATGKYSLELTVLLTQERPGLRPSIINPKRGHDFIKSLGVRGKTDRMDARGMGFYGVERQPAEYEPQTLELAKLREMNRFRDFLVAQKVAEENRMDDVSQCKEVQKIAKRRKVQIEHDIKKIEAEMKAHVKSFDSLKRDVQLLVTIPGIGFLSACTSMAELGDLRRFNRARQVTAFAGMCPSEYESGSSVHGKTRLSKSGNTRVRQALYMSAMTAARMEGPLCDDYNRKLREGKERMVAMGMVMRKLLVLMRAILISGLPYDKNHHSGGKPCGKLAA

SEQ ID NO: 502858 - protein, 412 aa, unidentified
MEIIYTCCCGLDVHAKTVVACLIKQGKKEVRTFSTMTDDLLRMSDWLIGAGCTIVAIESTGVYWKPVFNILEGNLEVLLVNARHYKGIPGRKTDVKDCQWLADLLRHGLLKASFIPPLEIRELRELTRYRQQLVKELATIANRVQKLIESANIKLGQVATDVLGVSGRLMLRALAAGETDAEKMSEFARRRMKSKQPELRRALEGRLTKSQRWVLGELLTRYEELESAIKRVEHQIDQEVADCADPFVSKAVELLKTIPGIGERVAETMVSEIGVDMGRFPSDRHLSSWAGMCPGNNESAGKRKSSKTTKGSRYLREALVQAAWAASHTKQTYLAAQYRRLAQRLGKKKALVAVGHTLLVIVYHVLAHQMSYNELGGDYFDKQNVETQRKRLIRRLEATGLKVTVEEVQNAA

SEQ ID NO: 502859 - protein, 362 aa, unidentified
MPQGMRWVGLDVHASETMLAVFDDATGEVLTRRVAGRPHELMPWLDGIKRPMRAVYEAGPTGYGLVRRARADGIEMAVCAPGRNDRTTTRVKTDRRDAIRLARLLAAGELTLVVVPSVEHEQLRDLVRCREDIRADLMRARHRLGKFLLRRERYYSGPNNPRSKAHRAWVAGLSLPDLASQLTLADYLHAHDVLVARRDTIERRLAALAADSPWAETIARLRCLRGIDTLSALGLCAEIGAFERFDHPDGLAAYLGLVPCEHSSGERRRQGSITKAGSSHARRLLVEAAYHYRRRPNIGKTLEHRQRGQQPAIVDLAWRTQRRLHARWRHLHGTRGKPNGVVAIAVARELAASCWRLATQRP

SEQ ID NO: 502860 - protein, 490 aa, unidentified
MARLLEHSPRPESTYRPTWAVVSGKAEQMQDSDQRKDNADSSKQIAGLPVVRHKVAGIDLGSERHWVCAATVEGSGREVADFGATTCELIRMAKWLNARKVESVAMESTGVYWIAPHEVLEAEGLEVMLVDTRQLARVPGRDKKSDPFDCEWIQRLHSCGLLMGSFRPKEAVCMLRTLVRDKGNLVAEAGDWLRRMQKSLDQMNVRVHRAVSDIDGVTGMAILRAIVDGERDARQLAKLRNPRCHKSEEEIAEQLSGHWREDHLFSLRQGLKMYDAIQERITDYEKEILQKLAKMEREECRGQEVPKSKKPQKGRAIQSRGAEPMRQALYRMSGVDLTGIDAIGVETVQVVLSEYGPDLSRFPTEKQFVSHVTLAPHKPTSAGKPVKKKKRNSASTRVAAALRMAASSLRHSETALGAYYRHIARRIGGDVAVFATARKLATIIYRLLRWGQPYVDEGAQTYEQRYRENRIKSLTARAKELGYQLTPTTA

SEQ ID NO: 502861 - protein, 321 aa, unidentified
MAMLSFCGIDVSKDRLDVMVLPEQQSFSVGNDAAGRAELVARLRSFAIAAIGLEASGGYERGAMRALLAAGLPACQVNPFKLRQFARASGVLAKNDPLDTRMIASFVAIMPTRPARPRPPAIERLTEMLAIRRQLNAEKVAAENASRLLEDTMLRRLSRRRIARLAADIDMLDRRLVAITASDAALAHRYRLLTSMPGVGLVLACTLIALLPELGTINRKQVAALVGVAPYAFESGKFKGRRCIWGGRAPVREVLYMAAMSASNWNPVFKAFHTRLKAAGKLPKVAIVAVMRKIITTLNAMVRDDVVWADHLHGRHIVPAA

SEQ ID NO: 502862 - protein, 422 aa, unidentified
MESVIVAGVDVSKYFSDMCVLSADNLVLKELHFTHDHAGLNKAADTLRQIEKKSGLNVVIIMESTSHYHRLPYYFFRNSGIDVIVINPLQSNAIKNISIRKVKTDKVDAYRIALLYRLQHFEVTDQPIDILFDLRNLTRQYGDIVKSRTAFSNQLVACLDQAFPSFRKVFKSVTTVTALSLLQHWQAPQSILSADRTQIYELIRAVSRSGSAYALRKTDMLYQLAALDSQINLQAESNCILIRSIVSIILSLNENLKLLHDEVKRLINTDRFAFTQVTLLSTIPGISWFGAALLLAEIGDFTRFKKPAQLVAYCGLDPSQRQSGMFKGTKNKISKRGCRYIRRLLNMSAVTAVSKNSTGEYNNPVLAEYYQGKCLSKPKKVVLCAIMNKIMHIVFAILRDQKPFELRTPEEHAIKLHQKNVA

SEQ ID NO: 502863 - protein, 367 aa, unidentified
MGSTLPERTPFMTSNIKYIGMDVHTESISIAVMNSIGKVVMESVIETKASMILQFIDGLRGDLQVTFEEGTSAAWLYDLLKPHVTKLVVCDPRKNKSMREGNQNDKIDARRLAELLRLNHLTPVYHGEHGLRTLKELVRSYLTVTKDLARVMTRVKAIYRSWAVPCSGKQVYARRHRQEWLGKITEPGVRRRAEFYYQQLDALRGLRQEARRDLLAESKKHKAWKQLCGIPSIGPIRAAVLLGILQTPHRFRSKRPLWNYGGLAIEMHSSADHRSVDGQLQRSRKNVLVRGLNRNCNHDLKNLFKGAAAVASSKPGPFQEFYTALVAKGMRPEMARLTLARKIATIVLIVWKKGVCFDANHLKPQTA

SEQ ID NO: 502864 - protein, 338 aa, unidentified
MLYSGIDLHKRTLAIHTVDAAGTLVRKADLPTSRAAVTAYFATLDGPHQAVCECTSMWYWIRDLLVPQGVDLRLAHAKYLKAISYAKVKTDAVDASTMAQLLRVQLIPEAHMIREGHREVRDLLRSRLLMVSRAVRCQRAIGELLEKYNVATPASLPALPRLQVDLHAAQGALLKSHIQRLDHELRDRVLATPDAQRLVWVPGIGRIVAYTLLLEIDDIRRFPSVRHFHSYCRLVPGSHDSGGKTRHKRSRDGNRYLKLAFHHAAIRAIQYFPEVKAEFQRWQRRKGKPIARALIAKELATIVYAMLSKGEPFNKLFHGHAVTTTKRCTWPRLANPPA

SEQ ID NO: 502865 - protein, 358 aa, unidentified
MAVTGGTRRIVGGVDTHKDLHVAAVVDEQDRVIGTRSFATTRQGYHQMLAWMRSFGELQRIGIESTGSYGAGLLRFMQQAKVAVLEVTTPDKQDRRRRGKNDDLDAQNAAHAAFAGQRTVTPRSRDGMIESLRILMACRKTAVSARRVALQMIHNTIVCAPDGLRDQLRSLTRMQLVRTLASWRPDLTAYRDLDSAYRIGLKSLARRYLELHDEIADLDVMIAAIVDELAANLVARNSIGQIGAAQLLLTAGDNPERLRSEASFASLCGVSPVPASSGKTVRHRLNRGGDRAANSALHIIAIGRLRTDQRTKDYVARRIAEGHSKLDAIRALKRYLAREVFTLITQRRKEINATRIAA

SEQ ID NO: 502866 - protein, 405 aa, unidentified
MLGERFAGVDWASEEHAVCVNDAGGRIVEGRRYRHDERGLKALCARLIELGVVLVAIERPDGLLIERLLDAGLRVIAIHPNQVAAMRPRFSAAGGKSDGFDSFVLAELARTDSHRFRVLVPDTDATKALRALSRAREDLVGHRVALANELRAQLECFWPGAAHVFADVDSPIALAFLKRYPSPGDAHGLGEQRMARFLARHHYCGRKPSAELLARLRGAAEGRAATLESEARRQVVLALVAALEPIVARIAELTSEIRGALHDHVDGRTFRSLFIDPKSAVCAAAMLAEIGDCRDRYPTKTALAADGGQAPVAVESGKSKRARFRWACDHRLRAAICTLADTSRHHNPWAADIYDRARARGCTHQHAIRILGRAWCAVIWRIWHDHDVYDPARHTARQHLTAATT

SEQ ID NO: 502867 - protein, 363 aa, unidentified
MEVAKEGRFVGIDMGKRGYVLRMIDGQNRITGWEGKTNPEGRRELYKRLRADDRIAIEACNLAFIMNREFKELTGTELYILNPGKLFQIYMTDKKTDKEDALKLAKEIRDKPEEDLPRVYAPTEEMKEMRKVVSEYRETVKFHTQRVNRLHTVYEHCGITDMKRSDLKTRTNREKNLELLSGYEKEEALRLMQVIDLLESQKDELEKKIKETERSNEKIRAVEQVPGVGKITAYAFVASVGGADRFANMAQVSSFLGFVPKIDCSSQTVHYGHITKKGNGYLRGLLVQAAWVLVRSKNGGALKEKYHNLVLHGLSKKKAIVAIARKMAELMYTLLKNKSLYEPRKFTVPLSRAERLANLAVAG

SEQ ID NO: 502868 - protein, 419 aa, unidentified
MRNGNTKKLKSISEGTLLVTIDMGKVKHTGYYRFSNGSEGKPFEFFNSRNGFEEFWWRICQAKRSLNLAEVVVGFESTGPYAEPLLHFLRKREARLVQVNPLHTKRLKELQGNSPNKTDQKDPKVIADIIELGHALTVIIPEGAGAELRRLTQARERSIQRMSRLMSQLQDLIFIIFPEFMTVMKDITIKSTQYILKNYPRPQDVVEMGVELLTQILKKVSRGQLGKERAEALYQAAVESVGIMEGRESIVFEIKEMVSAIESIERFTKELEKHMSKHLRDIPYSRCILSMKGIGEITAAGLIGEMGDFRKYRTISEVIKHAGLDLFEISSGKHKGKRRISKRGRPLLRKLLFFASINVVRKGGVLHKQYQHHLEKGMPKIKALIAISRKLLSIIFAVVRDHNVYIAEYLKTQQLKEAA

SEQ ID NO: 502869 - protein, 439 aa, unidentified
MLSLHYFILGGRSLEIGDVVYPICCGVDVHKKFFVATLIITKGFVPHYQKRRFSTFNNQILAFKQWLLDNNCYDVCMESTGKYYVPVYNLLEDSIRVTIANPKWVRAVKGHKDDAKDSKWIGNLFRLGLVPGSFIPGKDIRILREFTRYRFKLVSCKSSEKNRYQNVFTVCNVALDAVVSDMFGKSASSITNYIINSDTFDMDHCVSLLRGSLKQKAEEVAASIDGFQMAPAQKLRAKAVLEHYDFLVEHIQQLDTSIDCLAAPLESSIALLSCIPGIDRRSAITVLSEIGTDMSPFGSSKRLCCWGGLTPGNNESAGKKKSVKITRAGVYLKPALVEIAHAAIKDKTNPYYAIKYERISKRRGKKRAIIAIARMILTAIYHMLSTGEVWNPCDLQQIDMPPELREKELHKSLRRAAKLLVEQGVVNPDDILLPLANSA

SEQ ID NO: 502870 - protein, 355 aa, unidentified
MDSTKYVGMDVHTEAISVAVRNSAGKVIMESILETKANTILEFLQGLRGNVHVTFEEGTWAAWLYDLLKPHVTKVLVCNPRKNALLKDGNKGDKIDARKLSELLRLNHLNPVYHGEHGIRALKELSRSYLTISKDLGRVMNRLKALYRSWGIPCKGQQVYAPRHHSEWLNKITEAGVRRRAEYLYQQLDALQPLRQQVRRDLLAESRKQPATKLLRKIPCIGPIRAALLIALIQTPHRFRTKRQLWNYSGLGIETHDSAQYRFVRGELQRSKRPQQLRGLNKNHNHDLKNIFKSAATMATISAGPFHDFYEALLVKGRKPTMARLTLARKIAAITLIVWKKEVSFDGKHLKPQAA

SEQ ID NO: 502871 - protein, 364 aa, unidentified
MLIIGCDYHPSGQQVFGIDSESGEVFADRWITHRGTELEEFYGGLPAGTVVGVECSGNMQWFERRLAHYGHRLRLGDAAKIRSKETRKQKHDRRDAELIARLLREDQFPDLPWVPTLAERDQRQLLMHRHKLVRMRAQVKNQLQHIALNQGEQKKRQLWTKAGRELLEHLPLEPWTARRRDDLLRWLDLLDRDCASLEREVERAAESRSDARLLMTHPGIGPVISLAFVLTIGSIERFQRSRELVSYLGLNPTEDSSGERRRLGGISKQGSSFLRLLLIQGAQTAVRGDEDLRRQYRRLASKKHRAVAKVMVARKLAVRMFWMLKTQRTHAELVRMRGSSSHSGVNKTDALSERPASPRIWPQG

SEQ ID NO: 502872 - protein, 459 aa, unidentified
MRRKSRRTKGIEQAHPFDGMSRVNPNAAGVDIGAEEIVACVAANETIQLVRGFGNYTVDLHAIADWLAEHKIKTVAMESTGVYWIPLFEVLEQRGFECLLISSRSLRRVAGRKSDITDSQWIQTLHNYGLLESSFRPQSDLVALRSLLRHRRSLVDHRSPHVLHMQKALLQMNIQLSQAVSDVTGVTGQAIIRAILSGVRDPQMLASLREPGCKKSEEEIGRALTGTWREEHLFVLKQAVALYDFYTQQIQECDEEIERLYSEIRPDWDGGDVKPLPARKRNSHSKNKFRETEKIRAHLKRISGVDISLVDGMGVSLAQTVIMESGTDMSKFPTEKHFCSWLGVAPKHDISGNKVLKNSTLKTKSHAGQAFRMAAQSVKQAECAFGVLYRRLRARLGPAQATVATAHAIARVVYRMLKYQVEYDPLSVNEYQKQYEEQQIKYMKKRAAKLGYELVPVPA

SEQ ID NO: 502873 - protein, 343 aa, unidentified
MDYYVGLDVSLKQTSICVVNQAGSIVHEGVADSDPEAIASFVRSKAPGTVRIGIETGPTTTWLWTELKRLGLPVICIDARHAKAVLKMQINKSDRNDAAGIARIMQTGWFKEVRVKDLDSHAVKALLASRALLVKIKRDLENQIRGLLKNLGLVIGRAKFNVFAVRAEELIEDRPELVAAVRPLLDARKAIERQVGDLDRKVHKLARHDVQVRRFMTVPGVGPITALCFKATIDDPTRFRRSRSVGAYVGLTTRRHASGEVDWSGRISKCGDAMLRMYLFEAAGVLLTRVPKWSGLKAWGAKLTKRNGLRKAKVAVARKLAVILHRMWIDGTEFNWSTKKTAA

SEQ ID NO: 502874 - protein, 307 aa, unidentified
MQKISTMRTSGKNIFEGQLTIGVDLGDSSSSYCVLDEAGQIILERKLATTQEAMRKVFGSMPRSRIAMETGTHSPWVSRLLTAVGHEVIVAHAQQVRLIVKSRKKDDRLDARTLARLARIDPELLSPVRHRSAEAQIHLTEIRARAVLVSVRTALVNAARGLVKSYGERLPKCGTKQVSRETAAGLSVELKKALEPLLEEVESLNERIKEYDRRIEKMAKEKYPEVELLKQVKGVGDLIALGYVLTIEDPRRFKKSRDVGCFLGLQPGRRNSREERATATHQQGGGSVSANAAGAGGALHSRTFWRR

SEQ ID NO: 502875 - protein, 442 aa, unidentified
MARKPSKQRFTVVHPDCAAIDVGGREHFVAVDPRHENPVQSFTSFTDDLLKMANWLESLGIKVVAMESTGVYWIPIYEILSERGFEVYLVNARATRQITGRKSDVLDCQWIWQLMTHGLLRGAFRPDDLTCCVRSLVRQRASKVKDQAQTLNRMQKAMSQMNIQLANVISDISGVTGMKILRAICAGERDPVQLAELTDRRIKAGKEAVARSLHGNWRREHLHALTQELAAYDFLEQQIADCDDAIKAALEQLPVLQNKPEPSNKPLRSPHRNGAQQTELHQTLWKVLGVDLTAIPTIGVDTALVLAGEIGTDLSRFPSSQHFCSWLGLAPPTRISGGHRLASGGPKIVNRAAQALKQAASNARNDKGFIGASHRARLTRMDTSCAIKATAHQLARLVYNLLTKKQAYVEKGLEEFETRSQDRQVRALLRKARKLGYQLVAA

SEQ ID NO: 502876 - protein, 355 aa, unidentified
MATEQIEVVAGVDTHSNTHHAAVLDPVGRLLGTREFRAEPAGYLELLSWVQSFGRISLIGVEGTGSYGAGLTRCLRQHQVRAIEVNRPDRRTRRVRGKSDPIDAESAARRALSGVETVIPKDTNTIVESIRVLRIARTGAVKARTAAYNQLKDLIITAPEPLRSTLRGKTLHRVSLEAARLRPDTAQLAVPAQATKLALRTIAIRVGGYNTEIAELDKHLKSLVAVAAPRTHALLGVGVEHAAQLLITAGGNPERLRSESAFAALCAACPIPASSGKTQRHRLNRGGDRDANRTLYMITISRLRYCPDTRAYIERRQASGMSKPEAIRCIKRYIARQTFHTIRADLASLRPLDGP

SEQ ID NO: 502877 - protein, 321 aa, unidentified
MLYLGIDQHARQITISLRDDGGDVLQARQVSTQPDKINAFFRQLTRERLHDGESFVAVLEVCGFNDWLIRMLQEYRCHKVILIQPDQRKKCKTDRRDAAALSELLWVNRDRLLQGKPVRGLRQVDIARGTDQENRRLTTLRKDAGQARTRLVNRVRHILRRHNLQWQMPTKKFPTKAGIAWLKQLALPEIDRLEMNHLLADLERVQGRRKELEQVIAQRCGVSEEAVLLSSMPGVSYFTAVSLACRVGRVERFPRARSLANYWGLTPGCRNSGENTPPTIWQKAPFGAFSKRAGVHPVDHPDLFLAHLDALDQRPHDLPPC

SEQ ID NO: 502878 - protein, 458 aa, unidentified
MARRRLHRPTRPVTMPTLHPDAAGIDIGATELYACVPLDRDPEPIRRFGTFTEDLHALADWLRQCGVTAVAMEATGVYWIPLYQILETRGFAVCLVNARHVKHAPGRKSDVQDCQWLQYLYSVGLLRASFRPPEAVCAVRTLLRHRENLVQLAAAHTQHLQKALTQMNLQLHHVLTDITGVTGLAILDAILAGERDPQALVQHRDHRIKASPATIAKALVGDYRLEHLFTLRQSLAAYRHTQDLIAACDCEIQRRLGSFTSTIDPATHPLPPAAKKSRRPARGTTPAFDLRTELYRILGTDLTRVPGLNTSTVSTLFAELGADLTKFPANDHFASWLGLCPDNRISGGKILSVKTRSVKHRVADALRLAAQSLSRSSSVLGCFFRRMRAKLGAPEAITATAHKLARIIYHLLTTHEPYDETRLARAEQDHQRRSEARLRSQARALGFQLVPAIEQSVS

SEQ ID NO: 502879 - protein, 358 aa, unidentified
MQTQFKELDFTGQNIYTGIDVHKKSWQVSVFSEALFHKTFNQPPKPEVLHGYLTKHFPKGTYYSVYEAGFCGFWIHDKLQSLGINNIVVNPADVPTTDKEKKRKTDKVDSNKLARQLRNGDLDAIYTHKRSMLEDRSLLRMRRTLVKDLTRNKNRVKSDLHFFGIEIPEQFTKNPSYWSKRFINWLEELEFQQWTGTFSLRILMSQVKMLREQLLEVNRKVRTLSREDYYQKRVALLGSIFGVGLITSMTILTEIDDIHRFANLEKLRSYVGLTPTSHSSGDKNLHGEMIHRGNKFLKSAIFESAWIAARLDPVLHMDYVNFCKRMKPNRAIVRIACKLLDRVHYVLKNEMPYKSGIR

SEQ ID NO: 502880 - protein, 358 aa, unidentified
MEQILRVGVDLSKRVIQLHGVDAHERVVLRRSVSVDKFPELMVQLPACLVAMEACSTAHYWARKLAVFGHTVRLIAPQFVSPYRKSGTTGKNDAADAEAICEAASRPTMRFVPAKNVYQQGIMTLHRMRQGWIEERTALINRLRGLLAEFGVALPQRTTALQRIPELLEDASNEIPGVARSALMTGWQHLSVLNERVTEMDRNIRSHAKADESARRIMELPGVGALTASALVAAVGDAREFKNSRQFAAWLGLTPSQNSSGGKVQLGQITKRGDGYVRMLLIMGARSALLTAPRRDDRISRWLLELEMKVGWRKALVALANKHARIIWNMLTKKEAFVANHIPPGFQAKAMQTIAAVT

SEQ ID NO: 502881 - protein, 380 aa, unidentified
MATTRTVLRGQLTTKPVDLYMSFELGDKHWHISIGDERRSVRRYSVEAGNTDEVADCIAKAAARLHTTAKTRVHSCYEAGRDGWWLHRWLSEHGVDNIVVDPASIEVNRRARRAKTDRLDADKLLAMLIRHHSGERVWSVLREPSPSDEDARRVHRELQRLMHERIAHTNRISSLLVLHNLRPRIVIGGRDWPGWWNSHREQVPPTLRAELEREAVRLKVVKEQVRAIEAERARELAEGKQPLVAQLVRLRAIGAKGAWVLVKEVFGWRHFANRRELAGSLGLVPTPYASGDSQIEQGISKAGNRRVRALLVELGWSWLRLQPGSALTQWFNRRFAGAGKRMRRVGIVALARRLAIALWRYLQDGQIPTGAQLKPAGFPA

SEQ ID NO: 502882 - protein, 368 aa, unidentified
MTKTVYIGMDVHSTNYTLSSYIFEEDKSFATVKLSAETGSILKYIDRIRKEYGDDVNIVTGYEAGSLGYTLYKDLKDNGIECIIIAPTSLPKKKAGEIKTDKKDAQKLAHALAVGDYKAVYIPDNHDDEVKQYIRMRDDHKLALKKIKQQILAFCLRNGHKYDKGKSCWTQKHLKWLRDLEMPALLKTILEEYLISYDYYSLRIEQMDQAIERFCNEERYKEKTERLCCLSGMSYHKALCHIVETSDFDRFKKASAYSAYIGTVPGESSSSNDVNRLGITKAGNRHLRTLDIEAAHTIGRTSKKKSKALIQRQTKCSPEVISYCDKANERMRKMYIDISLRKNKNIAAAAVARELACFIWGLMTDHIS

SEQ ID NO: 502883 - protein, 346 aa, unidentified
MKILALDLSKFKSVGCVYEADSGEHRYRRVNTRPAELHDLLVELEPDRVVIEVSSVSGWVSDLVRVMGIELQVVNTNGEAWRWRSVEQKHDQADALKLARLSAMNQLDLVHVPAPEIRQWRAVIKYRQHLVGRRTDIKNHVRELLVREGVILPRGRKCWSQEGCAGLEEKARSWEEVGISELWRGELQSELQQLQVIQERIRELEAKLEELAKTDDRVGLLRTIPGVGPRLAEAMVALIDDPHRFKRARDVGAYLGLVPRQYQSGEMNRLCRITKRGSKLLRSLLVEVSWVSLRHNPWLRSLYERMNRGSKTRKKIAIVAVARHLAIYCWAMLRDGTTWRQPCTNQ

SEQ ID NO: 502884 - protein, 380 aa, unidentified
MDVHSTNYTLCAMEPIIGSEDRIFGEIQVAPDYKEVVCFIESLKMKLGLNDDYSIECGYEAGCLGYTLYHQLANAGIKCVILAPTTMLTQQGRRVKTDKRDARLIAQCLCYGGYHPVYIPTGEDDAVKEYLRMRDDHKLALKKLKQQINAFVLRHGYQYVGTKWTIKHVTWLNKLELDPMYRETLNEYMASYEEQEAKIERYDKRIEEIATEVRYQENAQKLGCFLGIRTHTALSLIVETGDFKRFGKGNIYAAFLGLAPGERSSSTNVNRLGISKAGNTHLRCLLIEAAKGICKGAIGHKSKELRSRQSGQSADVIAYADKANTRLRSKYYKMIRHGKKKNVAVAAVARELACFVWGMMTGNISISSAAGTSVPAVSQG

SEQ ID NO: 502885 - protein, 342 aa, unidentified
MKFTTIGIDLAKNVFQVHGADAKGKAVMKKQLKRAQVLPFFANLTPCKVGMEACGSAHYWARKLQGLGHTVHLIAPQYVKPFVKRNKNDAADAEAICEAVTRPDMPAVPVKNAEQQAILSVHRARQGFVKARTAQANQIRGLLAEYGITIPQGINHIAKRVPEIIEDGQNDLPGSFRLLIQRLVDHLKELDRQVGELETEIQLWHRNNAASQKLAKIPGIGPMTASAMVASIGDARNFKDGRQLAAWLGIVPRQHSTGGKSTLLGISKRGDTYLRTLLIHGARAVIRVAERKADADPWLKSLLARRNKNVAAVALANKNARTIWALLAHDREYEAHYVGAAA

SEQ ID NO: 502886 - protein, 343 aa, unidentified
MQTVATIGLDIAKSIFQVHGVDAGGQVVIRRRLKRRYVLAFFQKLSPCLVGIEACASSHYWSRELQALGHKVRLMPPAYVKPYVKRQKNDATDAEAICEAVTRPNMRFVATKTPEQQSCLTLHRTRHLLIRQQTSVINAIRAHVAEFGIVAPVGRNGVDQLLGIVADLADKRLPEVARTCVAALGAQLRMLKAQILEFDRMIRAWQRSSEVSRRLDAIPGVGPALATALVASVADPKAFRSGRDFSAWIGLVPKQSSSGGKDRLGNISKRGDRYLRSLFTAGALAVIRYAKIHGTTHRPWLTALLARRPTKVAAIALANKLARMAWAMMAKGEQYKEPAALAA

SEQ ID NO: 502887 - protein, 341 aa, unidentified
MLLIGCDFHTRFQQIAMLDSTTGEMMERRLEHPEEARRFYAALPSPARVGMEATGPAQWFERVLREWGHELWVGDAAEIRASVVRKQKTDARDALHILDLLVSGRFPRIWIPSVAERDARQLLRHRGKLVRFRTSVQNQLHALAMGEGVCRRKKLWTKVGRKELAGLELGPWASRRREDLLVMLDRLHAGIEELDQAVRNEAASRPEAVRLMQQPGVGPVTALAFVLTIGPVERFRRSKQVVSYLGLNPRESSSGGQQRLGSISKQGNSMLRWLLTEAAQTASKFDPELRRDYLRLQFRRGRGVAKIAIARKLAVRLYWRLREAAQPAPPAPMQGSPTRAC

SEQ ID NO: 502888 - protein, 351 aa, unidentified
MSHKTVATVAHTIGIDTGKNILHLIGLDNQGAIVLREKIARGRIAARLANVPRCLIGIEAGMATHYVARELSALGHDVKQVPPAYSKPFRQGHKNDFRDAHAVAEAVQRRSTRCVAVKTDDQLDLQGLHRVRSRLISDRTAVINQIRSFLLERGIPVRQGLRFLRQQLPDILAKRTDVLSPRIIRIIEDLIGDWSHLDERIENATNEIEALARGSESCRQLMTVPGIGPIIASAMVAAIGNGTAFAKGRDFAAWLGLVPKQMSTGDRTILGRITKRGNRYLRTLFMQGARVILLRPANWAKHNFGLWLTAAAQRLHHNVLATALANKLARIAWTVLAQGRSYEARVEPKVA

SEQ ID NO: 502889 - protein, 409 aa, unidentified
MEVLFERCCGLDVHQARVVACLRRPGTRGRRTGEVRTFGTTTAELLTLADWLTAEGVSHVAMESTGVFWKPVFNILEGQVEVILVNAQHIKAVPGRKTDVRDCEWIAQLLEHGLLRASFIPPPPIRELRDLTRHRTVLVHQRVSEANRVQKVLESANIKLTLVVTDVLGASGRAMLRALIAGERDVTVLAELAKGSLRQKRARLAEALCGRVSAHHTFLLEQVLTHIEYLEGTIARLDRRIGEVIAPYADHVTHLQSIPGVDRDAAETIIAEAGVDMTRFPSAGHLASWVGICPGNYESAGKRQRGTTRKGNRWLKTMLVECGWGAGRARRTYLGAQYARLSRRRGKKKAAMAVGHSILVAAYYILRDGVPYRDLGPDHFDRLASQRLTRHYVHRLEQLGHHVTIEPAA

SEQ ID NO: 502890 - protein, 370 aa, unidentified
MSVRRILAKTINTDLEYEAIGIDLAKNCVSVALLTTDGEVVCIDRLDYSELEKSAQVLCPTTFAMEPCTEMNYLVQKLEAWGHRCLVIGGKNVQNYVENHYSGQKTDLNDAQALAFLAQDTQLRTIKAKDMEQQKYASLTTLREQYIKQYRQTIVSLKGICQAWGLNISKGISGKARLKDLIENHAAFPEELKESLVDMVTHAQTAQKALNKITKTLELLAKNDKVCQLIQTIPGLGPICSCRLRATIGDIQRFKNLKDFPAYYGLVPRSIATGHNEKKGRITHRGDKTMRSLMVQGAGSVVNMATKGKLKSKQLTKWILKKQKEKRPWGKLVCAVAAKLLRIVRAVLISRKPYNPKIAGVAKCSLPKGT

SEQ ID NO: 502891 - protein, 408 aa, unidentified
MEVVYRCCCGIDVHKKIIVACLNQGGEQSLREFGTTTSEIKSLATWLTESGCEIIAMESTGVFWKPLYNLFELMDLDAIVVNAAHMKALPGRKTDVKDAEWIADLLRHGLLKASYIPSREQRELREITRYRKSLTEERCRETNRLQKILEGANIKLDSVVKDINGKSARKLLEKIIEDDVPTSEEEISKMIHGRMRSKLGQLVTAIEGITTPLQRKLLAQVIDHIDDLNRRIADLDKLVQDYMDEYEAAITALCDIPGIARRSAEVILAEIGLDMSRFPSAAHLCSWAGVCPGNCQSEGRRKHGKTTKGNKPLKTILTQCAKSARSVKGSYFSAQYQRIAARRGKNRATLAVAHSMLIAIYHMLRNNVPFRDLGSDYYDSFNRDRKIHGYLKRLKALGWEPDALPGSA

SEQ ID NO: 502892 - protein, 389 aa, unidentified
MKIFVGIDIAKLNHFAAAISSDGEILLEPFKFTNDADGFQLLVSKLESFDKNSIIIGLESTAHYGDNLVRYLVAEFYQVCVLNPIKTCQMRKNNVRKTKTDKVDTFVIVKTLMMQDDLRFITFFDLDMMDLKALGRFRQKTIKQRTRLKIQLTTYVDQVFPEIQYFFKSGLHQHAVYALLKEAPSPKEVASMHMTHLANLLKVNSHGHFTKELAKELRVLAQKSVGANDSAISIQITQTIQQIELLDSQLEKIEAEMTDIMKFNDSVIMTIPGIGYINGGMILGEIGDIHRFSNPNKLLAFAGLDPSVYQSGNFQAKTTRMSKRGSRVLRYALVNAAWNVVRNNATFKAYYDAKRAEGRSHYNALGHCAGKLVRVIWKMLTDEVEFNLE

SEQ ID NO: 502893 - protein, 324 aa, unidentified
MNKNTKFFGIDISKDVFDVVDSSEKHHQFKNDPSGFKKFGKLLDGSSHCVMEATGSYYQGLATWLFSQSIDVSVVNPLSVKRFIQMRLKTSKTDKMDALMIRLYGESEEPKLWNPPSKLIIEATELHKLIELLVRQRAGLKNRLHALESKGITKSLVHTTVRRQIRNLGKEIADLEVKLESVIKEYEPDLLTRLCSIPGIGKRTAIYLIVLTHGFEKFESSRQLIAFFGLDPIIRESGSSIRGKSRISKTGDNQVRKLLFMCAFTACEHNKACREIYQRITAKGKSKKLALIAVANKLLKQSLAIAKSGLYYDENYRSVNVNLG

SEQ ID NO: 502894 - protein, 416 aa, unidentified
MKKNSKSAMKKEQKAKRTKGQRPVQREPKAVLAELVEKLQGRLEVKTTSARPAEAGARTELGPNLDGLTVGVDLGDQWSHFCILGLHGETLSEGQLQTREAEVAEFFQALPAARVVMEVGTHSPWMQEIIAGEGHEVVVANPRLMEGSKRRKRKNDRIDAKKLARLGRVDPQSLYPIRHRSREVRQDLVMLRAREALVAARTELINAARGLVKSMGTRLPQCSSPSFGHKVKDAIPKKVREALLPLVQLADALSDCIQSYDQKIEELGREKYGHTKLLRQVKGVGPITALAYVLTLENPEQFAKSRDVGSYLGLVPKQEDSGESQPQLGISKTGDTMVRKLLVGSAQYILGPFGPDTDLRRYGLRLCERGGKNAKKRAAVAVARKLAVLLHRLWVSGEVYEPLGYASSRAIVEQAA

SEQ ID NO: 502895 - protein, 408 aa, unidentified
MNTLYVGIDVSSKSNVIYLMLPNGDKHSNFSVANSHEGSTQLVKRILSALTSHSLDTVLIGLEATSVYGDNLVYFLREDATLAPFNRKIHVLNPKQVKKFHDTYNDLPKNDYVDSFVIADCLRFGRINKEVYMGDYRYKALQNLTRARFFAVQNLVKEKQRFMNVLFKKYSTMTQEKVFSDTFSTTALAVYDEFESAEALANMDLHELTDFIIEKGKNRFPDPDAVAKAIQKAARSSYRLPKTVNDSVNQVLSISITSMKALESQIKEFDKAIKAQMELLPNVLISIPGIGPVYSAGIMAEIGDINRFNSQAALAKYAGLAWKQHQSGGFESEVTRLIPSGNRFLKYYLCEAAFSLVRCDKEYSDFYRLKYKEVNRCQHKRALALTARKFVRLVFRLLKDNRLYCPAK

SEQ ID NO: 502896 - protein, 352 aa, unidentified
MLVTIGADSHKATHTVVAVDEVGRVLGEKQVRATSEGHLVLVQWAARFDQVVFALEDCRHLTRRLEADLLKAGHRVVRVPTRLMAQARRSAREPGKSDPIDAQAVAQAALRYPDLPRAELDGPAREVKLLSDHRRDLVGQRTRIAAQVRWHLHELDPGLDIPSRGMRRRSVVGQLQSRLAGASGVVARITRELLARCQELNTQINGLDAELRVLVRAQAPALLAIPGCGVLSAAVIIGETAGVHRFGSRARFARFTGTAPVPVWSGANAGKVRLNRGGNRDMNCALHTIAITQARQGVGPGSSYIAKQTGRGKDTTAALRLLRRRLSDTVFTALRTDQHVIARPATTLAEAA

SEQ ID NO: 502897 - protein, 376 aa, unidentified
MSVYVGIDVHRKRSQVAVVTEEGTVQVNRNVPNGVAPILKVIGDLPTGTSVAFEAAYGWGWLVELLEDYGFDPHLVHPLRCKAIASARLKNDKVDAAILAQLLRADLLPEAWIAPKEVRELRALLRHRVALVRLGTRLRNRIHAVCADHGYHRPDRTWTGAYWTGPGRQWLDALDLPEVSRQITWDSLGIIDAIAPTIDRLDREIHARANADPRVKVLTALPGVGEFTALVLLAEIGDITRFGNARKLASWAGLTPTVRGSDLTVRHGHISKQGSPYVRWVLGQAAHIAKRHPEFAASYQSIATRRGKKIASVAIAPKLLTRAYHLLAEPPGQTTTDDSTCVARDPRVRPQTGRVTKPGRARPSGMSRPRQTRASD

SEQ ID NO: 502898 - protein, 340 aa, unidentified
MSEISIIGLDIGKHVFQVHGADALGRAVLRKKISRARLLPFFASQPRCRVVLEACGGAHHWARELARLGHEVQLIAPAYVRPFVKRQKNDAADAEAICEAAQRPSMRFVPIKSEAQQAAAMVFRGRDLLVRQRTQISNALRGHMAEYGWVAPKGLAHLDKLATLLADPTAVPEGVRSVCTVLLESLALLDRQIAALDKEIVRRSREDAVARRLMTIPGIGPITATAITALAPPPGTFAKGRDFAAWVGLTPRQHSTGGKQKLGAISKMGERTLRRLLIIGSSAVVLQASKRGAPRGSWLEQMLARKPRMLVTVALANKTARIVWALLMKNEDYRAPVVAA

SEQ ID NO: 502899 - protein, 330 aa, unidentified
MFFIGADISKRKVHCVLLLEPATGKRRSKVVPNTAAGMEQLLAWAQKQTGRPVGEFQVILEATGPYHETAAQTLYEAGAVVSVVNPKQIKDYAKGIGHKAKNDDQDALALADFGAKRRPRPWQPPPPEFRQLHALLQRLAALDKDLQRERNRQEKATISAASAQVLTSLERSIAFLEQERKRLLSQIDEHIDRHPHLRADRDRLLSIPGVGPVLSRWALMLLQHGQRFGSAAQFAAYLGLIPSEHRSGQTVHKRPQLSKTGPGHLRAKFYMAAMSAVRYNPMVRAHYERLLQRGKCKMAALGGAMRKLAHICFGVIKNQTDFQLQTPQEA

SEQ ID NO: 502900 - protein, 371 aa, unidentified
MLYLTNATNRKGGLVMNKSNKLDFTGQQIYVGMDIHKKSWSISILTDNLEHKTFTQPPHIEVLVKYLKRTFPGGTYKSVYEAGYCGFWIHDRFKEHGVQCLVVNPADVPTKDKERRHKTDRVDCRKLARSLRSGEIGSIYVPSRSKVEDRSLLRSRHSMVRKQTRCKNQIKSLLHFYGIQVPEELTKGHWTKRFLSWIESIRLQQASGNVALRVHLEELNHMRKILVDITRSIRSLANTEEYRQNVHLLKTVPGISTLTAMTLLTELYDIRRFKNLDKLCSYIGLIPDTDSSGETERRTGITKRRNAHLRGILIESSWVAVRKDPALLMTFQTLCKRMPKTNAIVRIARKLLNRIKYVLRTQQEYVPAVVR

SEQ ID NO: 502901 - protein, 329 aa, unidentified
MKKLFIGIDVSKDVFDVCSMDESGNVIASKEVFSNTKVGIANFCKSLKRWSDCDIWICMEHTGHYGYLLASEFSQRDFKYALINPLEIKNSIGMTRGKNDAIDAYRIAYYALTHYRKLKPYVLPIKELQKLKTLVSMRDGYVKINVQLKNSLKALEIIHQSLNIRSQLNDHKLVIKRQEKSIEKVEKQIMEIIHNNETLNDTFKKVNTVIGVGMLTAVKCIIETDNFAKFKDGRKFSCHCGLAPFDYQSGSSVRGRTRTSSLSNKSLKSILFKAASTAIQHDPQLKNYYSRKVAEGKHKLSVLNAVANKIVLRIFAVANRNEPFVKLVA

SEQ ID NO: 502902 - protein, 317 aa, unidentified
MEVSLIFVGIDVSKAQLDVEIRPSGEKQSFANDKVGIKALVKRLAKIEPTLIVLEATGGYERQVTRALVSADLPAVVVNPRQVRDFAKATGQLAKTDSIDAGVLAHFAEVIRPELRPLPDAVTLELRALTSRRRQILEMIAAENNRLEMTSKAVRKSIGAHVRWLEQALERANQELDRAIEQSPIWKENEELLRSAKGIGPVTSRTLLAELPELGTLDHKQIAALVGVAPFNRDSGSLKGRRSIWGGRAPVRCAMYMATLVATRRNPVIRDFYNRLTAKGKIFKVALVACMHKLLTILNSMIKHKTSWSETFSRQTT

SEQ ID NO: 502903 - protein, 464 aa, unidentified
MTDKKPWRNRKERKEWARRLQSEDPGLEVVHPHAAGIDVGNGMHYVAVRPDRDPQPVRRFECFTADLNRLADWLQQCGAKTVAMQSTGVYWIPLYEILEERGIQVFLVNARHTKNLPGRKSDVQESQWLLKLHTYGLLNNSFQPPSEIRVLRTYWRQRGEHVRGAATCVQRMQKSLTQMNVQLANVISDVSGLTGQTIVRSIVAGEHDPRKLAELSDPRIHASREEVAKSLEGNWRPELIFVLQQEVAMYDTYQQRIAECDQRLQEHLASFANIIPLQPTEEEPKRKKTKPAKNAPRFELRSELQRVTGVDLTRIDGIDVMVAQTLISEVGLDMSRWKTEAHFSSWLGLCPDNRTSGDKVLARGTRRVINRAATALRMAAVTLMRSRTYLGAQYRRLRTKLGAPKAITAMAHRLARLVYRMLKYGQRYIDKGADYYEHRYRRQQIEFLRKKAAKLGLQITLAQP

SEQ ID NO: 502904 - protein, 425 aa, unidentified
MEVIHRRCSGLDVHKETVVACVRLVLDDKITREVRTFETTTSGLLLLLAWLTELGCTHVAMEATGVYWKPVWNILSDGDFELVLANAAHIKNVPGRKTDVSDAAWIADLLAHGLIRSSFVPEQEFQELRELLRTRKQLGRQQSSHIRRLQKTLECANVKLDSVITDIVGKSGRAMLQALIAGETDPVKLAALADRRIKASAHELREALRGRVTDHHRFLLHLHLQHIDFADSAIQDIDRNVTALIARMDQEVEAGQTRATFQSLILLLMTIPGIDVLSARIILSEIGRDMSRFPTAGHLLSWAGLCPRNDESAGKRRSTRLRKGDPWLKTLLVQCAWAARRKKGSYFNAQFLRLRGRRGPKKAACAVAASLLTTIYHMLKDGTQFQDLGADHFDRRSKDVRAKRLVAQLANLGFNAKLTPLAQAA

SEQ ID NO: 502905 - protein, 406 aa, unidentified
MVSSIKHYDDVAVFIGLDVGKSEHHAVALTRDGKKLYDKPLPNTEAKIVSVLDQLAEHGPALLVVDQPATIGALPVAVAQAADVLVGYLPGLTMRRVADLHPGEAKTDARDAFIIAETARTMPATLRSIKVADEQLAELSMLCGFDDDLAAQITQVSNRVRGLLTQIHPTLERVLGPRLDHPAILDLLERYPSPTELQRAGQKRVAARLLKRAPRKGGVWAQEIFDALDQQTVTVVGTNAAGIVLPRLAKQLTELRKQRDEIAAEVERLVEAHPLHPVLTSMPGVGVRTAARLLTEIVGKHFPTAGHLAAYAGLAPVTRRSGTSIRGESPSRRGNKVLKRAMFLSAFAALRDPESRAYYDRKISQGKRHNQALIALARRRCDVLYAMLRTGSLYQPRTWSDTALAA

SEQ ID NO: 502906 - protein, 342 aa, unidentified
MNYYTGCDVHKKTTTIQQMDEEGALGLSMTIPTDKASIRKFLDQLDDPTIITFEAGRNWWWLHQFFSQQPQVTQVKVVDPRRARILASELSVQSGYGRAKNDEIDSEMLAELTRRDLEPAINVPTVEQLEQRTFCRHRFGLVMNRTRAKNIIHAFMAMHGTSARICDLIDDLSIRNQVYESIPDYISFIIDQLLIQVQLFDKQIFHCEKKINNLLPESHPQIKLLISAPGIGIVLARIIYTEILDIAYFKEPKYLVSYSGLAPIDNESAGRKGRIRLNRYCNYYLKYAFVEAAHNSSDFKKHKRKYDLDVKKHGKIIAKVNLARRIVKAVYWMLTRQQLYKM

SEQ ID NO: 502907 - protein, 381 aa, unidentified
MTTTATCHVQENTTAGTLFVAFELSEKTWKLGFTTGHGQKPRERTVPARHQERVLEEIAHAKRRLGLPDTAPVISCYEAGREGFWLHRFLQAHGITNQVVDSSAIEVNRRRRRAKSDGLDVRKLLSMLMRYHHGERQVWQVVKVPSIEAEDHRHLHRDLETLKQERASTTTRIKGLLSSQGLRVTSLTKLPAQLEALRLWDGSPVPPGLRCRVLRVYAHHTFLSEQIAAVEAERRAQLQASTDAKIDKVRQLMLLKGIGINGAWLVVMEFFGWRAFKNRREVGGLAGFTPTPYQSGESAREQGITKSGNRHVRWMTTELAWSWLRLQPDSALSCWFRERFGGGGKRLRRIGIVAVARKLLIALWRFLQTGVLPAGAVLKEG

SEQ ID NO: 502908 - protein, 309 aa, unidentified
MPSHQFIGIDVSGDYLDVAFAGADRVRRFGNDAAGLDTLGRRLSELERPHVVCEATGHHTRLLARELARRDVAMSRVNPRQVRDFARASGQLAKTDAIDAAVILRFAQVMQPAAVPPATPSQARLADIVRRRRQLVDMMAAEKQRSHGLEDPAIVASTRQHLVWLADQVRSFDNLIAEQIAAEPGLARRAGLLVTIPGIGSTTAAILTAELPELGQIGNKQIAALVGVAPFNRDSGHKRGEAHIAGGRLAARCALYMAAISAIRCNPALRPFYVRLRSEGKPAKLAIVAVMRKLAIIANTLIAEDRAWV

SEQ ID NO: 502909 - protein, 417 aa, unidentified
MNTSDYAALVALDWGDKEHAFALQVRETKLETGTIPASAERLHGWLEQLGQRCDHQPVALAIEAGRNAVLHALVAYPWLTIFPVHPATSERFRKAFTPSGSKSDLPDARVLLTILASHRDQLRALALDTAETRALAALTAVRRDAVDHRTQLANELRSTLKHYFPQALDLCGDDLWTPLALDFLTRWPELAALRRAQPATVQAFYTAHNSRRQEVIADRLTLIAHARPLTTDRAVIAPALLQVRLLVALLRPLQKHLLEIEDEIAAAFAAHPEAHLFRDLPGAGPALAPRLLVAFGTDRARYPDAASIQKYSGVAPVKEQSGRQVWVHWRWNAPKFLRQTFVEWAGQTIPQCAWAKAYYLQQKHAGKRHQTILRALAFKWLRILWRCWHDRIPYNEACYLAALQRQNSPLAHALFAA

SEQ ID NO: 502910 - protein, 381 aa, unidentified
MDTATRDQQCNSEPVLFMAMELSASKWKLGFTVGLGQKPRERTIDAGDVEALSEAVARAKRRFRLAEDARVVSCYEAGRDGFWIDRYLRGQGIENVVIDPASVEGNRRRKKRKTDRLDLGKLLRCLVRWYGGEEKVWAVVRPPSDEAEDARQFHRELEVLKGERTRHVARIKSLLVSQGIQVKRVSTDFVTELEAARTWDGSPVPPQLRDRLVRELARLQVLRQQICELEGQRREAIRKVTDRRMQQIRHLMRLRGIGENGAWLLVMELFGWREFRNRGEVGSIAGLTPTPWDSGDEDREQGIDKAGNRRVRAMMIELAWCWLRYQPRSELSMWFEQRFGGGSKRSRRIGIVALARRLLVALWHFLRDGWVPKGAVLTAPG

SEQ ID NO: 502911 - protein, 330 aa, unidentified
MKNFHVIGVDVSKSTLDVYLHTAKTHFQVDNSNQGMVELLGRALSSLKCKPADLMICFENTGKYSKLLSVMLDSQNIKFLMLSALEIKKSLGLTRGKNDKIDAMRIANYAIEKREKLKPTILPGVNVDRIKALLSLREKLVRHRTAYKNGLSDLKDCYVEGENALIVEVQLNLIGELDKQIQKVEDEIRMIIHSDDSLEVNYNLAKSVIGVGPILAAYLIAFTNNFINFDNPRSFACFAGIAPFSESSGKQKGNARVHPYANKQLKSLLNMGAMSAIRIPGELKNYYLSREKAGKNNMSTMNIIRNKIVFRVFAVIKRKVPYINHSKFAA

SEQ ID NO: 502912 - protein, 413 aa, unidentified
MERIIERCAGLDVHKSSVTACVRIPEESDALHQEIREFATTTPGLLLLRDWLASFEVRLVGMEATGVYWKPIYYMLEDDFELWLLNARHLKNVPGRKTDVKDAEWICQLVEHGLVRPSFVPPKEIRELRNLTRYRKAQIEERTREVQRLEKVLQDAGIKLSSVATRVLGASGRAMLDALVGGTTDPEVLAELARGRLRSKLPALRDALEGCFSSHHALMVGKILAHIDYLDETIGDLSVEIERVIAPFSDEVELLDTIPGVNRRTAETLIAEIGVDMSQFPTHRHLASWAGMCPGNEESAGKRRSGKTRKGSKWLRSALTESARAAARSKGTYLAAHYARLRGRRGSKKAAVAVGHSILVICYYVLERQVPYEELGEDYFDRRRSSEAYAKRLVRKLERLGHKVALEPLPQSA

SEQ ID NO: 502913 - protein, 409 aa, unidentified
MLRYVGLDVHKVWTEVARHLPDGSVQRERIATEPKLLKDFAETLGPQDVVALESTTNAMAVARLLKKRAGKVLISNPMKTRLIAESHIKTDKVDASVLAQLARSGFLPTVWQPTEDVELLRRRAAYHGALGRQLTRVKNRIHAVLARNLVEAPVSDLFCEKGRAFLRQAPLPEDEALQVEMDLHILETLEAVRQEATQQLAALAHAHPRAQLLMSIPGIDYPTAVGILGAIGEVTRFREPKKLVSYFGLNPIVHQSAQHTYTGRISKQGRCHARWLLVEAAHCAVRPAGPLKAFFLRLKARKGANVAVVAAARKLTTIIWHMLTSGEPYRWAPEKTTREKLGRMHYRATGVRRKGGVKKGTPRPATFGSGVRARDVRAKEDKARRADAQADYERLIEERAESTRSPRST

SEQ ID NO: 502914 - protein, 337 aa, unidentified
MIVMGLDQHRGQVTAEWIETDTGEVSRARVAPAHREPVRRFLGRFRGAELEVALEATTGWRFVVEELRAIGAGVHLAEPAETAARRGNKKRAKSDRADARHLRELLMIAGLPESWIPPDHILDLRARVRLRHTLSDQRGEWQQRIQAVLYHHGCPQRRDLMTREGRAWLQAQALPETAREQVTVAIAMVDALEVQLAPITKELRAYARRQVGCRALMAHYGIGELTAVTILAELGDCRRFSCSRHAVRYSGLDITVHQSDQRRAPGHLSRQGPPALRWALFEAAQVARRTGSPDREYYTQAAERLGPNRACLSIARKLLKRSYHTLSELGEEALAPA

SEQ ID NO: 502915 - protein, 312 aa, unidentified
MFEGKVLHEEETANHQGAIMSLLYQLEEDYGISNSQMLVCAEHTGQYTFPLACACKAVECKLWLENPAEIKYSSGVQRGKNDKVDAKRIAIYANRFQDKVQYYECPTEDIERLKQLESERTLYVTDLAKYKGQMKDQKDYMPKALYERKVKRLQALMDDLEEAIQAITDEMDEVIASCPVLFRQRELLMSIDGVGRVVATNMIITTEAFTRFDDSRKFNCYAGVAPFSYSSGSSQHSKAKVSHRADKVMKRLLHLAAVAVTHRAGGELKKYYERKVAEGKNKMSVINALRAKIVARMFAVIKRNEKYKPILS

SEQ ID NO: 502916 - protein, 399 aa, unidentified
MTPDDIDVWVGLDVGKSAHHAHALDHDGNTLYDKPLKQDEKAIRTMLGKLSKHGRVLLVVDQPNTIGSLPLTVARNTGIAVAYLPGTAMRRTAQPLPGDAKTDRRDAHVIAWAALKLPETLRDAGPDDETLAALKLLAGHDEDLAHESTRHVNRLRSLLLQTHPAFERALKGERITRDATLALLERYGGPMGVKRAGIEDVKDWAKSNGLRAGRIIDDMFKAIGEQTVTVPGTLMAETIIPSIAHDIKTIRDRRREVGRQVEKLLEDHPLLTVPASMPGIGVRTASNILLGIGGDIANFKSSAHLAAYAGIAPATGQSGTSIKGERPSRRGNKRLRNALWQTAFVASTKHPPSVAYYKRKREQGKHHNAAVICLARRRCDVIYSMLKNGTLYQEPALVA

SEQ ID NO: 502917 - protein, 501 aa, unidentified
MALEFAVSFAFAHAAGAGYALECVFFGEVLGYHQRVNLSGDAGVRALAGGVGGRDEQQDNLAANASAQLEFYAPQRQSGGRQAQDDSIYNANYSQNGVTGPVRWSWVRLGFWRESPSRATSGEEPVMKKNVRFLGLDVHAETIAVAIAEPEGEVRSLGTIPNRAESIRKLIHKLGPVEQLKACYEAGPTGYVLYWQLAELGVACDVIAPTLVPMKAGDRVKTDRRDAERLARSFRSGDLTAVWVPDAASEALRDLVRAREAAKQDQLRARHRLSKFLLRSGQRPAAGVKAWTEIYMAWVRRLRFEQVAQESTRLDYLHEVEHMGERVRRLEQAIAEAVKLASPAMQQVIGGLQALRGVAQISAVTIVSELGAISRFASARQLMGYSGTVPSEDSSGQRTRRGSITKTGNAHLRRIAVEAAWSYRLRPGVGPALRKRQQGVPEEIKEIAWRAQNRLHKRYCRLAAAGKDQRKIITAVARELLGFIWAIGVKTEATVQQPMVA

SEQ ID NO: 502918 - protein, 334 aa, unidentified
MKQVNDIGVDVDSQELVCAMRRAGQRLPLGRFANTATGHKKFIRWATKGGRPARVCLEATGIYSLEFALALHHAKNVEVMVVNPRAIKDFARACMQRAKTDAVDAGGILEYLERMPFTAWQPPAPEILELQAINRRIVQLNTELTREKNRRHASEFAGTRADAIAHDIEVNIHHLERRLERMHQSGLRLIRRVPALATKLAHLVSAKGIGELSAMRLLAELLVLPDDLAAPQWVAHAGLDPRPYESGTSVHRPRRITKVGNRHLRAALYMPALVAIQHEPNVKAFYNKLVTAGKKPMQAVVAVMRKLLHAIWGMLKHDEDFDGNKFFKIANENA

SEQ ID NO: 502919 - protein, 429 aa, unidentified
MNFKPIAGIDVGKYFSEMIILSPSNEVVTRMKIKHDSYTDIQKTIELLKKAERDFVSRPFVVMESTGHYHKILFRSLYKHGFEVSIINPIQTDSIKNIGIRKVKNDKVDARKIALLYRFQELKATNIPNEDIECLRSLCRQYYKLNDELTTYKNRLTGIIDQIMLNFKEVFSNTYSKAAIAVLEKYPTPTLMIKADKDKLISLIHENSHRSLIWATEKYELLILKAREFEPLSIDNPANVAMLDIYISIVKNLQENINKVLKAIYQLVADNLSTDMPTMSMTLELLQSIPGIGLLTAATIIAEIGDFKAFTKPDKLVAYFGIDPSVKQSGEFKGTRNKMSKRGSRLLRRVLFTVALANIRTTRNGEACNPVLLEFYKQKCQNKPKKVALGAVMRKLVYIIFAVLRDKKPYEFRTPEEHSRMLEAKHRIA

SEQ ID NO: 502920 - protein, 552 aa, unidentified
MGTGEPSGKYGIRLLHLKWEMRCDPSGTFEEARADLLCVAGQGAFAGSGLSHPTVLVMDDAEIKNRRFFSEKRLSSMATKVKASTKLTPLPLFPQEHLYVGVDIGKFRHIAGFLSRTLLVRHERFEGCPAFAFEQSREGFRSFVDRLREYVPLEQVTVLLEHTGHYHQLLEQYLLDLDITVYRIHVQKRAEGMLKTDKRDALTLANRLYTQLELGAQVADKMQLVRRIVPPTSAAAQLQGMMRHRYELSHMSTQYRNKLTAICDQLFPELVQVFHDPNLPTALAFRAAFPTPHAIALASLNDLRTLRQGHFPSDAQLLELQRLADKTIGVTDLDRQRGLVLEQGLLIKELQLIQEHLENLQTTITDIVQNCREGQILLSIPPIGPVLAATAIATIGNIANFEKACELKSYFGWAPRKKQTGVTMDQTSLSKRGVRPMKQQLFIAAARAITLDCEWAKIYQRLLPRLCTYDEKVREYRGKKRVLARIAGQMTSMMYALLKTDQETMSQVPPGETPPAPMLYDREIHRKHQEGSYRSLKPNTQPRKILQLPSKS

SEQ ID NO: 502921 - protein, 409 aa, unidentified
MTKEDFIYVGIDLHKEIHTAVMIDCYNKLGEITFPNRPADFPKLVTKVKKCNTDAKEVVYGLENAYGYGRALAVWLIDKGYFVKDVNTAISHRQAKHRGAMYRKSDSDDAEAIALATLNMLDKLPDACPNDAYWSLGQLVHRRDNIMKQRTRLVNQLHEQLCIAYPSYKQFFNDISRPTALYFWEHYPSRKYLKGKSVEDLRTELVPVSHNRCSTKNCEKILDAVASDKVKNNAYQDARDMVTLSIVSDLQHYDSQLAEVDKMLEQMYKMLGCTLTTIPGVNVITAVKILAEIGDIKRFSNANKLAQFAGIAPLHLSSSGKGKDVATKQGNRRLQATIYFLAIQMVQVSSKGTPRNSVVRAYYEKRKAEGKTSQQALICISRRLISIIYGMLKHGTEYRMPVVESAGEK

SEQ ID NO: 502922 - protein, 411 aa, unidentified
MVKENFIYVGIDLHKETHTAVMIDCYNQKLGEITFPNRPADFPKLVTKVKKCNTDGKEVVYGLENAYGYGRALAVWLIDKGYLVKDVNTAISHRQAKHRGAMYRKSDSDDAEAIALATLNMLDKLPDACPNDAYWSLGQLVHRRDNIMKQRTRLVNQLHEQLCIAYPSYKQFFNDISRPTALYFWEHYPSRKYLKGKSVEDLRAELVPVSHNKCSTRTCEKILDAIAGDKVKNNAYQDARDMVTLSIVSDLQHYDKQLAEVDKMLEQMYKMLGCTLTTIPGVNVITAVKILAEIGDIKRFSNANKLAQFAGIAPLHLSSSGKGKDVATKQGNRRLQATIYFLAIQMVQVSSKGTPRNSVVRAYYEKRKAEGKTSQQALICISRRLISVIYGMLKNGTEYRMPVVENAGEKL

SEQ ID NO: 502923 - protein, 427 aa, unidentified
MSLDPHEEPAAIQTHIGAIFISLELSRSKWLITSLVPGGGQRMSKHWVEAGDLAGLLARFWAIRDKVSARTGITYPIVVIQEAGLDGFWIHRSLVKEGIESHVVDAASIAVSRRRRRAKTDKIDGEALLRALLAFKRGEPRVCSMVRAPTPRDEDRRRICRERETLIAERIRHVNRIKGLLFSQGIGDYEPLRRDRRRALEAARTGDGRALGANMKAQIGRELDRLELLLDQIAAVEAERDAMLARQPEAGTAQSAQGAPAPVQKPMDLNGPGVETVPKAEAAAGVQSASARVQKLMDLNGLGGETVAKLETEAFYRSFDNRRQLAAFVGLAGTPWKSGKIDHEQGVSMGNQRLRQTMIQLAWLWPLHQPSSALTRWYLERTKGASKIQKKKMVVALARKLLVALWRYVDAGVVIEGAVLKRAARAR

SEQ ID NO: 502924 - protein, 358 aa, unidentified
MPGTVSHINSRTIQVIIGVDTHKDQHVAVAIDGLGVRLDEKYVPVAVCGYEELERWSRSLGQIHAFGIEGTGSYGAGLARFLTDRSHTVVEVNRPDRSVRYRKGKSDPTDAEMAARSVLAGVADATPKAGEDEVEMIRMLKSAKDSAIKARTQAVNQMKALVVTAPAELRETLEGLTTIALVTRCKNFRPGRLDGPKAAAKYTLRSLASRHRQLNEEVQELETELKRLTRAAAPALVNAFGIGPDTASSLLIATGSNPDRLRSEASFAALCGVNPIPASSGKTNRHRLNRGGDRQANAALYRIVLVRLRHDPRTQEYMQRRTAEGMSKIEIIRCLKRYVAREVYSIIRKPAQLIEKAA

SEQ ID NO: 502925 - protein, 343 aa, unidentified
MYYIGLDIHKKTISYCVKDASGQIHREGKIGSTRCELDSWIKTLPQPRMIAMEATIFTGWIYDHLLPHAEKVKVANPLMLRAIAAAKRKNDRIDSSKIADCLRCDFLPECYMASTAIRDRRRTLRYRNLVLKQMTQMKNRISGLLMETGVSYNKQRLHKLGYFMELMSCNEEVNESIRPLLKLSRETVVRSQRLDYALVHSLERDPLLAERLKRLRTIPGVGPITALTWALEIGDVSRFQSVKQAVSYCGLCSAERSSADKLVRMPISKQRNKHIQQVLVEAAKLAPRYSQELALVYERERQRGNKNRATLAVARKMVAYMLAVERRKQDFVPAEEFGGTAAA

SEQ ID NO: 502926 - protein, 316 aa, unidentified
MQTPLVFVGIDVSKARLDVGVRPSDERTSVPYDAHGITTLIAQLTQVQPTRIVLEATGGLERPLVRARVDAALPVIVVNPRQVRDFAKATGQLAKTDVLDAQVLARFAEVIQPSLRVIPDAQTQELAALLARRRQVLAMQGAEQHRLDRAPDRVRKRIEVHLRWLRAELARLDADLDDLIQQSPMWREREDLLQRVPGIGPVMSRTMLAELPELGRLNRKQIAALVGVAPFNRDSGRRRGHRTIWGGRAPVRRALYMAALVATRWNPVIRLFYQRLRTAGKAPKVALVAAMRKLLTMLNAMVHTGTPWQPNVVQEA

SEQ ID NO: 502927 - protein, 400 aa, unidentified
MIDTSDIDVFLGLDVGKGEHHATAVTPAGKKAFDKRLPNTEPKLRELFTKLQAKHGTVLVVVDQPASIGALPLAVARDMGCPVAYLPGLTMRRIADLYPGEAKTDARDAFIIADAARAMPHTLRAIDGEDETIAELEMIVGFDDDLAGEATRVANRLHGLLTQIHPSLERVLGPRLQHPAVLTLLERLGSPAQIRKAGRRRLITLLRPKTPRMTERLVEEIFAALDEQTVTVSGTEAAALIVPSLAGSLTAVLDQRKLLAGRIEELLEAHPLSKVLTSMPGVGVRTGARILIEVGDGSTFPTAGHLAAYAGLAPATRSSGSSIRGEQPSRRGNKQLKRAFFLSAFAALGDPASRAYYDKKIAQGKHHTQALLCLARRRADVLFAMLRDGTFYEPQPAAAR

SEQ ID NO: 502928 - protein, 377 aa, unidentified
MSEFNRVYVGLDVHKETIAVATARSGRGDPEYHGNIVNSTAAVQKLLKQLSPDGEALSFCYEAGPCGYGLYHDLTAQGHDCVVVAPSLIPRKVGERMKTDRRDALMLARLHRSGELTAVWVPDAEQEAIRDLTRAREDMKAIELTARQRLGAFLLRHGRIYQDGKSRWTQAHFRWLETVKFDSPVQQIVLQEYVDTVKAAQRRVAGLETQMREALAGWSLRSVVEALMALRGVSLITAMTTLAELGDITRFDSPRELMAYLGLVPSEHSSGSSRRQGCITRTGNGHVRRVLVEAAWNYRFVARKTRCIEKRAEKCPAAIQAIAWQAQKRLCGRYRTLMEAGKAKQQVTTAVARELAGFIWAIACESIGKAHGSKALA

SEQ ID NO: 502929 - protein, 412 aa, unidentified
MQDILTCAMGLDIHRDVIVACLAKGELGTDPEIEIRSFSTLIPEMRKLRDWVLEAECRYVAMESTGIYWQPIYEMLEPCFDGQISILVVNARHMKNVPGRKTDMRDAQWIATLLRAGLLKGSFIPDKTFRELRHLTRYRKSIVRDITAQKNRIDKFLQSSGFRFTAFLSDAFGASGRNIIRHLMEYGNISREALNRCLKTQTRKRIDEILIALNGSLSEHQRGFLRMIFGHLEALEQHRHTVEDAITKEITKHEEALSLLCSIPGIDVTAAAAIIAEIGTDMSAFPDSQHICSWAGLSPGNNESAGKRKSAHINKGNPYLKSMLCEVGWVISGKRSLYLSGWYWRIKQRKGAKRATIALARKLLALIYTMLKTGSPYNEDCFEIRRKQSERKRASRMVNELQKLGYFVVAPG

SEQ ID NO: 502930 - protein, 392 aa, unidentified
MYIVGIDIGKNHHEASIVSPEGKQIGHSLRFATTHKGADSLMSFIFNNIGNSSCIFGMEATGHYWYPIYSFLKARGYTIYVINPIQSDSLRKMYIRQTKNDSIDSFLIAEVIRFGQFTTTSMADENILAMRQLCRYRDSVISSRTEIKLRISTIMEQIFPEYEKQFSSLWLSTSMGILEKYLTPENIENAPIDELFEIIKDKSHNRLTRAKAISIKEAAADTFGIKIAQDAFSFQLKQLIDRMNFLDKQIEALDCQILEYYEKFDCYLHTIPGIGMIAAATILAEIGDINRFKSSSALVAFAGIDPTVRQSGEFSSTHNHMSKRGSPYLRHAIFLAATTCSFHNSPLNAYYKKKRDQGKHHLTTTGAVARKLTSVIYAVLRDSKPYEPKSFC

SEQ ID NO: 502931 - protein, 358 aa, unidentified
MQSNKINFKGQNIFIGIDVHLNSWSVTTITPSGYKRQTSHRADAVELYAYLTKNFPGGIYHAVYESGFCGYSCCYELRELGIDCVIVHAADVPSTQKSRLSKTDSNDSMRLAMSLSNGELNTIYIPPKEVLGDRDILRYRTIVQKGMSRTRSRIKHLLHTNGVSYPREFREPYKHWTRRFIKWLREDVKLLSGKRMELDFLMEDLEHQRSQLLKATGKVRELSRTSRYAEDYGNLISIPGVGLITAMTMLTEVTDIHRFSSQKKFMSYVGLIPVMKDSGETIRQNEITPRGNQRIRRMLIESAWSAVRYDAQMAAAFGTFCRRMKKNRAIVRIARILASKTYHILKTRTKYDTALCTA

SEQ ID NO: 502932 - protein, 343 aa, unidentified
MQAITTIGLDIAKSVFQVHGVDAEGNVVLRRQLKRRYVLAFFQKLPPCLVGIEACASSHHWSRELRALGHTVRLMPPAYVKPYVKRHKNDAVDAEAICEAVTRANMRFVATKTPEQQSCLTLHRTRHLFIRQQTSVINAIRAHLAEFGIVAPVGRNGVEQLLGVAADSNDKRLPEVARACVAALGAQLQTLKAQILEFDRMIRAWHRSSDASRRLDDIPGVGPTLATALVASVADPKIFRSGRDFSAWIGLVPKQNSSGGKDRLGNISKRGDRYLRSPFTTGALAVIRYAKIHGTRHRPWLTALMARRPTKVAAIALANKIARMAWAIMVRGERYKEPAALAA

SEQ ID NO: 502933 - protein, 457 aa, unidentified
MDNYYLAADVSKGYADFIILDSHKRVAEDSFQLDDTYRGHRTLRELLDEFYRKHSDCTIYAAVESTGGLENNWLHFFLEFGSAMNLKAARINPLTTSAYYKATLTRVVNDRISAKTIAEYMIACPEKIRYNVDDPYAEMRRLWSFLQMLKKQRTQLENQFQILIYTSLPFLVRYMRHGIPNWLYELLVQYPSAKNLAEAEVSALSKIPYISRKRAEKIVEQAKTTVGSSTQEATSFLIESMVRQIIELSKSIKKQNDYLSKHYGELPLVKLLESFKGIGTLSAIGLLVNIVSVELFPTVKNLSAFFGVHPVYKQSGDGSCGFHMSKQGRSGVRAILFMVALAASRSNPLIKEYYTEQIKKGKSRMSALGICMHKILRIVYGMLKNNKPFDADIDKQNRNKQAFAGVKKNNHQQRKNKIKEADNQNRGFHLPDEEAPISRRQNQKRKKRKQSQSELIA

SEQ ID NO: 502934 - protein, 372 aa, unidentified
MSNLRFVGLDVHAETIAVCVAEGSGEVRPLGTIPNRVESVRKLVGKLGPVKQLRTCYEAGPTGYVLYWQLAALGVACDVVAPTLVPVKAGDRVKTDRRDAEKLARCHRAGELTAVWVPDSEHEALRDLIRAREAGKKDQLRARHRLSKFLLRHGRRPPEGMKAWTKKYLEWVKTEVHFDQAALEATLTDYFHEVEHAAARIERLEKAIDQAVAKTPAQLRAVIEALQALRGIAQLTAVTIVSEIGSFSRFEPRKLMGYSGLVSSEHSSGNRIQRGGITKTGNSHLRRVIVEAAWAYQHRPWLGGYLLKRQRDLKLSEETKEIAWKAQQRLHSRYKKLSAGGKNKNQVVTAVGRELLGFIWSIAVQIEAGFKA

SEQ ID NO: 502935 - protein, 341 aa, unidentified
MEYCGIDLHAEYSQICILDEDGEVIQTSRIRTSRKAIDRFFRRDRMRVVIEAGGSSPWVSRLLDSFGHEVVVCSPRRVRLIAESKLKNDRVDAEVLARLVRLDPEFLKPIQHRSEEAQLLRGNLKVRSAMVETRTKWINTIRGLLRSFGFKVSGKAPRTFVERVDQMELPGELRTVIDPLLEQLDLLTGEIDRRNEHLEEMVKGLPEVDHLREIPGVGPVVATYFVLTIDDPHRFRNSRDVASFFGLRPSMRESASVSHYGRITKEGDPEMRRLLVQAAHACLLTKADSELKNWALALAERKGKGKAAVALARKLAVLMHHLWVTGEVYQAFPTKLATQAA

SEQ ID NO: 502936 - protein, 354 aa, unidentified
MSQKFNTAIAVIGIDIGKNSFHVVGHDERGAIVLRQKWSRGQVEARFANMPPCLVGMEACVGAHHLSRKLKALGHDARLMPAKYVRPYSKGQKNDFRDAETITEAVQRPTMKFVATKTADQLDLQALHRVRERLVSQRTGIINQIRAFLLERGIAVRQGQRFLRAELPRILATPSDVLSPRMVHLIENLAGDWHRLDERIEGLSGEIEAIARQDAGCERLMSVPGIGPIISSAMVAAIGSGEVFTKGRDFAAWLGLVPRQMSTGGRTILGRISKRGNRYLRVLFVQAAWVVLIKPKSWERHGLKSWIEAAKKRLHPNVLAIALANKLARIAWGVLAHGRDFELRKISEAAAQSA

SEQ ID NO: 502937 - protein, 370 aa, unidentified
MDNLIRIGMDTSKSVFQLHGVNAAEQPVLRRRLRRRQLLGFFAKLPAIRIGIEACGAAHYWARELGALGHEVVLLPPQRVKPYVPRNKNDMADAEAICEAMSRPRMRFVPVKTAEQQAALMLAGVRNQLVHRRTQLSNMIRGHAAEYGLVAARGLDKVEPLLARIAADDTLPALAKELFATLGEDHGRVKLELREIEARLMAWHRANELSRRLAEIPGIGPIGATLMVMKVADPGAFRSGRDFSAWLGMTPKDHSTAGKTRLGVITRAGDEALRWVLVAGATAVIQQVKKGRGHPSPWLMALINRKPPKLAAVALANKTARTAWKLMVSGERYDPAAAARRGRRTPLGESYARRARRWRGTILPAGSADA

SEQ ID NO: 502938 - protein, 376 aa, unidentified
MQQFNDIYVGLDVHKDTIAVALARGLRTKPIYFGEIPNTPAAIAKLPKQLCPDGEVLNFCYEAGPCGYEVYHQLTKLGQSCAVVAPSLIPRMPGVRIKTDRRDATSLAKLNADGSLTAVWVPDKEQEGIRDLSRAREDFKQTQTKARQRLGAFLLRNGKIFTGKSKWTVAHWRWMETLTFETPMQHIVMQEYVEALKEASRRLLGMEKQILLAVRGWSLEPVLNSLMAMRGVNTITAVTLLAELGDITRFDNPKQLMSYLGLVPSEYSSGSKRQQGSITKTGNGHVRRVLVEAAWNYRFAARKSRTIEMRAEKTSERVQAIAWEGQKRLCGRYQKLLTSGKLKQKVCTAVAREMVGFVWAIACEASGRVHASRATA

SEQ ID NO: 502939 - protein, 373 aa, unidentified
MPKYSTAFGMDVHLRSTTVCALDADTGEAVTRRFPGNPWGEIAGWMDGFPGPSLAAYESGYLGFAPQRELAGLGVECVVAAVSKIPRSAADSASKNDRNDAARMAKAILAHDISPVWVPSPEVEGIRDLAGAYDGATARLATAKQRLLAFLAKRGFVYGGTTPAGNPRKYWTYDFLRWLDKARPEDDGGVRTLAALRNEVEAAAEARADLLSEYRAAADASPIAAEVAALQSIKGCAFALAAAFSAEVGDFTRFRSGRQVTAYFGLAPSQRSSGDSVRLGGISGAGNALVRKLAVEGSWCYAAARHQPKLMPRDTGVPLEIRMHGRKGSERLLRRREEMLARGMPAAKANAATAAELVRWLWALGMMCREGAE

SEQ ID NO: 502940 - protein, 396 aa, unidentified
MNAVGIDVSKGKSTVAVLRPFGEIVVSPFDVSHSPKELSKLVTLLKTLNGDTKVVMEYTGNYYLPIALFLRNNGFFVSVVNPILVKDYSTKSLTVRKVKTDKKDALKIASFALDRWNELSPFSAQSEARLLLKSYNRQYNQYNKLKIILKNNLIALLDQTFPGANTLFSTPTRKSDGHEKWVDFVLKFSHSECISKKSFSFFLKSYLSWCKKFGYKFSKSKAQAVYDFACNCSPSLSFSDSSALLVSNAIIQLNSINETLASLASEMNKIAATLPEYDSVMSMFGVGSVLGSQLIAEIGDVSRFPNKKALVGFAGLDASPFQSGNFNPQSRSISKRGSAALRKTLFQVMSVVLQRAPTNNIIFQFMDKKRSEGKHFYVYMTAAANKFLRIYYARVT

SEQ ID NO: 502941 - protein, 429 aa, unidentified
MNSTQNKKIEQVKETTMIVGIDVGSEKHYFRAFNWRGIELTRKPVAFSNSMEGFNSFYNSVVELMQKNELKEALVGIEPTGHYWFDLGQFMGEKNIKFVMVNPHHVHKTKELDDNSPSKNDRKDPRVIAGLVRDGRYFYSYMPTGVYAELRNASNRRFVLVEEQTRSKNRLQKWVAVYFPEYKGIYTHIDAKGGLLVLKQAPTPEEIVRLGVEGIIKIWKDAKLRGNGHKKAMLILNAAMKSIGLKAGLTEARMEIQDLIEDYELQTKRLERVNDLIKELCQQIRYADKLLEIKGIGITTVAGFIAEVGDITRFDSTKELQKLAGLELVADSSGKHDGKTKISKRGRKRLRYLLFEAAISVVGKNEEFKEIHRYYTTREKNPLKKMQSLIAVACKLIRVFHVILTKGISYDASKMLKDIRRPGEQLKAA

SEQ ID NO: 502942 - protein, 320 aa, unidentified
MDRQYVGIDFHRRRSVIVRLSGSGERLGLHRIVNEPFELVQVLGLCGEAPQVVIEATYGWYWAVQLLQDLGAVVHLANPRALNWGDRRVKNDVNDATDLADMLRLNRLAEAWIAPPALRELRELVRYRAKLVQLRSGLKAQVHAVMAKEGVIPVVSDLFGPAGTRQLDALALGGPFARRVRSLRDLIAIHDREISALERDLHQHLKGHRGYEAVQEINGIGKISAAVLVAEIGDVTRFPSPAQLCSWAGLTPTHRESDLKTRRGHISKQGSRLVRATLIEAISRYHGGTLLDAQYRRIAKGTAARSGDRSVMPPWWRTGS

SEQ ID NO: 502943 - protein, 376 aa, unidentified
MREKLRFLGLDVHAETITVAVAEPNGEVRSLGTIANREDSIRKLIRKLGSPENLRACYEAGPTGFVLYWQLTQLGVKCDVVAPSLVPKKPGDRVKTDRRDALKLARSHRSDDLTAVWVPDEGSEALRDLVRAREAAKQDQLRAKHRLTKFLLRTGQRPPLGLKPWTEKYVEWLQKIHYTHPAQEATLLDCLNEVQHMEERVKRLEQSIVEVIQVAPAPMQEVVRGLQALRGVAHISAVTIAVELGNITSRFECARDLMGYSGVFPSEDSSGKRIRRGGITKSGNAHLRRIVVESAWSYRHRPAIGARLRKRQEGLPAEITEIAWKAQNRLYKRYMKLMAAGKDQRKVMTAVGRELLGFIWAIGIKAEAACKQQLAA

SEQ ID NO: 502944 - protein, 372 aa, unidentified
MNSIVYVGMDVHASNYTLSCYTLTSDECFATVQMEPDVKNILTYLKKVQRNLGTPCEFRCGYEAGALGFSLYYQLQKHGIPCTILAPSTMPTFHRNEIKTDRRDAMKIARCLAFGAFRPVHIPTKEDAAVKDFIRMRDDHKIALKKIKQQIQAFCMRYDLHFTEGRSYWTQRHLAWLKALALDDLLREVLDEYLVTLHQLADKIERLDARIEELAQGERYAENVKKLSCLIGVRTHTALALVAETGDFRRFAKAEQYAAFLGLVPGERSSGDKQSRTGITKAGNTHLRKLLVEASQCYGRGKPGYKSRLLKERQQGNTSEVIAYADKANERLRRKFYRMVLRHNKKHNVAVTAVARELSCFIWGMMTGHTAI

SEQ ID NO: 502945 - protein, 360 aa, unidentified
MAAAVADGIPHPSGVIKPGGELGHPSVIPSSPDSRLGRMASPVLQGRDQMERFVGIDVSKTALDVHVVPDGVAFQVARNASGIDELVHRLAAYQPHIVALEATGGFETVVAAGLAGAKLPVAVVNPAQIRAFAQALGKRAKTDLIDALVIARFAEATKPEPRALADVQTQHLADLVARRRQIVQMMTAERNRQKHASRRTANSCARLVAALERELADINEEIDDAVRGSPAWRETEDLLRSVPGVGPVVARTLLADLPELGTLDRRRIAALCGLAPWTRQSGQWRGKSFIGGGRSSVRSALFMAALVAAKRSPPFAAFYQRLIARGKAKMAAVIAVARKLLVVLNAVVRTATKWDEAKHA

SEQ ID NO: 502946 - protein, 408 aa, unidentified
MRVVFARCGGLDVHKDTVVACARVAKGAKAAYEIKTFAATMSGLLALSDWLSERGVTHVAMEATGVYWKPVWHVLEGTFELILANAMHIKNVPGRKTDVNDAAWIADLLAHGLIRGSFVPPEPIQELRALTRTRKQLVREKASHVQRIDKILQDANVKLGTVLTDIMGLSGRAILKAITQGENDPDNLLKLVDRRVKASPDTLREALHGRVTRNHRLLLEVHLDHVDALNRAIERIDKEVGNSLEPFRDAVELLKTIPGISDVAATVIVAEIGTDMSRFPGPGHLLSWAGLCPRSDESAGKRRSTRTRKSATWLKTTLVQCAWSASRARSGYLAAQFRRLRARRGPKKAVVAVAASILTAAYFILLRRNPYHDLGADHFDRGDRDKLAKRLVRKLADLGYKAELQIAA

SEQ ID NO: 502947 - protein, 342 aa, unidentified
MKQYVGLDVSQRETSVCVVSETGQLIFEGKAKSDPGDLTKLLRKHAPLAERIGFETGAMSSWLWHELRTVELPVVCIDARHAHAALSVRMNKSDQNDARGLAELVRVGWYREVRVKSEESQKIRAILVARARLVSMRRDIENQVRSLVKEYGLLFPRAIGQQFRNTVNDLLGEDHQLLIVVAPLLSIHEHICRQQSEFDDEVRRLAKQDETTQRLMTVPGVGVITALTFRHTIDDPSRFRSASLVGAYLGLTPRRKQSGETDTSGKVSRWGDRLLRTYLFEAATVLLYRTKKWSSLKAWGMKLAKRIGMKKAKVAIARKIAVILHCIWVDGTSFDWGHAKLT

SEQ ID NO: 502948 - protein, 321 aa, unidentified
MHSNNTVVYAGVDVAKATLQLHLQGQQSEFNNTPKGLHQLCAQLQKVPGVHVVCEATGGYERALVKVLHQGQIPVSVTNPARVRAAAQAQGQRAKTDQIDARGLTDYGQRYQPQPTPPTSATQEQLVALTQWLKQLIHGRALAKTQAEHHQDPFVRRQHAKLMTHLEAQVKAVEKQIEALLEQDAALQERVSCLDKIQGVGPRTAWMVLGHMPELGRLNRQEVAALAGLAPWTRESGTMKGMRCIGGGRPEVRLALYMAALSAARCNPVLRSLYKRLRAKGKVAKVALTAVMRRLLTYMNHCIKALPSEPATASAKELKIA

SEQ ID NO: 502949 - protein, 357 aa, unidentified
MLSSNVKYIGLDVHKEAIAIAVLNGAGKLVMESIVETKSSTVLDFLHGLRGELHVTLEEGTWAAWLYDVLKPHVREIVVCNPRRNALLKEGSKSDKIDARKLAELLRAGLLRAVYHGENGLQTLRELARCYLTISKDLKRVKNRLKALYHSWGICCTGKQVYAARHREQWLSKIAQVGVHRRAALFYQQLDGLLVLRNTARGELLAESRKHQAVKILRQIPSIGPLRAALLLALMQTPHRFRSKRQLWTYSGLAVVTHDSAQHRYVDGQLQRSRKPQQIRGLNQNYNHAMKEIFKSTALNASRCAGPLQDFYARLLARGIKPDMARLTLARKIAAITLALWKKGGSFDAEHLKSQAA

SEQ ID NO: 502950 - protein, 345 aa, unidentified
MEPMYYIGLDVHKRKISYCVKDSSGKIFAEGWLPATRLDLDLWMKTLPQPWSAAMEATMFTGWIYDHLKPHAAALKVAHPLMLRAIAAAKKKNDRIDASKICDCLRCDFLPECYMAPTAIRERRRTLRYRNLLVRQMVQMKIKISALLMEAGVSYNKQRLHKAGYFRELLATNPDIDEGLASLLRLCRETVVRLQKTESAMVRSLERDSLLVDRVERLMTIPAVGPITALTWALEVGDVQRFSSIKKAISYCGLCGAEKSSGSSVQRTPLSKQRNKHLQTTLIEAAKMAPRNSPDLAMLYDKEKQKGNANRATLAVARKLVAYLVAVDRRQKEFLTVKRENRTAA

SEQ ID NO: 502951 - protein, 334 aa, unidentified
MENIALIGIDLGKNSFHIHCQDHRGKAVYRKKFTRPKLIEFLATCPATTIAMEACGGSHFMARKLAELGHFPKLISPQFVRPFVKSNKNDFVDAEAICEAASRPSMRFVQPRTETQQAMRALHRVRESLVQDKVKTTNQMHAFLLEFGISVPRGAAVISRLSTLLEDSSLPLYLSQLLLKLQQHYHYLVEQIKDLESQLKRKLDEDEVGQRLLSIPCVGTLTASTISTEIGDGKQYASSRDFAAATGLVPRQYSTGGRTTLLGISKRGNKKIRTLLVQCARVFIQKLEHQSGKLADWVRELLCRKSNFVVTCALANKLARIAWALTARQQTYEA

SEQ ID NO: 502952 - protein, 385 aa, unidentified
MSKLYAGIDLGLRFHQVALVDANGQRLGEPIRIRRGCSGTEQLLAHAQVSPDELVVSIEATGNYWQELVSMLRRAGCEVYLISPKKSHDLRRFYALHTKTDTTDAEALARMPVVDRSLKPVWVAPPVVDTLLRLCRLRWKYRCEIANSKRRLTTFVELVMPGLGVVMPLRYSKSARLFLRRYLSPQKCRRLGHKRLVAILAKAAWGKFSDEKAQALWQCVENAPPMDYNGDDVLLEVNVQIDALERLEDNVARLDARIAELYGEVDPAQRLLAIKGLGEFLAPAITAHIGDANRFDTSKQLISYAGLAPRVKHTAGHAKPGQSLSKRGSSYLRAWAYLGAACARQYDDELGRYYSAMRARGKHYNVALCATAARLLERCHEVLKN

SEQ ID NO: 502953 - protein, 412 aa, unidentified
MEVLYPRCAGLDVHKDTVVASARLATGRDITVEVQTFATTTAGLLALSAWLAERGCTHVAMEATGIYWKPVWHVLSDGDFALVLANAAQVKNVPGRKTDVADATWLAELLAHGLVRASFVPDAPTQALRALLRTRKQLVRERASHVQRLQKTLEDANIKLASVLANIMGTSGRAMLEAMIAGESDPGTLAALAHRSVKAPPERMIEALQGRVTSRHRFLLRLHLRQVDALEAAITEIDQEVEAGIEPFRAAVRLLSSIPGVSALSAEVIVAEIGTDMRRFPSAGHLLSWAGLCPRSDESAGKRRSTRLRKGAPWLKTALVQCAWAASRKKASYLQARFQRLRARRGPKKAICAVAASILTAAYHMLRDGTFYQDLGPDHFSRRTRSDRTARLVSQLTALGYTVQPPPECADA

SEQ ID NO: 502954 - protein, 409 aa, unidentified
MRAFGMDVHRDFCEVAIAEGGEVRSAGRVATRVESLELFAGSLAVTDVVALEATTGVDKIVSLLQAQAIRVVVANTRKLRSISEAKAKTDRLDARTLARLLEAGLLDRVWTPDERTRTLRRLTNRRERLVRARTRAKNEAHGVLARNLCERPPVTDAFGKGGRRWLAALELPVDERLTLDGCLRQVDFLDSEIAALDAEIAKQALAWPEVLRLMSVPGVNVQTAATFMAAIGEISRFSSPRKLVSYLGLDPRVRQSGNTAARHGRISKAGASEVRHMLGEAAWKVTLTPGPLHAFFERVRARRGSQIAATATARKLAVLFWHLLNRGEDYAFARPAMTRNKIRKLELLAGAPPQKGRHGIAGGKSKAVFDAERELSRQAEAAYRRLVNDWRSTGPAKAGAGVTPGRASS

SEQ ID NO: 502955 - protein, 370 aa, unidentified
MKSIAYVGLDVHQDFIVVAMLPEGSERLLDERKIINDRVKLVKYLKKYRRDYELRCCYEASGCGYVAYRWLREEGIECEVIAPSLIPKRAGERIKTDRRDAEKLARLFRAGELVSVHIPTEKEEVIRGLVRCRETLKREVIKSRHYVLKFLQAKGLVYRGGSNWTGKHWSYLRQLKFEGAEEITYRQYVNLLEYKLTQLKELDMQIEEIAFTDEYKGKVSRLRCLRGIDTLTAMVLISEINDFARFSRPGELMSYLGLIPSESSSGDVRRQGRITKAGNVRCRRILIEAAWHYQHKPALSVLISKRQEGQPLEIIKHCWQAQQRLHKKFWRIAVRKERNKAVVAVARELVGFIWAIMTGRIDRGIELKAA

SEQ ID NO: 502956 - protein, 410 aa, unidentified
MSVLEIALDPATVIVAVDPGKVSNRVWVSDGSGLLADPVSLPVAREGISRLERLLAEHAAVDPVIAIEATGSLHRSWVVELERRHPGSVRLFAPSETKAARIQLGSGRFKTDDRDCAALTYLARQGAGRLHADASAVDALRAAVRHRRGLVADRRVAQQRMHDQLNALCPGLSAPAGHGRSLPVDSPTGLAVLACAVAFAGRPPRLLSLTRRAPGRLTTSTAQYWLQRWRGCLPPPTDADQRARRLGRDLDRYRRLQADITTVDEEIAGLLAATDGQILTTLPGVGTIRAASFAAHSLPIERFPDAEHLYSATGLAPALYQSATLHRRGRISRQGLAEHRDAPMGIAWGLSQCSSSFIARDAELPARGMAPIQARVVLARHACRLLYRLLRTQQPFDEQRYRRGRPGRER

SEQ ID NO: 502957 - protein, 495 aa, unidentified
MIQIPAVIERCAGIDVGKRELAVVVIAGPADEDGEIKTRTFGTTVPALEELREWLIQEGCTSVAMESTGSYWIPVKNVLEPSLKIVLVCPKKHKPARGDKTDFRDAKNLAHLHRHGLLKGSFLPLRTVVELRDLTRRRKKLLANLAAEKNRIQKVLEVANVKIGSIMSDLFGVSGQAMVSALVSGKEISAEQIAGMSKRRLRQRIPELTEALQGHHMNDHHRWLIAQSVEHTVLLDRQMEELEAKIEEKLQPYREPYELLQTIPGVKGMTAATILAEIGPDMSQFETAKHLCSWAGISPGNNQSAGKSKHSRIKKGSKFLLSALVEAAWAAARKRDSIFQRKFHRWMHKLGAAKANVALAHSLLELAYVMLKERRPYQEPDPQQMHELEKAKLVRHHAKRLQQLGADDGLVNELVAKMNQPEVCSSIETNQTAIPRPIRKVCPAKVCRGALGFRARQTGKREYSTVKKPATEALLPTRSQSKRRKHPETNAQRPE

SEQ ID NO: 502958 - protein, 374 aa, unidentified
MRYYLGVDWADQKHAVWVVDESGTKVAGRTVPHTVEGLSEWGRELDQWRAQGIELWAAIERPDGRVVDFLLDHDVVVYPVNPKALDRARDRFRQSGAKSDPFDARVLADFLRTDHAHLRALQPSSAAAQELKLLAEDYQRQIRQQTRLVNQLTTTLKAYYPRALEMAELTTALAQEFLEAYPTPEAVTALTERRWLRWARAHRLSEVRTRELWDSLQQPQLPVPAHVVRAKARLMLALVAQLKPVVAAVGDYREAIEGFFANMPAAQWVRTLPIGKHGIMAPTLWARLGDAPGRWESFRHLQAHAGAVPVTKRSGKQQRVVHFRFACDKALRYVVDHVAFLSLHSSAWARAYYDQQRARGHSHRQRFGRWARSG

SEQ ID NO: 502959 - protein, 388 aa, unidentified
MSSTKYIDKDVHTESISIAVRNSVGKLVMECVIETKASTIVQFINGLRGDLRVPFEEGTWATWLYDLLKPHVTEVLVCNTRKNASGNGSKSDRIDARKLSEQLYMNAIKSVYHGEHGLRTLKELARSYLTISKDLTRVMNRLKALYRSWGIPCGGKEVYAPRHRAEWLAKITEAGVRRRAEHYYQQLDFLRPLRQEARRDLLLEAKKHKPWKLLRLIPGIGPIRAAIVIAVMQTPHRFRTKRHLWTYSGLALETHDSAQYRVAEGQLQRSKKPTTVRGLNKDHNHDLKEPMLPACESPEPPYALPDNRRKPLGQEPPIGPCIATLEWTIIRLAVSETDGRRHDSEMGTTGARKQSLRPISWAECREKKIGIEPKGSTFFLTFPLIGLF

SEQ ID NO: 502960 - protein, 289 aa, unidentified
MPRFVGLDLARATVQVAILDEHGHQLRNQKLPLRREELERFIPATLDPTDEVAVEATGNTWAVVDLLTPHVTRVVVSNPLRTRAIASAKIKTDKVDARVLAELLRCRYLPEVWQPDATTRHLRGLTHHRAALVGQRTAIKNRIHAQLAHRLLHVPTSDLFGTKGLAWLHDLSLDAAGRAMVDAELRLLTAVDAEIAREDAALAGHGWKDDQIRLLMTLPGVSLVVAIGLLAAWGDITRFPSGAKAAAYLARLYRVGTAKQNGASSRSVQVSENTREACPVSERGDRGNV

SEQ ID NO: 502961 - protein, 323 aa, unidentified
MTKHTTICAGIDTGKRKLDVAIEGNREQLQVENTSEGHAVLLTWLRRHRVKRVGIEASGGYEQPVVAELRRQRFVVVVFQPAQVRAYAKFHLQRAKNDKIDAALIAGCTAAVRKIHAAPDPRLLPFAEQLTMIDQINEDTARLKNRIESCRNAQIKKLWTEDIARLEKREKAELKALVASIRKHPDLARRLELINSVHGIGLPTAVAILVRLPEIGRITREQAVALAGLAPYDDDSGEQVGVRHIEGGRKRLRRALYAASLAASFRWNQQLIQLYQRLTAAGKEHKRALVACARKMLIFANTVVARGTPWQDCPPEKAALTTG

SEQ ID NO: 502962 - protein, 370 aa, unidentified
MKLITTYVGLDVHKSTISVAVAEDGRRGEVRHYGVVDNRADVVIKLAARLGRRGERLHFCYEAGPCGYGLHRLLSGLGHDCTVVAPSLIPQKPGDRVKTNRRDAAMLAKMHRAGELTEVWVPDTAHEAMRDLVRARATAARTLTKARQHLGGFLLRHGKIYAGPRAWTVAYRRWLTTVRFDHPAQQIVLQDYIHAVEDAEKRIARLVEQIEQLLPHWSMAGVVKAIQAMRGVAFINAVTMVAEIGDFSRFSNPRQLMAYVGLVPSEHSSGDSVRRGGITKAGNSQARRALIEGAWTYRMQARVSRKLHDRLEDLPQGIRDTAWTAQVRLCARYRRLVAKGKPKVVVTAAIAREMIGFIWAIARQVPLQPV

SEQ ID NO: 502963 - protein, 329 aa, unidentified
MKKKHSIGVDVSKMTLDIVFKNNQKHIKISNDLKGFKSFTKEIKSLGLPLEDCLVVMEHTGVYSYPFENFLSKMGISFSKVPALQIKRSAGIVRGKNDKADAKQIADFGDLHQASLKLCVCSEKTNYLKSLLSLRERFVTQKAGYIASLKEQEAFLGINKSSPLLKTQKRMIAQLTDQIEEIETEIKKVISEDEAMKKNYELLVSITGVGFVVACSMIVFTNNFTMFSDARKFASYCGIAPFDHSSGTSLVRKPRISHLANKKIKCLLDLAARCAINYDLELKAFFKRRTESGKNKRSTINIVRNKLVYRMFAIVKRETPFQKNYQNAA

SEQ ID NO: 502964 - protein, 343 aa, unidentified
MDHFAGLDVSVKDTSVCIVDGTGKIVREVKVASEPEALLAVLTNGTYRFKRIGLEAGPLSQWLFSALAEADLPVVCVETRHMRAVLKAQINKTDRNDARGIAQMIRVGLYRPVHVKTLRSQKLRMLLTHRKLLQSKAIAIDNDLRGTLRNFGLKVGMVGAVKFEARIRELVEDLPDLAILIEPLLVVRRVLREQVGILHRRLLAIVRDDDVCRRLMTVPGVGPVVALTYRATVDVPARFRKSKSVGAVFGLTPSRDQSGERDCQGAISRCGDEMMRTALYEAAQVMLMHSVKWSWLKAWAMKIARHRGRNKAIVALARRLAVIMHRIWVDGTEFCWTREAAAA

SEQ ID NO: 502965 - protein, 424 aa, unidentified
MKVTYQTCCGVDVHKSFLVATIVKTTGGVEPSYQKKRFSTFNNSILEFKHWLLDNDCLDVCMESTGKYWVPVFNLLEDEINVVIANPKWVKAVKGNKDDTKDSKWIGDLFRLGLVKGSYIPCKKVRILREYTRYRYKLVSCRSSEKNRYQNALTVCNVALDSVVSDIFGKSSSSIIDYLLEQSDTSINHEEIASKLLRRLKSKEDAVIESVEGYQMTDAQKYRMRLVRAHMDYITAEINDVDKMIENMISSNPDFENAIQFLCTIPGVKRDSAITIISEIGTDMSQFSSSKRLCCWAGLTPGSNESAGKKKSVRITRAGVYLKPALVQCAHAAVKSDKSPYYKKKYESLVKRRGKKRSIIAIARMILTAIYQMLSTGEQWNPSDLYKIDMPVALVEKQKAKAIKQAKKLLQREGLLPPDEPLAS

SEQ ID NO: 502966 - protein, 359 aa, unidentified
MLTQSNKIDFNGQHFYVGLDVHLKSWKVSIMTEKLTLKTFSQDPNPELLHRYLVKNFPNGIYHSAYEAGFCGYWIHNKLTALGIDSIVVNPADIPTTDKEKVNKTDKRDSKKIARSLRNGDLKGIHVSSLKTLEDRCLVRMRRTLAKDLTRNKNRIKSFLYFHGIDMPEAFSKSATHWSKRFMNWLRSLEFNESSAKKTLALLIDESQHLRLTTLNAIREIRELAQSEEYCNLVRLLRTIPGIGTLTAMIILTEIETINRFSNFDQLCSFIGLIPSTNSSGEKEVTGEITHRGNNFLMSIIIESAWIASRWDLVLNKSFHDYCKRMEPNKAIIRIARKLLNRIRFVLKNNQPYVCSFIK

SEQ ID NO: 502967 - protein, 516 aa, unidentified
MTTRSRKSVRKYLIQKPSGSVAPRVQAVGPEHFGVLCFDCAKDRSKCMLANFYSAVLLPPEVVSHTRGDLQNVIDRVRKAMIDHQLRDLIVAIERTGEYHRPVQRACQRAGFDTRLVHPFTSKQFRLPADVDKTDDTDLAGIFRAAVNGFGLTEPVLPDDYQQLQMVIRHRRDLVHKMSALCCQIREHLHALMPGYAACFCDLWESQLALPLARATGSAECIRQAGVAGLVRLAAEQGLKARRDSAAKIVAWAETAPSAHPQPTLLRQILMTLDDDRLSKTLQIALLERSAAHYLTRTPYVLLLVIPGINVVSAADLAGELGPICLYPQDSAITGRAGLMPSRYQSDQVDRANGPLHRRANRRLRDALLQVAENLIVNNHYFRAKAALWHSQGKDPRWMRVKVAKIFSRLLFAMVAGRQLFRHPCRQERHYVLHKLMVFHQHHDTPMSVTLADLDAATQQLPRSAHADEAQPLAERLKEVLHRKGPQPLADIIPIVLARLGVMPVQSTPSEDQGPS

SEQ ID NO: 502968 - protein, 386 aa, unidentified
MKLVGIDIAKYEHAAFIMEASTGESLCDPFFFKNNKEGFKKLYTELNKYSKNELLIGMEDTGHYNFAIESSLLAEGYKVALINPITTKSLRKASLKSVKSDKEDALLITKALLDKAYYRIISIQDEKLKEAKELTRYRTQLTLEMNRKKNVLQRHIDIVFPEFNTLFNNEYTITYLNILRKYSDAYTIAHTDIRSLRKCFKYCNSFSAEELKELASNSVGIHDVSISFIIQSVISSIDLINSQIEELDKKIEELAITQDSSITSIPGISIITGTSILAELGDISKYSNAGKVIKFAGVNPYISESGKFSADKTAITKKGSKYLRTTLYRVIIPVIRHNPAFNNYYHLKRNQGKGHLCALGHCVRKLLRIIYHLETNNLSFDINSLK

SEQ ID NO: 502969 - protein, 416 aa, unidentified
MLFIGDDWAEDHHDLEIEDQDGHRLARSRLPEGLEGITRLHALVAEHAPPEWADLPPEQIAGQVIVGIETDRGPWVTALRAAGYQVFAINPLSAARYRQRHSTSGAKSDAGDAHVLAEIVRLDRAHHRAVAGDSDLADAIKLLARAHQSAVWERTRQVLRMRSTLLEYFPGAVQAFTDLAAPDALALLGRAPDPDRAAKLTRSQLVSALRAARRHHVDAKADVLLAVLRAPALRQPATLQGAYAAVVTGQVGIIAALNEQLAGLHEVMAEHFGRHPAADIYLSQPGFAVVLAARTLGEFGDDEDRFASSRARKNYSGQSPITRASGKKSVVLARYATNRRLGAALHLQAFAALGASPGARAYYDALRARDIGHHAALRQLANRLVGILHGCLKTGAVYDENIAWQHRQITTQTVAA

SEQ ID NO: 502970 - protein, 321 aa, unidentified
MTAILGIDVAKNKFDVALYRNGKYKTRSFENKPQGFEALTDWLKKHEVSSLHACMEATGTYGDALARFLFVAGHTVSVVNPSRIKAFGEAELLRTKNDKTDAKLIARFCESQKPAAWQPDPPEIEHLRLLGRRRDALISMRTQETNRLGSPDAAVNDSVQKVIDFLNGEIEQISKAIKEHIDKHNGLRKKRDLLKSIPGIGDVSIEAILSEANGFEGFDTVEQVVAYMGLSPKEHTSGISVKGKSSLCKIGSARLRKVLYMPTLSAIQHNPFVTALYERLMAKSKNGMIVACACMKKLVHIIFGVIKNQKPFDPAYNIKNA

SEQ ID NO: 502971 - protein, 424 aa, unidentified
MKNTAARKRKQVPEGYLVIGVDPHKKRHAAVAITQDFTTQAKFKFDNTNEGLEMMLGRTRAEMVKSRCRGVMFAIETGGHYWRNIAYYLDERGIPFRFINQYTLKRRREGKDLNHRKNDYRDSEVAAQLLCTGEFVESVIPQGVYAELRTSHNAYQRLVKERTRITNLVKGLLDGLFPEFSHVFKDPGGLTAMSILSACPIPGVIAGMTEDEFVAAIEACHKGRRLMRKKLRALHYLARRSIGIHAGAHSVSFEIGFLVDKLELIRQQIRIMEGELVKLVDETEEGKYLLSIRGLNYIAVAGLLAELGCFKLYRSAKQMIKMAGSNPTESESAGKKRSKTPMSKQGRPLLRYCAWTAVIPMLRFNEDFRAWAKQRRERPTHANPLSGREVVGAALNRLLRLAFALVKNQTYYQDTRPALIPVAV

SEQ ID NO: 502972 - protein, 412 aa, unidentified
MRRVIGIDTHRTFGEVVIWEDGRLRHVGRVDMTRTALEGFGKKLLANDEVVIEATGNCMAVSRVLTPFVKRVVIANPLQVKAITHAHVKTDKVDAGTLASLYAAGYLPEIWTPDAATERRRRLVARRYQVVRHRTRIKNEVHSILYAHLIPRCPHADLFRRLGRTWLTSQPLPDDERAAIERHLRELDRLGDDLRVLDQEIAQSALDDAAIKRLITITGVNLTVAAGLVAAIGDIGRFSSPQKLVSYFGLNPRVHQSGLGAAHHGRISKVGRSHARAMLVEAAWATAKAPGPLHAFFVRIRARRGHQIAAVAVARKLAVLCWHMLTKQTDYHWARPALIANKRRAMELQAGRPQKKGNKRGSTYAYNVKALRDQEMRLAQQAEQSYENLVAHWQPRPAKKPARGRLKPAGLE

SEQ ID NO: 502973 - protein, 336 aa, unidentified
MAIVRVFVGLDYHVDFVQVCVMNRKGKILRNRKAANDWQAIAAMVAEMGRVASAAIEACSGAAHLTDELIHNAHWPLQLSHPGYVARMKQSPDKTDFSDAQLLADLSRVGYIPKVWLAPPEVRELRRLLRFRQQLADQRRNVKLRIGALLREHRVAQPAANPWTRRWRIWLEALELPAETQWIIGRQLRRFDAVNLDIAAAESRLAKLAERDRLLQFLLTLSGIGLVTAVTLRAEIGRFDRFHNGKQLSRFCGLSPRNASSGNRQADAGLIRAGNPQLRAVIVQAAHRLKRYDPRWSALAMRLRRRGKSGSLLAAAIANRWMRSLYHQVQHWSTAN

SEQ ID NO: 502974 - protein, 431 aa, unidentified
MKNRTNQRLEEITAGMLIVGVDVAKSVQWARFVDCRGVEIGKALALQNDRKGFELIVARIREICNMKILRYPIEAVMIGMEPTGHYWKPLANYLMKAGYRVVGVNPYHTKKSKELDDNSPTKSDKKDAITIARLVKDGRFFDPYLPEREYGELRGLSNARVSVIKRTNAVKNTITAILDEYFPELWTVFKYPLKGKASRQILRSCPFPAFILAMGEAGVLAEIKKAVKKTVGMKKVRQLMAAAKESIGVEYGLDAAKMRLVWLLDELALAEKQLCEVEQAMEAALHRTGYALQLLGIKGIGVVTAASFLGEVGDPLRFQNARQIARYAGYNLVEDSSGKSKSGTCISKRGRKQLRSVLYQMAFTMAGKNAEMKMLYQYLTTRKDNPLKKKQALVVVSKKIITVIYSLLKKQTAYKPELVLGVVRKEMLKAA

SEQ ID NO: 502975 - protein, 360 aa, unidentified
MDIAKTIFEVALSHEPGRVAERRRLSRGTFLIFFAQMPAATVVMEACGSARSWARKLQELGHKVVLLPPHQVRPYVMRNKTDRTDAKGILEAYRNADIRPVPLKSVSQQVLVTLHRFRSAWMAERTAQINTVRGLLRELGFVIPLGMEKVLPQVRALVEDADSEVPDALRGVLFEACEEIRTLGERIKKTERQLEALAEQTPVVERLRSVPGIGLLTSTAQVTFVGQILRFPSGRHYASYFGLTPREFSSGAKRRLGRISKRGDAYIRMLLIHGARSVLCHAKKEQEHDRLRAWALALERRVGHNKAAVALANKLARIAWAVWKNDPPSSRCPWPLRRRPPQEERRNQGFAHPGTAQSIA

SEQ ID NO: 502976 - protein, 342 aa, unidentified
MTDLYVGLDVSLEQTAICIVDGNGHRVFEGQATSDPEAIAMELRAHGNSFARVGFEAGPLSQWLYFGLEAAGFPAVCIEARHAKAAMTAMNRNKNDRNDARSIAQLIRSGWFKRVHVKSVESQELHSLLVAREFFVNKLRDHENEIRGLLRPFGLKVGAVSASGFAARVRELVGGNRRLDVYIGALLDGRAAMMEQLANLHRELLRATANDELCRRFMTIPGVGPVTSLAFKTTIDDPTRFRRSSDVGAHLGLTPRQYQSGETDVRGRISRSGDGFTRTALFTAAHVMLTRSRQWTSIRSWGMRIAQRSSLKKAKITVARKLAVVMHRMWRDATPFWWGAAA

SEQ ID NO: 502977 - protein, 367 aa, unidentified
MKKISTVATKQNRNVSEQKLTIGFDLGDRSSWYCVLDEQGEVVLEQKLSTTPKAMKEVFGGMPRSRIALETGMHSPWVSRLLSELGHEVIVAHARSVRLIGESRKKDDRMDAQTLARLARIDPRLLCPVKHRSAKAQADLTVIRARAGLVRARTALVNTVRGLAKSYGERLRGCNVRNMNPEKAEGLSPELQRALEPLLAGIESLSERIVECKERIEKLAQESYPQVARLKQVKGVGTLIALTYLLTLEDAQRFRKSRDVGCYLGLQPGRRNSGQSEPQMHISKEGDPYLRTLLVQGAHHILGPFGADSDLRRWGLKLAERGGKNGKKRAVIATARKLAVLLHRLWVSGEAYEPLRHSQQRAMPAAA

SEQ ID NO: 502978 - protein, 321 aa, unidentified
MTHNATHSLMVGIDVAKDKLDVARSDDESVRTLAHDVTAIAQIVAELVASRPELIVLEATGGLEQPLLDALLDAALPVSRVNPGQVRHLAKALGILAKTDAIDAKVLVAFARHAAPRLAEKRSKSRAELDALVTCRRQLTKSRTEQVNRRGVTRSKPALRALDAVIKTLDRQIQSLDEQIRKIIDSDGDLSGMDRLLQTAPGIGPVASSTLLAEVVELGRADRRQVAALVGVAPFNRDSGRFKGTRAIRGGRAAVRSVLYMATVTAIRCNPVIRRFADRLTAAGKKPKAVITACMRKLLALLNAMLRNRLQWSQLKIVQNT

SEQ ID NO: 502979 - protein, 331 aa, unidentified
MKIIDVVGIDVSKLTIDVVVHKSKSYRQFENSNKGFATLCKWALSESKVDTKRLLFVFEHTGLYSHQLAVYLSKKNFSFSIVPGLEIKRSVGIARGKDDRIDAAKIARYGYRLKDEIEPTVFLTQELQNLKDLLTLRDRMVKQRAGYKVSLKEMKRVLKIKDNVVLFTTQEKIIASFNKQIDNIDKQMNKIVQCNKDIKNQCDLMTSITGIGQQTALYMIVNTAAFAKFRNSRCFASYCGIAPFPNSSGTSIRGKTKVSSLANKKMKSLLDLAAKSAIQYNPEMKLYYNRRLEEGKSKMSTINIIRNKLLSRIFAVVRRGSPYVNTMNYAA

SEQ ID NO: 502980 - protein, 304 aa, unidentified
MFGIGIDVSGENLDVAVHEQAFRQFKNSKRGWNSLIRWLQQWPAKQVVLEASGGYEQKALDALHEAGLPMVRINPGRGRSFASATGKQAKTDRIDAMVLAHMADALKLTRYVPPAAWQRRLGELCQRRRHLVQMRVSEHQRMRAFSEPSLISMLNQHLREIQKSIKQLDATIAALLAEQEGWRDFAKLKGAGPVLMATLACELPELGKLSGKAISALVGVAPMNRESGTWKGRRSISGGRAVVREALYMAALTAKRYEPRLKEFFESLVKQGKPGKVALVAVMRKMLVILNARKRDAEAQMASA

SEQ ID NO: 502981 - protein, 385 aa, unidentified
MTIRVQVSKFIPRDYDVFAGLDVDKKSMSVVFTDHADWQRALRMANSATPLLNYVRKHFAGQRVAFAYEAGPTGFGLHDELVRQAYTCVVVAPSKVPRARGERVKTNRLDSRKLAENLRGGQLKSIHVPTPVYRDLRHLVQLRDTHVRQLTASKLRIKSLLLFEGLPFPDPQEKWTARAMRELQTLPCSETVRFKLNDLLDTLHFHFQAAARTTKQIRQHCLDDPELQQSIELLLSLPGIGWIVASHLAARLGDPQQIKNGKQIAGFLGIVSSEHSTGEKENRGEITRSGDSRLRNKLIQSAWTAIKKDPELRDFYRRIYQRHPQKVAARKAIVAVARKLTTRIYVVLKEQRPYVVRPDSSIAPLTAEETVGPRDRLDSAQNDQP

SEQ ID NO: 502982 - protein, 319 aa, unidentified
MAQNDLVVVGIDVAKDKVDVCIRSLSLRQTFPSTPQGHRKLVAWLRKHQVNKAVMEASGGYERAWAKVLREAGIEVRIVDPKRVRSFALSAGRLAKNDAIDAEMIAWFAETFSEAPSQKHDAAHEELQTLVKARLSLIDVRMRLVSQSEHAAPGLVQKAHAHILKSLASEIAKLEAAIYAKIKSMPDFAERAEIIESVPGFAEISSANLVAGMPELGQVSDEIAAALIGVAPYDDDSGKRRGERHIKGGRRWVRNAIYMPCVGAATQNNPVLKAYYQRLIAKGKEPKVAIIACMRKLIVILNTMIARRQKWDPSRYALS

SEQ ID NO: 502983 - protein, 338 aa, unidentified
MPLYSAIDLHGNNNVTLVLDEQDQVVYQKRLTNPLPLILEALAPFQAQLQGIVVESTFNWYWLVDGLMEADYRVHLANPTAIQQYSGLKYTDDHSDARWLAHLLRLGVLPKGYIYPKEQRPLRDLLRKRGHLVEQQTSNVLSVQNIISRNTACRLSVNQIKQLTPDEVQVLLPNEDQDLAVSSTLRVITCLMEQIHLVEKRVQSRIKSTPLYELVQSVNGIGPILAQTILLETGDIDRVADVGDYVSYCRLVNSTKLSNGKRKGKGNVKNGNKYLSWAYSEASHFAIRFSPEIQRFYQRKASKTNVPVAYRTVAHKLARACYHIMRNKVPFDVAKAFG

SEQ ID NO: 502984 - protein, 323 aa, unidentified
MGNYVGIDISKLGFDASLPGTKGDCLTVRCDNNERGYGILSKSLPEDAHCVMEATGPYCLRLALHLHGKGIAVSVVNPLAVRRFTQMRMARAKTDRTDAKLIAEYGKSERPPLWEPPKGYIHELQQDNTVLDSLVKQRTMLSNQKEALTQLPCVSAEAVAALEPVAGQLGEQIAVLEKAMERKALDNCPELYRSLKSIPGIGPKTSIQLIVITHGFARFRNGKQLAAYIGLCPRIFQSGTSVKGRSRICKMGMGRARALLYLCAMNARKGNRACRELYERLRLNGKPPKVALIAVANKLLKQAFALGTRLEIYSEAKYNSVTI

SEQ ID NO: 502985 - protein, 383 aa, unidentified
MSARRRGPGPSSVLTTPDHAGNVVGVDPHKRTLTATVADPRGAILASEHFRVSGDGHRELEAWARQFGQIARWGVEGASSWGRHTAVFLVARDYDVRDVCANRTPRSDRARQRGKSDTLDSERIARETLAHPLLPKAFKRAGPDSGPDERHELLALRHNQRRSILTSRQHLLNEAEHLLSSLPLQLREQLPDTKAVRPRLTALAARNRRRRYDQPTTLRLTLLDDYRAQIATLDAHDKQVTAELAALVKASGSTLGELCGLSTVLVSELLVEVGDPRRFTIAGFARFNASAPLAASTAEGPGEPVRHRYNPGGNRRVNRTLHLMAVTQLRCEPRAQTLYDNARKRGHTKKEARRILKRHLSDVIYRHMIRDLAPPCAQPLLAT

SEQ ID NO: 502986 - protein, 314 aa, unidentified
MNDTSMICAGIDVAKGKLDIALHPTGKHLQVTYDAAGLKRLDAFLVKHGVGRVGFEASGGYEWRLLVHLRASPVPAGRFQPAQVRYFAKSRLKLAKNDKLDAALIAAFTANLDALPALPDARFDTLNAELTYLEQIEDQVSVLKTMAETTRAPSLKRLHEQDIARLQKRREARMLLIAALVANDDELARRRALLVSIKGIGLRTALALVIRLPELGSLSREEIAALTGLAPYDDDSGKRRGRRHVRSGRARLRKSLFMGAFTASRCNPDLKAIYRRLRNNGKHHLLATIAVARKLVILANAIVARGTPWTPTHA

SEQ ID NO: 502987 - protein, 430 aa, unidentified
MKSNTQNAKIEAITEKTLVLGIDVGSEMHYARAFDYRVIEYSKKPFKFSNTEAGFATFKEWILDLKERHEKDKVVPGMEPTGHYWFNLGKFLQDNEMKPVLVNPHHVKKSKELDDNNPTKNDRKDPKVIAGLVREGRYMIPYLPEGVYADLRTASNIRFQLQAELTRIQNRISRWFNIYFPEYKTVYGKPDAKSGMLILKAAPLPEDILTLGIDGVNQIWRDAKLRAVGKARAKTLIEAAEHSVGSKEGAVSARMEIRMLLEDYESRNTRLQEVMVLIEELVRKIPMAEKLLEIKGVGIRTVSGFLAEVGDISHFNNPKELQKLAGLALVENSSGKHKGETTISRRGRKRLRYLLFEVAMSLVSKNQEFRELHNYYTTRRLNPLKKMQSLMAIAAKLIRVFYAMLTKGVDYDPKKMVSDIKRPAVYLQAA

SEQ ID NO: 502988 - protein, 346 aa, unidentified
MIAPQDFYLTVNLKGMKNYLNAIGMDISKKTFDAILFHSGEHSKFANDKKGFNSFAKWMKKNGCNPANVLICFENTGYYSLQLSSFLFEKGFDYVQEHALQIKRSIGFRRGKSDKSDAMDIARYAWIYRESIRLSKPPSRLLLKLQQIKTTRELLVKHSVAIKNQIQALKVVGDHDVSRESSKSLSRVLRTLEKQVHNLDTEIEVLIGKDEQLGKTFKLCCSVKGIGLVLALELIIHTQNFTCFDCWRKFAAYCGTVPYPYQSGTSIKGKTRVHPASDKRMKSLLTMASISALQVDPELKLFYKRRVEEGKPKMSVINMIRNKMLARIFATVKRGTPFITMSKFAA

SEQ ID NO: 502989 - protein, 478 aa, unidentified
MALARSSGLNRKQRKELARRLRSEDPGLEVMHPHAAGIDVGNSAHYVAVRPDRDPDPVRRFECFTADLHRLADWLQQCGVTTVAMQSTGVYWIPLYEILDARGLEVYLVNARHTKNLPGRKSDVQESQWLLKLHTYGLLRNSFHPPAEIRVVRTYWRQRGDHVHGVSTCIQRMQKVLTQMNIQLANVISDLSGWTGQRIVRAMLAGERDPERLAALSHPGIHATRQTIARSLEGTWQPDLLFVLQQEVAMYDAYQQRIAECDQALELHLKSVADKVADTLPDAEPSPTPSRESRRSGPKRRRKAGSHAPQFDLGRELHRISGVDLTRIDGIDVGVAQTVISEVGVDMTRWKTEAHFASWLGLCPDNRITGGKVIRKGTRHVVNRAATALRLAATTLLRSQSYLGAQYRRLRARLGAPKAITAMAHKLARLVYRMLTWGHEYVDKGLQHYEERHREQQVQLLKKRAAKLGLQIVEPEAA

SEQ ID NO: 502990 - protein, 413 aa, unidentified
MRVEHERCCGIDVHKRMIVACVIVPDGAGEVVKEIRTYGTMRGELQTLVAWLHSVGCTHVAMESTGVYWKPVYNVLEGEFELLVTNAEHMKKVPGHKTDVSDAEWIADLLRHGLLKGSFIPTRQQRALRDLTRYRVRLVAERTSEINRLQKVLEDANIKLASVATDIMGVTGRLILQELIGGNSDPVLLAALARGRLREKQSLLEKALQGQVTAHHRFMLIQHLSHIDYLDEAIHNLDHEIEEQTRPFEEELQRWDQLPGISRRTAEIIIAEVGADLKQFPDAKHLASWTGLCPGNNRSAGKRKSGKTSKGSPWLRRALAEAAHAAARTKNSYYRALYHRLAGRLGKKRATIAVAHSLLVTGYCLITRHEDFCDPGRNYLDQRYLDAVKSRSVRRLEQIGYQVTLTPLPIAAT

SEQ ID NO: 502991 - protein, 351 aa, unidentified
MLYAGVDAHKKYSLVVLTDDLGTKLAQASLSNELGCFHDFFKQATEPVRAVVEAGRTWGVIYDLLESIGVEPVLANPLKTRAIAEAKIKTDTIDAKTLADLLRADLIPLVHVPSHEVRSQKNLLRQRFWLVELRTRVKNRTHHILDRNHVTLPSCSDLFGKAGRQLLDQIEIPAPDNLLLRAHLELLDYIEKQIDQVERWTQESLKDHPGVARLRTIPGIGKTLAALVALEIDDISQFSVADKLCAYAGLVPTTYASGGKVRHGNLLPSCNRWLRWAYVEAAWIAQRTSPYCHAYFERIKRRKGANCANTALARRLCEITWHCLMEKRSYEERSSARTANIQPAAFESSWS

SEQ ID NO: 502992 - protein, 342 aa, unidentified
MEQVTIVGLDLAKRVFQVHGATADGGIAIRKKLSRGQVLAFFADLPPCVVAMEACATAHYWAREIGALGHSVRLVPPAYVKPFVKRQKNDAADAEAIAEAASRPTMRFVEPKSTQQQARAMVFRTRDLFVRQRTQTINALRAHLAEHGLIAPQGMSNLANIRRLIDEAAAEVEPLVVETAHTYLEQIDDLSSRILKLEATLKQEAARTDASSRMMTMPGVGPITAMAIEAFAPSLCVFRRSRDFAAWLGLVPRQHSTGGKQVLGRTSKMGQRDIRRLLIIGAMSVIRWATRKGTTPGTWLHSILLRKPRKVAAIALANKMARTLWAMETRKEDYRDPRLTAA

SEQ ID NO: 502993 - protein, 456 aa, unidentified
MSKVKTVEPTFAAVPAPEFAARIGLDWADQKHFWTMLDEGGKKTRGQLDNTPEAIEVWAAELAQRWGGRPVALALEQSRGAVITVLSKYAHLVLFPVHPTSLANYRKSFSPSGAKCDPVDGDLILDYLVKHPEQLRCLRPDTVETRSLQFLTEERRKLVDAHTAALLSLIHWLKQVFPQILRWFDDPATLLVADLLMRWPTLQELQKSSPKTLRKFFHQHNCRSEDRIEERLEQLRQAVPATRDPALLQAGTLSIQNATRILACMRQGIAEFDRQIAVTYQAHPDRFITESLPGAGPVLEPRLIAAVGSQRDRFASAHNMNCCFGVAPVTERSGNSIWIHWRWACSTFVRQTFHEWAGCSIRTCDWARQYYDRQLAKGNGHHAAVRSLAFKWIRIFFRCWRDRVAYSDQRYEEALRKRATKPQPASTPTQADAKITLEWKSCGGFSKLVKVSEISS

SEQ ID NO: 502994 - protein, 386 aa, unidentified
MRQPNDLSRSLATFDPESTLVAVIEMSQSSWLVAGIVPGLDRQPLKKLTVDEGALLRLLQRWRDEVIRLGGKVECIAVAFEAGRDGFWLARWLRAYDIEAYVIHPTSIAVPRQHRRAKTDRLDTELLKRAFLGWLRGEREHCSMAAIPTLEEEDSKRPHRERESLVAERTRIINRMKGCLARLGIRGYKPNLQRATKLLPALRTPEGTPLPPNALAEMGRDLARLHFVEGQIREIEAARLERLHQDPTEKSHSMVRLLARIIGVGVETADMLVREILSRNLRDRRAVARYAGLTGAPDESGSKRREKGLARAGNARVRRGMIQLAWRFLMFQKESALVQWYRSRTADSRQGARKSLIVAMARKLLIELWRFVKTGETLVGVAMRPA

SEQ ID NO: 502995 - protein, 440 aa, unidentified
MKKYYLGCDVSKGYADFVMLDSDKNIIENNFQLDDTFNGHNQLYSILTDFYKAHPISSILSAVESTGGYENNWFNTLSKLSEILNINVIRLNPLGVSHSQKAKMNRAITDEISAYNIAEYLINHQNKIQTNTKSYYSSLRKQWIFVKLLVKQRVQLLNQLEAIVYTANTEVLTYCKHSTPNWLLLALKQYPTAKRLARAKVSSLIKIPYITRLKAEDLIAKAKLSISSSDDKTTEIIIKATVDQILHLSKTIVAHEKQMSDSCKLPEVKILESFKGIATYSAVGLILEIGAVERFSSSKKLAAFFGLHPTLKKSGDGSAAVKMSKKGRCEPRLILFNVARTAINSNPLIKGIYEKHVKRGMPKLAAIGCVMHKILRIVYGMLKNKQNFDPEIDKKNQRKSLPKKKTVKISKVRRFQNYDAKAPVSRRQNIKRKEEKKSQG

SEQ ID NO: 502996 - protein, 356 aa, unidentified
MRSDIKYIGLDVHKEAIAIAVLNDSGKLVMETVIETKASSILQFLHGLRGELHVTLEEGTWAAWLYDLLQPQVQQVLVCNPRRNALLKEGSKSDKVDARKLAELLRAGLLRPVYHGENGLRTLRELARSYQTISKDLTRVMNRLKAVYRGWGIPCAGTKVYAARYREEWLKKIPQAGVCRRAELLYQQLDGLQALRRKVRAELLAESRKHKAAKLLRQIPCIGPIRAARLIALMQTPHRFRSKRQLWTYSGLAVETHDSAQFRFVRGQLQRSKKPQQLRGLNHNHNHEMKEIFKSTATTASGGAGPFHDFYAGLLAKGMEPEMARLTLARKIAAVTLTLWKKGARFDAKQLNAQAA

SEQ ID NO: 502997 - protein, 332 aa, unidentified
MSHDVKYIGMDVHREAIVIAVLNGSGKLVMETILETKASSILQFLHGLRGELHVTWEEGTWAAWLYDLLQPQVEEVLVCNPRRNALLKEGSKSDKVDARKLADLLRTGMLRPVYHGENGLRTLRELGRSYQTIGKDLTRVMNRLKAVYRGWGIPCAGTRVYAARYREEWLSKLPQAGVRRRAELLYQQLDGLQALRREVRPEFLAESRKHKAAKLLRQIPCIGPIRAARLIALMQTPHRFRSKRQLWTYSGLGIETHDSAQYRYVGGQLQRSKKPQQIRGLNRNHNHEMKEIFKSTATRAGAQDRGHYFDTLEEGRTFRRRTTENASSLSIA

SEQ ID NO: 502998 - protein, 373 aa, unidentified
MYYVGLDVHAKRSSICILDDNGKLVKRLEVKGAWSRLLEVVDQQVPKPFTICYEASCGYGYLYDQFARRAERVSVGHPGQIRLIFRSKKKHDRVDAGKLAKLLYLDEVPQVHVPGVDVRAWRGLINYRRKLVARRTAVKTQVRALLRGLGVTVGVKGGLWTKKGIAWLTSELALASPADRVRRDVLADDLAHLEAKVATVEKELDRIAKGHPGVALLRTIPGVGPRTAEAFVAHVDDVSRFARVNRVGSYFGLVPCQDASADRNRLGHITKDGPAGARWLIAEAAWQGRRRSPRIRAYFDRVMRNDPNRKKIALVATAHHLTRVMAAMLRSGEVWREESQTQTSQTPALDQQEKTKTKTKTKTKTKAKTSDKE

SEQ ID NO: 502999 - protein, 340 aa, unidentified
MEGVAVIGLDLAKSVFQVHGIDAEGGVVLRRRLTRAKLVPFFAGLRPCLVGMESCASANYWARELAALGHEVRLMPPRYVKPYVKRSKNDASDAEAICEAVTRPTMRFVGTKSREQQGVLVLHRARLMLTRQRTQVGNAIRGHLAEFGIIAPVGREGLDRLVAVIADESDHRLPPCARTCLAMLVQQYQIVVANLLETDRAIRADSRSSELGRRLQEIPGVGPLVASALIASVPDPHVFKTGRCLSAWLGLVPRQHSSGGKERLGGITKAGDTYLRSMLFVGAMAVIRHAERYGTRKPWLIKLLSRRTPRIAAIALANRIGRTAWALMTSGERYREPAVA

SEQ ID NO: 503000 - protein, 290 aa, unidentified
MHMIAFDSHKHYTVASVQSINGQIIKEARIDHGRGNIVRFLAQWDKGSPVAVETIGNWYWIVEEIEHAQMRPRLVHARKAKLMLGMINKTDKLDARGLNRLQQTGTLPTVWIPPLEIRDKRELPRTRMVFTHQRTKLKNRIHSVIDKYGLQNKFTDISDIFGKRGRQLIQESLRLLPEQTRYAMETLLHHLDEVERQIEEIEKRMKEVFQPDEETRLLMTMPGIGFILAVVISLEVGDVRRFSGPERLASYSGTVPRVHASGEKVRYGRLRPDTNRYLKWAFCEAGSSSQ

SEQ ID NO: 503001 - protein, 383 aa, unidentified
MKYVGVDLHKHVIVLCVVVLVAGRPKVVKRARFGCDESEAIRAFFQALSTFQVVVEATAAYEWFFLLIENLADRLVLAHPKKLRVIAESTRKSDKIDAEVLATFLALDMIPQAYRPTPRIRQHRVLVRHRCWLQRRITSLKCKVRNVLGHYNADIADLFTRKGEQHLAVVPLSPADRFTIQALQEQLALFQRQLREADRQLAQFAETAPLVEREGRALLDTIPQIGPVTIGVVLSELGDWRRFHSQKAVAAFAGLDPGFRKSAEKCLELHISKEGSRLLRWAMIQAAWRLAVRSPRWREMLVRLQINTGSKKKAIVGVARHLLCMMFAMLQSGRPYELLGVPNVNQRAAKAHETAETSARARQKGAAPSRLHRRLGRSRCAVG

SEQ ID NO: 503002 - protein, 359 aa, unidentified
MGAQQAHERHVVGGVDTHKDLHVAAVVDDRDRVLATTSFAATRQGYRQMLAWMRSFGLLQRVGVESTGSYGAGLLRFLQQAGIEVLEVTAPDAQDRRRRGKNDDFDAQSAAHAAFAGTRTVTPRTRDGMVEPLRVLSACRKTAVAARRIALQMIHNTIVCAPDGLRETLRRMTRMQLVRTLAAWRPDLSAYRDVEAAYRIGLKSLARRYLELHDEIADLDAMIGAIVDELAPELVARNSIGRNGAAQLLLTAGDNPRRLRSEVGFAALCGVSPVPASSGKTVRHRLNRGGDRTANSALHIIAIGRLRTDERTKAYVARRIAEGHSKLEAIRCLKRYIAREVFTLITHRQRTINQTRVAP

SEQ ID NO: 503003 - protein, 426 aa, unidentified
MKKADLLSTLFVGIDVSSRENVVCAIDFEAQKLLRFSVQNNHPGAVEMATKLHEFLSGNRDINRLMIALESTSFYGIHIANYLSSCELLMPFNTHVYCLNPKMIANYKKSYIDLGKNDAIDAFVIADFARVGRITTAPWRGSQFLALQRLTRHRLHIAGSLTREKTYMLSNIFLKFSEFSMLDEDKQPFSNNYGATASSVLTDFLSTEDIANMPIEALIDHICTKGKNRFVKPSHTASLLQQAARNSYRLDKCLYEPLTISIASSFNLISAYVSEMKAINKAIEKTLKGLDPNAYQSLLSIPGIGPVYAAGIIAEIGSIDAFNSHNALAKYAGLVWRENQSGNFRADDTILSKAGNSYLRYYLIEAASHVKNHVPEYAVFYHKKYDEVKTHQHKRALALTARKFVRLIFGLLANHQLYSQSRVSQV

SEQ ID NO: 503004 - protein, 341 aa, unidentified
MTVYIGVDLHARQQTLAFVDTHDGEIKCRELHHQKEDVAAFYRQFTGEVIVGVEASGYTNWFEELIEQLGYTLLVGDAAEIRRLARRRQKNDRRDAELILDLLAHDEFPRLYRYPRQSREVLRQLRFRHKLVKLRTSVLNSLHALSISAGLSLQARLATAQGRTRLEQLRLSPVLATQRDEWLALGDELSHRILAVERWLQRQAKDDEQAPSVQTHAGVGLLTSLCLVHTLGDVTRFASTRKVTAYVGLDVTEHSSAERKVYGGRSLAGSRLLRYLLVEAGQTAARSDEQLRDFYQQVMKRRGKAKAKVAVARKLLIRTFIMLRDEIDYAEFLRRGKRTGE

SEQ ID NO: 503005 - protein, 339 aa, unidentified
MKKVTTIGLDLSKRVFQVHGVDASGEVVIRRCLRRSQVVTYFSRLAPCLVGMEACATSHYWARELRQLGHDARLMPPSYAKAYVRRNKNDAADAAAICEAVSRPSMRFVTIKTAEQQAAGGLHKVRDLLMKQRTMLMNSLRGLMAEFGIAVASGTQHIGKLVAILGDDEDRRIPAPLRAALACLVGSLGELERQIALVDKQILAWGQGNKTCRHLKSIPGYGPILSSAMAAFVVNPGAFRSGRDFSASLGLVPRQEGTGGKVKLGPISKRGNGYLRRLLVNGAMSVLNSKRAKQDPWLAKLLETKERKVAAVALANKMARIAWAVMLRQEDFRPMPAAA

SEQ ID NO: 503006 - protein, 410 aa, unidentified
MEVLHPICAGLDVHKETVVACVRHMSGGEVKSEVRTFSTTTGALLELSAWLGAGQVTHIAMEATGVYWKPVWHILADGDFELLLANAAHVKNVPGRKTDVNDAMWLADLLAHGLIRASFVPDQPTQQMRDLLRTRKQLVRERISHTQRIQKALEDANIKLDTVVTNILGLTGRRILQRLIDGETLPQALATLAHRNIQASRDQLEAALRGRVTSHHRFLLKLHLDQIDALDAAIASIDKEVESNLEPFRAAIELLSAIPGISQLSARVILSEIGLDMSRFETAGHLVSWAGLCPRNDESAGKRRSTRMRKGAPWLKTILVQCGWAAMRTKGSYFQAQYYRLRSRRGARKAICAVAASLLTTAYHMLKNGACYQDLGANHFDQRAKTKHVQRLVNRLESLGYDVKILPKAA

SEQ ID NO: 503007 - protein, 430 aa, unidentified
MMEEVDDAELVVERIAALDLGKAGLEACVRVPSPHRPGRRMQELRGYGTTTAQLLEMVAWLRHWGVQRAVMESTSTYWKGVYYLLEAEGFECWLVNAREVKNVPGRAKTDRADAIWLAKVAERGMCRPSLVHPAEIRRLRDLTRYRRALVQDRTREQQRIEKLLEDAQIKISSVLSELHGVTARAMMDALIAGQRDPRALAQLAKGRARKKTAQLEEALRGFFTDHHAAILRMMLDNTDRISAQIAALDARIEKEIGPFSGQAARLAEIPGVDAVAAAELIAEIGVDMTRFPSDAHLVSWAKFCPQTHESAGKSKSKGRGRGNPWLAGTLGRIAFANSRADTFLGARYRRLARRRGKQKAIVATGNSVLTVVYYLLSDPMATFCDLGPGYYESRINVHRRARDLVTQLQALTGQHIVIRDGKAVITDAAA

SEQ ID NO: 503008 - protein, 392 aa, unidentified
MEVQDETGRRLAKARLPEGISGIARLHGLVGRFLPEDSDPAEVMIGIETDRGPWVAALVASGYQVYAVNPLQAARARQGNGVSGAKSDAGDAHVLADLVRTHAHQLRTVAGDSKQAGAVKVLTRMHQSLIWDRTRQVLRLRSSLREFFPAALQAYEDLDSPDVLELLTKGPEPASAARLTRAQISAALKRAHRRDREVKTTAIMAALRTEHLAQPPVIAAAYGVTVRALAALIATCNEQITALEGPVEACFGRHPDAEIYLSQPGLGPVLGARVLAEFGDDPTRYDGARARKNYAGTSPITRASGKKKVVLARYVRNKRLTNALHQQAFSALSGSPGARAYYDALRDRDVGYNAALRQLGNRLVGILHGCLKTRTRYDEATAWNQHTQPAAA

SEQ ID NO: 503009 - protein, 347 aa, unidentified
MLHVGFDLSRTRLDVHAMDQIGTSVAVTTAAPDAGGLASLAYRLGEFGQPITAVIESMNGARFIHDQLELRGWTVEIPDAVKVKGFAPLACKTDKIDAWVLAELSRRDLVPALWLPSPGVRANRERARWRLHLVRHRTALKNRIHATLLAFGHPCPVSDLFGAAGRRLLEGLGLPEPWAGDVTAALRLIDILDGEIDDCEAALRREGADHRYVPTLMTAPGIGWVLGYTIAAEIGDIDRFPTPKKLVGYTGLCPSVDQSGGHDWRGSLAKNGPKYLRWALIEAATHAARHPVYRDRYQRTRIRLGRQRGPSIARVDIARKLTEAIWHMLTANKPFAPAGATNTALAA

SEQ ID NO: 503010 - protein, 381 aa, unidentified
MDLNCRSDPIPDEGEGMRIDIGVDLHKTQFTVYARREMKPGESGQYPTSDEGYREFLGKLGQWRGGGHDIRIGVESTGNTRYFKHRLEAKGYPVVVINTLKFKVINESVKKTDKHDAATIAEFLSKDMLPESKLCSEASEQLRRLLKVRSTLVRARVTVKNQIHGLLVSLGMEDTRASLQSKRGRQRILDTLAGAVNGLVVQPLFETIDRLSGNVKAIEREIEKLVSDDKVVELLQTIPGCGPITAWTIRAYTDDIGRFSSHKKYASYAGLAPWVQCSNETEHYGRITKRGPEELRTAFVQLVVGIRRSRQTASWRLMERYEAMKTVKGSGKSIIATARKMSKIVWFMLTREEEFNVELMTDNALEKEIDSMRTALNMMSA

SEQ ID NO: 503011 - protein, 383 aa, unidentified
MKKATRFVGLDVHAETIAVAVAEPGRGGEVRSLGAIPNRPEAVRKLVHKLGGAKSIQACYEAGPTGYTLYWQLTAMGVECDVVAPTLVPAKAGDRVKTDRRDAIKLARCFRAGELTKVWVPDPAHEALRDLVRAREAAKKDQLRARHRMSKFLLRAGRRPSDDVKAWSTAYVDWLRRITFEHTARQATMVDYLGELDHVAERIRRLEQAIDDAVKTAPEVLRAVIDGLQALRGVAKLTATTLAVEVGNFSRFDRPTQLMGYAGITPSEYSTGKSQRKGAITKTGNGHLRRVLVEAAWSYRHRPGKGQALRVRQRELPAHLNEIGWKAQHRLHRRYAALQAKGKPHTKVVTAIGRELLGFVWAIAVRVEHDHANRQPRSERRAA

SEQ ID NO: 503012 - protein, 386 aa, unidentified
MSRPSNIPLRAINYDHTLVLAIELSNKSWVLAAQVPGFPQTKAQRTIEPNKNALLAAIDGYRARAAAVGYAVERVIATYEAGWSGFWLARWLTAQGVEVHVVQPSSVPVDRRLRRAKSDGIDAELLLRTLLAWLRGEPRVCSMAPIPDEADEDARRSVRERTELLSDRVGLTNRIGAVLATLGVNDYNPLLQSRRRRLAELRTGLGEPIPPNALAKIERLLARLELVLAQIAELERERDEVAAADAPDRAGKMIQQLTSLRGIGVQSATVLVREAFVRHFSNGKALGSYAGLTSTPYSSGGIDREQGIGKAGNRRLRTVMVELAWLWQRYQPGTAQAAWFRDRVGSTGRRIRKVMVVALARKLLIALWRFVTDGVMPEGAVMKPSI

SEQ ID NO: 503013 - protein, 354 aa, unidentified
MIIIGADYHPGFQQIAFVDTDTGEFQERRLQHPEEAEKFYRDLGAQGARVRVGMEASGHARWFERLLSELRFELWIGDAAEIRTKRVRKQKTDRQDAQLLLRLMLEDRFRIWVPSWENRDLRQLLWHRHRMVQARTRIMNQLQAVALNEGLRYKKRLWREAGRKQLESFPLAPWASRRRHDLLELLDRLNPTIAELSQAIEQAVEKCPEAQRLMTHPGVGPLTALAFVLIIGRPERFRCGKQIACYLGVVPLEESSGDRRRLGHITKQGNSMLRFLLVEAAQVTVRSDPEWRSKFFHLAMRRGRKIAKVAMARRLAVRLYWMWRKGWNYEQWIKFGSHAGQPEHRHGVQLTPSN

SEQ ID NO: 503014 - protein, 410 aa, unidentified
MRYYVGVDWADQTHAVWVVNESGTKTAARTVPHTAEGLSEWGRELDEWRAQGIELWAAIERREGRVVDFLLDHGVVVFPVNPKALDRARDRFRQSGAKSDPFDARVLADFLRTDHAHLQVLQPSSAAAQELKLLTEDYQQQIRQQTRLVNQLTATLKAYYPRALEIAALPTPLAREFLQAYPTPEAVAALTERQWQRWARAHRLSETRTQALWDVLQQPQLPVPGHVLRAKARLMRSLVAQLTLVAAAVEEYREAIEDFFARMPAAQWARTLPIGKHGITAPTLWARLGDAPGRWESFRHLQAHAGAVPVTKRSGKQQGVIQFRFACDKALRYVIDHVAFLSLHSSVWARAYYDQQRARGHAHRQALRALAAKWLKIIFVMWQHQVPYDEQYHLATMTRQQPRHGQKHIA

SEQ ID NO: 503015 - protein, 438 aa, unidentified
MDAYQKGSSKLQEMFISVGIDVGADFSYMSIALPNQTFVGKPYKLVHNNLKSLEQAVLTIKNAEELHSMKARIIMESTGIYHYPLFCYLRDKGCEAVINPIISKNSTNLNIRKVENDKFASRNLALIGLKPDLKTSVMPPDAVLDLRNLVREYYNLMDCRSAYVNKLMGVLRVAFPQYIGVFSKVTVQTSLALLDRYPSPIDFLSADKSDIVGVIRKTARFGEAYAETKYHTIVGAARDAGVFGHFLPSNSVLIRQCVSFIKKYDAEVAEVLALMHKLVDEHRGATFVRHIRLIETIPGAGFLSAVTVLCEIGAFSAFKSPKQLFAFFGLDPAVKQSGNFKGTNVKMSKRGSRFARRAIFTIALNSIGVTRNGTPNNPVLRDYYLRKCQSKIKMVALGAVMHKVCNIIFAVLRDNASFSLTTPEQHVLNFAAHYSLSA

SEQ ID NO: 503016 - protein, 317 aa, unidentified
MSIQESKVYVGVDVASKHLDLFFPDTGKSERIKNDAEEVKALCVRIQGQSQYMFVMEASGGYESLLCAQLGSHGILHAVVNARRVREFARSMGADAKTDQIDAKVISQFASVLKPIASEAQSDEERSHAALVTRRTQLVDLITQERNRLKQTWDAYAKKSVQKTLKHLENELESIDKLLVKMLQQDKKNQRKIEILQSAKGIGEVSTSVLLAHLPELGKLNREQIAKLVGVAPMNRDSGNTMGKRFIMGGRGNVRAILYMATLVAIRHNEKIKAYYAHLKSHKKESKVAIVACMRKFITILNHLIKTDQTWEEKRAC

SEQ ID NO: 503017 - protein, 371 aa, unidentified
MTDEKLFIGMDLHQRTSTFAVKDRDGRKISEATVETDRDAITMFIRSLPSPCLSIALEPVSQWYVYADHLQGLGCEVHLAHPLRVKAIASARVKTDTIDAGVLCDLLRSNLLPEAYFSSKEVRSWKEVVRYRAQVIHQRAQVKNQLHAILHKNGVRHEFSDLFGKKGIVWLNRLEIPEPFRTNLTEHLRTLDWLNERIVDADRRVEALVHSHPQAELLTTIPGISFVSALTIIAEIGDITRFKSPKKLMGYAGLVPSTSSSGGRTTHGRITKQGSKWLRWIMVEVAQKQQLCRRTIGLSPYFNRIKARKGTNPATVATARKLLAVIWRMLTDNRPFSMTPPDRHGRRPEVIPPSSARPLAEVLSSPVSSTS

SEQ ID NO: 503018 - protein, 430 aa, unidentified
MDEVNRNRLEEFRQLRKEVRHSEEYLIVGIDIAKDRHYAFFGTATGKTLLKRIVFSNDHEGFRKLLDQAEVLRVQHGLKKVVYGMEPTANYHKPLGEYLINLGRMVVLVSGVTVARNRESLDGRWDKHDGKDSANVADLISQGKCLYYEHPSAELRGLRGLLSLKRRLKKQEHGYRVRIRNHLLAQYFPEMDRDYERLGAEGLSIVRWCLAASQVAQLDVEPFIERVTSRRIRMEKRRRLEEVWEKAGESIGCEEVPGVDHEAKVMVEGLKQIREMIKETEGKIKELCEQFPEYHSILTIPGFGPDVSAKVLGAIGEPDRFQNGKQVLKMGGLDLSADRSGKDSDKAIPEISKRGKADLRYALYQAALVASLQNREVMIYYTNKIRGREREKGIHVKMRVKLAAKLLVIAWTLMKKKEAFNPACLSAELN

SEQ ID NO: 503019 - protein, 345 aa, unidentified
MELHTIGIDLGKTVFHLVGLNPRGEVVVRKKYSRAQLLRFTANRQVHLIGMEACGGAHFLGRALREQGHEVRLIPAQYVKPFVKTNKSDFIDAEAIAEAVGRPTMRFVPIKSDDQLDLQSLHRVRERWVMRRTAVINQIRGLLLERGMTVRKGRRHLEAALPAVMEDAAGKLSATLRLLLAQLKLELDQLATRLEEAEALIQLTAQESEACRRLDAIPGIGPVTATALIAAIGNGAAFGKGREFAAWLGLVPREHSTGGRQKLLGISKRGNSYLRRLFVQGARAVLQQRSKQSSGLSAWLKQLTARAHHNVVCVALANKLARIAWAVLATGQAYRPPAITAVAAA

SEQ ID NO: 503020 - protein, 355 aa, unidentified
MDSVKYVGMDVHQATIVIAVLDGSGKLLMESIIETQAATILQFIQGLKGTLYVTFEEGIYSAWLYDLLSPNVAQVVVCDPRENALLKVGNQNDRIDARKLADLLRAGLLTAVWHGGHSLRGLKELARSYVVLTRDATRVMSRLKALYRGRGIRYVGRQVYLLRHRQGWLEQLREPGVCRCAERLYQQLDLLQSLRQEARRDLVKESRKYRATSLLRTIPCLGPIRVALLVALVQTAHRFRIKRQFWAYIGLALETRISGEYRLVAGQLQRADKALAKRGVSPNHNHELKNIFKASATGGSVRPGPFRAFYESKLTQGMRPEMARLTLARKIAAITLTLWKKGVRFDPEELQPQAA

SEQ ID NO: 503021 - protein, 344 aa, unidentified
MARFIGVDLHKNRFTACYMQTSGEYQLAIFNLEINGWAKFKRTLTREDEVAVESTGNAGYFAREIKDLVKEIRIINPTQFKIIAHSVKKTDEHDAVTIARYLAKGLIPEVRMRSQEESQMTSLIGTRDKLVKLRSALKNKIHNILNANGIVTGRERFGSEIGLDKILALNLDAAYRFELRIIIEQIRSLNKSIEQLSQEISQRGEQLKGHKNLTSITGIGALSATILLNTIGDINDFSDDKKLAAYFGIVPRVSVSNETRQYGRITKMGNKLGRTALVQSTLIAIKYNGYLRDFYYRLKSKKGSGKAIIATSRKLLTIVYRTLKNNWTFEDFNKFKLVTPLQAG

SEQ ID NO: 503022 - protein, 436 aa, unidentified
MRGCRCSMIMGFTKPIEHFNLQRKKVITMNTLYVGIDVSSKSNVVYLMLPNGDKHSNFSVANSHEGSTLLVKKIYSALTSHSLDTVLIGLEATSVYGDNLVYFLREDATLAPFNRKIHVLNPKQVKKFHDTYNDLPKNDYVDSFVIADCLRFGRINKEVYMGDYRYKALQNLTRARFFAVQNLVKEKQRFMNVLFKKYSTMTQEKVFSDAFSTTALAVYDEFESAEALANMDLHELTDFIIEKGKNRFPDPDAVAKAIQKAARSSYRLPKTVNDSVNQVLSISITSMKALESQIKEFDKAIIALMELLPNVLISIPGIGTVYSAGIMAEIGDINRFDNQASLAKYAGLAWKQHQSGGSEAEVTRLIPSGNRFLKYYLCEAAFSLVRCDKEYSDFYHLKYKEVNRCQHKRALALTARKFVRLVFRLLKDNRLYCPAK

SEQ ID NO: 503023 - protein, 360 aa, unidentified
MAKIKSVLTPSVVGGVDTHKDLHVAAVVDENNRVLGSKFFATTRQGYRQMLTWMTSFGTVARIGVECTGSYGAGLLRYLQNAGITVLEVTAPDKMERRRRGKSDTIDAESAAHAAFSFIRTVTPKTRSGMIEALRVLKVCRKTAVAARRIALQMIQMNIVSAPDELRDQIRSLTRMQLIRTLAAWRPDVTAYRNVQDAYRIALKSLARRYLELHDEIADLDIMIASIVDELAPDLIKRNAIGYESASQLLITAGDNPQRLQSESGFAALCGVSPVPVSSGKTNRHRLNRGGDRAANSALHIIAIGRLRTDTKTQEYVAKRVSEGHSKMEALRCMKRYIAREVFTLLRNQNRQINSTQITT

SEQ ID NO: 503024 - protein, 412 aa, unidentified
MQAIIERCCGLDVHKETVVACLLVGAPGEQPRKEVRTFRTMTRDLEALRDWLLEAGVTHVGMESTGVYWRPVYAILEGYFELIVGNARHIRNVPGRKTDVKDAEWIADLVRHGLIAKSFVPPKPLRELRELLRYRRKLTESQAAERNRLQKILETVNIKLASVASDVFGVSGRAMLRALIAGEASPEAMADLARGQLRRKRDDLVLALDGRLEEHHRFLLAMQLRRLEAIEADIATLDQRVGERLEPYSAAHTLLMQIPGVDWVVAAVLIAEIGVDMSVFVSVYHLSAWAGVCPGNHESAGRQKSGRARKGNIHLRTILVSAAISASRTRGTYLKDKFHRLKARRGGLRAALAIAHKILVSAYHMLAKNLPYHDLGEAYLDQISQTRTVANLKRRLERLGYKVTLEPSAQPT

SEQ ID NO: 503025 - protein, 302 aa, unidentified
MWGPLSGALRMIRSTWSFELEAAMAVFLGLDVHRAQITFDALDVDTGEVHTGRVRPANRDTFARFLSRFDGAELVAAMEAMTGWRFVVEELQRVGAEVHLAEPAETSAKRGPKRRAKTDRLDARLMRELLVERRLPEAWIAPAHILDLRARVRLRKALVDQRTEWLQRIRAVLFHHGVPTQAGRLGRLEGDNAREQLSRFALPPVAHQQIQVALAIIEHLNAQLHPLDLQLERDARRLHGCRALMAHYGIGAKVATAILAELGDPRRFSSSRQAVRCAGLDVTVHESDQLRAAVCAGPTADA

SEQ ID NO: 503026 - protein, 343 aa, unidentified
MDYYAGIDVSLESSSLCVVDATGRVVREAKIASEPEALTAWLKSLGLNIVRIGLEAGPLSQWLYAGMEQGGLPAELLETRHVRTAFKIMPVKTDRKDARGIAQLMRLGWFRPVYCKSLAAQETRAVLGARKLLQIKLHDIEMSLRGTLRGFGLKVGKTTAKAFESRVRSLVAEHPTLLAVCDALLRARTMLAEQFMRLDNQAHRAARADKRARLLTTAPGVGSIVALTYAAAIDDPSRFKSSRSVGPLFGLTPRRYQSGETDVTGRISKAGDAMVRTALYEAANAILTRMAGDSPLRSWALAVARRTGMRKAKVALARKLAVILHRMLVDSTPFDATKAAAAA

SEQ ID NO: 503027 - protein, 311 aa, unidentified
MKIVCGVDISKAGLDVYVWPGGAFQRFDRTVSGVDALAGFCRQHGVDLVVMEATGGLERLVVGVLNTAGFGSSVVNPGRVRDYARAMGITEKTDRIDAAVIARFALAANLRATPAQMENQRRLNALVVRLRQLTADLIVQKQRLSAVEDAESIGSLRAVIAFLKQHSRMIEGEIASLIDDDPVWAKLAETFGAIKGIAGRTIARLMAELPEIGLYSNKAIAKLAGLAPIANDSGARHGKRSIRGGRCNVRSILFLVAGIVAKYDERLKDFHQRLSKAGKPKMVIRIALAHKLLVWLNAKAREARAEMTTAT

SEQ ID NO: 503028 - protein, 349 aa, unidentified
MEHYAGLDVSLKAVSICVSDGEGRVLWRGEVANEAAVVASVLSRRAPGLVRAVLESGSCGVHLYRGLEAEAVPIVCICARHAKSALTCWINKTDANDAEGLAQLARTGWYKAVYVKSAEAHVIRAHLLARRQLAKARRDFENQIRALLRVFGLKVGQVARGRFEERVWSLVDRAPALRLPIDQLLQARRSLMIGQDKLEAEAKRLAKADRRCRTLQTMPGVGPLTALAFVAAIDCSGDGPARFAKSSSVGAYLGLTPRGHQSGEVAWTGRISKAGDTLARALLYEAANVLMVRVKAWPALKVWAHKLAERVGGKKARVALARKMAVVLHRMLADGTAYNANHQDNAIAA

SEQ ID NO: 503029 - protein, 429 aa, unidentified
MNYKPIADIDEGKFFSEMAILSPSNEVVARMRINDDSNDDVKRAAKLLKKVEKDFDSRPHVVMESTGHYHKILFHSLIAFGFEVSIINSIQTDSIKNIGIRKVKNDKIDARKIALLYRFQNLEASRIPNQDIECLKSLCRQYYKLSDELTMYKNRFTGIIDQLMLNFKDIFSDVCSKTAIAVLEGYPTPSAMIKANRNRLIDIIKSSSRKGPDWAAKKCELLVLKAKEFKPLSLDNPANITMLSVYISVVKSIGKNLDRVLEAIQELIDSDLVKGTPTLSLTLELLQSIPGIGLLTAATIIAEIGDFAAFTKPKKLVAYFGIDPSVRQSGEFTATQNKMSKRGSKFLRRLLYTAALANIRTKRNGEATNPVLMDYYKKKSQSKAKKVALGAVMHKLVYIIFAVLRDDKPFALRSPEEHAIMLAAKFTEA

SEQ ID NO: 503030 - protein, 367 aa, unidentified
MEPIYIGVDFHSRQQTICYLKTETGELVITELKHQDKAQVRAFYQQFQVHVIVGLEASGYSPWFEAMLEELGCEVWLGDATEIRRRARWRYKDDRRDAELIWDLMVHQEFPRLHQPAPQSREILRMLRYRQKLIKVRTMTKNSLQAIAMQAGLAKGKQLFTATGQAEFKAVAMSPVLQYQRDHWFELLKPLNLELLETMKWFKAAAKSDAAIARLRTHPGIGLLTALCLQHTLQPVSRFRNQRKVVAYAGFDPMVRRSAESAIRLGISKAGSRMLRYLTVEAVQTAVRYDEDLKRFYKRVAERRGRPKAKVAAARKLLIRAYIMMRDEIDYAEFRRRAVAARLARCSQGPPSSVPEVLIGQSASPGA

SEQ ID NO: 503031 - protein, 413 aa, unidentified
MELLYERCCGLDIHKNTVVACVMITPPKGRMQKSLRTFGTTTTDILALRDWVDAQQVTHLAMESTGIFWRPFYNLLEEGHTIILVNPHDIKTVPGRKTDVKDCEWIADLLRHGLLRPSFIPAKPFRDMRDLMRYRKSLVYMRTEEINRLQKVLETTNIKLASVATNVLGKSGREMIEALIDGKDDPESLASLAQGRLRTKLPQLQKALEGRVEPHHRLLLRQILAHIDFLEQQMQELLNEVEARMVPYKEFFDLLRTIPGIQLLTALTILSEVGTDLSSFPSSKHFASWIGVCPGNKESAGKRLSGKTTHGNVYLRASFAEVSWCLSRMKDNYLSSQHHRFARRMVKPKAAVASSHSVAVIVYHVLKKKKPYQDLGPTYLDTLDGERTKKQAMRRLEALGYEVNLSQKEVSVQ

SEQ ID NO: 503032 - protein, 315 aa, unidentified
MTNLKKSKSNVNVGVDVGKWTLDVCLYEKDLYWQVENTPEGVRKLLGRLGRYQVDRLVMEATGRYQHLLTEKAFERDLPVCVVKPLSVRRYAQAIGKTAKTDRIDAQVIAEFAAIIQPPVTLKKSKNLLLIRDLLARRRQLVGMRTRELNRIKVMGKALETSCRRIIRVLDQEIARMEKRLDALIDKEAAWSEKKSLLKTAPGIGDTMVYTLLADLPELGSMTNKQAAALVGVAPMNRDSGKMRGKRRIKGGRYMVRTTLYMATLSATLCNPVIKEFYQRLVAQGKHKKVALTACMRKFIVILNAMVRDNCEWQY

SEQ ID NO: 503033 - protein, 418 aa, unidentified
MEVLRERCAALDISKRDVKACVRVPNPNRKGARSQEVRTFASMTNALLQLKEWLVSEQVSVVTMEATGDYWKPVYYLLEDAGFELMLVNARDAKGLPGRKTDVSDSAWLCQLTECGLLRASLVPPEPIRRLRDLTRYRTTTVRERNREAQRLEKVLEDACVKLSVVATDILGVSGRAMMQALIDGERDPEILADLAKQKLRLKHDALVEALTGRFNEHHAFLCAIILRRIDELSAVIEEVTSRIDTELAPFADAIEHLVTVPGIDRKGAAVIIAETGGDMGRFRTAAHLASWAGVCPGSHESGGVRKSGTRRNGNKALGAALGNAAMGAARTKNSYLRERYYRLAARRGKQRAIVAIEHSLLTAIWHMLVNDVDYHELGPDHFTRREPAHVMRRITKQANALGFTVRFEPVPETAGAA

SEQ ID NO: 503034 - protein, 351 aa, unidentified
MNIMGCDLHTRYQVVAWIEKETGEIRTRRLEHENGEAREFYASWPRGAVVGVEATFPALWFERLLSECGHELWVGDAARIRASEVRQQKTDTRDAEHLLDLLRTDRFPRVWVPSLEERDLRQLLVHRLKLVRARTTVKNQLHALAISQGVCRKGALWSRRGRAELESLALLPWATRRRKELLGWLEQLDASVAELDQAVEEAAAGRAEVERLRTHPGVGPVVALAMVLTLGPVERFRNSRKVVSYLGLNPRERSSGGRQRLGAISKQGNTMMRWLLVQAAQTAARYDPELRRAYQRLKFRRVSGVAKVAVARRLAVRLYWMLRARLDYAQLVRMSGSPSSAVAPTVSGSKV

SEQ ID NO: 503035 - protein, 344 aa, unidentified
MKVTTLGIDLAKNVFQLHGVNEYGKTVIKKQIRRDQMAEFFANLPACLIGMEACGSAHHWARKLEGFGHTVKLMAPQFVKPYVKTNKNDAADAEAICEAVARPNMRFVSIKNIEQQAVLALHRVRQGFVKARTAQANQIRGLLSEFGLIVPQGIGYIASRVPELIEDAGNELPGSFRMLIERLLDHLRALDHQVVELEAQIVSWHRQSAVSSKLAQVPGIGPITASALVASLGDAKNFDGGRQVAAWLGLVPKQHASGGKQKLLGISKRGNTYLRTLLIHGARSVIYRAQNKPESCRWINGVVSRRNKNVAAVVLANKNARIVWALLANEREFRPDYTTAKAAT

SEQ ID NO: 503036 - protein, 356 aa, unidentified
MTKVKTNFNDQTIYVGLDVHKRSWNAALYLNDHYLRNVHQPPSPQALHTFLQTNYPGADYVCAYEGGKFGYWIQRQLSSKGISCIVVNPADIPSTHKDEVSKTDVRDARGIAMSLQCGQLRGIHIPPEQQESDRSLVRHRKKIWRDLVRCKNRIKGFLDYTGVELPDKFSNSNWSKNFLTWLSAIKFVYSSNRTTLDYMIREAELLRKELLNISNDIRKLMRSAAYKKLYYLLRTITGIGPLTAALLITEIGDMKRFPSFYQLNSFIGLLPSEHSSGEKELKGRLTIRRHRQLRSDLVECAWTAKRTDPALSLFYSEQLKRGKEPKLIIVKIARKLLSRIRYVWMTEKPYEKGVVK

SEQ ID NO: 503037 - protein, 402 aa, unidentified
MKKVCGLDVHKDNIFCAIYNGESHSQVKEYATLTPSIYSMGEYLQSEEVEEVALESTGIYWIAVWDMLYEMGFKLTLVNPYLIKQMPGRKSDIKDAQWIATLLHKGMMRGSFVPGPLIQELRVYSRKYGKLRQQVTRVLTCMDAILVKAGIRASSCLSSISTKSFMCIVEALIAGWTDPGYLASLVYGNKKNKQSGKLKEALTGNIKTHQRQELSWAKQEYDMCQGQIAECLLQMERICEGHFPVMVKLLKTIPGISRIAAMTIIAETGGDMSIFESSDKIVGWAGLRPRNDESAGKYKSTATTKGNKYLRSILVQVSWAASRMKGSFFKEKFQRLAMRKPRKKALIAIARKLLIVIWNVLKYTKEYNPKLVPVQDPVKIKARLAYHKKEYEKTANLLNITV

SEQ ID NO: 503038 - protein, 449 aa, unidentified
MNPHSFVGVDPASGDFECAFIRNGEQDVIHKTFTIKVTELDQMVQWIRNEHVDVVAIEGSGGYTRPLEHALRQAEISFYSIDPYRITRYRQAVLGQHKNNQKDAIAVAHFARQQAIEGDLEAYRRTWFPDETLRPLVRLYEQKQREATREINRLWQRIQNISGDMFLALRTLTEGSRNSRCLSQQWLLKILAWYPDLTTWQTFTRDGISEVIDENRTRIIDKIMELKDVAANVSPYSVVTQVELQVAASTALALKQAVRLLYHQIEAEVAQNNATLRLMKYGGIGAITAAQIFSEIADISRFPNDDHLASYAGLGRREHKTGVGTTERKTFMFNHRLKNTFFTAARNYTLYNPDSHLTGYYRSLKARGMKQTETYKRVARALVRRFYRDLKAVAAQETEMRHEGNPKPEPAENSSLKQPHASLSKLNYTSVRAVKSNRIPAAKQSLKRR

SEQ ID NO: 503039 - protein, 336 aa, unidentified
MSHYCGIDLHSNNHVVVVIDDKDKRVFDKRLSNDLPTTVEALSPYRETLEGVAVESTFNWYWLVDGLQDHGFNLQLVNTAAVKQYDGLKCIEDHQDAFHLAHLMRLGILPTGYIYPKEQRAIRDLLRRRMSLVRSASTQLISVQSQIWRSTGIRIKSGDLRKPEFSPPPLDQYTLQAVAAGLAVYQTIQQQINVLEQSAYQAVKLTDAFKILQTVTGIGKILGLTIMLEIGDILRFAGAGNYASYCRTVDATRTSNGKKKGKGNAKAGNKYLSWAYSEAAHFAVRYEPLAQRFYERKKAKTNGIIAIRAVARKLARATWMMLRHQVPYDAKLMFPG

SEQ ID NO: 503040 - protein, 378 aa, unidentified
MSDHSEAFVGFDTSKLRNAVAIAEGGRDGEVRFVGEIENSAAATAKLVRKLAAKYDRLTFCYEAGPTGYGLHRQIENLGHACVVAAPSLIPKKPGDRVKTNRRDAVSLAKLLRAGELTAVWVPDRHHEAMRDLTRARETAKQDLQRKRQQISAFLLRQGLHYPESKSTWTKRHMNWLASQKFELAEHRIVFEEMMEAMRQAQGRVARLEAAIGAAVPDWSLAEVVTALMAMRGLDLVSAATLLAEIGDLSRFQSPCELMAYLGLVPSENSTGDKVKRGPITKAGNRRARRMLVECSWSYQHPPRLSKKKQMKVDAVPPAVREIAWKAQCRLNRRYRALVKRGKLKTVAITAVAREFAGFIWAVARAAMTPTTAGTGAR

SEQ ID NO: 503041 - protein, 355 aa, unidentified
MSQEKYIGMDVHQATISVAVMDAGGKLIMEGLLETKAATIVEFVRGLHGPLSLTFEEGTSAAWLHDLLKPHVDRLVVCDPRKAALLKEGNKSDRIDARKLAELLRTNQLKPVYHGEHGVRTLKELGRSYLTLTKDVTRGMNRIKALYRSWAIPCSGTTVYAPRHRAEWLAKIVEPGVRLRAERLYQQLDLLQPVRQQARHDLLVESHQHPAVKLLRQIPAIGPIRAALLVALLQTPHRFRTKRQLWAYSGFAVETHDSGEYRYVRGKMQRNRERITVRGLRDNYNKGLKNLFKGAAISASTRPGPLHDFYVALIAKGMRPTMARLTLARKMITITLTIWKKGVSFDPQQLHRQAA

SEQ ID NO: 503042 - protein, 463 aa, unidentified
MAGSQKETRTAGVEAAVQGLPVLRPNVAGIDLASEIHWVCAPNMDGTGREVEKFGATTPELKRMAEWLKQRQVESVAMESTGVYWIAPYEVLERYQFEILLVDTRELARVPGRKKSDHVDCQWIQRLHSCGLLTGSFRPAEQVCRIRTLVRDRGNLVAAAADWLRRMQKSLDQMNVRVHRAVKDIEGATGMAIIRAIVKGERDARKLAELRDPHCQKSVEQIAEQLSGHWREDHLFSLREALKMYDAVQSGIADYDQEILRQLAEMEREECRGQQAPKLKNVNKAQKIKSRGEETMRQALYRMSGVDATAIDAIGVGTVQVILSEYGPDLSRFATEKQFVQHATLAPHKPTSGGKVVRKKKRGSASTRVAAALRMAATSLEHSPTALGAYYRHTARRKGGSVAVFATARKLATLVYRLLRWGQPYIDEGAAAYEKRYQESRIKRLTATAKELGYQLMPKASQA

SEQ ID NO: 503043 - protein, 376 aa, unidentified
MTKIIRIGVDTSKSVFVLHGVDAAERVVLRKRLRRRQVVELFAQLGPTKVGLEACGAAHYWARELQGLGHEVVLLPPQYVKPYVKRNKNDAADAEAICEAMSRPTMRFVPVKTAEQQAALMLVGTRDALVRRRTQLTNAIRGYAAEFGLIAAKGLDKIEPLLARIAAHAPLPGLARELFAAHAKEYARLQAQIREIEAKLRAWHKHNELSRRLAEVPGIGPIGATLAVMKVPNPKAFRCGRDFSAWIGLTPKDHSTAGKTRLGVITRAGDEALRSALVAGATAVIQHVKQGKGHPSPWLIELVRRKPAKLAAVALANKNARIAWKLMVSTERYNPAHGRAVAASGGRGPALRGGSAPRPPLAPHDKSREITATTRA

SEQ ID NO: 503044 - protein, 372 aa, unidentified
MGHHTEAFVGIDTSKSRNAIAIADGGRGGEVRYLGEFPATEAAIRKLVAKLAAKYRDLTFCYEAGPTGYGLYRLLKSLGHECLVVAPSLVPKKAGDRVKTNRRDAVSLAKLLRAGELTAVWVPDERHEAMRDLSRARQAVKKDLQGKRQQISSLMLRLGRIYPGKTTWGPAHMNWLMAQKLEHREQRIAFEELLEGIRQESERVERLEKAIREAVPEWSLAEVVAALQAMRGIDLIAAVGVLTEIGDLSRFQNPRELMGYLGLVPSESSTGDKVKRGGITKAGNGRARRILVEAAWSYRYPPRVSREKQPKVEAAPRRVREIAWKAQTRLCGRFRSLERKGKRRTVVATAIARELSAFIWAINRELMAHRQA

SEQ ID NO: 503045 - protein, 388 aa, unidentified
MMADPSATPIEATTRPDAGRLFAALELGKSRWLVTVDAPGSDKLSRHAVAGGDGAALLDLLARLRTTAERRTGRPAEVLVIREAGLDGFWLHRLLERNGISSRVVDPASIAVDRRHRRAETDTIDGEMLLRSLMAWARGERRVCSMVRPPSPEEEDRRRLTRERATLLKERIQHTNRIKGLLYGQGIIDYDPLRKDRLARLDALETGDGRPLPERLEAEIRRELERVELVASQIAAVERERDALIEAPSEAAGPGTPAAALARLKGIGGELGALLWLEALFRRFDNRRQIAAYAGLAPSPWQSGGTEREQGISKSGNRRLRHAMVELAWFWLRHQPDSALSAWFRERVGPGRGRVRRIAIVALARKLLVALWRYTTQGVVPQGAAFKA

SEQ ID NO: 503046 - protein, 363 aa, unidentified
MHYVTNTELSSHEGTRCQFNGGRCAIKLGIDVHQDFYVVVMQQDGGNPKPPQRFVREAFVHWAAKLKSEGGEVYAVYEACGFGFCLQRQLSALGIQCYVVCPQKLDDRNKRVKTDGLDAKALCLRLDRFVQGNRDALAIVRVPTEEEEQKRALHRQREQLVKARKQLEAQGRSLMVNHGLEPVQNWWRPRTFAALDVPQWMRELLCNSQSILVALQQKIAALTVQLQSAASSDPPRGLGKMTSVIIDREIGDWKRFNNRRQIASYTGLCPGEYSSGNTRLQSCVTKHGNPRLRTALVELAWRLVRFQPNYKPVRKWRQILAKGALATGAARKKAIVAVARQLAVDLWRLKTGRLRAEDLGLIK

SEQ ID NO: 503047 - protein, 355 aa, unidentified
MTMLAEVVDAVIGTGTHRDSHEVEIADLAGRPIATMRIGNDSKGFAQLLAAIAEVVPGPRVLVLVEGTRGYGIGLARALAAAGLRVIECEQPRRKQRRGKGKSGPIDAHLAVLAALRLEANRVAVPRADGDREALRILLVACQEITVACKAQASGLRALLLAGDDTDRRAARTTLSKTALAALAGRDLPAGASREQAVRHAETARLALAIGQARGQLNGSHAQLLAVVGDIAPGLTSRYGIGPVSAAQAIVSFSHPGRCRREAAFAALGGTSPLPASSGSTIRHRPNRGGDRALNRAIHAIALTRMRSCPRTRAYAARRTAEGKTTREIRRCLKRYIARELYRQLTRSMKPLTNP

SEQ ID NO: 503048 - protein, 413 aa, unidentified
MDVLHPRCCGLDVHKSSISACILLREAGRVQKHQRRFGAMSQELQELAEWLRQFGVSQVAMESSGVYWKPVWNILEGQFAVVLANAQHIKNVPGRKTDQKDAEWIAQLLQYGLLRASYIPCEIIRDLRDLTRMRTSLCQEASRISSRIQKVLEDANIKLASVATNVLGKSGRAMLEDIISGEDNPEHLASLALGHLRVKIPQLRLALEGKIRSHHRFLLGRLLDQIQFVEHEIALLDERLEDIGRQRPDLAQAVARWDTIPGIDRVAAWALLAEIGDNMAQFPTAEHLASWAALCPGNHESAGKRLRGTTRQGSPWLGRMACQCAWAAARTKNTYLSSQFRRLAARRGKKRAIIAVAHTIIVIGYHLQKNQSNYEDLGGNYFDRIHSDGLKRYLVKRLQQLGHKVTLEPMEAA

SEQ ID NO: 503049 - protein, 315 aa, unidentified
MMQSHDVAVGIDVSKAALAIAVHPSGEAWTSGTTPTAIDDVVHRLLTLEPTVVVVEATGGYEQALVAACATAHLPVAVVNPRQVRAFAQALGRTAKTDAIDAGVLALFGARVPPAPRTLPDAATQALAALVARRRQLLEMLGAEQQRLQQATTNPVKRDLRHHIRWLERRITDVDDEIGGAIQGSPIWRVQDDLLQSVPGIGPTVARTLLAELPELGHLDRRAIAALVGVAPFNRDSGQWRGRRMIWGGRASVRCALYMAALSATRHNPLLATFYQRLRAAGKPSKVALVAVMRKLLTIVNAMMKHQSRWHHQST

SEQ ID NO: 503050 - protein, 418 aa, unidentified
MNGEGNTRDSKRYVALDIHKHYCVVAAVDREGKVVLQPVRVEHEDLEGWLKKNLRVSDHVVIESTTNAWHVYDLLSPLAERVVVANSFKVKQIANARVKTDVRDTLILARLLAANLVPDVWVPPQHVRELRQLLSQRRQLVEAHTQMVNRMHSVAHRHHLKHERGKRFNEKNTGWQKDKRLSKMEQFQLELEMENRAYLEKQTERIGRAVAKLSHQKPWTESMTYLMQMPGFGVITAMTVLAAIGDIQRFETAQHLASYSGLTPGLEQSGTKRRGKGITKEGRKELRWALVEVAQRAVKSDPYWKKRFETMQKRMHRNQAIVAIARQILELVWNVLTRRQPYRHFSQERIAYKYLTWGWQMDEEARDGLTRQQFTRYYLMRLGIGHDLTRIALDPKHPRKIASEAEVLALRPELQRIE

SEQ ID NO: 503051 - protein, 371 aa, unidentified
MNSIVYVGMDVHKEQYTICCYSYETDKVEYKQTIPSDYKLVLKYMEQVRSRYDGEVTFVCGYEAGCLGYSLYHQLKDHAVDCKILAPSTMAVTNTHHVKTDKRDAANIARCLAFHTYSEVYVPDNDDNDVKEYIRMRDDQKLYLKKVKQQILAFVLRQGKRFEGGKTYWTIAYLKWLKTLELSDLQRETLNEYLMTYEYLTEKISRFDERIEELASVERYEEKVKHMSCLLGIKTHTALSMIVEVGDFERFEKAPKFASFLGLVPSEDSSDTRVNRYSITKAGNSHLRRLLVEAAQSYTRGNVGHKSVALKQRQKGNPPEVIAYADKANERLRRRFYKMTLNKGVNRNVASTAIARELACFIWGMMTEHVS

SEQ ID NO: 503052 - protein, 412 aa, unidentified
MFYLGIDIGKKWHEAALLTDTDEIVWRLRFRSNRAGLERLAERLGGVGTADLTVGLEATGVYWITLHRWLVGRGIAKLLVLNPLQTKAFRNANLRGSKTDRIDAVSIARLIRWAGQSLSAHVVPEERRAAARELSRVRSEMVRLRAEQLIKLDSVLERVFPEFREVFSSLGTKSAQAVLARWPTPRLLRQSSVEEITAELQQARGRRVGPEVAQELLRKAEETVGVDDPLDASAAAIQALVAHVAHLTEQIQALGERLDTLLKPDATLATLLQSIPGIGLETARTWLAEALPIEQFEGRDAAQKLVATIGIDAQPRESGQYTGKVKMSKRGNRHLRRAILLAARSACRNDPQFRAILHRQLARGKHYNVAVSHVARKMVHVIYSVLKNQRPYELPPEYRRGIIEPQLSASGT

SEQ ID NO: 503053 - protein, 435 aa, unidentified
MAKRRYRSAKINQIEIARLLEAIEGDRIVVSVDVAKEDMFAAVMDVQERVHAIVRWKHPSQSRQWMQFVKELSGRGHRVEVAMEPSGVYGDGLRWALHQAGVPVFRVNPKRSHDAAEVYDGVPSLHDAKSAAIVGKLHLDGISEPWPVRSDHERRLAGAVRLLEVHEKQFQQNRNRLEGLVSRHWPELSRILDLGSATLLELLSAFGGPEEVAQRPEEARLLMQKVGGRFLDDAKIEAVVASASSAFGMAQVDEELRLVKELAAEARRNQRASATQQRRVEELTKAEPVTDRMQPVVGKVTTAVLVAAAGDPGGYASAYAYTKALGLNLKEKSSGKQHGQLHITKRGPGVTRLFLYLAVLRWIQHDPVARAWYAKKVKRQGGLFKSKAVIALMRKLALGLWHVARGADFDSTLLFDTRRLGLDDAISRHRMEATM

SEQ ID NO: 503054 - protein, 354 aa, unidentified
MSNGSTPIVATMGIDIGKNSFHVIGLDRRGAIVLRQKWSRSQVEARLANMPPCLIGMEACVGAHHLSRKLQSHGHDARLMPAKYVRPYAKGQKNDFNDAEAIAEAVQRPTMKFVATKTAEQLDLQALHRVRERLVGQRTGVINQIRAFLLERGIAVRQGRRFLCTELPIILAERSDVVSPRMMRIIEELAGDWHWLDERIEGLSAEITAIARQDAACERLMTVPGIGPIISSAMVAAIGNGAAFSKGRDFGAWLGLVPKQISTGDRTILGKISKQGNRYLRVLFVQAAWVVLVKITDWDRYGLKAWIEAAKKRLHHNVLAIALANKLARIAWAVLNKERDFECVRTPATSPRPT

SEQ ID NO: 503055 - protein, 365 aa, unidentified
MNNSVYHTELSSQEETRCQFNGGTGAIKLGIDVHQDFYVVVMQEGGSNPKPPQRFGKEALLYWAARLKEKSGAQMYAVYEACGFGFSLQRRLSELGIRCYVVCPQKLDERNKRVKTDSLDAKALCLRLDRFVQGNRDALALVRVPTEEEERSRAIHRQREQLVKARKQLEAQGRSLMVNHGVDPVQQWWKERTFTKLPVPGWMKLLLGNTQPILIGLQQKIAELTLQLQSAAAADQPRGLGKMTSVVIDREIGHWQRFNNRRQIASYTGLCPGEYSSGNTRLQSCVTKHGNPRLRAALVELAWRLVRFQPNYKPVIKWRRILAKGALATGATRKKAIVAVARQLAIDLWRIRTGRCSAQQLGLTI

SEQ ID NO: 503056 - protein, 301 aa, unidentified
MYPFYLGIDLHLKRTFMVLMDAKGEVIDKERISNQEIKEYLEEKVPRETYAVLEATRNWPFMYDLLNEHVQQVDLVHAKGVRAIANAAVKTDQIDASTLAHLARMNYIPKAYAATQEIRDLRQLLRHREWMVNQRSKAKNRIHAVLAAYNLISPVTDLFGAAGREYMHEMMEKELRSSARQVIEDHLAMIDHLTERIQAIAKNISLNEKQNHIVNLLKSMPGVGKLIALILLAEIGDISRFRSSKALCSWAGLTPKVHSSDAVVQHGHITKEGSRYLRSSMVQAATTACRVSPKWYRVHEN

SEQ ID NO: 503057 - protein, 374 aa, unidentified
MKRQKKSSDITIGLDLGDRRHRFCVLDKSGGLLEEGSVRNERVFLAQLSERYPGALAVVEAGCHSPWISRYLQEQGCRVLIANPRKLRTIYQHERKSDRRDAQMLARIGRLDPALLYPVRHGTAEAQQDLLCIKLRDSLVRARVAVINSVRFTLKSLGYTVRNPSSERFHKVAMEGLPAALCQMIAPSVAALEELTGRIKALEAQINSLAQSKYPPALQLQQIPGVGPITALYFVLKIEDPTRFQNVRDVGAYAGLCPKRDQSGRSDPQLRISKCGDAYLRRLLVSAAQYILGPFGPQSALRAYGLMLAEDGTARAKKRATVAVARKLAVLLLSLWKHQRPYQPFPLAGSRLNLQQTKEDRRFGTIALHRLEAL

SEQ ID NO: 503058 - protein, 459 aa, unidentified
MPENVQKRKRKKKGMCLADRPMVEANAAGIDIGAREIYAAVPPDRDQEPVPMFASYTEDLHHLADWLEACGVRTVAMESTGVYWIPLYEILEARGLKPCLVNARHMKNVPGRRTDWHDCQWIQYLHSVGLLRGAFRPAEEVCAVRAILRHRQELVQMAAQHIQHMQKALSQMNMQIHHVINDPTGLTGLAIVDAIVGGERDASKLAQLRHYRIQADEETIRKSLLGNWRGEHLFALRQSRELYGYYQRQIEQCDAEIARLLADIEPKVDPQQRPLPPDQKKRRTRNGRNPGDGGFDMRTEVYKRLGVDVLQIPGLERTALSLLTEVGPDLSRFPTAAHFVSWLGLCPDNDMSGGRWWRGARKVNNRAGQLFRQAACALHRSQTQLGDFLRRRKAKLGPLGATMATARKIAVIFYTMVKNQIEYDHSIWAEQETQRQRQHENRLKRQAARLGYLLVPKNA

SEQ ID NO: 503059 - protein, 357 aa, unidentified
MPKKKTTKIARKYAQTIGIDLGDLWSHYCILDEAGEIAEEGRFRTTEAALRKHFGDVDRARIAMEAGTHSIWISEQLRQYGHEVLVAHVSELRAISRSDRKCDRVDAEKLARYARLDPGLLRPISHRSVAMQESLTLVRARDVLVRARTGLINAIRGLAKPCGYRLPKSATSCFSERCLPSVPIGLLPALKPLFEQVQSIHEQIKAFDKLILKMAKEQYPETKALSQVNGVGTLTALTYVLTVADKHRFLHSRDVGCYLGLRPKRSQSGEHDPQLGITKAGNSYLRTLLTECANYIVGPFGQDTALQRWGRHLASRGGKNARARAVTAVARKLAILLHRLWVTQAEYIPFPERQRAA

SEQ ID NO: 503060 - protein, 364 aa, unidentified
MTSVTSAGAVHWGMDTSKDTIVVAVLMPGEELPAIDRIAGREEAVRRLIGRFGDRERLRACYEAGPGGYDLHRLLASMGVACDVVAPSLIPKGGSDRAGTDKRDAVRLARLHRAGELTPVRVPSPAEEAVRDLARVRAAVLADRKRAQQRLTAMLMRHGRIWREGSYWTGPHRAWIAAQSFTEPALATALGCYRATLDTRETELACIEAELAPWAGRDPLAATVARLRCYRGIAELTALMLAAEVVDWRRFPCARAFMGYTGLVPCEYSSGQRTWRGHITKAGPAPGSGGTLAAWAYRCKPAIGATLRRRQHGAAPETIARSWKAQRRLHGKYRTMTARGKAAPEAVTAIARELAGFVWAEMTS

SEQ ID NO: 503061 - protein, 412 aa, unidentified
MLKIVYPICCGIDVHKKFLVACIAFTNDKGVTTYKSRRFSTFTNDLRKLSEWLSSNSCTHVCMESTGKYWVPVYNILEATCKITLAHPKYVKAIRGKKTDKKDAKWIADLFKHDLVAGSFMPPLPIRQLRDLMRYRFKLTNFSSSEKNRIQNCLTVSNIQLANVVSDTFGKSSMRIIDYLLENPDDKDFDFVPLLHSSMLHKVDDIRLALDGMITPEQRQKMNIILQHYGELGKCKSNLESLILSLSEPYAKERTLVSTVPGIKNPFSAIAIISEIGADMSVFPTAKHLCSWAGVTPQNNESAGKKHSVRISRAGVYIKPLLVQCANAVVKSDKHPEIKGRYLSIKKRRGHKRAIIAIARMLLTAIYHILKKGEPYNPELYKKAQPFPASREITVEQAILIARRHGYSVVKD

SEQ ID NO: 503062 - protein, 449 aa, unidentified
MEVIVERAAALDVHKAQVTACVRLPAGRARRTQEVAEFRSTVQGLSALRDWLRAHNVTEVAMEATGVYWKPVWAILEDDFELLLVNARHVKQVPGRKTDVSDAAWLCQLLEAGLLRASLVPPKPIRALRLLTRYRKTQVRERQREANRLHKVLEDTGIKLDCVASDILGVSGRAMLDALVAGTTDPEVLADLARGRLRAKLPALREALEGRFDARHALLVGAILAHLDFLEEQIDSLSEAIGEALAPHAAAVELLCSIPGVQQRTAENVLAEIGLDMSRFPSAGHLASWAGQCPGNHESAGKRRSGRTRKGSKWLNEALTEAAIAAMRTKGSYLQALYRRLRPRLGHGRALGAVKHSILCACWHMLSSGELYRDLGGDYFLSRDPERQTRRLVRRLEALGHTVTLQDDTAMLKHGDTAMLKHGDTAMLKHGDTAMLKHGDTAMPKEPAA

SEQ ID NO: 503063 - protein, 324 aa, unidentified
MQVPLVNVAPACIGVDVDSKRLNITRADAATLATPVTGVANTASAIKAWLKTLPAGCRIGMEATGPYHRSLADLAVRAGHTVFVFNPAQVASYLRSLRSRGKTDVLDARGIARYVLNESVQCHSYVAPSPFHAKLAVLIGRRHQIVKECSSLQMSLGDLTDCAAQIKALRDAFKHLLARIDAQINAAFAAEHELQVQRQRLATIHGFGPLVSAAVAARLSRLPYANSDAVVAAFGMDPRPRDSGEFKGLRRLSKRGNAEERRLIYLAAVSACNNPLFRAIRDKLLLKGMSAIQAHCVIARKLLRIAFAVWTSQQPFNPELIGRA

SEQ ID NO: 503064 - protein, 450 aa, unidentified
MGKKKINMEIVNPNAAGIDVGSRSHYVAKGQQINDVREFGVCASDHQEIIKWLKKHKIKTIAMESTGSYWQNLFSALQGAGFEVLLTNGKFTKNIKGKKTDVLDCQWIQKLHSLGLLSGSFLPDQTTEQLRTYCRHRSNLMDMAASTSKKMQKYLRLMNLRLDIVVKDVCGLTGLKIIDAICCGERDNETLASFRHGNCRKSEKEISEALQSNGREDYLFALQQEYQMYIELQEKITQCELKIKEYLDRTLKNQPHLQNLKTTDKVHKRVNKNAPKTFDLNQVAFKYFGGVDLMEVEGVSHSTILTLMSEVGPNGLMKFPTGKQFASWIRLAPNNKISGGKILSSRIPKGSNRLKIALRQAANCIGNMKGANLHNFFIRICIRKGRSAAITATARKLAMIIWNMVVKKVSYNPPNQYEFLDQKRKRKVREMRKLILNYQISPAEIGFVTC

SEQ ID NO: 503065 - protein, 406 aa, unidentified
MIFVGIDWSEAHHDVCVLDDKGMVLAKGKVSDDVSGVGRLHAMAAEHAEDPSEVVVGTETDRGLLVGSLVQAGYRVYAINPLAASRYRDRHAVSRAKSDPGDAKVLADLVRTDRQNHREVAGDSELAEAVKVLARAHQNLIWSRQRQVNALRNTLREFYPGALRAFTTSQLATIEACSVLAMAPTPTWARDKLTLQRLRRSLSASGRKRNLDRRAKQILHALQAPELSAPALVEQAYGDVVGSLVVVIDGLTHQIAKLEAELAERFEGHPDAEIITSLPGLSSVLGARVLAEFGDDPTRYQDARARRRYAGTAPITRASGTRLVVLARVARNRRLFDACYLWAFSSITTSAGARRYYDAHRARGKTHHQALRALANRWIGILHGCLTRHEPYRENVAWVAPVEAAA

SEQ ID NO: 503066 - protein, 312 aa, unidentified
MTIIGIDPHPGSHTAVALNQDGKRLASLTVSNDEAGLAMFRDWVKGYEVERCAVEGANNVFSRALSQQLLASGYQVVDSSPSLTSQYRSKRGRKKSDEIDAENVARVALANPELANFSSHTKLEELKTLTRTREMLVEHLKAQRLSLSTLQLELAKQALEQVNVVMREQIKQLEKVMLTLVNALMPELLEVKGIGVVLAATLLAEAGDVRRFRSQHAFAMFAGCAPVERSSGGCQRRQLNIGGNRRLNRAFHMLAIIRLRLDDDTKAYIAKKKAEAKTLRAALRCLKTHLARAIFRVMHTTLNAHPERGVTS

SEQ ID NO: 503067 - protein, 434 aa, unidentified
MLLPQGSWVLVLVGSLTRKEVITINTTTLFVGIDVSKKENTVRFMDGSGDTLSLFTVPNNADGAAKLHEKLRYTLLHADYSKVTVGLESTSVYADHLATFLRNDDFLRKWECKVYLINAKNIRKFKDSYPDLPKTDSIDTFIIADFLRFGRFPKSIYHDEKYLALRNLTRARFQVTQNLSREKTRFLDTLFLKFSSLDSAKVFSNTFGVTSLAAVCDFLTVDEIIYTPITELTDFVNNKGKGKFADPEAVAAALQAAARSSYRISRSVNDSLNQLLAIRLVGIRSIEDQIKSLDKAIASYMAAFQNVLISIPGIGPVYSAGLMAEIGDISRFDGQASLAKYAGLAWSRHQSGGFEAANTRMIVSGNKYLKYYLLEAANKVRLHDTEFARFYRLKSREVPKHQHKRALALTARKLVRLVYSLLSTNRLYIPPTAQ

SEQ ID NO: 503068 - protein, 398 aa, unidentified
MTESSDYESVQVFIGVDVGKDTHHAVAINRSGKRLFDKALPNDENKLRSLISDLKQHGQILLVVDQPATIGALPVAVARSEGVLVGYLLGLAMRRIADLHAGEAKTDARDAAIIAEAARTLPHALRTLKLADEQIAELSMLCGFDDDLAAQTTQASNRIRGLLTQIHPALERVLGPRLEHPAVLDLLQRYPSPEKLASLGEKKLAAQLCKLAPRLGKRLAADIAQALAEQTVVVPGTNAAAVVLPRLALQLITLRKQRDEVALEVEQRVLAHPLYPVLTSMPGVGVRTAARLLTEVACRAFASAAHLAAYAGLAPVTRRSGSSIRGEHPSRRGNKALKRALFLSAFAALRDPLSRAYYTRKMSQGKRHNQALIALARRRCDVLFAMMRDGTFYTPQGS

SEQ ID NO: 503069 - protein, 356 aa, unidentified
MQTQGTKKIDFTGKQLFIGLDVHKKSWSVTIVVDSMEHRTFTQPPDPMTLFNYLQRMFPGGNYNSAYEAGFCGYGIHRELNSLGIKNIVINAADIPTSQKDKLQKRDPIDSRKIARGLEKGQLRGIHIFDREIEELRSLNRTRFYLMRDLRRSKNRIKSFLQYFGILIPAEYDNNLWTLKYVSWLKQIKMQTLSGQDAFSNLISSYEYHRQQLLTLSRQIRQRIREYDNELYSLLKTISGIGPLTSSALITELGDINRFPHIDHLSSFVGLIPRVRESGETIHTGGITFRCNSFLRTMLIEASWQAIRMDPAMMQYYQKHVINNKGHKVIIKIARKLLNRIRYVMKNRQPYVTGVA

SEQ ID NO: 503070 - protein, 374 aa, unidentified
MKNTTKYIGLDVSKEKISVAIADAGREPSRYWGTISHKPEAVRKLLKQLGKPDELEVCYEAGPTGFELYRWISSMGISCTVIAPSHIPSRPGDHIKTDRRDAEKLAQLFRAGELTAVYVPTRDDEALRDLIRARADFKEDQHRFRQRIIHYLLRRQISPPATIQRRWTQAYRAWLNRLTFERESEQLTVQEYLHELHECEERLTRIEAAMAEQALKGAKAEVIRAVQSLRGIALVTAVTIVAEIGCFRRFRSPAQLMAYLGMVPREYSSGQGVRKGSITKTGNRQVRRVFIESAWSYRYRPAVKGELEKRLVGQSGEVQLISWKAQNRLHQKYRQLLMKGKHKNLVIGAVGRELVGFVWALACEAEKRLEATGA

SEQ ID NO: 503071 - protein, 346 aa, unidentified
MSYSTTVGVDLAKNVIQISVVSSRGKELCNRSLTRKKFAEFLGKQKRSLVAFESCATSHYWARAAERHGHEARIIPAKAVAPFRQGHKTDSNDALAVAEAARRPNIKEAPMKTVEQQGLQAIHRSRELLIQESTALSNHVRSLLMEFGLVIPKGFASLMKAVPEILEDGENELPDLYRPTLHRMYNRLLELREDIGSMTKEVEFLAKAHPICSKLMALEGVGPIGALLLYATMGSGAAFSGSREFAAYLGLAPRQYSSGGKTNIVGLSKKIGNSQLRSVLILGARAYVYKFKEPKSAKDKWLKAIIERNGESRAAVALANKNVRTAWAMVTQGTEYQRRQQLEMAA

SEQ ID NO: 503072 - protein, 341 aa, unidentified
MEKYVGLDVSMEETSVCVVDGGGNIVFEGKTSSQPDALSKLLRAKASDAARIVLETGSLASWLWHELRSRNFPVICLDARHVRAALSMRVNKTDRNDARGLAELARMGWYREANVKSMESRYTHSLLAAGAKLVDLRRDVENQMRGLLKGFGLPPGKGGIKALLEKIVVIMREAPHLHMLFKPMMLAHSALVTQVEFYDVQILKLAKGDETTRRLMTVPGVGPATALAFRSTIDNPNRFKSSSDVGAYLGLTPRRYQSGELDRTGRISKRGDRLTRLYLFEAASVLLSVVKRWSVLKAWGVRLAKRVGIKKAKTAVARKLAVILHCIWVDGTEFQWGKEKA

SEQ ID NO: 503073 - protein, 430 aa, unidentified
MKSNTQNTKIEAITETTLVLGIDVGSETHYARAFDYRGIEYSKKPLKFSNDEAGFVTFKAWILDIKEKHGKDKVVPGMEPTGHYWFNLGKFLQDNEMKLVLVNPHHVKKSKELDDNNPTKNDRKDPKVIAGLVREGRYMIPYLPEGVYADLRTASNMRFQLQAELTRIQNRISCWFNIYFPEYKTVYGQPDAKSGMLILKVAPLPEDIMMLGIDGVNQIWRDAKVRAVGKARAKTLIEAAEHSVGSKEGERSARMEIRMLLEDYESRNTRLQEVVALIEELVKKIPMAEKLLEIKGVGIKTVSGFLAEVGDISRFNNPKELQKLAGLALVENSSGKHKGEITISRRGRKRLRYLLFEVAMSLVSKNPEFRELHSYYTTRKLNPLKKMQSLMAVAAKLLRVFFAMLTKGVDYDPQKLVGDIKRPAVYLQVA

SEQ ID NO: 503074 - protein, 316 aa, unidentified
MSVPAIQTSRFLGCDVGKAEIAVFDSVSGLTYSIANEPEALSGFASGLDPTCFVVCEATGGYENNLLAALLAANVPAHRADARKVKAFIRSFGILGKTDAIDAKALARYAKDRQADLPSWRARDRERLRLHALVMARRDLIKDRLAYANRRDAPTAETTRPYFEALIESFEAQLVAIETDIQTLIDTCQPIAASVKTLTQIPGVGRKTAAALLALMPELGTTDRRKIAALAGLAPHPLQSGNEERYRRTRGGRPEVKRVLFMAALSARKHNPSLKAFFERLVQNGKKPLAAITAIMRKLVTIANAKLKAETLAQLS

SEQ ID NO: 503075 - protein, 457 aa, unidentified
MRELRLGIDVACREAHRAALADDTGAMIWSNRRFTTSSVSLEALWAAVRGAGPAGGDVPVVVVMEPTRNAWVLLAAWLRARGATVRMVPPEQSADLRKYYNKHTKTDRLDCELLARLPLLHPDGLVTTPGLGPAEALRRTVAHRHSLVSRRTAGLQRLEVLLELLGPAWTAVLGTDPGKAALAVLERYADPHALHRLGRARLTRLLIRASRGAWRQDKADALLAAAAETLRLWPAGAVDFAELADDIAVEARLVGQLGEEIETLDDRIAVHYQQADPAGIVASAPGVGPVLAPMILGRLGDATRFRDLAAVRNYTGLVPKVSQSGTVDRHDGPTKAGDHILRYALFVAADHARKTDPTLAARYARLRAAGKHHNSALCTLAAVLVTRIAACWRNHELYVLRDLDGNEITDKQGRALCAAMKPTPVSTVRGTGRRSKESHSAPSTGPSTNQATTRQSA

SEQ ID NO: 503076 - protein, 354 aa, unidentified
MSKFLKYAVGLDVSKDSFHVCLSVIDTLQKVTIKASRSFANQSKGFQELAQWVKNHRKEEDIPIVYLMEATGVYHENLAWFLHHLGCHVTIILPKKAKHYFKSVGLKSKNDTIDAKGLAQMAAEQNLDVWEPISPQIEELKALTRHYSNLQEQKTVYNNQIHAIESSHHQDKLVLKDLYELVELMETKLVAIKKQIDVVIEKDSILKEKFALVSPIEGVGTLTIATIVAETNGFEFFDNQRQVTSYAGYDVTERQSGKFIGKRAISKQGNSRIRKILHLPAFNVVRFQQQPFTNLFERVYERTNMKMKGYVAVQRKILVLIFSLWKKNEKYNPNKVASMNEATLDEVQELLLQE

SEQ ID NO: 503077 - protein, 334 aa, unidentified
MSAYVCGLDVHKKYTYATILGPDGEILAQRKMGNEEVPAFLEPYPVEHVAMEATTSIAPIHRKLVDDGYDVHVSHPKETRSIAKARIKTDRTSSRALAELLRLGSLPESYMPPREIADLRELVRRRAFLVRQRAKLKTKIKSSLTYEGINPPTGHGLFTRKGVEWLRGLGFKPVDCYLRLIVPLNREILHLSKELRGMAQDDPDVRLLMTIPGIGYYLGLLIKAEIGDVNRFISGDHLASYAGLVPSTSSSGGVTRHGRITKEGSSWLRWAMVEAMHSHLRYDTPVTRLYHRVAERRGSPTAKVAAARKLVTVCYSVLKHRKPYYNPLQPHAQA

SEQ ID NO: 503078 - protein, 408 aa, unidentified
MPLTCGIDWAEKYHDVALVDQPGRLVAKRRISDDVHGWRTLVDLLAEHGDCPGEQIPVAIETSRGLLVSCLRATGRKVYAINPLAVARYRERHTVARAKSDHADAMTPANILRVDADHHRPLPADSELVQAIAVLARAQQDAVWNRQQLANQLRSLLREYFPAALTAFHVKNIGLTSREARAVLQAAPTPAAAAKLTTRRLHDLLRSSGRRRNIGTWAERLQTLFRGEHLHQLPLVEEALGRQAQALLLQLYAACRAADELSEATSEAFHQHPDAAVVTSFPGLADLTGARVLAELGDDRARFTDARALKAYAGAAPITRASGKSLVVHHRKVKNQRLAAAGYVWAFASLRAPGPRAHYDRRRTEGDRHSSALRNTFNRLLGCLHHCLQEGMIYNEHVAFPPRSKATA

SEQ ID NO: 503079 - protein, 496 aa, unidentified
MGCCALEGGDAVSAIPIRNLMNCAAQPFRWRQQEELEMNPKRSKSRHGRKMPMVHPNAAAIDVGATMHMAAVRADRTPEPVRSFGTFTADLHRLVDWFTQCGVETVVMESTSVYWIPVFELLDARGFTVFLVNARDAKHVPGRKTDVSDAQWLQRLHSYGLLRASFRPKGQIAELRSYVRQRERLLEYAASHIQHMQKALTEMNLQLHHVVADITGATGLRIIRAILAGERDPQALATLRHYSCHSSAETIAKALTGSYRAEHLFALEQALALYTAYREKASACDVRIEAVLKELSIHRGRDHGAVPPPRRRHRTDQVNALAFDVRAALFALLGKDITAIDGLGAYLSLKLIAECGDDLSSWPSAKHFTSWLGLAPSNKVSGGKMLSSRTRRSGGRAAALLRLAAVAVGRTDTALGAFYRRLSSRIGKAKAVTATARKVAVLFYNAVRHGMEYVDPGASSYETRYRTRVVNNLHRRAKAFGFLLQPLEPKAGAAVS

SEQ ID NO: 503080 - protein, 440 aa, unidentified
MRRVEEVTDEPLYRDRVCGIDIGKAGMVATIRVSSDKDPARRAQETRSFGTTKKGVLALADWLRCWQVPAVVMEATGDYWKGPSCRLEAEGFECVLADAKQVKHLPGRPKRDPSDSRWLAACFERGAVTGCFVATGEFRIIRLHTRYRRDLTGERTREKQRAEKLLESAAVKLSSVVTDLHGVTGRDIMDHLIAGERNPKVLAQLARARARRKIAELEAALEGAEFFTDEHAALLAVMLARIDRVNAEIDQLTGVIERLLAPYEEQLAQAGSMPGWGRRSAQDAIAETGPDMTRFPTGAHLASWAGRTPLDNQSGKRNGRSKSKKGNRYLGAITGETAVAAGKTATREGARYRRLARRRGKAKALVAVGNTQLKVYHKLLSSPGMRYADLGPDYYERQRDLRRQISHHVGKLGALGFEVTLCRIPESEPRPDGPGNTQAA

SEQ ID NO: 503081 - protein, 371 aa, unidentified
MGSDSTTKFIGMDVHSKTISVAIADEGRKGEVRHYGTIGNTTEAIEKVLKSLTSTGAELRFIYEAGPCGFALYRYLTGNGFKCVVTSPAMIPKRKTVRIKNDRRDALTLARLYRAGELTGIYVPDPEDEAIRDLARARNDARIAERKAKQRVISFLLRHSFVYPGKKAWTKTYFVWLSKVSLEHPAQKIALQEYIDAVQECTGRVKRLSEQIGLAVEEWRMAPTVKALQSLRGVSLITAAITVAELGDISRFQHPKELMAYLGLVPSEHSSGESIKRGHITKTGNSHARRVLVESAWTYKHHARVTLPLIKRQQGLPKNICQISWKAQLRLCARYRRMMARKKPMQVVVIAIARELAAFMWAIAQEVETAA

SEQ ID NO: 503082 - protein, 390 aa, unidentified
MSQQHFDASRSLTALDQDSTIIAVIEMSQSKWLVSALVPGVERHPLKKLDAQEEVLLKLLHRWRAEASQAGREIKRIVVAYEAGRDGFWLARWLRARDIEAYVIHPTSIAVSREHRRAKTDRLDTELLMRAFLGWLRGEKRHCSMVAIPTIEEEDARRPNRERQNLVTEQTRIVNQTKAIFARFGIRTFRPTLRKAEEKLKGLRTAEGTSLPENTRAELCRHLARLRVVREQIRAVERERLRKLAAAPAAEKGSHAMVFLIARVLGIGIETADMLVSEVLSRRWRDRKAIARYAGLTGSPDESGKRRRERGLARAGNARVRCGMIQFAWRFLRFQKDSALAQWFTARTTDRRASTRKTMIVALARKLLIALWGLASTGEVPQGVILRPAS

SEQ ID NO: 503083 - protein, 346 aa, unidentified
MLHVGLDLSRKRIDVCLISDQGELIDRFAATPDRDGLHGLARRVAVYGEPVRAVVESMNGARFVHDELTGHGWEVLVADAQKVKGLAPLACKTDKIDSRVLAELSVRDLVPAIWLPTFELRREREISRWRLHLVKHRSTLKNRVHSTLITFGHQRHMSDLFGVAGRRLLKELDIPEPWRSHVDASLVLIDDLEARITQIAKELRRSGADHPYVPILMTAPGFGWITSFTVACELGDINRFSSPVKLTGYTGLCPRVRQSGESDHRGPLSKHGPKYLRWGLMEAAIAASSHPLYRERYQRTKRRLGKQRGSKVAQIDLARKLTEAIWYMLTRNQPFAPAGAIFRLAA

SEQ ID NO: 503084 - protein, 339 aa, unidentified
MNITTIGIDLAKTSFSIVGANEQGKVMLRKTLSRTKLLPFIAQCPPCLISMEACSGAHYWGREFQKLGHQVRILAAKFITPYRKGGKNDNNDAEAICEAVSRPNIWFVPIKSPDQQAVLCIHRVRQGLVRDRTSMINQLRGLLSEFGIVMPKGRYPAQQAIVGVLEDAENGLPMIARRVIDNLWQRIKHANEQIHEYDQELGRLVKESPLARRIMTIPGVGEQTASGVVASAPDPAMFKDGRNFAAWLGLVPRQYTTGGKIKLGRITKKGDQYLRTCLVHGARAVVAHLGDKQDRVSCWVRELIARRGYLRAVVALAARNARLIWTLMIKQENYRAMPV

SEQ ID NO: 503085 - protein, 373 aa, unidentified
MRKATKVVALDIHKDSTTVAGSDRKEPRLYGDIASTGEAITKLVDKLGGPSTRLRFCYEAGPCGYGVYRQLTAMGHECTVVAPSLIPRRPGDRIKTDRRDALALARLHRNGELTAVWVPDEEQEAMRDLERCREDMKHGERRVRQRLNSFLQRHSRVYSGRSRWTQAHFRWLETQRFDHPFQQIVFQEYVDAVQEAQVRVKGLDQALQQALEGWSLEPETRGMMALRGVDTLTAVTTMAELGDITRFDAPRQLMAFVGLVPSEHSSGHHRQRGGITKAGNAHVRRVLAEAAWCYRFPARKTAALQRRAEHTTPAVQAIAWKAQKRLCGRYHHLTARGMPKNKACTAVARELLGFIWAIAWELKQPGSMVGKAA

SEQ ID NO: 503086 - protein, 319 aa, unidentified
MTSTLIGIDIAKLKFDVARLAEGKYKHAKFANNPEGFAAFAAWLDGFGDTNQRLCMEATGAYGLPLAEFLADRGYFVSVVNPAQIHAFGKSELSRAKTDKADAKLIARYVLQADLVAWKPLPANLRQLQALTRRLEHLLEMQRMEQNRLETADSAIVPSINTVLATLTAELKATRQAIQNHVDKDPDLKQQSDLLISIPGIGPATTAYLLVALSRHHGYANAKQVVAQAGLAPAIRQSGQWQGKTRIAKTGDSRLRKALYLPALVAWQHNPAIRVQCERLKANGKNGKLIVCAAMRKLIHLAFAILKSGKPFDPNFSLA

SEQ ID NO: 503087 - protein, 369 aa, unidentified
MKKRIIFVGLDVHKNSIDVALADSGRDGEVRSYGTIGGDLDSLHKVVRKLQSTGATLRFVYEAGPCGYEIYRSLTNQGFDCIVVAPSLIPKKSGDRVKTDRRDALNLARLHRAGELKAIYVPTEVDEAMRDLTRAREDAVKAQRVARQTLLSFLLRHGHRYNGKSNWSQAHFNWLADIKMQHPAQQIAFQEYVHAVKEQTERVLRLTGQVQELVSSWKLAPMVKALQALRGVSLIVAATTVAELGDLTRFDSAKQLMAYLGLIPSEHSSGPTVRRGGITKTGNGHVRRVLIEAADAYKHQARETRTLLARLDGLPEEVRKIAWKAQVRLCGRYRKLLARGKSRNSIVTATARELSAFMWAIACALLPAT

SEQ ID NO: 503088 - protein, 438 aa, unidentified
MRAKCNDDLSTVNFSTIGLDVHKNRLVACAVHVQHDAKGREVHEKEYFESTGTYSGRQRLTKWCSSQNADLILMESTGIFWKAPFRDLEKADLHPVLINPRIFNRGSDKRKTDKSDATWLANLARLGLYRASFIPAEPYRSLRLVQSQIKSLVAERQRLKNRLVKVLDDSGFRFTVAFADIGGASSQSLIAGILEDAPREELALMIDPLCKKSIEEILDAVSGELSQINKDIVQSILRLIETHTKEIETLEQTVIRELKKCEKVKQNIRLMTTIPGVSQKSAQLLMSMIGPDFVENFSSPHAFARWLGVCPGNNESAGQIKSGRTPHGQRLIKKVLTECAQAACHTKGSHLAVLFGGWKHKGFCKAVMAVAHKLALLIHWVVVNQKPYIDKEFDYTGVFKQDGQRRPRWIRALRRYGLMTLADVEKEKAARGWIIAKA

SEQ ID NO: 503089 - protein, 348 aa, unidentified
MKHYAGLDVSVKETSVCILDASGTICREKKVVSHPEDLVAILSDPAFSLERVGLEAGPMSQWLFEGLAQAGLPIFCIETRHTKAFLKASQTNKSDRNDARGIAHMMRVGLFKDVHVKTLTSQKRRALLTARSLLQEKAVAFENDMRGLLRNFGLKVGEVSGGRFEERIRELVEADPDLAEIMEPLLAGRRKLREEFANLDKKVLQEAKHDEVCKRLMTVPGVGPVVSLAYVSTIDIPSRFRNSRAVGAVLGLTPMLNQSGESKRVGHVSLCGDAMMRKLLYEAAQSMLTRVVKWCWLKAWAMNIARRHGKKKANVALARRLAVVMHRMWVDGSEFRWTREETTSTVAA

SEQ ID NO: 503090 - protein, 417 aa, unidentified
MKKHNNSRKNSELTSKRAKSRGPVQRDTKEVLAELVGKLREKLDPKVGAASAGEKNQRGELRPNLDRLTVGVDLGDQWSHYCILGLEGETLAEGQLRTTQQDVAEFFRALNAARVAMEVGTHSAWVREVICSYGHEVLVANPRLMEGSKRRKRKNDRIDANKLARLGRVDPESLHPIEHRSAEVRQDLVMLRARDALVAARTELINATRGLVKSMGARLPKCSSPSFAQKVEEAVPAQVREALLPLVRMTAALSDCINGYDEKIEKLASEKYGHTALLRQVKGVGPITALAYVLTLENPERFVKSRDVGPYLGLVPKQEDSGESQPQLGISKSGDTMLRKLLVGSAHYILGPFGPDTDLRRYGLRLCERGGKNAKKRAAVAVARKLAVLLHCLWVSGEVYEPLRQGMSARIAPAVAA

SEQ ID NO: 503091 - protein, 412 aa, unidentified
MEVLHACCCGLDVHKESVTACVLWAEGKGKKRKAKRQFGTMTRDLLALADWLRDCGVTHVAMESTGVYWKPVWNILEGQFEVLLVNAQHIKAVPGRKTDQNDAEWIADLLQHGLLRSSFVPPTPIRELRDLTRYRVSLVHECNRIANRIQKVLEDGNIKLASVATDALGASGRAMLKAMIEGEEDSGKLAEMSCGLLRRKIPELQQALEGRLRDHHRFLLRELMEHLEFVESKIARLEQEIGEHLRPFEAEVERLRTIPGVDWVTAGGLIAEIGVKMEQFGDAEHLSSWAGLCPGSYESAGKRKSGKTRKGSAWLRRCLCQGAWAVSTKRGNYLSAQFRRLAARRGKKRAIIAVAHSLLQIVFYILRDRKCYRELGADYFDQLHPNRVKRYLVKRLERLGFQVSLEPTAQPA

SEQ ID NO: 503092 - protein, 392 aa, unidentified
MFYAGIDIAKKNHEASIIDSNGKLLDKSISFSNSESGSNKLIALLNKFEAGSSNVIIGMEATGHYWLSLYSYLLELGFTVYVINPIQSEAFRKMYIRQTKNDSKDSFIIAQIMRFGEFSTTSLADEDIMALRQLSRYRFSLVDECSDWKRKCIALLDQVFHEYSKLFSDTFGVTSRELLSNYPTPEDILSIDTDTLSKLLSEASRGRFGISKASEIQESASNTFGVSFAKDAFAFQIKQIIAQINFIEEQLKELENEISTLLHRTNQVITTITGIGDVLGAVIIGEIGDISRFESAPQLVAYAGLDASVKQSGDFVGTQTKISKRGSPYLRRAIWLAATVAAFKDPALSLYYQALRARGKHHLTAIGAVARKMCNIIFAVLTNDKPYVPNIL

SEQ ID NO: 503093 - protein, 416 aa, unidentified
MDMEREVVCGADIHKQFLLATVLSNDGQKFQDRFDTNFEGLLNFRQWLLDLGCQKLAVESTASYWLPIYLVVGKDVEFILANAYQIKHIPGRKTDVLDSEWIAELCLKDLIAPSRIFSEDERDLRAMTRTRESYVKMRTQTKNRIHQELESACIKLSSVLSDIFGKSGIHIIRGILKGSGIEDILDSIPSKKLKAKRKEIQDAIRMNMSPAQVDLISLLLDSVDILNREIASIDKQIQDLISKRQDDLKIAMSIPGMGFTSASAILAEIGDFKDFRTGDKLAAYCGLVPSVYQSAGKLITGHITKHGSPHVRRMLIEVAHAISRTKADSKLKRFYFRIKGRHGAKVAIVALARKVICILHHLIVNREMFEDEATNKSKRNKPGRSFSSPEPTIADAIQILVRAGYAVQKRSEREGR

SEQ ID NO: 503094 - protein, 320 aa, unidentified
MQTPAVVLNIGADVAKDEIVAACSEGSFPVRKVANQRTALLAFLKGLPAGSRIGVESTGSYHELFAEVAHQLGFLVFLLNPKDTRHYAKAVGLRGKTDRVDAELIARMIAHEHTKLHAWIPPTPQQRELDRLIKRRAALISLREAVEMSLHELDGFAAELKALRTRFNQLIARLDLRVKALVDASPERKQNYRRLCTITGIGPVVGTALVNTLERVPLKSADAFVAFTGLDPRPDDSGQHRGKRRLSKRGPAELRRLLYMAAMSAIKTKTWRPLYDHYRAKGLSSTATLVILARRIARTAWSIYTHKTEFDPGRLTNPLT

SEQ ID NO: 503095 - protein, 326 aa, unidentified
MVHERAEAYAGVDVSKERLEVCVRRDREARVGEDTFGISNDPAGTQTLLGRLLQERPALVILEATGGFERPVAAALAAAGLPVAVVNPRQARDFARATGRLAAKTDRIDAQILARFAQAVRPAPRPVPEEEAQALAEITARRRQVVGMLTAEKNRLGAATTKPVRKRLEAHVRWLEKELSRTDRDLEEAIAKSPTWRENEKLLRSVPGVGPVVARTLLAELPELGSLRPKQLAALVGVAPLNRDSGAFRGRRAVWGGRATVRAALYMGALVATRHNPQIKEFYERLLGAGKPRKVALVACMRKLLTILNAMLKNRTPWRTPQTRAP

SEQ ID NO: 503096 - protein, 312 aa, unidentified
MAMQVEPQTIGVDVAKAELMISVDGDAPFTLENSPATIRRWLKGLQGPLRLALESTGVFHLELACQAHRLGHEVYVIDAYRLNRYRESVGGRAKTDACDARLLVRYLRHEHAELRPWTPPSRDYQALQRLIHRRATVVRARTAIAQSLREVPGLNATLHATLRQLDRTIAAIERRIRQTLLRAGWQDHARRCRQLEGIGPTTAAALVMAFARGRFANSDAFIAFLGLDVRIRDSGQKRGQRRLTKQGDPELRRLLYLAAMQAKAQPAWRAFFERHLARGLTKVQALNVLARKLARVAFALMKNETDYVPKTA

SEQ ID NO: 503097 - protein, 432 aa, unidentified
MPSRVGSDPSQRPASCLRVDLSARARDGAWPTGQASSDLIGASPKGTVAVLSARPPGGPSTTATTEETAITSISQNPAPDRHCTIGVDTHKDVHVAVALDQLGARLEELHVPATAAGYAQLEGWATGLGPVKVFGVEGTGSYGAGLARFLSTRGHLVVEVNRPDRATRHRIGKSDPIDAEMAARSVLSGVATGTPKHGDGEVEMVRMLKMAKDSGVKARTQALNQIKALLVTAPAELRETLDGLPVGKLLDRCAALRPGELSCPTAVAKHTLRLLARRNLELRVEVKGLEEQIRLLAAVAAPKLLDVFGIGPDGAARFLVTAGDNPHRLRSEAAFAALCGSNPIPASSGKTQRHRLNRGGDRQANAALHRVVVVRLRWHEPTQAYMTRRLAEGKTKAEIIRCLKRYVAREIYAILCPPLAAASTGKNLARAA

SEQ ID NO: 503098 - protein, 431 aa, unidentified
MNVKTSKAKKQVNLDNQAINLLSKEELGKKIEVVEKELKSYTWRELETNGKFAKNDKLSFITDDMLIVGCDVGSETHYIRAIDVRGREVSRGAFEFSNTEEGFENARTWMLILAAENGKKQIVLGLEPTGHYWLALAAWMISNGISVVQVNPYAVKQSKEIEDNSQCKDDRKDPKLIANLVKDGNYGMPYLPEKIYADMRRLSMFRDQLTEDRIRNINRLHRELKIYFPEYMDAFGKIDGAFTLEVLKVSAIPTDIVALGTDGLRNIWHNAKLRGRGYSRAHEIVSCAEKSVGLTDGIDAGCEAMKWYAGQILKLDVQLAAIESTLHKKCREIPYAENILAINGVGENILSGILAEMGDISRFDDVKEIQKLSGMGLVACSSGKHKGQTKISHRGRKRLRYWLFQAANRRYHMQMNSSSCMSIILHELTIH

SEQ ID NO: 503099 - protein, 343 aa, unidentified
MEQSQGLVVGVDTHKDSHSAALVDELGAVLASTDVGANQRGYVRLLEWARCRSPRRTWVVEGTGSYGAGLAGFLARCGEVVYEGDRPQRRKHGAGGKSDQLDAIKVAREALAREHHAVPRQRGNREAIRVLLSTREGAVTASRQALNQLYALVVTAPEPIHERLIGLKGEQLVKASLRLRCSAGELETSVTTRVLRQVARRIRTLQAEAVDYEAQLEKLVAETVPVLLSEPGVGAITAAQLLVSWSHAGRIRNENAFAAMAGVAPVPASSGRVTRHRLNRQGDRHLNRALHVVAVCRSSFHRPTKSYIARRTAEGKSAREIRRCLKRYLARRFFRLLQGLDKP

SEQ ID NO: 503100 - protein, 362 aa, unidentified
MRIIGCDLHARQQTLAMLDTTTGEVVGVTLKHEGDNVREFYSSLPRPVRVGIEATGSMQWFVNLMEELGMECLVGHPAEIRAAEPRKQKHDRRDADLILKMLVEGRFPAIWLPSKELQDLRSLLRHRHQWVRMRTRIQNALQSIALANGLRRGTALWSHDGQSRIASLPLAPHTAYRRSELQAMYEKFEAEIEKLNQRVEEQACQRPGARLLMTHPGVGPITALATEVFLGDPARFADSKALASYVGMIPREYSSGGRQRLGGLSKQGNPLLRFLWGEAGAHAARKDPELQRFYRRKLVQKGLGKASVAVARKLGIRLWIMLRDQIEYNEFCRRGQKQQKSSDACAGMPETPYGANSHRPVD

SEQ ID NO: 503101 - protein, 408 aa, unidentified
MRVVGLDIHRVFAEAVMLDDGRITRLGRVGMTRDHLAAFAQTLTHDDDVVIEATGNASAVAEVLRPHVGRVVIANPRQVRLIAEARIKTDVIDATVLARLHASGFLPEVWIPDEHTLGLRRQVTRRTQIVRQRARLKTIVQSILHAHLIPQCPHADLFGPRGRAWLLRQPLPADESDAVERHLREYDRLTDDLRVVERELARDALTNPKVKRLMTIPGVDMVVAVGLMAAIGPAERFPGPDRLVAYLGLNPTVHQSGEGRPRHGRISKQGRTHARTMLVEAAWQAVRGPGPLRAFYQRVARRRGNHIAAVAVARKLAVIIWHLLRREEDYAWVRPALHAKKLRDLELRLGEPARRGQRGAAYAYNLSRTRVEEKRRAEQAETAYRRLTEGWSRRGRRVPTGPAKEERP

SEQ ID NO: 503102 - protein, 347 aa, unidentified
MRFYTKQHKYYCGIDLHTNKMYLCILNQEGEITFHRNLRTNPDAFLRAIEPFRDDIVVCAECMFTWYWLADLCCKENIPFILGHALYMRAIHGGKSKNDKIDSRKIAALLRGGLIPMAYVYPQKMRATRDLMRRRNHLMRKRAELFAHIQNTASQYNLQTPLGKIAIPKNRVDLLDHFDDPAVKLSIAANLEMIDTYDRVLTGLERDIIKSAKDHDSTTYALLKTIPGVGKIIALILIYEIEDIKRFPRVQDFASYCRLVKCAKESNGKKYGSSGKKIGNAHLRWAFSEAALLFLRCNGPGRKYMQKITNKHGKGKALSILSHKLGRAVYFMLKNRQGFDMTKFFTA

SEQ ID NO: 503103 - protein, 424 aa, unidentified
MKNTAARKLKQVPEGYLIVGIDPHKKRHAAVAMTQDFATLAKFKFDNTREGLETMLDRAKVGMMKSGCRGVMFAIETGGHYWRNIAYYLEERGIPFRFINQFTLKRRREGKDLNRRKNDYRDSEVAAQLLCTGEFTESQIPQGIYAELRAAHNGYRRLVKERTRITNLLKGLLDGLFPEFVQVFKDPSGLTALSVLSTCCIPSVIAEMTEEEFVAIIEATHQGRRLMRRKLKELNQIAKSSIGIGAGSCSVASEISFLVEKLELIKRQIGIVGKTLIKLVDETEEGKYLLSIRGLNYIAVAGLLAELGSFKSYRNAKQMIKMAGSNPTESESAGKRGVHTPMSKQGRPVLRYCAWTSVIPMLRFNEDFRAWAKQMRERPVHANPLSGREVVGAALNRLLRLAFILVKKQSYYRLPLTKPAEVPI

SEQ ID NO: 503104 - protein, 339 aa, unidentified
MNAMPVGVDLAKNLFQVHYIDPQTGEIVNKAIKRAQFAEHFANRAPCLVGMEACGSAHHWSRQLMKMGHQVKLMPARFVKAFNIGNKNDAADARAIWLAVQQPSKGVAVKTEMQQAVLMFHRQREQLVKFRTMQTNGLRSMLAEFGEVMGKGRTAMNKAIYDALARIEQRLPKALIDSLREQWSRIEKMDEEIAAIERRLREWKKEDKAVKAICEIPGVGLLTATAAVAMIGNPKAFSSGREFAAWVGLVPKQTGSGGKVSLHGISKRGDGYLRKMLIHGARSVVANAKDPGPRIEQMRKRRPSNVVVVAVANRMARTIWAVLAHDRPYQKDYACVKPT

SEQ ID NO: 503105 - protein, 319 aa, unidentified
MTQIVLGIDVSKRTLDVALIFEARTLCKQFKNSTDGFRSLADWLASLEIKQVHACLEATGIYGEAVALFLHECGHLVSVVNPLRIKGYAQSNMRRNKTDRLDARLIADFCLTQKPDVWQPPLKEVKHLQSLVRRVEVLEEMLLAEENRLANASAEIKPSIEQMRRLLKAEIKELQQQTKRHIDRHPHLKEQSALLQTIPGIGARTAHLLLSEIEFERYSSARSIAAQAGVVPRKRQSGTSLKQTSLSKLGNARIRRALYFPAITAKQHNEVIKEFAKRLKKNGKTPMQIVCAAMRKLLHIAFGVLKHKRAFDASLAFSA

SEQ ID NO: 503106 - protein, 387 aa, unidentified
MTATTRSFDPTALDDTLCMALELGEGRWKLGFIRGFGGKVLRRQVVARDGQGLLAAIAWAKVKLGLPKTVRVASLYEAGRDGFWLHRFLVAHGIENLVIDSSSLEVNRRRRRAKTDRLDLEGLLDLLQRHLAGSTKKVFSVVRVPTVEEEDRRHLHRELQSAKRDRTRVTNRMKGLLANQGLTLDLKKHVPAQLAALQQWDGKRLPEGLQARLAREWERVCFFDALIDRLEAERREILRSSSDPVMEPVRQMNALRGIGINSAWLYGMEFFGWRQFRNGKQVGGLAGLAPTPFQSGESEREQGMSKAGNRHVRAMAIEIAWGWLRFQPQSALTKWYERRFGHGSKRLRKIGIVALARKLLIALWRYLETGVSPEGALLKTEAQARIR

SEQ ID NO: 503107 - protein, 388 aa, unidentified
MQDVADQSAAPTTVGADLCAIFVSLELSRSTWLVTSLSPGGGQKMSKHSVSAGDIAALLARFSELRRKACARTGRSFPVIVIQEAGLDGFWIHRVLLSEGIESHVVDAASIAISRRRRRAKTDRIDGETLLRALLAHKRGEPRVCSMVRAPTPEDEDRRRICRERKVLIMERVQHVNRIKGLLFSQGASGYEPLRRDRRARLDALQTGDGRRLPQHLKAQVCRELDRLELLLQQIKAVEAERDALLDAEQTKASAPPPMLRGVHGVGPEFASVLWSEGLSRHFDNRRQVAAYAGLAPTPWQSGSVNREQGISQSGNRRLRTMMIQLAWLWLRHQPRSALTLWFKDRMERNGGRRRKTTIVALARKLLVALWKYVSAGVVIEGAMIRAA

SEQ ID NO: 503108 - protein, 386 aa, unidentified
MHDRTNLPIPKQTDIRADCATLFVSLELSRSTWVATSLAPGSKKMSKHTLAGGKGRELLDLLARLKTRAEQRIAAPVKVVTIHEVGLDGFWVHRLLDANGVESHVVDPASIAVPRRHRRAKTDAIDGETLLRTLMAWKRGEPRVCAMTVPPSPSEEDCRRVSRERATLLRERIQHTNRIRGLLFGQGITNYNPLHKNRRECLEELRTGDGRSLPTHVKAEILREIDRLELVLRQISEVEAERDEMLRLSKASSPAALLMQLKGIGAEFATVLYLEGLFRHFENRRQLAAYAGLAPSPWKSGSIDHEQGISKAGNPRLRTTMVELAWMWVRYQPASALSCWFRQRVGSERGRTRRISIVALARKLLIALSRYVTHGEIPAGAVVKAV

SEQ ID NO: 503109 - protein, 418 aa, unidentified
MYYLGIDVSKKRSDYLILDSQGERFQRAFSLENSREGFEALARRLEELNLTAENLLSGLEATGSFWENLYSFLKKKGYKVILLNPYQTKKYHQALRQKATTDQLAALVIADLLRSNRYLSSSVPEEEIEALRVLVKLQYRLEEEKKGLQRQILSLLAVVFPEYEKTALKKVFGIAPRKILERWPTAKDLAEAKPRQIEKFVRSIKENNFNISEIEKLIETAKDSIYSGRAREVRSFTIKLLLSQLDRTLSSLKKIKEEIDKILSPRDESGSFPGDNVLSIPGVGKGTLATFLAIAGQNGSFFSSAKKIIGYVGFYPQIYQSGEKRRENIISHQGPNYARKNLYMVAVSCIRHNREMRTLYNEKVSQGKSHKQALICVVKKLLQMMLAMAKSGEAYRPERVFVPPTALPYFREAIPAYL

SEQ ID NO: 503110 - protein, 416 aa, unidentified
MKLFVGIDVSSEKLDVCFLTDDNQLSILSEISVANDIEGASFIRETILEFNNSYHFDQIVIGMESTSMYSFHPSMFFHEDEKLKKLNTLVTIENPFRVKQFSRMFDENKTDRNDALRIADFLRIQRFTTSPIKEEKYMALQRLTRTRYQLIKQLIRTKQHFLENLTYKCNTLAREMRDESTSLFSATLISLMTEDFTLDELAELPLEAFCDLLQEKGKGRFKQPEKIAKAIQRAITMSYRLGALAQESINVVLSVLVREIRALEKNIKELDKAIEQVIVVIPEYQCLTSIPGVGKVYAAGLIAEIGQIERFEDQTKLAKYAGLSWKVNQSGNYQSQNTPLTKQGNRYFRYYLVEAANSVKNYLPEYKAFYQSKYKEVPKHQHKRALVLTARKFTRLVDTLLRKHQLYTPPRSVIEK

SEQ ID NO: 503111 - protein, 453 aa, unidentified
MSRPQPQTAVEGMPIVHPHAAGLDVGHDAIWVCVPATAMTPPVRRFATFTTDLHDLADWLAVCQVDTVAMESTGVYWLPVFEILESKGFDVKVVNARHLKHVPGRKSDVQDCQWIQRLHSCGLLTGSFRPEPQMAVLRSYLRQRAMLIEHRAAHIQHMQKALDQMNVQLSLVLSDITGKSGMAMMRAIIAGERDAARLVALRDSNCRQPDATIRKALTGNYRPEHVFALQQALALYDAYSQQLALCDAEIEQYLEQLAASTLDDRPPLPPSPKKGTHSKNAPSYDGRQLLYKLTGVDLTAITGLHVSTIQSILAEVGTDMSRWPSEKHFCSWLGLAPHNEVSGGKVLRHRTLPTHNRAGQVFRLAAQAASRNRDSAAGAFYWRQKARLGPQKAIVATAHRIARSFYAVLRTRTPYHETGAAAYHEGVRQRELHALQKHAARLGLTLVPATAAP

SEQ ID NO: 503112 - protein, 387 aa, unidentified
MIYVGIDIAKLNHFASALSSDGEIMLQPFKFTNDYDGFHLLTQKLESFNSDDIIIGLESTAHYGSNLVEFLVINNYKVCVINPIQTSSMRKNNIRKTKTDKVDTFIIAKTLILNPHRLFTMQDISIMHLKQLGRFRMKLIKKRTQAKIQLTSYVDQAFPELQYFFKSGIHQKSVYAVLKEAPTTDAIISMHLTHLSHLLETTSHGHFKKSTATELRILAQRSVGSSDSSISTQITQTIDLVELLDSQVNKVESDMEAVVTSLDSVIMTIPGIGFINGGMILGEIGDISRFSNPSKVLAFSGLDPTVYQSGNFNASHTKMSKRGSRPLRYALINAAHNVVRNNKTFKAYYDQKISEGKSHYNALGHCAGKLVRIIYKMLTDNVEFKLD

SEQ ID NO: 503113 - protein, 351 aa, unidentified
MLIIGCDFHTRYQQIATAEDSTGELLCERRLENENGEAAAFYRSLQKPVRVGIEATGPIHWFERLLAELGHELWIGDSAKIRASEVRKQKTDERDARIILDLLLAKRFPKIWVPTAGERDLRQLLWHRHKFVTLRTMLGNQLHLLAMSQGLCRKQKLFSRKGRAELAGLALGPWASRRREELLKLLDQLDPAIAELDRAVLEEAKRREDAVLLMTHPGIGPVTSLAFVLAIGPVTRFPRSRKIASYLGLNPSEESSGGRRRLGAISKQGNTMVRWLLIETVHQAVRQDPELRQDYQRLKFRRGHAVAKVAIARKLAVRMYWMLRSGAAYAQLVRRQGSPGATLVDASPSLG

SEQ ID NO: 503114 - protein, 313 aa, unidentified
MEPQEINVGIDTSSKQLDIYVRPTGQFFSVANDKNGIKDAIKQLQPLKPQRVLIESTGRLELEFVCAAEKAGLPIVVCNPSQIRSFAKSAGRLAKTDKLDAMDIAHFGEAMKPRLSVLKPEKLREISDLLAVRSQCLEMSTMQKNRLQRMPKSVHKPIQTILNTIKKELQGIDKQLDKLVNSVSEWRQRRDLLLSAKGVGNVLAYTLMSELPELGKLNRKEIAALVGIAPMNRDSGSFQGKRYIRGGRHRVRTVLFVSIMSAIQHHPKLKPMYKRLVDAGKPKKVALIACMRKQITILNTMVKNNTYWDESMA

SEQ ID NO: 503115 - protein, 359 aa, unidentified
MDNNEDGTRHVVGGVDTHKDLHVAAVVDGQDRVLGTACFATTRQGYRQMLVWMRSFGDLRRIGIESTGSYGAGLLRFMQQAGIDVLEVTAPDKHDRRRRGKNDDLDAQNAAHAALAGRRIVTPRSRDGMVESLRVLTVCRKTAVAARRVAIQIIQTTIVSAPDGLRDTLRSMTRMQLVRTLAAWRPDLTAYREVEAAYRISLKSLARRYLELHDEIADLDAMISAIVDDLAPELIARNSIGYTSAAQLLLTAGDNPERLRSEASFAALCGVSPVPASSGKTIRHRLNRGGDRAANSALHIIAIGRIRTDSATKAYVARRTSRGHSKLDAIRALKRYIAREVFHIITRRHREINQTRIAA

SEQ ID NO: 503116 - protein, 355 aa, unidentified
MTSVKYIGLDVHKESISICVRNSVGKVVMESVIETKASTILQFIDGLRGDLRVTFEEGTWAAWLYDLLKPHVSGVEFCNPRKNALLKDGSKSDRIDANKLSEQLYMNNIKSVYHGEHGLRTSKELARSYLTISKDLTRVMNRIKALYRSWAVPCAGKEVYAPRHRAEWLGKISESGVRRRAEFYYQQLDALRLLRQEVRRDLLLEVKKHKAWKLLRQIPGIGPIRAAVLMAVMQTPHRFRTKRQLWNYCGLGLETHDSGEYRAVAGQLQRAKKQATVRGLNRDHNHDLKDIFKGAAMRASTAAGPLHDFYENLLAKGRKPTMARLTLARKIAAITLIVWKKEVRFDANYLKPQAA

SEQ ID NO: 503117 - protein, 352 aa, unidentified
MNNYNNEIDKSKIIFLGIDVHNLTWHVTIRTHEQELFSRGIPGNWKSLRGLLDRYKHAPLQVVYEAGYFGFWLHDQIVEYGAECIVTPPSLLPQEYGNRVKTDRRDSRKLAMLLAKGMLKKVWVPDRQELYHRHVVRRRRQLVGDRIRLQNRIKADLRFYGIEIPKHQGKWSKTFITTLYQVQFGDHWIKESFNRFLEHYEFLSQQIDKQTRLIRDLSETASYKERVWILCSIPGIGLLSAMEILVELQDFTRFKRSDQLAAYVGLTPSQYSSADKIRMGRISKAGKNSLRGVLVEAAWMLIRKDEMMREKFDRISQQAGSKRAIVAIARRLLIRIRRMLLDEKPYIKQIAA

SEQ ID NO: 503118 - protein, 369 aa, unidentified
MAKSITYVGLDVHKDTIAVALAEAGMRGEVRQHGKILNTPAALKALTVKLALTGRDLRFCYEAGPCGYGIQRQLTGMGHDCAVVAPSLIPQKPGERIKTDRRDATNLAKLHRAGELTPVWVPDQAHEAIRDLVRARQAAVRTLRQARQQLSGFLLRQGYHYHRPAWTQLHRRWLASLKFEQAVHHIVLEDCIAAVEAATARRDRLEAHIEAALPEWSLAPVVQALQALRGVGLVAAATLVAELGDITRFANPRQLMAFLGLVPSEHSSGGTRRQGGITKAGNGAARRMLIEAAWSYRFPARISREQLLRQERLAKPIRDIAWKAQERLCRRYRRLARAGKLPTVITAAIARELAGFIWAIAQQAQPATS

SEQ ID NO: 503119 - protein, 268 aa, unidentified
MLDSDGTLMMQSVLATRAAAIIDFLHGIRGTLHVTFEECNHSAWLYDLLARRVAEVAVCDPRKNKLLKSGNKSARIDARKLAELLRINSLSPVYHGEISALEVQHRVRNYTALTEDTTRVMSRLKAVFRSQALERPGKKVFRRENRESYLVRLGSAALRERAENLYRELDVLHPLRLRARREMLAECRKHPATKWLRSVPYLGKVRSAVLIGRVQTPHRFRTKRQFWAYCGLALETWSSAEYCVINGQIQRKFRPLPIRGLNWNHNMN

SEQ ID NO: 503120 - protein, 452 aa, unidentified
MPARKDELMHFNKLLQMLDGSSYLSVGLDVGADFTWMSIALPNGSFPWKPFKIIHHDPYSRELAVAKIKEAQELYSLKSRCFLESTGIYHIPLLCFLRDKGLDCSVINPIITKNSTNINIRKLHNDKFDSKKAALVGLNASLKTSIIPDEDIADLRNLVRDYYYFKDLQSSVVLKLNAELKVSFPAYLKVFSKVTTQSSLKLLGAYPLAKDMLAAPEEELVGIIRSTARFGETYALSRYEAIPEAAKDAAICGRALPSHAVRIRLYIESYQTYQKHLDTLLLALHEAVDKLHGTPVYDRICLLQSLHGVGFLSAVVLMAEMGDFDLFSSPKKLYAYFGLDPAVKQSGKFNGDKVHMSKRGSSLARRILHMVAINNLKVDKGTKTPVNPVIHGYYTDKCKSKKKNVAVGAVMHKICNIIFAMLRDNKLFEIITPQEHCERYLAAHPDKVRNAA

SEQ ID NO: 503121 - protein, 473 aa, unidentified
MQKILNDKQKEVIKLLEKQKIRDVKDLDSYKLSVCHPFSAGIDLGSEELYVALAPNIAAELGLSIVHRFKTFTSDLLRCRDLLKYCGINTVSMESTSVYWTTIYAVLREADIEVCLVNPKKFRMVPGRKTDILDCQWLQTLHLYGLLRGSFHPDAEVETLRSYMRQRDTIIKERSTYIQRMQKALTKMNLLLHNVIDDITGKTGTDIITAILDGERDPKKLAAFRDPRVKKSEAEITEALTGYYKEDQLYLLKINWQTYCFFDKQLTDIDRQITKALKNFPLKKSAKEKRKDNGKSASKGKNDIRTKDNMEDILYRILGSDLSRLPGIRSLAILQIISEIGTDMSKFPTANHFASYLGFAPHNKITGGRIISSKTDRIKNSAAQAFRKVIPSISKTKTALGAFYRRLAPRIGKAQAITATCRKLAILIYNTLVYGNDYIEQGEAQYLKKQEEWERKKLMKLAEKYNLKVVQNA

SEQ ID NO: 503122 - protein, 321 aa, unidentified
MNKYSKIYGVDISKDVFDVVCSDDAHHQFDNTPKGFSSFLKAIAQGSLVVMEATGYYHYRLAQYLFKHGVAVSVVNPLSVKRFIQMKLAKVKTDKSDAKAICEYALVNEVPLYSALTDVQAECLQLFRLLDSYLKKRTATKNKLHGEETLGIPSKFVHQSLKRDLKHLDKEVKALEERLLLLVKQDQQHQLTLLKGIPGLGTKTALFLIVITDGFDKFETAGQLCSYVGITPTIRQSGSSVRGKSRISKVGNQKLRNLLFLCAFSACKHNKACREIYERIVAKGKSKKLALIAVANKLLKQAFAIAKSGLPYDEKFVSKLN

SEQ ID NO: 503123 - protein, 371 aa, unidentified
MTTSRTEAESQRTQGGHRRKDGRGAAWRRELKDASRSKPATLAACAIDELGKPVAEATFANDPGGHVAFIAWARSTAPEATVGIEGSSSFGAALARSAQHAGLSVREVPPHLSRVERRRTRRPGKSDPADALAIARVTARETNLPPIRLPERTSELRLLLEAREDLVGEATRVRNRLHAHLLVLVPGYGGTITNLVAARHRTTVGRLLRGNGAVQAELARALVARLARVDREIAGLTLRIDQLVASHPLLGLPGVGSITAARLIGEVGDVRRFRSADALAALAGVAPIPASSGQIQRMRLNRGGNRQLNRALHVIAVTQARFHPAAKAYVARRIEVDGKTWREAIRALKRQLVRPVFRLLLEGSVAELPIA

SEQ ID NO: 503124 - protein, 407 aa, unidentified
MGITCGIDWSESHHDVALIDEHGTVVARTRIDTGATGFHVLLALIAEHGGSVDDTPIALETDKNLLVVALAEAGFTVYPINPRAVARYRERYGQAGGKSDPGDAAVLAHILRTDRHLHRPLPAVSEEGRAVKALARQHQEAIWALHQTVSRLRSVLLEFYPQALQAFPNLKHKAALTVLAAAPTPAAGQRLTRGRVVALLRRSGRGNHPALVEQILTDLHTPALGQPPRVEEAYGHTVRGLVAIVIAMGQAVDDLETELAREFDQHPQAAILRSVPGLGPVLAARVLGEIGDDPARFDNPQGLRAYAGTAPVTIASGRLRYVKARKVRNKRFGDACHWWAYTMLTKSAGARAHYDRRRAAGDHHNAALRNLANKLLGRLWWCLVNNQPWDEHGAWPDHGHTENPTAA

SEQ ID NO: 503125 - protein, 342 aa, unidentified
MEITTVGIDVAKSIFQVHAVDAAGHVVVRKALRRAQVTPFFAKLPRCLIGMEACGTAHHWARELIKLGHDVRLMPPAYVKPYVKRGKTDANDAAAICEAVTRPSMRFVPVKATEQQAALALHRTRDLLVKQRTQLVNMIRGLLAEFGIEMARGLRHALELAARLSAGDAAEVPPLAQRVVTGLADQIGALQIQLTRLEKELLTWHRDSDLSQRLATIPGVGIVSATALAASVSEPERFRSGRQFAASLGLTPLQNCSGGKERLGRISRMGDRYLRRLLVVGMTSLIRRAKTTPTSVDPRLPALLQRKPVRVVTVAAANRTARVAWAIMTRGGTYRAPAATVA

SEQ ID NO: 503126 - protein, 408 aa, unidentified
MLFVGDDWAEDHHDIELMDEAGRRLAAARLPEGVAGITRLHEMIGAQLGEDADEGEVAFGIETDRGPWVSALVAAGYTVYSVNPLQAARYRERHSVSGAKSDKADAHTLADMVRTDAHQLRPVAGDSPQAEAIKVVARAHKTLIWERTRHTLRLRYALREYFPAALEAFDDLAAPDTLELLAKAPDPASAAKLNRSQIRAALKHARRRDIDTKTTRIQAALRSQQLGRAPVITAAYAATTRSIAAVLATLTEQINTLRGQVETHFGRHPDAEIILSQPGMGVLLGARVLAEFGDAPGRYADAKARKNYAGTSPITRQSGKRKIAHARFVHNDRLVDALMSQAQSALLASPGARAYYDKQRARGLDHHAALRQLANRLVGVLHGCLKTRTLYDEATAWSHHNQDQRTAA

SEQ ID NO: 503127 - protein, 438 aa, unidentified
MSNKVIFNFDELFISVGIDVGADFSWMSIALPNQQFVGKPYKILHNSINSLSTAVSKIKEAEELYSLESRIFLESTGIYHYPLFCYLRDKGFNCSVINPIITKNSTNINIRKVHNDRFDSKKAALVGLKPDLKVSLMPSDLALDCRNLCREYYDLMDNRSAYVNKLQGELRMAFPQYLGIFSKITINTSLTLLETYTSPSAFIEADKQEIINIIRSTARFGLTYAQNKYNAIIKAANEANEFGYIIDSNIKRIRIYISFIRKYDEEINSILEAMHELVNANEDTDFVKQIHLIETFKGAGFLSAVSLMGEIGDFSAFSKPKQLFAYFGLDPAVKQSGKFEGTKIQMSKRGSAIARRVIHTLTLQSISTSRTGKAKNPVLRDYYLQKCESKPKLVAMGAVSHKVCNMIFAILRDNKPFEIITPQEHIQQYNAAKCDMAA

SEQ ID NO: 503128 - protein, 408 aa, unidentified
MADKIAGIDVHKKVLMVVVMDAHAPEAKPERRRFATLPSELRRLSAWLQEQGVEEAVMESTAQYWRSVWLELEPHMRLHLAQAFSNRAPRGRKHDFKDAERLVRRLIAKELILSFVPDGEQRIWRNLTRMKLQLVRDRVRLQSQIECLLEEMRIKLSAVVTDLLGSSGLRILHALANGETDAKSLALLGDDRLKCTEEQLVEALTGRSHPLHRKMLAFELERLRLLDEQIAKLNSLIAQAMKPHQDAVIRLAEVPGLGIDSAQQIIAEVGVTASTFSSAAEFTSWVGTCPGKEESAEENHNSRSAKGNKYLRRVLNQAAHAAARSKGTHFQAVFRRLLPRLGYQSAVWAIAHRLCRLVWKILHEGIRYIEQGIESEPKLLIHRAQYLARQLRRFGYNVQITPDNRAPA

SEQ ID NO: 503129 - protein, 390 aa, unidentified
MKNMYSSVACGGMDVHYKFSTVTFRDEAGRVVRRERLEHPRRDRLREHLNRWPRGLPMVMEASFGWGWLSDLLSEAGLEPHLSNCYKLEQMRKARGWVKTNKKDADMLSLLPFEPSDWWKVWRAPLHVRNRREQMRFRGDLVGLQTRVKSRIHAIFHRHGIFHEFSDLFGCRGRKFLVELCLHNPTNLSTQALLALRGQVKLLDHLRRQLADVARILHKQLLKTPLTMRLKKIDGIGLVLAHVLAAEIGTIERFRNHKALASYSLLAPRANDTGQDDPRHSPLGRHLGFRGNRTLKWAFVEAAHGAVRSGGRWRAIFDRVTNGGTKNRGRGYIKVARELVKVVYVVWSKGIDYQPVPPARPGSDKKKKNKKKSRSGTGQLLHPMVHALPA

SEQ ID NO: 503130 - protein, 464 aa, unidentified
MKPRIYAGVDLGGSFHQVQVTNAAGERLGKSFRIGRGKAGLAALQEGLRGVAGDEVEAVYTIEATQNYWLELVHPLQRAGASVYLVSPSKSTALRTFYRRHTKNDAIDAEALSRLPLVDPGLRPATASAPKWDMLRRLVRQSWQLKGHMADRKRRIMTRVLMVYPGYETVFRDRYCGASLLFCRRYLDPAKARRLGRRRLSVLLRKRACGKFDESRAEHLWQVIENAPELNLCYDDLQLLVNYDLDLLEAEEKSQQALRERIAELYGELDPATRLTSVPGLGDYLAAAITAFIGEPGRFANGDQAVALSGLCARLKSSAGTDTANQPLTQHGDPVLRGCAYLAAEICRHYDPELRAFHRRLTARGKHYKQASCALAAKILRRCFALLRDQREYQVAHQDQMARQQKQEGKTVRESVHEVAERLNDRSGPSSPGPAGYVGAAESARPSQDVQRLRSASRRGRKSA

SEQ ID NO: 503131 - protein, 417 aa, unidentified
MKYYTSTTEFNCGIDLHARQMYVCVMDRQGKKLVHTNVLNNDFEYFLKLIAPYKHDLTVCCECMFGWYWLADACQIAGLTFVLAHALYVKAIHGGKNKNDRVDSEKLTHLLRSNLIPPSYIYPADKRPLRALLRQRIFFVWRRSELLARIYSHQLAHNRAPVKQTRRVRDSWQEALLKAEDNPLRQIALQNDLAMVRHFDHQIFQLEEELQRQTKQVACREFALLQTVPGIGESLGLTILYEIGDVQRFPSVKDFLSYCRLVKGTVASAGKIKGLRGAKLGNPYLRWAFGEAAVIGKRDHYVLGPLSKRLEAQMHGNKFKSNTIVAIKLARAVYFMLKNKTVFDPERLVASMQKCFSPGRRQPARPTGCAKKAMPPLVEDHSCCAPSTPVCVGQASNPADSIGTCDQRLIPSAAQTK

SEQ ID NO: 503132 - protein, 343 aa, unidentified
METIKTIGLDIAKSVFQVHGVDGGGRIVVRRRLTRSRMLPFFAKLPPCLVGIEACNNSHYWARELMALGHVVKLMPAQYVKPYVKRGKNDAADAEAICEAVTRPTMRFVAVKGPEQQSMMMLHRVRLMLNRQRTQLSNAIRAHLSEFGIVASVGRNGVDQLLKIVADPKDDRIPEDARLCLRMLVAQLTVVKQQILENDRRVLASARRTDVGRRLMDIPGTGPLLASAFVATVADPAMFRTGRDLAAWIGLVPKQNSSGGKERLGGISRAGNRYLRQMLVVGAMAVIRFAQRHGTKRPWLLQLLARRPAKVAAVALANKNARMVWALMKSGERYREPSIAVAV

SEQ ID NO: 503133 - protein, 442 aa, unidentified
MLLRARGSVSWQGSLRAGAVRRWSPHRWREDVMEVMFDRVAGLDVGKESVTVCVRTPGSRRGRHSETRTFKTMTGSLRAMRDWLVESGVTIAAMESTSAYWKPPFYCLEEVMEVWLLNAAHMKAVPGRKSDVRDAEWIAQLLEQGLLAPSFVPPPEIRRLRMLTRYRVQLMGDRAREIVRLELMLEDASIKLSSVASSLKTVSARAILTAMISGESDPLRLADMAKGRMRRKIPDLAQALTGHFDANHARLARSMLRRLDLVEQAIVELDAVIVAACRPWQHQIELLQTIPGVGRKVAETIVAETGADMSRFPTAAHLAAWAGVAPAMNESAGRQTPAGKRHGNKWLTAMLVEAAGSVGRMHGKNYLAVQHARLTKRRGMGRAQVAVAHSILVAAYWMLKRDEPYHDLGADWHSRRNDEAHTRRLIAQLEHLGHTVIIDPAA

SEQ ID NO: 503134 - protein, 320 aa, unidentified
MSASSVVVGIDVAKAHVDVAVLGAQFGARRFDNDADGHSALAAALQPLGVALVVMEATGGYEAALACALQAAGLPVAVVNPRQARDFAKSMGRLAKTDAIDARMLAEFASVLVRRDDLAKLLRPLTDPDQQVLAALVTRRRQLLTMLVSERQRLQLAIAAVRPGIEAMIEAIRKQLDDVEAQMVEHVQAHYIELDKLLRSAKGVGPVASATLIAELPELGRLNRREVAALVGVAPMANDSGNSKGRRRVVGGRFEIRRVLYMATLTAARHNPAIKAFYDRLKAAGKLPKVALVACMRKLVTMLNAMVKTNKPWDTSLHGA

SEQ ID NO: 503135 - protein, 343 aa, unidentified
MNVIRVLGIDLGKDICSVVGLDETGKVLLRRRMRRDNVLKLADRMPDCVMAMEACCGAHHLGRQLREQGHDVRLMSPEYVRPYVKAQKNDDRDAEAIAEAATRPTMRFVDLKSDEQLDMQILHRARDRLVGERTTLINQLRAILLERGIVIAKGRSTLERQLDQLLAGEMAISRRIRELIEDMRDEWRALDDRIGALDTEFADLARTDGSMKLLSTIPGIGPLNATAFVASVGKAETFNRGRDLAAWLGLVPRQMTTGGKPRLLGITKRGNGYLRRMLIHGARAALPSLSKGKTLMGEWLRGLLSRAHKNTAIVALAAKMARIIWAVLRTGRPFDLKAIPSAA

SEQ ID NO: 503136 - protein, 354 aa, unidentified
MDKDKYVAMDVHKASVVVGIRDAAGKYITEAIVETKASTLVELVKGMSGPIHLTFEEGTQSAWLYDLFKPHVTELIVCDPRRNKLLEEGSKGDRIDVQKLSELFCKGMLKPVYHGDHGTRALKELGHNYESLVSDRTRVKNRLKAIYRGRGISYQGAEIYQTKQQAEWLGKLNERGVKRRAELLYQQLESLDALVKEARREMLAESRKQKVSRCLRRISTLGSISVALLIATVDTPHRFRTKRQFWTYCGLAVVTRTSADYYFDQGQLRRSRRPVVTRGLNQNYNRRLKRIFKQAALTASRRGPFKPYYERLLARGLSEELVRVTVARKIAAVTLAVWKKGAQFDPEKILKPTT

SEQ ID NO: 503137 - protein, 408 aa, unidentified
MEPIYTCCCGLDVHRRSVAACVRRLEAGGRLYQETRTFGTMTRDILELADWLAAEGVTHVAMEATGVYWKPIYNLLEDRFTLLLVNARHVKHVPGRKTDVQDCQWLAQLLQAGLLRGSFIPARPQREFRELTRHRSQLVAERSRVANRVQQVLEDANIKLGTVATDILGASGRDMLRALIAGEQDPEKLADLARRQLRNKIPELRRALEGKVTDHHRFLVGQLLAHVEHLEGQIEALSRRIEEVSRPFASANKAVSSLPGFEQRSAQNVLAEIGADMKPFPTAAHLASWAGVCPGNNESAGKRKSGRTTHGNRWLRTALVQSAWAATRKKDSYFQAQYRRLAARRGKKRAIFAVAHSLLTVIYHMLKTGSTYKDLGGDYFDKLNSKRLLPHLVKRIKDLGYQVTIQAA

SEQ ID NO: 503138 - protein, 346 aa, unidentified
MMIIGCDFHPSWQQVSWLDSETGESGERKLVHASGDAQRFYQQRTAPMLIGMEATGNSQWFIELAQDLGHEIWIGDAAQIRASYVRKQKTDKRDAAHMLKLLLEGRFPCLWTPDREQRDLRQLVLHRHKLVLIRSRVKNELQHLAMNKGVQRKHRLWSQAGQKLLRELPLKPWAACRREDLLGLLAMLDQQIGKLDGAVQQAAEQHPQARLLMTQPGVGPNTALAYVLTIGEVSRFPRGKQVASYLGLIPREESSGGRQKLGAITKQGNRLLRSLLVEAAQVTVRYDPGFRREYLHRCHSKPKAVAKVAAARKLAVRLYWMLRTQKPYPEVVRIESSSRVALVGAS

SEQ ID NO: 503139 - protein, 412 aa, unidentified
MRFNFAEREKFALEFFRKEGICVVGCDIGAKFSVFAVDGKTYKVEHSKLREFKEKILKVADGRKIKIYLEQTGRYSLPVVETFLDCAELYLVEGKRVKAARELFSLPQKNDYYDARLLAIIGILPVPVIPLDYDAYTLRFLVNRMIRLEKSFQQAVNRLRQCIAVLFPGEYETFTKERLEQKRGKYLKQLKELLNGFVPFSAIQEELLIEAQNELQVIELLLKQRRQVEERIDLLCEKPHIKRDLEILTSFPGISKKRALIIKASYIDIRRFRNWKAFVKFMGYTKQENQSGTSVKFKKRINSNRLVRREMYMLCSFLCSQEGPASDLFSYYYLRTGGIFKKAVHKFSSKYLRLLFYCLKHGELFNPAFLINSLEDLISPQTIEELRRNVRRLREQRGKVKKKKEGSNGNSN

SEQ ID NO: 503140 - protein, 403 aa, unidentified
MNAVGIDVSKGKSMVTILRPFGEIVSSPFEIKHTSSDILSLIKLIHSIEGESRIVMEHTGHYYEVLAQQFSAAGLFVSAVNPKLVKNFNNDSLRKVKSDKADSIKIARYALDKWQNLKPYSIVDELRTQLKAMNRQFHFYVKQKTAMKNNLIGLIDQTYPNANTYFNSPTRSDGSQKWVDFVSTYWHVDCIRKMSLNAFVEHYQNWCKRKKYAFNKSKAEEIYTKTKELVPVFPKNEITKHIIRQAIDQLNSTSVTVETIRTLMNETASKLPEYPIVMQFKGIGPSLGPQLMAEIGDVTRFTHKGALTAFAGVDPGVNESGSYAQKSVPTSKRGSSNLRKTLFQVMDVLIKTMPQDDPVYQFMDRKRTQGKPYYVYMTAGANKFLRIYYGRVKEYLSVLPDPS

SEQ ID NO: 503141 - protein, 314 aa, unidentified
MKDISTFVGIDVAKKSLDVATLPATTPHTFSHDAKGRRELLDNLPQPETCLVVVEATGGYERLLVADLLDAGYLVAVVNPRQVRDFAKALGILAKTDRIDAAVIARFGQQVKPRPRAEVHEKQDELDQLVTRRRQLVVLRTAEKNRFTMAHSKPVKRSLQLIIDTLNKEIKRIEKEILALVESDDQWRGKADILNSVPGVGNVTAATLIAEFPELGQINRQQAAALAGLAPFNRDSGKFKGKRTISGGRRSVRTALYMAALSAKTHNPLIRKFAERLKAEGKLPKVILTACMRKLLVILNTMLKTNTLWNPRIV

SEQ ID NO: 503142 - protein, 392 aa, unidentified
MLAWVTTRSEAGQPIHIRRCWLMRDDTTVLGLDVHKETIAAALLPAGAGMVRDLGVLPNTPEAVRKLVKRVRVPGPVVVVYEAGPCGYATHRQMEGLGVPCAVVAPTLIPIRPGDRVKTDRRDAAKLARLYRAGELTEVRVPTPGEEAARDLVRAREDVVANRLRARHRLSKFLLRQGRIWREGRAWTGKHGVWLGGQRFDESLQQQAFDAAQRGVAEADAHLAVLGQQVTDAAQVEPWRAVVTALRGLKGVDTLAAMTLAVEVRDFARFPTGPAFMAYTGLVGREDSSGSRIRRLGITKAGNAHVRRVLVEAAWHYRHARGTVSPALAARRAVLPPLLAQMAQRAQDRLQRKFGRLVSRGKVPQVAVVATARELAGFVWALARAGATEATT

SEQ ID NO: 503143 - protein, 319 aa, unidentified
MAQNDLIVAGIDVAKDKVDVCIRPLSLRRTFASTAEGRRELASWLRRKKVGKAVMEASGGYEREWAKALRDTKIEVRIVDPKRVRDFARSAGRLAKNDTIDAEMIAWFAETFDEAPGQAHDAAREELAQIVTARLGLLDLQTKLLNRGEHAGPEPVQKMHARMLKKIALEIAKLETVIAAMIKATPRFAELAEIIESVPGLAEITSATLIAKMPELGQVNNKIGAALLGAAPYDDDSGCRRGERHIKGGRRKVRNLFYMACLGAATRHNPVLKAFYDRLIAKGKEKKVALVACMRKLIVILNIMIARRQKWDPNLHVVG

SEQ ID NO: 503144 - protein, 408 aa, unidentified
MNAIGIDVSKGKSMVAVIRPFGEIVSRPFDINHTPKELAELAKFILFLEGESRVVLENTGKYSDPVIKVLSEAGVFVCPVNAKLIHDYGGDTIRRDKTDKIDALKIAGFCLDKWTRLERHSPTDDLRKTLKTFNRQLDEYMKVKVMLKNNLISLTDQIFPGINNLFSSPARESDGHEKWVDFLARFWHCGCVTSLSEGLFAERYKSWCKKLGYNFASAKAALVYEVAHNQQATLSKNDFTKTLILQAVEQLNTLCASIAKLKAEMTTIAKMLPEYETVLSMHGVGKTLAPQLIAEIGDIRRYSKRASLARFAGIEPPENQSGTYSQHSRRISKQGPPQLRKALFQVMRCVLQLSHPDEDTFRFIARKRAEGKPFKVYMIAGANKFLRIYYARVKECMDLAAQNPENIA

SEQ ID NO: 503145 - protein, 345 aa, unidentified
MDIMHYVGLDIHKKTINYCVKLADGTVVREGVVPATRQGLDGLVAKLPQPWVGAMEATIFTGWVYDHLRPHSAALKVAHPLMLRAIAEAKRKNDCIDARKITDLLRVDLLPECYMAPVEIRERRRELRYRNLLVRQRTQTKNKVSGLLMECGIQYHKQKLHQKRYFSELLKRQGAEELPAALKPLLELSRTTLEAFSKMEKQLIAGLQQDSLLTQRVHRLMTIPGVGPVTALTWSLEVGEVQRFRSHKQAVSYCGLCGAEDSSAGKQKRTPISKQRNHHLQTALIEAAKLAPRHNPDLALVYEQERQKGNCNRATLAVARKLVAYLLAVDRRETGFVPVKAAAVA

SEQ ID NO: 503146 - protein, 347 aa, unidentified
MRFYTTQHPFYCGIDLHARTMYVCILDQSGAVLVHRNMKTDPETFLHVVAPYRQGMVVAVECMFTWDWLADLCADAGIPFVLGHALSMKAIHGGKAKNDKSDSQKIAALLRGGMLPQAYVYPAQMRATRDLLRRRMHLTHKRAELLAHIQNTNSQSNLPAIGKKIAYKANRDGVAERFADAAVQKSIEVDLALITYYDELLRDVELSIVKTARHHDAHTLYLLQTVPGIGKILSLVLLYEIHDIERFPRVQDFVSYCRLVKCSKESAGKRYGTSGTKIGNAHLKWAFSEAAVLFLRDHAAAQKYLARLEHKHGKGKALTLLAQKLARAVYYMLKRQVAFDTETFFQR

SEQ ID NO: 503147 - protein, 430 aa, unidentified
MLRYERLTMHTGFTAVLRICPRWSLEGSTQMHYLGIDWADEKHDVCLLAADGRVLSQLSIAHDLTGFQKLYDLLKSLDEVSINLERSDGLLGDWLTCQPWPIYITQPVAVHHRRPRRSKDDRGDAYLLAHLLRVGDPECRLFLTHSPIVQHLKQLTQAYDSVLREQRRLTNRLIYLLKQYYPAALKAFVVPHSAIMLTFLEQYPTPQTARAASQADLRAFLKANHYRGADKKATELYQRIQLPTPHASVQAGLVEHVRVLLPLLQSLFRSRAHLEKQIEQVFASHPEASWWKSLPGLNGPLTAARLLARIGDNRERFPSAQVLQAVAGTAPVTRRSGKQIQVEFRIACCHELRKAMDDMARQSVKHSGWALAYVEAQRARGRHAARANRALANRWLSIIWKLWKTRTPYDEQVHVLNRSRQGKPAQTNVA

SEQ ID NO: 503148 - protein, 356 aa, unidentified
MNNPNKYIGFDIGDKSTTACVIQDGQPERFKTFRSDVPSMQAFLQQQRQEDGGSIHLTFEVSGQAGYFYDHLVDRVDSLTVSNPSQMTWIYRTPKKNDRMDSRKQAVLLSVGEIPAVHRPSREGRQWRMAIQHRKRLVEQGVVIKNRIRTLLKSQGYTRPIKGCSGWTQAHEQWMKEVADKGPLTRQTLWRLGLKDLLDGLELVDKQGAALKRYLDGYLAKQAGWPWLRSIPGVGPRTAEAVLAHTDEVKRFGRGKEYGAYFGLTPKLDESGDSRRIGHISKQGPSVVRGLLVESAWRAIRSSEALRKFYERVTAGHPARRKIAIVAVARKRAVIRRAVLLHGCMYDESLVGGGKE

SEQ ID NO: 503149 - protein, 438 aa, unidentified
MSNKVIFNLDELFISVGIDVGADFSWMSIALPNQQFVGKPYKILHNSIDSLTTAVSKIKEAEELYSLESRIFLESTGIYHYPLFCYLRDKGFNCSVINPIITKNSTNINIRKVHNDRFDSKKAALVGLKPDLKVSLMPSDLALNCRNLCREYYDLMDNRSAYVNKLQGELRMAFPQYLGIFSKVTINTSLTLLETYTSPSAFLKADKQEIIDIIKSTARFGLTYAQNKYNAIIQAATDANQFGYIIDSNIKRIRLYISFIRKYDEEINSILESLHELVDANEDSDFVKQIHLIETFKGAGFLSSVSIMGEIGDFSAFSKPKQLFAYFGLDPAVKQSGKFEGTKVQMSKRGSAIARRVIHTLTLQSISISRNREAKNPVLREYYLKKCDSKPKLVAMGAVSHKVCNMIFAILRDNKPFKIIAPQEHIKQYNSAKCDIAA

SEQ ID NO: 503150 - protein, 386 aa, unidentified
MLKPDRTIYVGVDLHKQHHTAVMIDCWNKKLGEIRFDNKPSAFPMLLKEVKKHTKKGISAVYGLEDMGGFGRSLAVYLTESGCSVKEVNAKLANNRRKSHVTVQKSDSWDAECVAKVLRDELANLPDAKPIDLYWAISQLVTQRKWQAKSLSGMVKRLHQQLGYHYPSYKKFFSEIDGKTALVFWHKYPSPVHLDGVTLDELAKFLRKLSNYALSTKKAEQMLTLIAEDGETTRDFQEKRDFIVKGLVRNIRFYGRELSRIEQEIASLMKQHGFQLETMTGIDLVTAAELVAEIGDIHRFATPDKLARFAGVAPIAVGSGNKHRHYKSKQGNRELHDILKALAIRQIAVTRTKKEPRNPYFYAYYEGRMAEGKTKQQAIVCICGSW

SEQ ID NO: 503151 - protein, 349 aa, unidentified
MKYFAGLDVSLEETAICLVDETGCIVKEARSASEPDALVAVLRGFDLPIERIGLEACSLTAWLHEELTQAGLPAICIETRRANAAMKTMPNKTDRNDARALAQIMRTGWFRQVHVKSRPCRHWRSLLVARRTILNEMRTIENVVRAILREAGMKLGTPSRAAFADRVRELAGGDKAVASLAEPLLVVLATMLRELARLTRQALDIARRDEDCQRLMTVPGVGPITALAFRATIDRPERFRRSRDVGAHLGLTPARHQSGETDIQGRISRCGDELARTALYEAAHCLLVRSRKWSSLRAWGLKIAKRRGMARARVAVARKLAVILHRMWRDKTEFHFGKEPATAAARAAA

SEQ ID NO: 503152 - protein, 346 aa, unidentified
MTYYAGLDVSLKEISICVINNDGEVVARGAAPADPAGVAGWFKNRSLEPKRIVHESGQLSIWLQRGMVELGLPAICIDARKAHKSLSARLNKSDSADAEGLAQLARTNWFTPVHVRSEESDRLRCLIGARERLIRLRKDLEGHIRGMLKTFGIRMIGVGQGRQRQGFRDQLAMAGETDPVLRAIADGFIAAHATLCQATADMDRALQAKSKNHPVTRRLMTIPGVGPIVSLSFVALVDDPTRFSKSSDVGAFLGLTPKRHQSGEMDWSGRVSKCGDAAMRGLPFEAASCVISQVKRFSALKSWAVRLAGRRGFRKAAVATARKIAVLMLTLWKTETDYQWTQEATA

SEQ ID NO: 503153 - protein, 410 aa, unidentified
MEVLHPHCAGLDVHKDTVVAAVRHMVGGTVRREVRTFKTTTTDLMALSAWLSAEGCTHIAMEATGIYWKPVWHVLGDGEFELVLANAAHVKNVPGRKTDVNDATWLADLMAHGLIRGSFVPDAHTQELRALLRTRKQFVRERSSHIQRLQKTLEDANIKLDSALSDVMGLSGRSMIEALIAGESDPDTLAGLAHRRVKAPPEELREALRGRVTKHHRFLLQLHLQQIDAIDAAISEIDREVDANVEPFRTAITILITIPGVSDLSARVIMSEIGTDMSRFPTEGHLISWAGLCPKNDESAGKRRSTRMRKGAPWLKTTLIQCAWAGARKKGSYLQAQFHRLRARRGIKKAIGAVAASILTAAYHMLAHGTLYHDLGPDHFDRRAKATQTRRLVTRLHNLGYAVQITPLAA

SEQ ID NO: 503154 - protein, 344 aa, unidentified
MQIAVLGIDLGKNSCSIVGLDSAGRVVVRGRLRRESVVQFATSLAPCVVAMEACCGAHHLGRILQAQGHTVRLMSPEYVRPYVKAHKNDDRDAEAIAEAATRPTMRFVELKSEEQLDMQTLHRARDRLVGERTALINQLRAILLERGLVIPQGRRKLEQHLAAILDEGSDVPLSPRVRALVEDMRTEWRELDRRIEAFDDEFAARARTDAAARRLATIPGIGVLNATALVAAIGTGEAFGRGRDLAAWLGLVPRQVSTGGKPRLLGISKRGNGYLRKMLIHGARAALPSLANAETGLSQWLRGLLARAHKNTVVVALAAKLARIVWAVLRSGQLFELRTASAAR

SEQ ID NO: 503155 - protein, 310 aa, unidentified
MDCFVGIDVAKTTLDLALEPGGEAWSVTNDAAGIQELVSRLAPLAPTLIVLEATGGFEAAVAAALASVGLPVVVANPRQVRDFAKACGRLAKTDAIDARILAGFGQRVRPAPRPLPTEAAQLLDALLTRRRQLVEMLTAETNRLGFARGPVRRDISQHIRWLERRLDDVDGELRSAIEASPIWRTKDDLLQSVPGVGRVLSLTLLAELPELGQLSRREIAALVGVAPLNRDSGRRRGKRLVWGGRAPVRAVLYMSALAATRANPVIRAFFERLRAAGKPFKVALTACMRKLLTILNAMVRHDTRWRLATA

SEQ ID NO: 503156 - protein, 345 aa, unidentified
MQSIKFIGIDLAKSVFQLALADSRYHVIKSLRLSRSQFKAYFNNHPPTHIIMETCGTAHYWARVFQQQGHQVSLLPAQYVKAYVRRNKTDHHDAVALIEAIRNHEIHCVPVKSEYQQVLQSLHRLRSQYMRTRNARINAMRGILRELGFIVPMGPVAALREATNALSQLPAIITPAICAVIEEVETLQQRMKGIEQQLKSEVKADPVLQQFMQINGVGLLTATATRAAVQSPEQFKNGRQFSAWLGLTPREYSSGNHRYLGRISKRGDKYLRTLFVHGARSVMVRCKVQQRSGKPLTRLQQWAIQLEQRVGHNKATVALANKMARILWATWMHQRDFDGDYTQAA

SEQ ID NO: 503157 - protein, 352 aa, unidentified
MLIIGCDFHPGFQQVAIFDNLSGEIQEKRLQHRAEAEQFYGSLAGQEVRVGMEACGHYPWFERLLEGLGIELWMGDAAQVRASVVRKQKTDRRDAEHLLQLLLEGRFPRIWVPSLEVRDVRQLLVHRHKQVQARTRTKNQLQAMALSCGVQKKYKLWTKAGRVELEQLPLLRYAAQRRKRLLEALDGLEAEIGELDRRVEEEARRRPEAELLMTHPGVGPVTGLAMVLTLGPAERFGSAKQVGSYFGLIPSEESSGGKQRLGKISKQGSSFLRFLLVEAGQTAARLDPQLKRFYRRLAARKNRSVAKVAVARKLATRLYLMLREDWTYAQLCQAVMQVSPSHSVAGESEPSA

SEQ ID NO: 503158 - protein, 340 aa, unidentified
MKFVGVDLHKHVIKLCVIQVVRGERKIVTRRHFQCCDTEGIRTFFEGLGCFQAVVEATAAYEWFFLLIEDQADRLVLAHPKKLRVIAESTRKTDKIDAEVLALFLCLDMIPEAHRPSPRIRQYRVLVRYRRCLSRRITSIKTKLRNKLAHYNADIAALFTRRGMKYLAELAVSASDRFEMNSLQAQLKLLEQQLRETAGELEKFAETAPLHEREARDILASIPLIGPVTIDVVLSELSDWTRFRNARKVVDFAGLAPGVRESAGRRHELSITKEGSRVLRWALIQAAWRLAYKSPRWKRLHRRLIENTGSSKKAIVAVARHLLCVMFSMLKSGQSYRLTA

SEQ ID NO: 503159 - protein, 315 aa, unidentified
MTTPTERFIGIDVSKDTLDVHVRPDHTARSFANTPEGIDALLAWARSLAPTLIVLEASGGYERDVLTALSLGALPVGLVNPKRVRDFAKACGQLAKTDALDAAVLAHFADTLRPPVRPLPDADARKLQALLTRRTQLVGMKTMESNRLSGLSDSRIRRSVQNMIRALDRELRQADKELGAAIQACPAWAAKDELLQSIPGIGDGVSRTLLAEMPELGTLSRGQVAALAGVAPVARESGTFKGKRLIAGGRAFVRTMLYMASQAARQGNATLRAFSDRLKAAGKAPKVIRIALARKLLVIANAVLRDGQPWTPKTA

SEQ ID NO: 503160 - protein, 349 aa, unidentified
MTTTVETARRITGGADTHRDQHVVAALDERGAELGVRAFATTPAGHRALLAWLRGFGTVEGVGVEGTGSYGAGLARFLHTEGVTVVEVNRPNRQLRRSHGKSDPVDAVAAARAAQSGQATGEAKTRNGAVEAIRALRVARRSAKHGRTTAINQMRALLVSGPDDLRETLRGSTVSKLVTTAARFRPADPTTAAGATRFALRELARRVQSLDAESKRLDALLESLVSATAPQLVASYGVGTDTAGALLVSAGDNPERLRSEAAFAHLCGVAPIDASSGLTSRKRLNRGGDRSANHALWRIVMVRMVFDARTRAYVARRTAEGRSKREIIRSLKRYVARELYRCLPRPQTA

SEQ ID NO: 503161 - protein, 412 aa, unidentified
MQVIHRVCCGIDVHAKMLVACLILANGEKQKRTFSTMTAELLQLRDWLVAVQCTQVAIESTGVYWKPVFNILEDALTVILINPEHAQALRGRKTDVKDAEWLADLLRHGLLQPSFIPPPVIRELRELTRYRDSVVREQASVANRIQKLLESGNLKLGQVASDALGVSGRMILKALAKGESEPRKLAALARGKLKEKSLSLEQALQGRLTVNQRFVLGELLSRWEQLEAADARVTGEIDKYVQANPKLARAREQLDTIPGIGPRVAEVIMAEIGIEMAAVFADAAHLASWAGICPGNKATGGKRLSGRTRKGNTYLRSALVQAAWGASLKKHCYLSSQFQRLVKRLGRKKALVAVGHSLLVIIFHVLQNDQTYTELGGDYFDRRHVEQQRDYYVRRLQMLGLKVTLEELPQAA

SEQ ID NO: 503162 - protein, 353 aa, unidentified
MNNRKYIGMDVHQASISIAVSDAAGKVLMECIIETKAATVLEFIQGLRGSLWVTFEEGTSAAWLYDLLKPHVTKVVVCDPRKNALLKAGNKNDRVDARKLGELLRAELLTPVYHGESGVRTLRELSRGYLAVSKDLTRVMNRLKAIYRSWAIPCAGQQVYSPRHRAAWLEKLRETGVRRRAEQTYQQLDFLMGIRKETRKELLAESRPHPARELLEQIPRLGPIRVALLIALLQTPHRFRTKRQLWNYCGLGLRTRSSGEYRYTGGQLQHARKPPALRGLNVNHNHDLKHLFKSAATQAGNDPLGAFYQNLLAGGMEPPMARLTLARKIAAIALKVWKKGERFDPAKLKQQAA

SEQ ID NO: 503163 - protein, 377 aa, unidentified
MKRIKFVGLDVHAETIAVAVAEQEGELRSLGVIPNREESIRKLVKKLGPVEQLRFCYEAGPTGYVVYWQLTAWGAKCEVVAPTLVPVKSGERVKTDRRDALKLARNYRAGELTPVWVPDAAHEALRDLVRAREAAKKDQLRAKHRLGKFLLRHGRRPPTGVKPWTQNYLSWVKNEVHFEQMAQEATLLDYLHEVEHAEARIARLDLAISEAVKLTPPKMRAVIEALQALRGIAQVAAVTIVAELGKVSRFKGARELMGYGGIVASEHSSGESTRRGSITKTGNAHLRRVVVEAAWAYRHRPNIGETLRKRQEGVSEEIREIAWRAQHRLHARYRKLMARGKVKGKVVTAIGRELLGFVWAIGVQAEAAQKKTEQRAA

SEQ ID NO: 503164 - protein, 457 aa, unidentified
MSAPKKVKTKSTRKTDPQLPTFHSHAAGIDIGAREIWVAVPPGSDPKPVRSFDTFTDDLLKLRDWLLACGVQTVAMESTGVYWIPLFQILEAAGLEVCLVNARHCKNLPGRKTDVQDCQWLQYLHSVGLLRASFRPPEYVCAVRSLLRHRSRLVRCAADQVRLMHKALTQMNVQLQHVISDLVGLTGLAILDAILAGERDPVQLAKLKDHRIKASHDTLARSLRGDWRPEHLFTLSQSHQTWQHYQKQITDADEQIELQLATWDARLDVQAQPLPAPRTTHRTAQRNEPQFDARSECYRVLGVDLTALPGFQAPTALVLLAELGPDFAQKFPSAKHFASWLGLCPDNRITGGKIMSSATRDVKSRVAETLRLAAQSLWHAQNYFGELYRRWKARLGTPKAITAMAHKLARILWHLLKHRQAFNPEVFRKEEEKMRRKKLARLQNTAAALGYRLIASQ

SEQ ID NO: 503165 - protein, 338 aa, unidentified
MEQVITIGLDLAKNVFQVHGIDAAGKVLVRRQLRRGDVLRFFGGLPRCLVGMEACATAHYWARELTKLGHTVRLMPPAYVKPYVKRGKTDVADAEAIAEAVTRPTMRFVAVKTADQQAALMLHKVRDLLVRQRTMLINALRGHLAEFGIVAARGPGGVTAAIISLHEAQDSLPELARVALHGLIDQLRIVRDEIARVEKRIVAWHRASNASRRLATIPGIGPITASAIAAAVPDATLFQSGRQFAAWLGLTPRAHSSGGKERRVGISKQGDGYIRRLLVTGATAVIRLARQGNASKTWAAKLLERKSARLVSVALANKTARIAWAVLARNQSYVAPAM

SEQ ID NO: 503166 - protein, 317 aa, unidentified
MTQVITTTAGIDTSKVKLDVAIHGRTERWQFDNTLIGWRRLAAELSKAEVTRVGIEASGGYERGVVGHLREQAFTVLVLQPIQVKAYARVHLRRAKNDKLDAVLIAACAATIDQPRIEPDERLAKLAQHLTFVEQIEQDIARFKVRLEHVGDPRLRRMVVTDIARLKARRSAELLRIVETLRVHSDLARRLELVLSIPGIGERTALSLIIRMPELGQVSREEAAALAGLAPFDDDSGKHKGQRHIAGGRGRLRRSLYAAALPAAFRWNKALVALYARLTARGKAHNAALIACARKLLVYANTVVQRGTPWTEKQLYC

SEQ ID NO: 503167 - protein, 421 aa, unidentified
MVQQKISRKLAQVKKGTLHVGVDLGLENNAAIVINERAERLDRFRFPNDRGGYDYFLRRIEKHQQQSSAPEVMVAMEPTNYLWKLLASDLEQKGVGYRLVNAYTVKKHREGDQLDRSKDDPRDAFTIADLSRTGKCTETQLQHGAYAELRQYISLYYRLKRQIRREKQHIWHATGQLFPELTRIFKNITGETAKAMLITQAAAVEIRKMSEAEFIARVRGGFDGNRLYVSRLRATHHLAMSSVGVKYGVQALQLALKLHVESLNRLQDQEKWLLSALKVCFLSLPEANSLLSVKGIGILSGATILAEIGDPKRFRHAGQLVKLAGIQPTPNRSGRKQRSATPMSHQGRPRLRSALYFTCLRLLRVDQRFSTLYQRLQVREKNPLTKMQAVGVLMNKLLHILWALMKQQSQYKPLDTGLTGS

SEQ ID NO: 503168 - protein, 332 aa, unidentified
MEQERKTASDEVREAIVGIDVAKEKLDVALRLRSGKWKTKVVANKPAGFEALRAWLAKQGVLRAHVCMEATGVYWEAVAEDLADHGFAVSVVNPKQIKSTGEALGIRSKTDEIDAKLIGEFCAMRNPPLWQAPSASVRRLRALVARRDALVELRTAETNRLEVTSVADVRQSIEETIAHLNQQIGQIEKQIHDDINNDPTLKTQKDLLTSIPGVGDATAAKLLSHYGGALRFGSSRQAVAYAGLDTRKHESGSSVRGKSRLSKKGHSDIRRSLYMPAVVAKNSTAWGRTFAERLLAAGKPPMVVVGALMRKIVAIAYGVLKSGVRFDSALHA

SEQ ID NO: 503169 - protein, 388 aa, unidentified
MYYVGIDIAKYKHDCYICTSEGVTVLESFSFDNSNTGFKELQSALDHLDHSQQIKIGLEATGIYGKNLKLFLSSIGYDFHEFNPLLVKRFHDSLSNRKTKTDKIDARIIALYLSTGASRTYLYSSYHIEALKQLSRARNKLIRSRSDQYVIITNILDVEFPEFKAFFHNKLSDTALFLLNKYKTVDRMKRLTYQDCVLLHNKSRRIPTSSFEELRDLAKHTIGHHFNYNDLILSSALQIVNTLERQIESIEKEILAIMEELHSPIDTIPGISTLSAATILGEFGDFSKFSNPKQLCAFCGVEPAIYQSGTSFHNGRMVKHGSSELRYVLFNAVPYLVIHNITFREFFYKKLHEGKNYRVAQSHVVKKLLRVIYHLELTGESFDPTLLY

SEQ ID NO: 503170 - protein, 317 aa, unidentified
MKYVGIDVSKDKLDVFIRPDKKHFVIANNEAELIKLSLQLEEIAPELIAVESTGGYENLLVEILSGKGLKVARVNPLYIKNFAKSGGSKAKTDKLDSSIIAHYAEVYNPPVVILASDEERELDELITRRKQLIDFRTADQNRLKKVRGKIAKDIEEHIDWLDKRVKEIDEMLNKSIKESPELKKKEELLRSVPGVGEVLSKTILMQLPELGTLSNKKIASLVGLAPFNRDSGKYKGQMRIFGGRKTLRSAMYMPTWVAVKHNPVLKGFYERLIAKGKKPKVAITACMHKLLHILNSIIKHGIKWENDFLKNKADVLI

SEQ ID NO: 503171 - protein, 372 aa, unidentified
MTSLSARCSWTDRGRVSPSRANVDKGSYGEFRPSMNCKVTCAEVHRPSSFSLARSIMDHNTVVYGVDVSKAKLVVAQDDVQTLAEVDNRPESIAAWLAGLPKGAVVAMEATGIYHRLLAHLAHAAGMRVYVLNPQTLKHYAWAIGQRGKTDNCDARMIARYVAHEQAKLRRWQPPARAADRLSQLLERRHTVVGVRQTLSQSLSGLPILKAARQSLLASLERTVGRLDLLIRHEMARLPGAAALYERLKSIVGIGPVVAAQLVAVFSTLSFARAGAFIAYTGLDPRPNDSGGHRGRRSLSKHGPPLLRCQLYNAGMAAANSKVFKPVYKQLLERGLQTTEAIVILARKLARIAFALYKSGEVFDAQKHFKIA

SEQ ID NO: 503172 - protein, 341 aa, unidentified
MDIVVLGIDLGKNSCSLAGLDASGRVILRRRMRRSSVESFVNGLGRCIVAMEACCGAHHLGRVFVAQGHSVRLMSPEYVRPYVKAQKNDELDAEAIAEAATRPTMRFVAVKSQYQSDVQALHRARERLVSERTALINHLRALLLERGIVAPQGRRKLQEELAVFADEDGIEALSPRIRLLIEDLRSEWRALDERIAAFDAEFVRMAREDEAVRRLTTIPGIGTINATALAAAVGNARAFRRGRDMAAWLGLTPRQMTTGGKPRLLGISKRGNRYLRKNLIHGARAVLPYLVERETPLGRWARGLLARAHKNIVVVALANKLARIAWAVLARGRTYEAAAAV

SEQ ID NO: 503173 - protein, 391 aa, unidentified
MIYIGIDVAKDKHDCFITNSDSEVLFKAFTIFNNLDGFNDLYQKIESVMDDVTKVKVGLEATGHYSYNLLGYLIDKGLAAYVINPLHTNLYRKSLSLRQTKTDKVDARTIASMLMSDVNLKSYSDISYHNEELKSLTRYRFDKVKERAKLKSSVSRLICILFPELEKLVPTLHMASVYALLSEFPGAKQVANAHLTRLTNLLSEASKGRYSKDTAITFRDAARTSIGSNMPAKSLELKHTIKLIKELDSEIDEIENEIKIIMDEINSPILSIPGINYRMGAMIIAEIGDFSRFDSPDKILAYAGFSPSTYQSGHLYGAYAHMEKRGSRYLRYALYNAAKYVCHWDPTFTAYLAKKRAEGKHYNVAISHAVKKLIRVIYHLEKTNQQYIKAS

SEQ ID NO: 503174 - protein, 355 aa, unidentified
MSSEKYIGLDVHQATISVAVMDSQGKVVMESILETKASTILEFLAGLRGSLFVTLEEGSWAAWLYDLLKPHVTEVLVCNPRKIPLLKQGNKSDKIDARKLAERLRLHDLKPVYHGETGVRMLRELARSYLTVVKDLSRVMNRLKALYRSWAIPCAGRDVYYRRHRSQWLEKISEAGTRRRAEQLYEQLDMLQRLRQQARGELLAESRKHTITAKLRQIPSLGPIRSALAVALIQTPHRFRSKRQLWTYSGLGLETRDSGEYHYVSGQVRRRKKQATIRGLNKDYNHDLKGLFKAAALRASVLPGPFQEFYQRSLAKGIKPPMVRLTLARKIAAITLTLWKKGEDFDIDKLNSQAA

SEQ ID NO: 503175 - protein, 412 aa, unidentified
MFKIFRNNCCGLDVHKTWIYACIGITDPNGRTEYKQARFSSFSKGLRELAAWLAKYSCIEVCMESTGKYWIPVFNILEKSCFVTLAHPKYTKPQKGNKTDRKDAKWICNLFMCDMIKPSFIPSPEIRQLRDLVRYRVKLTNMLTGEKNRAQNCLTISNLKLDDVFSDVFGKSARSITNYILEHPGETFDVSPFVDPRCKTPVSEIQAAVDGAISPEQAVKLRQCLAHIDELEAHRKEIESEILQIAEPFSAVLDLLYTLPGLDKNPMTAIAILSEIGPDMSVFPSSKHLVSWAGCCPRNDQSNQKVKSRRISRAGSYLKPLLVQVANALIKSKKHPEFKERYHRIKSRRGHKKAIIAVCKMLLTAIWNMLSKLEPYNPDGFLEHRPVKQEKILTVSQALELLRLRGYTITNQ

SEQ ID NO: 503176 - protein, 380 aa, unidentified
MDVHSTNFTLCSFEPGYGFEADKIFGQTQIKEDIFNSTVKYINKLKSMRPDVDVVCGYEAGCLGYNLHRKLKAKEIESVILAPTTMAVSRNCSKKKNDYRDAITIAKCLASSAYKAVYIPDDKDEDVRDFIRMRDDHKTALKQIKQQLNAFCLRHGHHYDKTKWTGLHLNWLRKLELSKLQRETVEEYLVTYETLTSKITALDIRIEDIASEERYAEKVNKLKCIKGIKTHTALSFVCEIGDFNRFKSADKFAGFIGLVPGECSSGNTERMLGITKAGNRHLRRLAVEISNTYRRGAVGRKSAALKERQKDMPKDVVAYADKATNRCQRKYQRMMFKGKNSNQAVAAVARELCCFIWGMMTGHHSRTAQAEASVYRSELD

SEQ ID NO: 503177 - protein, 350 aa, unidentified
MCSLPVFVGLDYHDASVRVCVLDTDGRELANADRCNDWKAIAEFADRFGRPVRAAIESCCGAADLAEELVSCAGWSVDLAHPGYVQRMKQNPDKTDYQDAQLVADLERIGYLPRVWLAPQHIRELRQVVRYRLQLTEQRRATKLRVRALLREQRCRAPQGVNAWTKAWDHWLRHTAELSAEGRWVANQHLQELACLVTRIRQVEKRLEHLTANDVEVQRLQQQVGIGPVTAWTIRAEIGHFDRFRTGKQLARFCGLSPRNASSGQRQADAGLIRAANPALRAVLIEAAHRLVNYDRYWQKFAQRLRAAGKPGSVVAAAVANRWIRRLYHEMKTPSGELAVAVRSARSEDS

SEQ ID NO: 503178 - protein, 346 aa, unidentified
MKVLIGVDPHKASVAVAVVDEAKGELIERASFPQNRTGLRALERWAKLFPVRRWAVENASGLGRHLAQRLAASGESVVDVPSKLSARVRVLSSGNARKNDGLDALATALAASRNERLAAVDPEVGSEMLRLLSERREDLVAERTRALNRLHGLLRDLLPGGVAGTLSAPRAARILRGIRPQGASARLRRRLASEILRDVRALDRKIADLSGRIEAEVEASGTTLTEIFGIGPILAARIIGTVGNVARFPTKAHFASYSGTAPVEASSGEVVRHRLSLAGNRKLNYALHMVATCQARSDARGGGYYRKKIAEGKSRKEALRCLKRRVSDAVFKSLVADSQAPSCGAA

SEQ ID NO: 503179 - protein, 363 aa, unidentified
MNESMTVTVGLDVHARSIRLAAVCADELLEERTLPFDEEAVERALRRWPAVRCCYEAGPTGFGLQRHLVERGIDCFVVAPGLVPQRPGERVKTDSRDARRLARLLAGGLLEPIHVPSRELEAARDLVRAREDARLDRMRDRHRLSKFCLRHGRRLPTSSWTVARRRWLSEQRFEFAAQQQTFDTYVHAVDLVDARIEALERAVRETAEQGPWSQLVARLRCLRGIDTLTALALAAEIGDFDRFKSAEELMAFVGLVPSERSSGEQRRQGSITKVGNSHVRRLLVESAWHARRRPTVGYQLARRQRGQDAVVVERAWRCQQRLYQRWQRMAGRGKPQQKIVVACARELAGFVWAIATQQPLRTT

SEQ ID NO: 503180 - protein, 359 aa, unidentified
MQVQSNKIDFNGQNIYVGVDVHLKSWKVTIMTEKLTHKTFSQPPSPVVLYRYLAKTFPGGTYHSAYEAGFSGYWIHNKLKEFGLNSMVVNPADVPTTEKEKVQKDDARDSNKIARSLRNGDLNPIHVPSLKTLEDRGLVRTRAMLVKDMTRYKNRIKAFLYFHGIEIPEVFASTETHWSNRFLKWLESVDLSTPSGKTSLNALVTQSKNLRDTILLITKQIRELSKTDTYEKRVLLLRSIPGIGILTAMIILTEIETIDRFATIDQLCGFIGLVPSTKTSGEHEKIGDITPRGHNSLRTAIIESSWVAARLDPALNKSYHDYCKRMEPNKAIIRIARKLTSRIRFVLKNNQTYVCSVVK

SEQ ID NO: 503181 - protein, 343 aa, unidentified
MQTVTTIGLDIAKSVFQVHGVDAAGQVLIRRQLKRRYVLVFFQKLPPCLVGIEACASSHYWSRELQALGHSVRLMPPAYVKPYVKRQKNDMADAEAICEAVTRSNMRFVPTKTPEQQSGLVLHRTRHLLIRQQTSVINAIRAHLAEFGITAPVGRRGLEELLRVVADPRDKRVPELVRACLAALGSQLLSLKKQILEFDRMILAWHRCNQTSKRLNCIPGVGPLLATALVASVGDPKSFRSGRNFSAWIGLVPKQHSSGGRERLGSISKQGDRYLRSLFVGGALAVIRYAKLHGTNHRPWLTALLARRPTKVAAIALANKLARMAWALMARGERYNYPVALMP

SEQ ID NO: 503182 - protein, 354 aa, unidentified
MTRTILQESLGVDVSKDNLSWGICQMRIDLSKDFVSEGETSNDKVGFKLIEKQLKSNPSMIVVMEATGVYHEGLAYYLHSKGYKVCVMSSGRVRRYAQSLEQRSKTDALDSKVLAMLGCERRLTLWEPPSKTLRELRFLSRERSALIKERTVEKNRQHANSRSEFNSHQANKRYKKRMKLLNDQLSEIEFEMSQIVRADEELSRKVKYLESIPGVSFITSVIVVAETFGFSQFTNSKQLTSFCGFDIVLKESGAYKGKTRISKRGNKHIRAALYMPALTAIRVNPTLKPFYERLKPKKAKPRVAVVAVQRKILCLMFSLWKNECFYDAEFEQKKVARVNALATQDRVKNEFETS

SEQ ID NO: 503183 - protein, 339 aa, unidentified
MKEVSTIGLDLAKNVFQVHGVDGVGGVVIRRALRRSQVLVWFAKLPRCLVGMEACATAHYWARELEKLGHEVRLIAPAYAKAYVRRNKNDPADAAAICEAVGRPSMRFVAIKSTAQQAAAGIHRVRDLLMKQHTMLRNQLRGLMAEFGLVAAKGQRGFSALIAILVDPEDRRLPSPLREGLVAIVETLRGIDRKLEAIDRQLVQAGRENATYRHLITAPGYGPILASAMVAMVVDPGAFRRGDDFAAALGLVPRQEGTGGKTWLGPISKRGNGYLRRLLVNGATAVLKSKRAKEDPWLAKLLTSKPRKLVAVALANKMARIGWALMTRQEDFRGSLAVA

SEQ ID NO: 503184 - protein, 408 aa, unidentified
MNTLYVGIDVSSKSNVVYLMLPNGDKHSNFSVANSHEGSTQLVKRILSALTSHSLDTVLIGLEATSIYGYNLVYFLREDATLAPFNRKIHVLNPKQVKKFHDAYNDLPKNDYVDSFVIADCLRFGRINKEVYMGDYRYKALQNLTRARFFAVQNLVKEKQRFMNVLFKKYSTMTQEKVFSDTFSTTALAVYDEFESAEALANMDLHELTDFIIEKGKNRFPDPDAVAKAIQKAARSSYRLPKTVNDSVNQVLSISITSMKALESQIKEFDKAIKAQMELLPNVLISIPGIGPVYSAGIMAEIGDINRFNSQAALAKYAGLAWKQHQSGGFESEVTRLIPSGNRFLKYYLCEAAFSLVRCDQEYSDFYHLKYKEVNRCQHKRALALTARKFVRLVFRLLKDNRLYYPAK

SEQ ID NO: 503185 - protein, 336 aa, unidentified
MNELRCFIGIDVAKLKLDLALLVNGKYKSKVVANTREGHLQLQQWLLDRDATPANSRLCMEATGPYSETVATALVDRGWPVSIVNPARIKGFAQSELSRNKTDAVDAALLARFCSVMQPECWTPPPAEYRTLRAWVDRLQALKDIQQQEKNRQEAALAMQQAALVDSIQHHLDWLAQEIARIAQDIDDHLDHHRGLKRDAALMTSIPGIGNTTAAKMLAYVGDVRRFESAKALAAWLGVSPRQRQSGSSVRGRTMLSRTGHRSARTALYMPALVARRHNSALQAFGERLRANGLAPKAVVGAAMRKLAHLIFGVVRSGMPFDAQMAMPKLDVQDGI

SEQ ID NO: 503186 - protein, 334 aa, unidentified
MEKITTVGIDLAKSVFSLHGVDGAGRVVLRRTVRRDQLVEVVAGLSPCLIGMEACSGAHEWGRRFQEHGHTVRLMAPKFVAPYRKSGKNDGNDAEAICEAVSRPSMRFVPVKSAEQQALLAMHRVRQGFVVERTATINRLRGLLAEFGVVLALRSVTVRRQAAAAAEKLPELARRAIGDLLEQLRILDERIGGYDRQIESQAKLCEPAQRLMKIRGIGPTTALAIVATVGNAREFRNGRQFAAWIGLTPSQYSTGGKARLGHISKRGDAYLRNLLVQGARSVLNSAGGHQDRMSRWILELQPRRGYYRTLVAIANKNARIAWALLAKNQSLRSA

SEQ ID NO: 503187 - protein, 328 aa, unidentified
MSEITTVGLDLAKNVFQAHGADVSGRVLFRKKLRRDQVLSFFSQLPPCIVAMEACGGAHFWGRELGKLGHEVRLIPPAYVKPFVKRQKNDAADAEAICEAAQRPTMRFVPVKSEDTQGAAMVFRIRELLIRQRTQAINSLRGHLTEFGLIVPQGAANAARLIAIVEDPDNGLPAEAVATLTVLVATLSHLEDEIGKLNAEIERRAKEDAVACRLMTVPGIGPLIATAIAALAPPPTIFRKARDFAAWLGLVPRQHSTGGKQRLGTTTKMGERSLRRLLIIGANSVIVKRHFHAAAQPGTWLGGMLTRKPPMLVRVALANKMARPQPLS

SEQ ID NO: 503188 - protein, 343 aa, unidentified
MDTYIGLDVSLREISVCMVDEAGAIQLERTVAADPDAIAALVHAQASSVRRVGMECGPTSVWLWRELARRGLPVICIDARHAKAALSMQINKSDRNDAAGIARIMQTGWYREVQVKSPHSHAIRGLLNSRSLLVKVQRDLENQVRGLLKSAGLIVGRAKDGVFSARTKYLLAAHIDLAAIALPLLEAREAIHQQLVQLERRVRQLAKEHRQTSAFMTVPGVGPMTALAFMATVDDPTRFRRARSVGAYVGLTPRRYASGEVDWTGRISKCGDTMLRTYLFEAAGVLLTRVQKWCALKAWGLRLAKRSGMKKARTAVARKLAIILLRMWRDGAQFHWTAAPAGS

SEQ ID NO: 503189 - protein, 342 aa, unidentified
MTIVAGFDVHRRQITFDALDTDTGEITRGRIDATPAAVERWTARFEGREVQVALEACTGWLFVSRALERAGAVPHLAEPVETSALRGRKRRAKTDREDARWLRTLLGEGRLPESWIPPEHVRGWRSRARLRKTLVDERTQWLQRVQATLFHHGISGAPAELRSAAGREFLQGLELPADARERIEIALAMVDSLDGQLRPLESELRKLARRQTGCRALMVQFGMGELTALMTLCELGDVQRLSASRKAVRMAGIDIGVHRSDRRSRVGKLNRQGSPHLRWALYEAALSATRPKSPDHQDYLALKARGLTHTRASLTIARKLARRSFHILRELGPAALEPTTTT

SEQ ID NO: 503190 - protein, 356 aa, unidentified
MRYFKGIKKFVQDKAVFCGIDVHISHWNLCFICDDEIVEKIRIDANYVKLKALLLMSYSTARVIKIVYESGFSGFWLYRSLVKDGYHCTVTPPSKIPVDGDRVKTDRRDAMKLAKYHSAGLLKSLAVPPENIESDRRVCRKRRQLTKDRTRAKNRIKSFLALFGISKPESIRSAWSGAYLSWLDDLEFESESDRFTLGQLLKMYRHIRAQLAEVTRFIRQLSRSVKYDKNYRLLTSLRGVGLITAMTFLLEIFDFKRFANERKFASYLGLTPAQHSSGDKVRLGHITRQGNAHLRNLLVESAWTVIRYEPALRDKYERIKAPGTNGKKAIVAVARTLAIRLRRCLLEKQEYVIGLC

SEQ ID NO: 503191 - protein, 362 aa, unidentified
MLIIGCDYHPSGQQVFGIDTDSGEVFADRWIAHTGTELEEFYGGLPAGTVVGVECSGNMLWFERRLAHYGHRLRLGDAAKIRSKETRKQKHDRRDAELIARLLREDQFPDLQWVPTLAERDQRQLLMHRHKLVRMRTQVKNQLQHIALNQGQQKKRQLWTKAGRELLESLRLEPWTARRRDDLLRWLDVLDRDCASLEREVEQAAEARADARLLMTHPGIGPVISLAFVLTIGSIERFQRSRELVSYLGLNPTEDSSGERRRLGGISKQGSGFMRLLLIQGAQTAVRGDEDLRRQYRRLASKKHRAVAKVMVARKLAVRMFWMLKTQKTHAELVRMRGSSSHPGVGKTEALSERPASPRIQP

SEQ ID NO: 503192 - protein, 364 aa, unidentified
MKKNSIAKRRREAARKLTVGIDLGDRSSRYCILDEEGDMLSEGSFATTRSGVEKVFESMPRCRIALETGCHSPWISRQLTQLGHEVIVANARNVQLISQSTRKDDRLDARTLARLVRIDASLLCPVRHRGAEAQAHLAIIRARDVLVRTRTLLVNAARGLTKSFGERLRKCGTEQVGLHLAAELDLEIQTVVGPLLAEVETLNRRIAEYSSQIENIAEEHYPEVAGLKKINGVGTLIALTFVLTVDDPHRFRRSRDVGCYLGLRPGRRNSGNSEPQMHISKEGDSHLRRLMVQGAHYILGAFGTDCDLRRWGLKLAERGGKNAKKRAVIAVARKLAILLHKLWISGEAYDPLRNSNRAAQKAAA

SEQ ID NO: 503193 - protein, 345 aa, unidentified
MNKQVFAPQATVFCGIDVSAASLAVALIAPDGSLARREFSNNASGHEALSVWLKKRDSPVRVSLEATGIYSLDLALALDAEACVELMVLNPKLVNRFQQTVCRSKTDAADAMVLAEYSRRMPFCRWQRPAASHLALRTVSRYIGSLVVEQAALKNRLCSAESTATTPRAVRVDLKRSLAAIERRVKRLRVEALKLVESEVELRERYQLLTTVPGIGPVNALTILSELILLAPAMTVRQWVASSGLDPVHRQSGTSLNKPSRISRAGNRRLRAALYMSALSASRYDRHLAAFYRALRARHKTGMQALMAVARKMLHAIYGIFKSGTPFDGQRLFPNIQTEVESSAG

SEQ ID NO: 503194 - protein, 326 aa, unidentified
MQTILDNCCGMDVHKDSVVACILKTHTPLAIEHNKEDVEKEIRVFGTFPDDLAQLRSWLESENCHHVAMESTGVYWQPIYEALEDACGGKMDIKVVNARHIKNVPGKKTDIKDAEWIASLLRSGLLAGSFIPAQEVRELRQMTRYRKNVVQDINTQKNRIEKTLQQAGFKLSTFLSDIFGVSGRNLIRVLIKQGRLYPSDVENETRRISKEKKAEIKRAINGQLTQKQRCFLQLQITLLDGLSAHLDTIEQSIAELSASFNCDIDRLSTIPGIGITSATAIIGEIGTDMSKFPTPEHFCSWAGVVPGDNKSAGKKKVQESLLATLT

SEQ ID NO: 503195 - protein, 405 aa, unidentified
MKVYIGIDWSENKHAVCFLDEQGEVVRVQQIAHTMSGFRQLDQARQSLGVGRQEVIIGLETAHNLLVDYLWDQGYEPIYVLPPNAVKSAQTRFRQSGAKDDHWDARLIADLLRTDQQRYTPWKPDQPLTRQIRAEVRLAQQLGRELIQNENRLRAILLRYYPAALDAFPHLDSVVGLAFLQAYPTLEQAQALRFEQLQLFLRQHHHTQTRAWPSLYAALHADQPRADPHLDAAYAPLTVAQAQILETLLRSRNACLTRLEKLFPLHPDHEIYDSLPQAGTLLAPALLAKLGDDRARYPTPAILQAVAGTCPFTKRSGKHAYVLFRQACDRDFRHIVQQWARLTLNVSPWAATYYHIVRPHCRTDNDAFRRLANRWLEVLWRLWVDRKPYDEALHLKQHTLRNQIH

SEQ ID NO: 503196 - protein, 395 aa, unidentified
MFYLGIDIGKFVNAFCLLDSSNSEKDIFQLPNTKDGFLKLIERLNELVPESKYVDLTVGMEATGHYFLNIYEFLLSCGIGSDNIALLNPLQVKSFRNSNLRGSKSDNVDAERIATLLHFGDYNRCNVSTDELMSLRELTRFRADLTANMGNLKRKIIAVVDRIFPEFGKVFSNKFGKTAMSLITDYPTPEEMAELSLDDLTKVIKKISKRGISKEKIESLHSSASNSIGISFGKEAFKFELDFLIEQLKMLQRQVDKLKTEINSIVSGFNSPIFTIPGIGENTGPAILAEIGNISNFSSSAKIIAFAGLDPKLRESGNYQGRTPISKRGSKYLRNAIWYSALTAVRVEPSFKEAYQRRRDQGKSHRYAITASANKLTKVIYHILKNNCSFDPELV

SEQ ID NO: 503197 - protein, 448 aa, unidentified
MAPHEGSAAVAIGIDAAVVANHHIVVRRPQAGRAGEVVDDFSSGPTLAGLDALAKRLSPWPGAMEVAEPTSMTWLPLAVTLEKAGVELALVGNRHSARLRSALAGKNKSDPIDARVLSRAGEFFDLVPARLPTAPELALRRAVQRRGKVLVEANRCLRRVISLARWAFPDVWNACSGSRATAIGVLGRWPRIDVLARARTSSIIEVVAEHTRGVSDVERRAVAIRDGARRWSEFWDGRLDFEALGWEVAELIADLTAGEERVERAGLQAQHFWQRIYRDDPLLLSVPGMGPRTAPTVRAFFGDARQFESAKQAQAYVGLNPSNWSSGQTASPSRAITKEGPSVLRLAFYQAANVARTRDPQLAEFYQRLMVERGHCHTKANCAVARKLVARTWSTLTTGTIYEMRHVDGSAVTRAEGARLAASYAVAAEVRRRSRAQSAATHRGRLTR

SEQ ID NO: 503198 - protein, 395 aa, unidentified
MNYLVGIDIGKNSHFFSVVDKSSGEILMNPVSFKNNKEGFVYFINSLASYPKDDILIGMEDTGHYHFSILKFLLDLHFHVALINPVTTDLTRKLDGSITKNDMLDTLTICDVLASPRRKKNYRITTVDSFDLYEQKQLTRHHHNLKEELNVYCNRLQKSIDLVFPEFNSLFRSKYGSVYMNVLKTFGSAKKIAETDIRTIRKCFDIKGRGRRISLTPEKLKEAAKNSIGISYFAEEIQIRHLVCQIELINEQIDEIDKKIEEFSIQNNSPIISIPGIAHFSGTSIIAELGDINKYSRPSQIVKRAGVAPYHYESSQFNAEHTAITKKGSKYLRKTLYQVITPVIKFNKVFKDYYDLKRSQGKSHRCAQGHCVRKLLRVIYHLLKTNQPFDASLLK

SEQ ID NO: 503199 - protein, 315 aa, unidentified
METTTPTTEVTYVGLDIAKDRLDYTVDGIRCDHVPNTPSGHEKLLGVLAKLRGVRVICEATGGYERAVVAALLLAKHEVCVTNPGRVRAFAHAEGLLAKTDRLDALLLRRFGEKVQPRLHAPMDQAAITLRELLDYRRQVSEQLVAVRNRLELAGPVLRARLDGQVTFLEKELTATDQLIQDHIDHDDTLSRKAARLRELKGAGPVLAATMLAYLPELGEIESPQLSALVGVAPFARDSGRSHQARHVRGGRGLVRRVLYMAAVAATRHNHVLRAYYTRLVAAGKPKMVALVAVMRKMLHVLNRLLADPNFVLVQ

SEQ ID NO: 503200 - protein, 408 aa, unidentified
MNAVGIDVSKGKSMVAALRPMGEVALLPQEFLHTEVGLEQMAYAIIALGENTRVIMEATGRYHEPVAAALHEYGIYVCVLNPLFIKQSGGGSIRKVKTDKADAMKIAKYGLDNWVDLREYTPMDTVRQQLKLCSRQYNLYMKTVVSLQNNLISLTDKTFPGVNELFSSPERADGHQKWVDFVMTFYHCDCICRVSEKAFTERYQKWCKRKGYYFSAEKALDVYAGSCGHFTTLPKNDNTKLLITTAAQQLLAGKMTLAALRTEMTRLAKQLPEYDIVRAMYGVGETTAVQLMAEIGDVRRFPRRSSIVGFAGVDPAVDQSGKHSAKSVPTTKRGSPHLRKTLYQIVCTYLKKYPVDEPVYQFLDKKRSEGKPYFVYMTAAQNKFLRIYYARVKECLEAFDARQNSAQS

SEQ ID NO: 503201 - protein, 338 aa, unidentified
MKLYGGIDLHSNNSVIALLDEEDKVAYRRRLANDLELVLSELTPYREAVEGLVVESTYNWYWLVDGLMAAGYRVHLANTAAIVQYEGLKYADDDTDARWLAKLLRLGLLPEGYIYPKEERAVRDLLRRRSKLVQQHTANLQSIQNLMARNRGRSLSANRIKRLTYEEVDALLPDADLALAVKGNLAVMRTLEGVIGLLEKRVKSRIRLRPQFKPLLTVSGIGEILGLTIMLETGEIERFAKVGNYASYCRCVGSEHLSNGKRKGRGNRKNGNKYLAWAYIEAANFAVRYNPQIKRYYQRKCARTHRVVAIKTVAHKLARACYYILRDQVPFDVNRAFA

SEQ ID NO: 503202 - protein, 343 aa, unidentified
MKLFVGLDVSLEKTAICVISEHGKIVKEAQVASEPEALLRWISDQDGTIAAVGLEAGPLSQWLHRGLSEAGQPVVLMETRQVKGALKAMPIKTDRRDAEGIARLLHLGWFRPVHCKSVSAQEVRAVLSARKAVQQGFITLEMSLRGLLRNFGLKVGTISRGRFEQRIRELAAGNPMLVAATEPMLSARSALRRELAGLERHVRQLAQEDPVCRRLMSMPGIGAVVALTYRSAVDDPDRFTSSKKVGPWVGLTPSRNQSGERDISGGITKAGDVNLRRALCQAATVMMHRGRATWLRTWAAKLARRRGAKRAMVALARRIAVILHRMWKDDIDFRFDTPVINAD

SEQ ID NO: 503203 - protein, 354 aa, unidentified
MIIIGVDYHPSFQQIAFCNQDTGECGERRLNHSDGEAKRFYRDLQQPGIRVRVGMETTGYSRWFEQLLAELGFEVWIGNAAEIKTQRVRKQKTDRNDARLLLKLMREDRFPRIWVPSPENRDLRQLLWHRHRLVQMRTRILNQLQALAMNEGRHWKMKLWSEQGRAELEKLALAPWASRRRQELLELLDRLHPTIEDLTAAVEQEARKRPEVLRLMTHPGVGALTALAYVLIVGTPERFRRGKQVGSYVGMIPKEDSSGGKQRLGHISKQGNSLLRFLLVEAAQAAARINSEWRRRYVHLAMRRHRSIAKVALGRRLGIRLYWMWRNGCEYSASLEFGSHAGQLGTGHGVTAAP

SEQ ID NO: 503204 - protein, 342 aa, unidentified
MKNTMIGVDLAKSVFQLHATSLTGELKFRKKLSRQGFVRFMEEHGPAVVVMEACGGANFWAREMVRLGHDVKLIAPQYVQPFVKRQKNDAADAEAIVIAAQRPEMRFVEPKTEEQQARAVVFRTRERLLYQRTELVNVVRSILFEHGLTFPTGFGQIGRIEAALHDPAIVLSGIVRTECLDLLQQIVEKTNRINAKTQMAKELAKDAETARRLQTMPGLGPITALAIETFAPPMETFKCGRSFAAWLGIVPRQHSSGGKARLGRISKAGQADIRRLLITGAMSRLNWLGRKRIQPGSWLAKMLDRKPRLLVAIALANKMARAIWAMLTKGEDYRDLAHAAAV

SEQ ID NO: 503205 - protein, 376 aa, unidentified
MNKCHSNTELSSHEGTRSQFNGGKCAIKSAVGRMRPVCALGIDVHQDFYVVVEQVDGTNPKPPQRFPKQAFLRWAARLKENTGAEVHAVYEACGFGFSLQRQLSSLGVQCHVVCPQKLDEQNRRVKTDGLDAKALVLKLDRFVQGNRSALALVRVPTEEEEQKRAIHRQREQLVKARKQLEAQGRSLMVNHGLEPVQSWWKPRAFAALPVPQWMKELLANSQPILVALQQKIASLTIQLQSSATPKQPRGLGLMTSVIIDREIGDWRRFSNRRQIGSYTGLCPGEYSSGNTRLQSCVTKHGNPRLRAALVELAWRLVRFQPNYKPIVKWRQILAKGALATGAARKKAIVAVARQLAVDLWRIKTGRLRAEELGLIN

SEQ ID NO: 503206 - protein, 391 aa, unidentified
MIYVGIDVAKNKHDCFIMRAEDQGILNHFTIPNSCLGFNELLNKLNAVARENESIKVGLEATGHYSYNLLGFLLNQPLQVYMINPILTNIHRKGLSLRKTKTDKVDAKAIAHFLMSDLDLKPYSLTSYHTQDLKTLTRYRFNLIQQRAKLKTSLSRLVNIVFPELETLVSTLHLKSVYALLEAYPGAQSLAKAHINRLVRLLKTHSKGHLAQQSARGFRAAAKTSIGAQSPATTLELKHTIQRIRILDEQISQAECEIKRMMTQSYHTLLSVPGLGYYMSAMIMSEIGDINRFSSADKVLAFAGMVPTVHQSGQFTSNRAHIEKRGSKYLRYALFNATKYVCIHDKTFADYLAKKRAEGKHYNVAITHAAKKLMRLIFALIKSNTPYIPAY

SEQ ID NO: 503207 - protein, 413 aa, unidentified
MEVVWQRVAGIDVGKRDAKVCVRVQGRGSTPTSTTVTTWSTTMPQILRLRDHLVESRVELVVVESTSDYWRPFFYVLSEAVPVMLVKASDVKGMPGRKSDVSDAEWLADLAAHGLVRASFVPAEPMRQLRDLTRARVGLFEERTRELQRLAKELEDACIKLSAVVSDLAGASARSMLEALIGHESDPATLANLAKGRMRPKIDQLTEALTGRFNNHHRFMVGFRLSRIDRTTAEIAELDRRIDEVMEREDLVIARELLVEIPGIGRHGAEELLAEIGADMSVFPTPQALACWAGVAPGSHESAGKRHHVRTRAGNRYVKRSLGIAAKSAARTKACFLGARFKRICARRGYNKALVAVEHSMITAIWHMLSTGETYRELGGDYYQRHAPQHALKRKIRDLEAAGYRVTAVAATA

SEQ ID NO: 503208 - protein, 461 aa, unidentified
MANDDRKRRATGGEGVEGFPVLRADVAGIDVGSEEHWVCAPALTGVGREVAVFAATTPGVEQLAAWLKDRGVAAVALESTGVYWIAPHEILERCGFDVLLVDTRDLARVPGRKKSDRHDCEWIQRLYSCGLLRGAFRPGEQVCMLRTLVRDKSTLVAERGDWVRRMQKSLDQMNVRVHRAVADLDGATGMAILRAIVAGERDPGQLATLRDPRCRKSEAEIADQLTGHWREDHLFSLKQALRMYDAITETIQAYEQEILQRLEEMASVDRRGDQAPPPNNPQKARAIKQRGEDPLRQALYRMSGVDLTAIDAIGVQTVSVVLSEYGPDLSQFPTEKQFVSHVKLAPHKPVSGGKVVKRKKKPGSASGRVGAALRMAALSLRHSQTALGGYYRQVARRAGADVAVFATARKLAQFIYRLLRWGQPYVDEGATAYEKHYQLARVNRLATTAKDLGYKLVSIEA

SEQ ID NO: 503209 - protein, 343 aa, unidentified
MQTITTIGLDIAKSVFQVHGVDAAGPVVVRRQLKRRYVLAFFQKLPPCLIGIEACASSHYWSRELRALGHTVRLMPPAYVKPYVKRQKNDATDAEAICEAVTRANMRFVPTKTPEQQSCLMLHRTRHLFIRQQTAVINAIRAHLAEFGIVAPVGRKGVTELLHVVADPSDGRVPEVARACLAALGTQLLGLKEQIVEFDRLIMAWHRSNETSKRLHYIPGVGPLLATALAASVADPQTFRSGRNFSAWIGLVPKQHSSGGKDRLGSINKVTGIYLRSLFVAGALSVIRYAKIHGTKHRPWLTALLARRPTKVAAIALANKLARMAWAMMARGERYRQPVALAA

SEQ ID NO: 503210 - protein, 419 aa, unidentified
MSFKIIKNNCCGLDVHKTWIFACIGITDSNNRTEYKQARFSSFTKGLNELCDWLAKYNCNDVCMESTGKYWIPVFNILEQRSLWVTLSHPKYTKPMKGNKTDRKDAKWICDLYMCGMVKPSFIPPADIRELRDLVRYRFKLTCMITGEKNRAQNCLTVSNLKLDDVFSDVFGKSSRSITEQILQHPGETFDVAPFVNSRCKTPIVEIQAAIDGAISKEQAVKLRQCLDHIDELNKHISEVEQEILRLSDKYEVALNLIRTVPGFDKNPLTAIQVLSEIGGDMSVFPTAKHLVSWAGCCPRNDQSNQKIKSTRISRAGSYFKPVLVQVANALIKSKKHSEFTNRYKRIKARRGHKKAIIAICRMILTAIWHILSDLKPYTPEGFLDSRPVNKEKVLTTSQALNLLKQRGYFIKDDPLSVS

SEQ ID NO: 503211 - protein, 323 aa, unidentified
MIDKEGINNEAQSFVGFDVSKASVDALSLPDGEYKRFENTDCGLQQCLAWVQGKRHCLCVVEASGGYETALAGVMAAAAVPIAVVNPKHVRDFARGMGILAKSDRIDARVLALFAQKRRPPIRALPGETQRSFIDLVDRRRQLVSMRAQEQTRLTQAKGRPRKSIQAHIKWLNAAIDDVDGNLNDTLRGCELWLVDSQLLDSVPGVGKVTICTLLARLPELGHLDRAAIAALVGVAPFVRESGQWRGRRFIWGGRAEVRSVLYMAVISAIRCNPVIKAFYHKLLAAGKAPKVALTACMRKLLTILNCMMRTRTPWNPPLAQNT

SEQ ID NO: 503212 - protein, 436 aa, unidentified
MSLCGRLGPVFLSSAVQTGRYPGTRMSVDPVYKVARSGARVEEMRWRDRTVIDGILGIDVCKNTLDVSISSYTKVRTKSFTNSPDGWRHLLDWLIAQKIQRVHACLESTGRYSLGIACALYEADHVVSIINPAQIRDFVRTKLGRNKTDGVDASHIREYCELFKPSPWAPPSKAHRRLGELQTIRSGIIAGLTEWKNRKNSGIVDAEAQALADATISHFTSQLGAVDKAIALTIDNDCDLQSKRDLLLSISGVGETLAGVVLAELPGPDVLRSSAEVVAYAGLNPRQHQSGTSIDRATRISKIGNAVLRAALYMPALSAMRYNSAIVALVTRLKSRGRLKPKQIVVAAMRKLLVLCFGVLKTGRPFDAAIAMGGCATSRSLSHGGHRLEAEAEVKFRSPKGCAAARGLDARLRLQHPSCHRETLHSQQLRSIKKSH

SEQ ID NO: 503213 - protein, 332 aa, unidentified
MLYAGVDLHRRFLVVAVEDGRGEVKHQERFECREAGRIREFFSSLGVFRAVIESSSSYRWLYDLLSEYGQVVLAHPYRLRAIVAGRAKTDKLDAAMLAGLLRVDMIPESYVPPVDYQALRDLARNRARLVGEGTGAKNELHALLGRANRHSPYRNAFCQRGRHWLGALDWSPVYRDAAGELLRRLAHFEAEVRLVDERLEELAGHFPEVEALTCLYGVGRYSALLIVAELGEPWRFRGPRQVGAYAGLTARVSQSGERARYGSISRQGSKWLRWILVEAAMKLVRQDRQLGNFYQRIRKRSGAKVARVAAARKLAEICWKRLMKWHRERRAA

SEQ ID NO: 503214 - protein, 415 aa, unidentified
MEVLYGTCCGVDVHKKLLVVCLRSGRKSELRNFGTTTQELFDIANWLKSSDCEMVAMESTGSYWKPLYNILEVMEIPAMVVNAQHMKTVPGRKTDAKDAEWIADLLQHGLLKASYIPDKDQRELRELVRYRKSLIEDRGRELNRLQKMLEGANIKISGTIKDVNGKSGRNILNRIVNGEKIDGKVYDEMYTKGEISHSLKCTREQLIADLNGVLSVLQRKMMKELLRHLDELDNHIKHLDDDIDQFMTPDETTASKMIQDIPGIGNASAQAIISVIGTDMSRFPTDKHISKWAGLCPGNNESAHKRKSGKTAKGNKVLRTTLVNCAHSAVRVKDSFFSAQFARVSTHRGSKRAYVAVAHSMLIAIYHILSEGTVFKDLGSNYYNQFNKERKANSMLKKLKALGYDVTIATAAETA

SEQ ID NO: 503215 - protein, 375 aa, unidentified
MGDHNEAFVAFDTSKLRNAVAIAECGRVGEVRFFGEIDNTAEATAKLVRKLAGKYERLTFCYEAGPTGYGLYRQISSLGHGCSVVAPSLIPKKPGDRVKTNRRDAVSLAKLLRAGELTAVWVPDEGHEAMRDLTRARETAVNDLRSKRQQVSAFLLRLGRHYPQMRKTWTKAHLNWLASQKFEYPQQRLVFEEMMLAVRQAQERLLRLEEAIRGAVPEWSLAGVATALMAMRGIDLISAATLLAEIGDLSRFRTPHELMAYLGLVPSEDSTGDTVRRGSITKAGNTRARRMLVECSWSYQHPPRVGAHKQHKVDAAPPAVRQIAWKAQCRLYKRYRALIRRGKLKTVAITAVARELTGFIWAINREITTARAAAK

SEQ ID NO: 503216 - protein, 350 aa, unidentified
MLIIGCDYHPSFQQIAFVDTDTGELQERRLEHREEAEKFYRELAVQGMKVRVGMEASGQARWFERLLAELNIELWIGDATEIARKRERKQKTDRQDAQHILHLLLKDDFPQIWVPSWENRDLRQLLWHRHRMVQARTRIMNQLQAVALNEGVRCKKRLWREKGREQLESFRLAPWASRRRHDLLEWLDRLNPTIGALSQAIEQEVEKCPEAQRLRTHPGVGPLTALAFVLIIGKPDRFQCGKQIASYLGLVPLEDSSGNRRRLGHITKQGNSLLRFLLVEAAQVTARSLPEWRSKYVHLTMRRGRKIAKVALARKLAIRLYWMMRKGWDYEQLKKFGSHAGQPGNRDGVK

SEQ ID NO: 503217 - protein, 322 aa, unidentified
MAMLSFGGIDVSKDRLDVVVLPEEECSSVPNDAAGWAELVERLRGFSITAIGIEPSGGYERGAMRALLAAGMPVRQVNPFKLRQFARASGVLAKNDPLDARMIASFVTIMPTRPAQRQTPAAERLAEMLAIRRQLSAEKVAAENASRLLEDAMLQRLSHRRIVRLAADIDLLDKRMVEIVATDDALVHRYRLLTSTPGVGAVLACTLIALLPELGRMSRKQVAALVGVAPYAFESGTLKGRRCIWGGRAHVRQVLYMAAMSASNWNPAFKTFHDRLKAAGKLPKVAIVAVMRKMITTLNAMVRDDVIWADRLTGRHSVPTAR

SEQ ID NO: 503218 - protein, 419 aa, unidentified
MAFKILRKNCCGLDVHKTWIFACIGITDTNGRTEYKQARFSSFSNGLRDLADWLAKYSCSDVCMESTGKYWIPVFNILEKTCWVTLAHPKYTKPQKGNKTDRKDAKWICDLYMCGMVKPSFIPPPDIRQLRDLMRYRTKLTNMLTSEKNRAQNCLTVSNLKLDDVFSDVFGKSSRSIIQHILDHPGEHFDVSAFVDRRCKHSVDEVQAAVDGAVSREQAAKLKECLQHIDQLNEHRNHIETEILRLAEPYPYQLELIRTVPGFSASPMTAVALISEIGLDMSVFPSAKHLVSWAGCCPRNDQSSKKVKSTRISRAGCYLKPLLVQIANAVIKSDKYPECRERYRRIKARRGHKKAIIAVCRMLLTAIWNVLSKLEPYSAKGYLEDKLTEHSVVISKAQGLELLRKRGYIFKDELSSASG

SEQ ID NO: 503219 - protein, 380 aa, unidentified
MKKNNIARLQLKQKQIRGMAAKQRLTVGLDLGDRYSRYCILDEAGEKASEDKLPTTKTGLDALFGKMSPCRIALEVGTHSPWVSRHLAGMGHEVIVANPRKVKLITQSVKKNDRMDAEQLARLARVDPKLLSPIHHRGPEAQADLAVVRARMTLVDARTELINSARGMAKPMGERLPKCDADYVKESLADGLSAAAQTAIRPLLKSVEEINKQIQVYEQRIGAIAERYPEMKVLKQVHGVGTLIALTYILTIEDAQRFAHSREVGPYVGLTRKLKDSGDSQPELGISKSGDELLRRLLVQGAHCILRQGAPDSDLKAWGMARLQSGGKPGKGSKKAKKKAVVAVARKLAVLLHHLWVTGEVYDPHYNRKAAAKSTAKAAA

SEQ ID NO: 503220 - protein, 348 aa, unidentified
MIVIGIDPHKSTHTAVAVDGTGRKLGEKTVAARSTGHLELVRWAARFGERTFAVEDVRHLSRRLSTDLLIAGEAVVHVPPKLMAGARRSSRERGKSDPIDALAVARAALREDLPAAVLDGPEREVRLLVDHRDDLVAERTRMQNRLRWHLHELDPGNEPVARALDRAVILDALAERLAEAPGTVGRIARELVVRIRELTATINDLEREIAGFAATLSPTLLELVGCGSLGAAKLVGETAGVGRFRSAAAFARHNGTAPLPVWSGNTERHRLSRTGNRQLNLVLHRIAITQIRLGGAGRAYFDKRLAAGDTKAEAIRALRRRISDEVYRRMGHDERLRATPRATLAAAA

SEQ ID NO: 503221 - protein, 428 aa, unidentified
MPSLSTGVEEHAAQERFSQKARTPRWYAGIDWANAHHDAMVIDEKGRQVGSLRIAHTPAGMQQLKTFLEQIIGQAPKEEMACIIETSRGLLITSLLEAGWRVYPVHPKTVDRRRAASGAKTDLIDAYLLAKHGRAELADLRQLKPDSPLVAELKGLTRDQDSLIQMQTRLVNQLTACLKAYYPVALTLFGKLQQRSTLLFLQAYPTLEAARSASLSQVEALLKTCRYPGAAKAASKIVEQVKEPCLQSDTVTTRTKSRLMLALVRQLLPVIEEIATYDEEIERLFLSHEDSEVFRSFPRAGQHLAPRLLAEIGDDRERYQDAESLAALSGSSPVIFQSGTYAKAHRRYACSKPLRNALQQFAWQTTLSEPWAADYYQRKRAEGKSHTKAVCALSCIWVRIIFACWKKRKCYQASTFEAARLAHQRLAA

SEQ ID NO: 503222 - protein, 333 aa, unidentified
MFNNEVYVGLDYHQKFVQVCVLDSEGQVLGNRRCDNHWCRIADYANGFGRVRRAAIEACCGSADLADELVEEAGWSIDLAHPGYMSRMKRGPDKSDFTDSRLAADLTRVGYLPKVWLAPHAVRELRRLIRFRQEQANQRRNTKLRIRALLREQRLTAPVRAWTRPWFAWLENEAALSEQGRWVIEQHLKQLTWIGQRLTDVEERLEEATKDDPVVAKLRAQRGIGPVTAWTIRAEVGRFDRFATGKQLSRFCALSPQNASTGGNGADAGVIKAGSRTLRAVLIEAAHRLSIHDTHWRAFRRKMLAAGKPGSVIAVAIANRWMRKLFYEMNEAA

SEQ ID NO: 503223 - protein, 418 aa, unidentified
MKEEENARPPRRYVALDIHKHYCVVAGVNRDGQVVLQPVRVEHADLEGWLQKNLEGTDHVVIESTTNAWHVYDLLEPLAERVVVANPIKVKQIATARVKTDIRDTLILARLLAANLVPDVWVPPVHVRQMRQLLSQRRQLVETHTQILNRMHSVAHRHHLKHERGKRFNEQNTGWQKDPSLSKIEQFQLELEMENRKYLEKQIERISLEVGKLCHQKPWSSGMAYILSLPGFGMITAMTVLAAIGEIERFETPKKLASYSGLTPGLEQSGTKNRGKGITKEGRRELRWALVEAALQAVKSDPLMKRRFDELQKRMHRNQAIVAIARHLLELIWYVLTRRQPYRGFTQERIAYKYLSWSWHVKEEARHGLTHQQFARYYLMKIGLGKELTRIALDPKHPYRLASEAEVLALCPELRQIE

SEQ ID NO: 503224 - protein, 360 aa, unidentified
MKDTTIAVDLAKSVFQVAVSHKPGRVDAERRLSRERFLEYLAKQPPATVLLEACGSAHHWARQLQPFGHTVRLLPAHDVHRYVRRSKTDRTDAKALLEADRNEEIHPVPVKTIEQQSIAALHRMRSTWLATRTSRINTVRGLLREFGIVIPVGAQHVVPQVRELLASSPSVPDVLRTSLSQACDEIQALATQMRAVERQLIVLARNRDDLTLLQTIPGIGVLTATALVALVGDIHRFHSSREFASFLGLTPKEASSGCRRRLGAISKQGDIYVRMLLIHGARSILLRAHGASAATAFQLWARALQKRRGHNVAAVAVANRLARIIWAVWSHQRPFAADYQAPRTTTSIHAAHQEDCSESK

SEQ ID NO: 503225 - protein, 354 aa, unidentified
MRRYSKQTWKGKHLFMGIDLHRKSWHVTIRSEDDLILFSNNIGGRWEDLERLLSRFSDAGQISVVYEAGYFGFWVYDRLIEYGVDARVTPPHLIPQRSGSRVKNDRLDSGSLAKHLQSDQLDAVYVPTVEERAHRQVSRRRRQCIGNRVRVQNRIKAELRVNGIELPRESSGKWSQVFVDRLRAFRFQDRYQQECFQTLLNEFDFQSAQIEKQTNLLKELSKSDGYQDRVEILTSTPGIGWISAMELLLELQDVARFRNADQLAAYVGLTPSQFSSGENIRFGHITRQGKSSLRALLVEAAWRVIKKDGGMREKYDRIKTRAGAKRAIVAIARMLIIRLRRILINKEPYVLGLV

SEQ ID NO: 503226 - protein, 386 aa, unidentified
MTLFVGIDVSKYKHDLAILDEHGEILSKHFRFANTYQGFQKLKEHLETLELPTYELHIALEDTGHYADNLIAFLQNIGYPTFTYNPLLIKEFVKSLTLRKSKTDKKDALSIARKLLAAPTPERYIVKPQLKELKELTRYQNRLIHERSKNKTLYVRTLDIVFPEFAKIVKNVHNQFVYDLLSKYPSPQKIKRAHFQSLLTIKRLTADKIKQIQEAAHLTIGNSSLALQLELTQLIDMIRIQTIQINKVQEQINHLMTEIDSPITSITGIGQRLGAIILAEIKNIHNFKTPSQLQAFAGLEPSIYQSGTMDITGHMVKRGSSYLRYALIQAAKLLANYSPHFRAYLRLKISQGKHYNVAVSHVAKKLIRIVYYLLKTNQSFDESKLR

SEQ ID NO: 503227 - protein, 425 aa, unidentified
MTAPTDATPVATWVAIDIAKRHHAVLIEVPDEKRRRFRMASSSEDHQALVALLHSLPQPIRVAMEPTGDCHRTLAYRLVDEGFDVFLVSSIAGARYREAMFNSWDKNDPKDASVIMALLKQGMTMRYVDPLVAGHHGLQELSKTYYQISLARTRLQHSLLTHYLPLYFPEMERYFNTSHADWFVRFLLRFPTAASVHRLDRETFRQQAWELVGRKVNKTTWLSELYDCAGHSIGLPVAEDSLAITTFRLQLERYQVLIEQRDALSAQAHQLLNGNPDYDVLCSLPGVGPVIALTILAEAGDMRRFAHHRQFLKYCGLDLAKSQSGERRGQERLSKRGNARLRFAFWFAATIAVRMRENSFRNKYERYIQNDPKNADRKRKALTAVAAKMARVAYGLVKHQTLYRCYFETALPRGSIPLSRAVGTA

SEQ ID NO: 503228 - protein, 382 aa, unidentified
MTGTEPHAWGAGLMDDITFVGLDVHKATVCIAVAEGGRGGEVRQLGVFENRPEILSKVVSRLSKGGRRLSFCYEAGPCGYGLHRLLTGYGHECVVIAPSLIPMKAGDRVKTDRRDALMLAKLHRAGELTAIWIPDAAHEAMRDLVRARATAVRVLAKARQHLQGFLLRHERIYRGARAWTLAYRRWLSTVRFEHPAQQIVLQDYIHAVQEAETRRDRLTQQIEELLPNWSMAPVVAALQSMRGVALVVAVTVVAEVGDFRRFANPRQLMAYLGLVPSEHSSGSSVRRGGITKAGNALARRVLIEGAWTYRMSARVSRKLHDRLEGLPAAVRDIAWKAQLRLCARYRRLAAMGKSKVVVTTAIAREMVGFIWAIARLAQPALV

SEQ ID NO: 503229 - protein, 406 aa, unidentified
MDVVYTHVCGLDVHKKNVVACVITPETKEIRTFSTMTDDLILLVDWIKSNGCTHVAMESTASFWKPIYNLLELEDIQTLVVNAKNIKNVPGRKTDVKDAEWIASLLRHGLLQGSFIPNRDQRELRELIRYRRSLIDERAREVNRIQKVLEGANIKLSSVASDVLGKSGRAMIEAMIAGEENPELLSELAQRRLKNKKAELQRALNGLIGNHQKLMLAAQLRHIDYLDEEIGRLDEEIKRRMLPFEEDLELLDTIPGVARRTAETIVAEIGTNMDQFPSAAHLCSWAGLCPGQNESAGKRKSGKTRKGNKKLRSALVEAARAAGRTKNTYLSSQYHRIAARRGANRAAVAVAHSILMITYYILKRRQPYIELGPTYYEERKRDTLIRQSIKKLESLGLKVTVESAAS

SEQ ID NO: 503230 - protein, 367 aa, unidentified
MQNTIVHYEGAASLEAAATKVKPSGARIKIGLDVHARLYVAVAQYDHLLPKAAQRLRPGEFVPWVEALLGRGHSVHVVYEACGFGFSLYRQLMAAGAHCYVIAPRKLDEDRSRVKTDPRDATTLCQRLSRYLEGNTRELALIRVPSEEQEQARHMSRQRGQLVHHRQKLEAQGRSLLINHALPAPAHWWKEQTWTRLGQHLPAWITTRLQTARPALLSLQQQINALTSELEASAPSILPRGVGKLTSVVLTREICDWHRFNNRRAISSYTGLCPGERSSGSKRVPGSVTKRGNPRVRAALVECAWRMVRFQPQYPPVQKRLAVLSKGSRALGAVRKKAIVAVARRLAVDLWRLHTGRCTAEELGFTI

SEQ ID NO: 503231 - protein, 356 aa, unidentified
MIYAGVDIAKVDHVIGAVDERGSEACGPMGFKNSAAGFERCEAWLEGVAASPADVLVGMEATGRYWMALYAFLTSKGYAVAVIDPLQVRAVRRFKGLGGVKNDRVDAGLIAEAMRIGQYDPTRLATDDVQSLRTLTRYHQSLKSELAEVKVQCTCLLDAYFPEFSGVFSDMFGAAGRAVLSRSPLPSEVRRRRVDSLQRDISSAARGSRRVDGKAAEIKELAGRSVGIALGERAASLQVRSLVRQMDFLDAECAKIEAEVRGLLDRVEPLVLTIPGVSYTTGAQIVAEIGDVSRFRNASALVSYAGLNSSVCQSGMFDSGGGPITKHGSPYLRRALWLAASWARLHDPSLREFYER

SEQ ID NO: 503232 - protein, 344 aa, unidentified
MGEVSTIGLDIAKSVFQVHGVDVDGAVVIRKRVSRAKVLEFFESLPRCLIGIEACPSAHHWSREFQALGHTVRLMPPSYVKAYLKRSKNDANDAAAICEAVTRPSMRFVPTKSEQQQSGLMLHRSRQLLVRQRTMLSNAIRGHMAELGIISAKGRNGTAELLKVIADNEDGRIPVVARFSLDVLARQYAAITTEIGAIEKRIHAWHRSCEESRRLEGIPGVGPIVATALIAEVGDWKGFSSGRNLAAWIGLVPKQHSTGGKDRLGGISKQGNRYLRWLLVTGAMAVIRYARLRGTKRLWLTRIMERRPVKVAAVALANKIARMAWAMMVRGEQFKEPRLLPAAA

SEQ ID NO: 503233 - protein, 382 aa, unidentified
MQRIARKVSRFVGLDVHAETVSVAIAERDGEARGIGTIPNRAESIKRLVAKLDIGGPWAACYEAGPTGYALYWQLTRLGRVCQVVAPTLVPTKPGDRVKTDRRDAERLARSYRAGELTPVWVPDEAHEALRDLVRAREAAKEDQLRARHRLGKFLLRQGKRPPRSMRAWTQQYLEWIKRQVAFTQPAHQATLEDYMNEIEHCTLRIGRLDSAIDEAVRQDPPNMREVVEALQALRGVAKLTAVTVVAEVGTLSRFGSPRQLMGYSGTVSSEHSSGQKTQRGAITKTGNAHLRRVIVEAAWTQRHRPILSRAMRERQKNVSVEVQEIAAKARHRLHARYVRLLGRGKSGPQAVTAVARELLGFIWAIGVTVEQAQAERARGAA

SEQ ID NO: 503234 - protein, 435 aa, unidentified
MRRSETALKGEVYMSYCPVAGIDVSKRFSDMCILSPDNRIFAQEKIYHDETSINRANALLQKAERLFFRKPVIVMESTSHYHLILFQFFSEHGYDVIVVNPLQSNSMKDFSIRKRKTDRVDAFKLAMMYRTKTLRPSQIPQTATRALRQLCRHRAELLNDVSSYKNRLTALLDQTFPGYDKVFSDVGGVTSCAVLVRFPTPTILLVEEESELVEVIASASKSGYSFAKKKAGLLISAAQKAQAWGIHSCADETLIVCTIQMLRTLSESVLQIETAIDNLLAQIKEMRNNVSLLQSIPGIGSHSAALLLGEIGDISLFKKPKQLAAYFGLDPTERQSGSFRGTKNKLSKRGSPYARAALHMGVVNSICKRGKDSAANPVLLSYYEKKCKNKPAKVAQAASMHKLVFIVFAVLRDQKPFELKTPEQHAVEQGFVKAA

SEQ ID NO: 503235 - protein, 427 aa, unidentified
MKFKQSTAYNQRVERITTIHLVVGIDIAKNTHVARAVNFRGIEQGRGLAFENNQFGFSKLLNWIRDLQKKSELSEEIVGLESTGHYWLNLADWLSEKGIKVVLVNPLTTKRNKENRDNSQSKNDAKDALVIADVVSRGYYSDYNKQEPFYRRLRVVVNEREYWADIRGNIMNRLIRWMDIYFPEFTQVFKYWEQPRPLATLKDFPLPADVLKHTAEDLVHAWKKRMQRAGGRTGLLKAQELLEACRLSVGAADANEEARREVSRLVEDYERLTERLQEIDREIAALLEEIPETVELFSSIKGLSPLYIAVLLANAGDLRQFNHGRQLLSMAGLNLAESMSGKKKGQVVISKRGRRQLRKYLYLAVMNLVAHHPSFKKWHRQNVEVRKMKKQRSVFKLIGKLARILVAMARTGEAFQEGRANPLTRAA

SEQ ID NO: 503236 - protein, 329 aa, unidentified
MSNLLKKVIGVDVGSKFLTLSFLDDEKGEQVLNLPNNERSILSFLSKISPSDYCFVIEATGNYSSRLLHFSIGKGFESSLINCMSVKHFARMKNIITKTDAEDAKLIRNYGEIFRPEFYIPKTQDIEYLDQEIKLLNDLEEEKRRYTVKLKALRFHPVLNPSTEKHYEKRLKQLEKEIKEVEARLPQLQDEEFTETKNLLQSVSGIGEKTSLQLMTATSGFKNFHSSKSLVKYFGLAPRIYQSGKKSYSPGKCRTSKTYIRSILYVCSWTAIKHNQKCKELYLRLLEKGKAKKLALIAVCNKLLRICFSVVKNKTAFQQDFQNKLKILT

SEQ ID NO: 503237 - protein, 480 aa, unidentified
MSPSFIAIGCDSSKGRIDVEVRNHHGTVLHAGIFDDTPNDHAAVRRLIDELRERYPEAFFLVGIESTGGMERNWLAFFRKEKRWTKCMHVFKLNASSVHAYRLSQLHRAPGDAAAASDIARFLLEKCSKRTPVTEPESGPLVFYRMIRALIGERICASQRLQTLLVAVHPDLVRFCRYGLPTWILLLLERYPTAALLAQAQISTVDAIPHIDTTRAGELIANAGQSVASLTDSATSAAIRLLVRRLRDTEKCIDEAQAELLTIITSDPQSQLAKAVALLDGMPGIATWSAACLACEIGDPSRFPHGKSIVAWAGLDPVTEASGDDHHSLGISHRGNAHVRAMLFPLAMSGIQYNPVLKAFYERLTTTNGKTKLAALVAVMAKILRIAHAILLSEKAFDPTHEANRQQLAKATQANRSPVPAAAPAPPQAPRLEAPISRREANKRKKAAAPSATVRDQSPKRMTGREPHSKHHAQPTHAKG

SEQ ID NO: 503238 - protein, 358 aa, unidentified
MNRNTGMNAGQIIGTMNGRQVVGLDIAKHVFQLHTVDMGTGEVINVQLKRARVMEHFARRQPCLIAMEACGGGHHWARELTALGHSVRLLHAKAVRPFVSGNKTDATDARAIWLAVQQPGVKFVGIKTAAQQATLTLHRQRELLMKMRTMQTNALRGLLYEFGAIFAKGRNALFKDVEQALEALSPQLPQMVRDSLHEQVARIKALSQDMQTIDKRLALQLKADASMQRIAQIPGVGLLTATAAIATMGEASAFKSAREFCAWLGLVPSQTGTGGKVRLGGISKRGDTYMRTLLIHGARSVLTHAKEPGAWLEGLKSRRPANVVVVAQAAKMARTIWAVTARQQDYQRGFQSLRPQAA

SEQ ID NO: 503239 - protein, 356 aa, unidentified
MQKVKQNSFKGQTFFVGIDVHLKNWEVTIRNNHMVLRTFSMNPSPHELTRHLKRNYPGGIYRSVYEAGFCGYWIHRDLENLGIHNIIIHPADVPTSEKEKQNKTDRIDSRKLARELENLTLESIYIPNEAHQHLRALRRLRGRQVQNITRVKNRIKSHLYMNGIDIPSHTEMSHWSGRFIQWLESLEFSTSAGSDYLRICIEELRACRARIAEIVRLLRSYCKELGITDLIGHLRSIPGIGFITAITFYTEMMDIYRFRTLDHMCSFVGLVPSVHSSGDHEWHGRLTNRKNSYLRHMLIEASWIAIRKDSALLLAFNELTKRMSKQRAIIRIARKLLNRIRYVWLNQESYVYAVVE

SEQ ID NO: 503240 - protein, 351 aa, unidentified
MCAAYDGSQVVGLDLHRQRTVMVRMTPAGERLEAVRFTNSRAELTAQIAKAGPAPEVVVEATYGWYWAVDTLIEAGAGVHLAHPLGVKGFAYRRVKNDVRDAADLADLLRMGRLPEAWIAPPQVRELRELVRHRHKLRCVCSGFKAQVHAVLAKNGVASGCSDLFGVRGRQWLAALQASDQLPAVFADRIGSQLRVIDLLEAEIVMADRVIAQRLKGQPGYEAIQRIGGVGPVFAAVFVAEIGDVTRFATPGHLASWVGLTPRHRESDTAVHRGRITKQGSRIVRWAAVEAIQRAPAGTPPRLLLDRIVDKRGKKAKNCARVAAARVLLELVYYGLRDGHIRRLQPDRAAA

SEQ ID NO: 503241 - protein, 315 aa, unidentified
MSDMPCFVGIDVATAQLDIALRPSGERWAVPNDASGVMTLVDRVQALHPTLIVLEATGGLERAVTSALATAGLPVVVVHPRQVRDVARATGQLATTDALDARALAHCADVIRPTPRPRPDAQTQELRALLGRRQPLIGMRTAAQNRLAGTNARLTKDIAAHMTWLNAAIATLDDDLETILRASPLWRENDDLLQSAKGIGPVCARTLLLELPELGTLTRQQIAALVGVAPLHCDSGTLRGRRMIWGGRAHVRTVLYMGTLVATRFNPQIKVFYERLLAAGKVKKVALTACMHKLLTILNAMLKHRTPWQPQEVQS

SEQ ID NO: 503242 - protein, 410 aa, unidentified
MAKKRRRCDQLPVLHPDAAGIDVGASELFVAVAADRDPHPVRSFPTFTRDLNALADWLEQCGIRSVAMESTSVYWIPVYQILESRGFEVYLVNAQHVKNVPGRKTDVSDCQWIHLHSVGLLRGSFRPPGVICAIRSLWRHRSSFIQMAAEHVLHMQKALDQMNLQIHRVLNDISGLSGLRILDAILAGERDPVTLARLCHSRVKSSEDTVAKSLEGDYRPEHLFALKQSLAAFRYYQSLISEADQEIQRQLNDLDTAVDAEDAPPKRTKASPYQRRRYEPKNFDLRGELYRIFGVDLTNVPGVSAITAQTILCEIGTDVSQFRNASAFASWLGLCPEKKISGGKVLYTKSRRVRSRVATALRMGAHSLHHAKDYLGEFFRRITRKLGKPQATTATAHKLAPIVPCERRKP

SEQ ID NO: 503243 - protein, 321 aa, unidentified
MTAILGIDVAKNKFDVALYRNGKYKTRSFENKPQGFEALTDWLKKHEVSSLHACMEATGTYGDALARFLFETGHTVSVVNPARIKAFGESELLRTKNDKTDSKLIARFCESHKPAAWQPDPPEIEHLRLLGRRRDALIAMRTQETNRLGSPDAAVNDSVQKVIDFLNEEIEQISKAIKEHIDKHDGLRKKRDLLKSIPGIGDVSIEAILSEANGFEGFDTVEQVVAYMGLSPKEHTSGISVKGKSSLCKIGSARLRKVLYMPTLSAIQHNPFVTALYERLMAKSKNGMIVACACMKKLVHIIFGVIKNQKPFDPAYNIKNA

SEQ ID NO: 503244 - protein, 420 aa, unidentified
MEITELPTPVFCGVDWAEDHHDIALVDAGGQQLAKVRISDDAAGFAQLMALLAEHGDSEDIPVPVAIETSRGLLVSCLRATGRAVFAINPLAVARYRDRHSVARKKSDAVDAAALANILRTDMAAHRPLPADSELVQAIAVLARAQQDAVWARGQAHNKLRSQLREFYPAILDAFAQHKHGLCSREARSILAAAPTPASAAKLTRRRLQSLLKQAGRIRGIQAEAERLHEIFKRDYLHQLPQVEAALGHQTSALLRQLNTACENADQLEEAVTQAFEEHPDAPVIRSFPGLAALTGARVLAEIGDDRTRFATAGSLKAYAGSAPVTRASGKSCKVMSRKVKNQRLAAVGYVWAFNSLTRSPGARAHYDRRRAAGDRHVAAQRNLFNRFISMLFHCLQTGHAYSEAIAFPQAPAELQAAAA

SEQ ID NO: 503245 - protein, 410 aa, unidentified
METLGRAIGLDVHLEFCEVAIVEGGVVRSAGRIETSPEQVELFAQSLGREDRVALEVTGSAWEIARILEPHVARVVVVSPNETGIRQARAKTDRLDARTLARLLWGGELDAVWVPDQQTRVLRRRLARREQLVRARSRAKNEVHAVLMRCLKGKPPFSDLFGVKARKWLAELELPVEEAETVAGCLRHVEFLDREIAAIEALIAEQALESEEVRRLMTVPGVNVICAQTFLAAVGDIRRFPSSRKLVGYLGLDPRVYQSGSTPAKGGRISKQGSPQARWVLVEAAWSVVQQPGPLHAFYERIRARRGHAIAVVAVARKLAVLCWCLLSRAEDYAHQQPSLTAKKLRLLEIRAGAKTRKGTNTGTWATRQKMRHAERQLAQQAEASYKRTVADWQAAAQNKAGASVTPGRA

SEQ ID NO: 503246 - protein, 364 aa, unidentified
MGDCITWIGIDDAADRLDVAVFYGNEVLPRHEFPVVNDAQGLRKLIKKLKSMPGEVRCVYEAGVNGFHLYRVLRKYGIACDVVAPALTPRKPGERVKTNKIDARKLATMHRSGDLTSIAVPKAEQEAVRDLMRAREDALEDLQRTRHRLGGFLLRHGRRYRDGKAWTAGHLNWLKGMRFEDPHLQDVLDEYRLALDDATERLKRFDQRVEQVAEKEPYQRLVGFLMGLRGVKVITAMTIVAEAVDLKRYLSAPGYMASIGVVASEFSSGDRRRQGPITKTGNSHARRVLVESSWHYRWAPGLSKTIKKRRASLPPEILAIVRKADQRLYKKYLALVNKGKSNKIAAVAVARELAGFIWAIGQAA

SEQ ID NO: 503247 - protein, 322 aa, unidentified
MCSFVGVDVSKKTLDFSWESEGKNYHHKINNSDVGFKQFLKIVPKGSHVVMEATGIYHLRFANFLFLKKEKISVVNPLAIKRFGQMRMRRIKTDKADAALIAEYASYEKPELWKAPSDEMVEMRQLWGLSDKIKSSKQSYANQLEAITKSFSSSKKAVSYIKKIIKELEIKIREIEKDITEISRKAFPREMEILESIPSIGVKTAAALIVTSNGFTGFKNGRNLCSFYGLTPQIYQSGTSLNSRGGITKMGNGRIRALLYMCSLTAISKNTGCKHTYERLVGKGKAKKLALVAVIAKLVRQAVALIQKDELFNEKKSFSACA

SEQ ID NO: 503248 - protein, 391 aa, unidentified
MICVGIDVAKDKHDCYILDSEGTTLADCFTIPNNLDGFKRLLQTIKDCTQKSDKIKVGLEATGHYSCNILGFLLDNDLPVYVMNPLHTNLYRKSLSLRKTKTDRVDAKTIATMLLSDVDLKSYTDTAYHNEELKSLTRYRFDKVQERAKLKQSVSRLVTILFPELEQLVSSIHGTSIYALLSEYPGAKQISEAHLTRLANILVTTSRGHYRKDRATHIRDAARTSIGSVMPAKSLELKHTIKLIQELTSEINEIEDAIRKIMDELKPPILSIPGMGFYSAAMILAEVGDFSNFNSPDKVLAYAGCSPSTYQSGKLTNCYAHMEKRGSRYLRYALYTATKYVCYWNPVFTEYLTKKQAEGKHYNVALSHATKKLVRLIYALQKSGKAYLAIT

SEQ ID NO: 503249 - protein, 420 aa, unidentified
MEIDHGEQHLIERVAAVDIGKAEMVCCVRVPGAGRARAQEVRTYSTMTPSVLEMADWLTGLGVTRVVMEATSDYWKPVFYLLEEQVAETWLVNARDVKHLPGRPKTDRLDAVWLCKVAERQMLRASFVPPAPIRRLRDVTRYRADLVAVRTAEKQRVEKMLEDAGVKLSVVASDIFGVSGRAMLAALIAGERNPAHLADMALGRMRARTGLLEKAFMARFTDHHAFLLTTMLARVDTATADIAAMDDRITVILTEELHDAATRLTTIPGIGAVTAVAILAEIGTDMTRFPTAAHLCSWAKFTPLTSESAGRTKGRQSTGHGNRYLARSLGEVAVMAGRSHNFLSARYHRIARRRGKPRAIVAVGRSILVIIWHLLSRPGTTFVDLGADYYETRVNHQRTARTHVRALEDLGYEVTLATAS

SEQ ID NO: 503250 - protein, 364 aa, unidentified
MLYLGIDQHHKQITVSIREGAGAVILRRQVSTRPEKVRAFLEGVRRQSGDEGFMAVVEVCGFNDWLLELLPEFGCREVVLIHPDKRSKRKTDRRDASKLSELLWLNAQRLRSGQKPQGLRRVVPASADDQQDRQLTSVRKRLAQQQTRTLNKIQNILRRRNLTWQQPTKTFQTQKVRQWLKSLDLSAIDRIEMDHLLAQWELWRKQIEEIEQHIQKRFERSPTAQRLASTPGASAYGSLAIASRIGSVERFASPRSLANYFGLTPGCRNSGEVTDRLGSITKEGSRIVRFIVGQMVLHVLRKDHLMRQWYTRIRRRRGSKIARVAVMRRLVTIFWHMLKHQESYQPGSPPRRKLAQQRESILSP

SEQ ID NO: 503251 - protein, 352 aa, unidentified
MEAELTINRRQEETVMQITTVGLDLAKNTFHLVGLDANGHEVMKKQMSRAQVLRYFINRPPCLVGMEACAGAHYFARTLSRHGHTVKLIPPQYVKAYLRGQKNDYNDARAIGEAVRAPQMRFVAAKTVSQQDLQALARMRAGVLRSRTALVNRLRGLLGEYGIVAPKGVGTLRRALPELLEDAENGLSDRFRRLLRQGQQELSELDAHVATLTDELQDSAKQDERARRLQTIPGFGPIVAAVFAATLGDGGQYRRGREASAAVGLVPRQHSSGGKERLLGISKRGDRYLRSLLVHGARAVVVAAKAKDDPLSRWINRLRETRGMNKATVALANKLTRVGWAVLKHGNAYQPA

SEQ ID NO: 503252 - protein, 359 aa, unidentified
MKALQFVYIGVDVSKGSLSIDAGDRYRGEIRNSAMDIRRLVKELKRKIGRDSVPHFCFESTGPYGDKLFAECCKAGVPASVLNPSKVRHYAKAMSQTAKTDPIDARVIRLFAEARRPEPTREPGRAESTLRQLVLARDALTKSVVQLSGALDSVHEAPARRPLSQAVDGLKKKIQRIDGQIALIRKEDYRLDGLVGVLSEIEGVGELSASKIVALVPELGTLGRRDSASLAGLAPFARDSGRFKGKAFVCGGRAAVRRALFMPATVAVKHNPVLKSAFEKLRQRGKPYKVALTAIMRKLFFYMNRVAAQWYAEHGGVSNAATAQHAPAYPPLLPLSLSPAPLIPICHLPPLSKKLIQDS

SEQ ID NO: 503253 - protein, 421 aa, unidentified
MSNSTLSKKLASVKPGTLFVGIDLALDRNVAVVLSEQAEQLTRFGFPNERDGYDYFYRRLAAIQEQQQAPAVLVGMEPTNYFWKLLAADMEHQQPDYGYRLVNPYTVKKRREGDQLDRSKDDNRDAFTIADLLRTGKYTETQLLHGGYAELRQYVTVYARLQRDVRRQKTLIRNVAGQLFPELPRVFKDLAGLTALAMLRNHAAAAVVRKMSQDAFIAGVRSDLPGQRVQVAKLRRAHVLVRRSVGLTEGVEALQLALRLHIEALEALEQQLEEVYKALVDAFLALPESAYLLSVHGLGIITAATILSEIGDPSHYTNARQLVKLAGTQPVPNTSGRKSRSKTPMSHKGRPRLRTALFFAVMRLVQIDQAFARDYLHLQTREENPLTKMQALGVLMNKLLRILWALMRQRSSYDPELQLAV

SEQ ID NO: 503254 - protein, 284 aa, unidentified
MNYSHFVGLDVGKKTFDASLMSADEKELSHKSFDNTPTGIQSLLDWIAGYHLSLSKLLFCAENMGSYVTELSVSSVSMGFSLALVCPLTIKKSIGLQRGKNDRIDAKRIANYAVLHYRKLELYKLPDKDLVRLRGWIIIRDNLVKQKVSSIKLLETFSRMAKLADVTESISFLEEQLKSIKERILEVEEDMEQLIAASTSLYTNYLLLRSIKGIGIINAIVLLCVTDNFQRFDNPRKFACYCGVAPFEHTSGISIWGKTQTSSLALYEGQKNGIIRVFCCLFLL

SEQ ID NO: 503255 - protein, 415 aa, unidentified
MDVLHPRCAGIDISKRDAKVAVRIVRDGQAKAKTEVRTFGSMTPHVLALRDWLVECRVTCVVMEATGDYWKQFYYLLEDAEFEVLLANPRQVRGMPGRKTDVSDAAWLAELAAVGLVQGSFVPSAPIRALRDLTRMRTHLVRERAREVQRLEKVLEDTGVKLSSVASDLTGVSSRAMLRALADGEPVEAIVDLARGALRKKMPQLADALQGRYTAHHGRLVSMLLDRIDSTEKDIAGLSARIAVEMECHRRARDLLVSIPGWSERVADVFIAETGADMAQFPTAKHLVSWTGVSPGSNESAGRVKSTRTRPGDAYLKGALGVAALAASRSKNTYFAAQYRRIASRRGPMKALVAVENSMLTAAWHMLTNDTGYVDPGADYFANLRPEQTRNRAIHQLENLGYDVTLTPLPPARVG

SEQ ID NO: 503256 - protein, 339 aa, unidentified
MTIVGCDFHPGWQQVAVFDSETGEIGERKLENGNGEAASFYRGLSSPVRVGFEACGNTQWFEDLLDGLGHEVWIGDAAEIRASYVRKQKTDRRDAAHILKLLLEDRFPRLWRPSAAERDLRQLLVHRHKLVGIRARVKNGLQHLMLNRGVQLKQKLWSEAGQKVLRELPLEGWAAQRRQDLLNLLSGLNPQIRQLDEAIERAAQENRRAQLLMTQPGVGPITALAYVLTIGDVNRFQRGKQVASYLGLIPSERSSSNRRRLGSISKQGNSFMRMLLVESAQTVNRLDEGFRKQYQHRCHRMAKGVAKVAAARRLAVRLFWMLRTNTGYPEIAHIESSPR

SEQ ID NO: 503257 - protein, 391 aa, unidentified
MINLLAQNIGIDISKDYLEVVFSTLDTQRQVKVKASRKFANTPAGFKEFARWLESKRAAAVELRILLEATGVYYEQLAWFLHHQGYQVSVILPTKAKRYLQTLGHRSKNDKIDAKGLAQMGLEQLLPLWQPLSNNIYQLRLLTRQLEDFANQRTIFLNQLHALSHSAFALKQVERNLRKLLRTLDKSIQELEQAIWELIYQDPELSERAEKVLSIKGVGRKTLAVLLAETNGLATFERQGQLVSYAGYDVVENQSGKRSGRSRISKKGNGHIRRVMHMAALVAVRCKEPVLTALYERLLARGKAKMQAYVAVQRKLLILIWRLWRRNEAYDPLYEQRRRRQLKEYIQSLEAGASLSGVSAADKNTVAPATARATQDELPVPVGPGALFQVE

SEQ ID NO: 503258 - protein, 331 aa, unidentified
MFPVGIDVSKKNLDLCMLYDGIKGRIKTRNIQNNRHSVENILRWLRLQHCSPEDVHVVMEATGVYHERLATELHDAGFRVSLANPHRSREFARGMGIMTKTDKVDAYMLACYAFLKKPHRWEPPAPEIRYLGALLRRRDVLLGDALREENRLEKYLSTDTPADIISSCRRMAQLLREEVSNIERQIKAHIKASPALRRDYTLLTSIKSVGPQLGMHMLVVLRSHNFVSAEQAAAFLGVVPIEKRSGTSVRRRPRMSKIGPPQLRAKLYMSALCGKIYNKRMRDIYDEMCLRGKPKMVAIGALMRKLVHWCYGVLKTGTVFNDEDLKPVLST

SEQ ID NO: 503259 - protein, 388 aa, unidentified
MLPSVHHAFTEQTANNSPDLTLYASLELSRATWLVTCLLPERDRMSKYSTPGGDGGALLGLLERMRARAQQLTGRPAKVVVIQEAGLDGFWVHRLLEANGIESHVVDPASIAVPRRRRRAKTDAIDGETLLRTLLAWTRGEPRVCAMVVPPTPEEEDRRRVCRERAILLQERIRHTNRIKGLLAGQGITDFNPLHKDRRQLLDAARTGDGRPLPHQLKAEILREIELIELLLRQIADVEAAREVLAGPKAAKAPSPVVLLQQLKGIGPEIASVLYFEGLFRSFGNRRQLAAYAGLAPTPWRSGTVDQEQGISKAGNPRLRSTMIELAWLWQRYQPASTLSRWFHTRVGNERGRIRRISIVALARKLLIAVWRYVTQGEVPEGAVLKAA

SEQ ID NO: 503260 - protein, 371 aa, unidentified
MEQSSKTLFVGLDVHKDSIAVAYAPEDRGAEVVSLGPIGTRRCDIDKLVRRLESKAATVVFTYEAGPCGYGLYRYLTGKGLACHVVAPSLIPRKAGDRVKTDRRDAMTLARLMRSGDLSAIYVPGIEDEALRDLSRGRDDAMQDLKRSKRRLKSFLLRQDIRYEGRANWNAGHLRWLSEVVCPTPPQQIVFQEYVRAVNEQHERVQRVEHELHEAVQGWRLYPMVQAIQALRGVELTSAVIVMTELGDLTRFDNPRQLMSYLGLTPSEYSSGARRQQGGITKAGNSHARRALVEGAWAYRYPAKVSRHLQLRLETLPAEVQAISWKAQVRLCKRYRQLTARGKHVNQVVVAIAREMAAFAWAIARLVPLAS

SEQ ID NO: 503261 - protein, 480 aa, unidentified
MHDDRRLVGIDLGITSAHTVRVLAGDGSEVCRRKAVPTKESLAEVERAALAGAGPGCRLEVVVEPTGPAWLPIAVFFISRGHQVFRVSSAKASDLRKFLSRHAKSNGIDAETLARLPLMDPGGLHPLELPRAEAAALDRRVRAADRLTRAGAEHKRRIKDLVRQLLPVSPLVGELGVSDVVVLERFGGDPHELVRFGAARLTKLIAKASCGKLGAERAQRWLDAAEAAIDLYGGHPAVAFVDLADEVRTEVRLLRAVQAELARHASEREAAYRWVDPLALARSLPGVAEIGAPALVACMGNPRRFATGAKFRSFTGLAPRASETGDTDRKGQPMSKAGNRLLRTTLVRAADNARRVDPQLARTYYVQMVERGKDHLGALCVVAAQLAERAWAVLDRGMPYVVCDIDGTPVEADQAKQIIAEHWTVPEEVRRRRRSKKGKAPHQVHAGHAQPGPKRAATRRPSPTPSSPRRARNVKQPAAT

SEQ ID NO: 503262 - protein, 310 aa, unidentified
MENKNYDYIAIDISKSDLEVRTELHRCSVTNNLTGFKALVKLAGKQEQPLVVCESSGGYERDMMDYLHQKQIAVTRVNPGRIRNYVRSEGIKAKTDPIDALMILGFAREKQLQPAPVPQPIRQELAALLDRRSHLTEQAAREKNRIQNSSKFIKASIERMIKEVEKELQRIEKQIRKLVANDQQLTEETNILQSVCGVGEVTAWTLLSYLSEIGKLKRNQLVALAGIAPFNKDTGIFKGKRRIEGGRAKVRKCLYMAAQTAAIHNPVIKAYVDGLRARGKPYKCAMVAAMRKLLIHMHILIKKHQLTLAS

SEQ ID NO: 503263 - protein, 343 aa, unidentified
MDHFAGLDVSVKETSVCIVDDAGKIVREVKVASEPEALLAVLKKPAYRFKRIGLEAGPLSQWLFSALAEAELPVVCVETRHMQAVLKAQINKTDRNDARGIAQMMRAGLYRPVHVKTLRSQKLRMLLTHRKLLQSKAIAIENDLRGTLRNFGLKVGVAGTVKFEARIRELVENFPDLAGLVEPLLVVRRVLREQIGILHRRLLAIVRDDEVCRRLMTVPGVGPVVALTYRATVDVPARFRKSKAVGAVFGLTCSKYQSGEIDRNGRISRCGDEMMRVMLYEAAQSMLRSKKWSWLKAWAMQIARRRGMKKAIVALARRLAVILHRIWVDGTEFRWTRERAVAA

SEQ ID NO: 503264 - protein, 368 aa, unidentified
MLTFNRLATALKEYGRPVRVAFEATGNYHRALAYYLATAGFEIKLVSSVALARTREALNNSWDKNDPKDAQVILHMMEIGNEQYYHDPLVCGTNDIQELSKTHDIVSKSKTELWHRVLTHYLPLYFPEADRFYRSSRSDWFFAFLERYPSPHLIAAMGKAAFTTDAWDVIGRKVAKERLLADIYETAKSSVGLPVAPDSDAIRMFRLVLGEGRSLIAQRNQIEDRAVALLKDLPDYQLLTSIPGIGPINALTILAEAGDLRRFGHHRQFLKFCGMDLATIQSGTFRGQTKLSKYGNARLRRTLWMAGQVAILQRTNSFRDKFERYIAKDRQNTHLRRKAHSAIAATLSGHCCAIPCRAVNGPYCSRDH

SEQ ID NO: 503265 - protein, 414 aa, unidentified
MEKQWNIVCGADIHKKFLIATILSRDGTKTTRRFGMTLDDLLTFKNWVIENGCEQVAVESTGTYWVPIHTVLEGSVGLIVANAYKIKHTPGNKNDLDDADWIAELCLNGMIEPSRIFPKADRDLRRLTRIREGYVNDMTREKNRVHHALESCGIKLSSVLSDIFGKSGRYVLNGLLEGRTIDDILKGIKLKRIKKKADEIKEAIKGSLDLTQIFLIRGSLEQMEAIQKRIDELGVEIKARSAHRNADLKIAMSIPGVGFTSASTLLAEIGDITDFKKPEQLAAWAGLVPSVYQSADKLLTGSITKHGSRHIRRILVQVAHVIARGRNSKLKRFFLRIKSKKGSSVAVVALARKVLCILHHLLMNREMYHEGGINKKIKIDIEKASSSTEIDLEEMIKYIVKAGYEVRKGPSGGG

SEQ ID NO: 503266 - protein, 350 aa, unidentified
MTIIGVDFHSRFQQIAMLDTDSGEVVERRLDHSNGEVPNFYSGLPKPVLVGMEATGYAQWFERMLAKLGHELWVGDAAKIRAAMVRKQKTDARDALHILDLLVENRFPQIWIPSPAERDLRQLLRHRHKMVCLRTSVRNQLHALAMGQGVYRKRKLWAAGGRTELAALGLDPWASRRRQELLAILDRLDPSLTELDRAVGKEAEERPAARCLMEQAGVGPVTALMFVLTIGPVERFRSSKQVVSYLGLNPRESSSGGRQRLGSISNQGNSMARFLLVEAAQTAARYDEELRRDYQRLKFRRGTAVAKVAIARKLAVRLYWKLRKLSSPAPPARMQGSSEHPVVGASLSRN

SEQ ID NO: 503267 - protein, 359 aa, unidentified
MPHPETGQRITVGVDTHADAHVAVALDQLGARLEELHIATTQAGYDQLEQWAITFGQVDAFGVEGTGSYGAELARVLRRRGYRVIEVNRPDRATRHRRGKSDPIDAEMAARAVLSGVAAGTPKHADGDAEMVRMLKMAKDSAVKTRTQALNQIKAILVTAPAQLREALAGLSVGKLLDRCASVEPGELTTPTAVAQHTLRLLARRNLDLRAEVKALQADIARLATRAAPHLLDIFGIGPDGAAQILVTAGDNPQRLRSEAAFAALCGSNPIPASSGKTNRHRLNRGGDRQANATLHRTAVVRLRWHEPTQKYMTRRLAEGKSKAEIMRCLKRYIAREIYQVLCPTPRHGSAGKDLPQAA

SEQ ID NO: 503268 - protein, 370 aa, unidentified
MESIIYVGMDVHKETYSLCCYDPRTDRYLYEHKMKAATGNVLKYLESVRKQVKGATFICGYEAGPTGFGLCRDLLRRDIACVVMAPTSLRRPANHRVKNDKTDARLLAKDLFTHSYSPVHLSSEKEEAVKEFCRMRRSIMTELKAAKQVLCAFLLRQGKHFEGKTHWTKGHREWLRKLTFEQPYLQESFDEYVISVNALEERLKRIEKRLEEIACDEEVGTKVKKLVCFCGIDTLTAVSIVSEVGDFSRFARAWDFANFVGLSVGEHSSGQKERHLGITKSGNCYLRRLLTESAKSIKKTSVRFRKSKKLLKRQEGNDPAVIAYADKCRYRLRHKMMSLENRGKPANVASTAAARELACFVWGMLTDHIA

SEQ ID NO: 503269 - protein, 339 aa, unidentified
MPMLEGNIDHVIGVDTHRDAHAAAILDRNGGLLGQLEVPSSQAGYEELLGLVAQQAPGRRCWALEGTGCYGAGLASFLAAQGEWVVEVDRPKRPRGRSGAKSDVLDAIRAGREALSREHLACPRQRGQREALRVLQLTRSGAVKVSADARRHLKALLVTAPEPLRAGLCRGTWLRQARACAVLDAAPTDPVEHRAAVPAHQEAKQLGKELRVLVQAMAPALLAQPGVGPVTAAQLLISWSHRGRLRSEAAFAMLADVAPIPASSGQVVRHRLNRGGDRQLNRALHTIVMTREAWHEPTKRYVARRTLQGRSRREIRRCLARATARQLFRLLEHQPATAG

SEQ ID NO: 503270 - protein, 401 aa, unidentified
MSKKNTRNALDTSLSYAVIGLDLAKADCAVAAVPCSDDDLGLIDRMDYESLFEQAEKLKPTLFAMEPCCGYSQISLRLQNMGHEVKVISGHAVKNWIATHKSNQKTDLNDATALAKLALYDHDLQPIRVKNVEECRIASVQAIRIQLRTQATKSLVCFKSLCQCWGIVIRRGSLTTKKMAEAVAAVEKLLGAEVASSLMILRDAYKFTMKQINALDKLLDALVEANEQARTMKTVLGIGTQTAARLAVTTGDIKRFPMPRSYVAYFGLAPRNIITGHSGTPSPSKRGALKPVSSRGQGKVSRRGDRVARSFIIQGAATIYMLYCKDMLPECQLRRWLHEQIKRGKPYGKIIVSLAAKLLRIVWALLTYGEKFDSHKAGVPRSVLAAMEKPLKHDAAAESAA

SEQ ID NO: 503271 - protein, 361 aa, unidentified
MSTIAEDDVRVVAGVDTHKEFHVVVVLDELGRKLDMATFAATPRGYRELTGWVTDFGEVLAIGVEGTGSWGAGLCRHLRERGLNVIEVNQPDRHKRRRKGKSDRLDAEVAARAVLAGDATGLPKSGDGPVEALRQIRVARAGAMKARTAAANQLHSVCDTAPDQIRSQLRGLSTRRKIAIASRYRPGDPLTPSGAAKRALVTIARRWAALDAEIAELDRAIKTILDAIAAPLLARHGVGYETAGALLCTAGDNPDRLATEASFASLCGTATVPISTGNSNRRRLNRAGDRRGNSALWTIVMARLRSGHAPTVEYLQRRVAEGHSKRDAIRCLKRFVARELYGDIQAITAAQTTKSPLEIAA

SEQ ID NO: 503272 - protein, 338 aa, unidentified
MSEVVRIGLDTAKLVFELHGVDVHGSVVLRRTVRRKDLLSTFAQLPRCLVGLESCAGSHHWARALQMLGHDARLMASQFVSAYRKEQKNDANDAAALCEAVGRPSMRFVPVKSVEQQAVLTLHRARELAVQQRTALINQIRGLLGEFGLSVGKGTAALRSALPALLEDAENGLPSLARAVIAELRQQWQVGDSRIADYDRRIASLASESEPAKRLMHIPGIGPVTATAIVASVGGAEVFRSARQFAAWLGLTPRQHSSGGKSRLGSISKRGDVYLRTLLIHGTRSVLSRCDARADRLGKWMREVRQRRGRNIAAVALAAKHARIVWAVLRRDCAYVPA

SEQ ID NO: 503273 - protein, 343 aa, unidentified
MTIRILGIDISKNTFQLHGTDYKGKMVLKKRLTRSQLTAYVANLPHCEIVMESCGGANYWARVFIRSGHSVKLISPQFVKPFVKTNKNDANDAEAIVEAASRPSMHFVPIKQVEQQDIQSIHRIRTRIVKNRTALINEIRGLNLEYGIAIAPGAAKVKRSLCAIITDNTNELTALSRDCMQDLYDELIGVEIRLKALDKKIRQLCRQNEMCCRILKVPGVGELTATAMVAAVPNAKEFKNGRHMSAWLGLVPRQSSSGDKQVLLGISKRGDRYLRTLLIHGARSALSHYKNRDNDYGRWLTAKRARLSFNKAAVALANKNARIIWSLLNTGEEFNCGVQTAAT

SEQ ID NO: 503274 - protein, 354 aa, unidentified
MNTTQNSTKSKIVKVIGVDLAKDHCDVIGYDENGIICLRLDGCSYAKLQEILANLPQAVVLMEACKGSMFHARSIADLGHEVRLVKGTDVKALRNVNHKNDLRDAAYIANLYFVPGIKYVYIKSQQQQSLQFLQNEYKSLQELRIQVGNQIHAGLEEFGCPVRKSSKFIKTRMVAHLEKHAELIPEDVMASFKRRREIWLNLLQQEEEAKRRLEQVAATDANAKRLMTVPCVGPQTAVGLLVHVGVDFGRFKNSRQFAASLGLVPKQNSTGGNNTLNHITKCGPKSLRSNLVQCAQLVLMYAEKWKGNFGDWVRKMRDSGKKHGVIVCAIATKLARIIYRLMKDKVDYTPILSC

SEQ ID NO: 503275 - protein, 369 aa, unidentified
MAKSTPLYVGLDVHKDSIAVAHATGGRAEPPVFVGEIGTRQADIDKLIRRLQGKAPALRFAYEAGPSGYGLYRYLTGKGLACDVVAPSLIPRRPGDKVKTDKRDAVELARLLRSGDLTAVYVPTEEEEAIRDLCRARDAARVTLKDAKLRLKAFLLRLGRHYVGRADWNAAHKRYLAKVVCPTPAQQIVFQEGVRAVDEQVDRLARIEAELRELAPHWLRYPVVEALQALRGVQWVVALTVVAELGDLTRFDNPRQLAAFVGLVPSEYSSGASRRQGGITKAGNGRARRVLVEAAWAYRHPAKVSLHIQQRIDQLPKALQDLGWKAQVRLCKRFRRLVARGKHPNVVVTAIARELIAFMWAIARAMPHA

SEQ ID NO: 503276 - protein, 475 aa, unidentified
MKRHQKTRKTKPKPTASKPLHEPLPDAAGIDLGATEIWVAVGPDRCQMPVRRFGTFTQDLLTIVEWLLECGIRTVAMEATGIYWVPLHQHLSEAGIEVCLVNARHVKNVPGRKSDVRDCQWLQYLHSVGLLRASFRPAQAICNARTIYRFRQDLLGQSTQHLQHMQAALDQMNIKLHYVIDDLSGQTGQTIIEAILNGERDPLRLAKLRNRRVKASEETIAKSLEGDWRDEQLFVLRTAWENGKQIKEQILKCDQKLLEYTQQLEATTVVAKPLGSLQSRSLTATGPAVAPILPPLKTRPKTSKNEPAGPWRQELTRLFGVDLSLIPGISILTSITLLSELGNDLSAFRSAQHFSSWLCLCPDNETSSGRVLHRRTRRSQSRVRLALRMAASSLHHEKSFLGEKYRRLRTKLGAPKAITAMAHQLARIIWHLITHKVSFEMSIFAALEKAHQRRRLNRLHAAARQMGFQLTQIAP

SEQ ID NO: 503277 - protein, 345 aa, unidentified
MKKIIIGIDFAKEKCDVCAICVEGVSVLAEKWHEAFMNEKRGFRSLLSWAEGLRKEFAVEDLLFCGENTGNYSRKAADYIYGKNYDLWLANPLEVKRNNPLQRNKTDRADARMIAEYAMRRYDKCQLYRSPSKALSNLRELYAYRVRLVNQRKEETVRTGEKLYTMEKCEAMTFIRQESKKLVNRYTAAIRKCEEKIKEVLESEEELRETYEILTSMPGVGLQTAVCLIVYTENFSKFEYDARRLACFFGVAPFGKESGTSVKVSPHVSRYCCTSIKASLHEPALCAVRFEPNMRAYYQRLIAKGKPHLLALNNVKSKMLHILMAMMRNRQMYDPAYRSPLSTCA

SEQ ID NO: 503278 - protein, 353 aa, unidentified
MEFTMIARSDAACFVGIDLHKDTLTACTIAAKDREVSYRKIACVAREKVREFLAGLPRPSVVAIETVGFYRWLWTEAEPLVDQVVLADARGCRALAGRRIKTDREDALNVAELLMTGRLPMAWAPPVYIQRVRNLTRHRVGLSRDHAKTLHRVKSIMNRLNRPGPARMDAAGLQRYLLASVERIEADDLTVLWQHQRRLVEIEQDRSAIDRRIIELMGAEEFRRLRTILESIPGVGLVTAATAIAEIGDFSRFPDGKAIGRYAGLTPTGYASADKNRLGRICKTGSPDLRWTLQQAAWTAIRCDAGFKKTWLKISKTAGKKAAAVAIARKILVLMWSLVRKDELYKAREPIAA

SEQ ID NO: 503279 - protein, 427 aa, unidentified
MENSMDVMFDRVAGLDVHKAMIVACVRKICSGKVERECRTYETTTTSLRDLLAWLAESQCTQVAMEATGVYWKPVWNILSDGDFDLILANAAHIKNVPGRKTDVNDATWIADLVACGLVKPSFVPEEEIQELRSLQRARKQLTREQTRHTQRIQKTLEEANIKLDSIVSNIMGVSGRRMIEAMIEGVKNPTKLAALADRRLKASPKELYDALHGRLTDHHRFMLKLYLGQYDALDKSIIEIDQMVDAAIARMDAEVAAGNATFRSLIDLLSTVPGLSALSATAILAEIGTNMSRFATAGHLVAWAGMCPGQNESAGKRKSSRLRKGAPWLKTMLVQCAWAAVKKKDSYYRAQFNRLKARGGAKKAICAVAASMLTAIYHMLKDGTEHTDLGADHFDSRTADIKAKRLVNQLNKLGFEVALQPLQKAA

SEQ ID NO: 503280 - protein, 414 aa, unidentified
MNHPKMRYTYVGIDSHKDTHTAVFLDCFFEKLGEITFENLPSTFECFLNDAYRFLIDGTVFLFGLEDVSSYGRTLSVFLKSNGQEVKHVNAQLVAAERKNQTIVQKTDSVDAECAARVLLSKFSDLPDADTQDIYWVLRSLVARRNFLVKHRASAKKQLHSFITQHYPNYRQFFENIDGKTALSFFMQYPSPALLKGTSATELTAFLHDTCKTHYTLEFAQNFLATLQDTTVQYQEYRDVVIQSTIRQIRFNMEEIEKIEESMTVFLKMFDCTLTTMTGIDTVTAARMLAYIGDIKKFSSPAKLARYAGIAPITYASGKKDLQFANQRGNRKLNALFYQLAVRLCFITGSSHKVINSFFHDYYNRKISEGKTKHQALKCAQRRLINIIWTMLTHNEEYVNPPTFDLPEDEKNKK

SEQ ID NO: 503281 - protein, 316 aa, unidentified
MQERGVNVGVDVSKDRLDVHVEPSGERWSCEQTPEAHEALADRLAELKPQRIVLEATGGLESAVVAVLGARGLPVVVVNPRQVRDFAKAMGRLAKTDPIDAEGLALFGERVQPPLRPLPDAASAELDALVSRRRQLVEMLTMEKNHLHSARSPQVRASIQTIIAALQAQLSDVDRDLRQAVQDSPLWRAKADLLRSVPGVGKVLSTTLVADLPELGTLGPKALAALVGVAPLNRDSGKQRGKRSIWGGRAPVRSALYMGALVATKHNPILRAFYARLRARGKPAKVALVACMRKLLAILNAMIRDNQPWRPMATAA

SEQ ID NO: 503282 - protein, 352 aa, unidentified
MEQFIGCDAHKQFSVFVAVNEKGHVGEVARVPHERRLYREFLTRLPPHSTIAVEASGQYSWLVDEMEQSGHYPKLANPLEAKRRMGLTMKTDKLDAKGLAILLRNGTLPEVWIPPSELRDQRELLRLRIFLVHLKTRVKNRIHGTLARHNVIIPGADLFGAEARLQLGARLPELPVHSREAIEQELATLDFLEGEIKSAEQRLEAIMKVSAEADLLKTLPCVGTILSMVLMLEIGRVDRFPTAAHLASYAGLVPRVRASGGRTRMGQVCKNVNRNLKWAFVEIGNLVVINQRRLAGTHVVRLYQRIKRAKNHQKAVVAVGRHLAEAAWWILTKQEVYREPRNVRQALSSTHG

SEQ ID NO: 503283 - protein, 315 aa, unidentified
MVDVPCFVGIDVAKAQLDIALRPAGERWAVPNDASGIVPLVARLQALHPTLIVLEATGGLERAATAALAAAGLPVVVVNPRQARDFARATGQLAKTDALDARALAHFADVIRPTPRPLPDAQTQELRALLGRRQQLIGMRTAEQNRLVGTNARLAKDIEAHIAWLNAGIATLDDDLETMLRASPLWRENDDLLQSAKGIGPVSAHTLLRELPELGTLTRQQIAALVGVAPLNCDSGTLRGKRTIWGGRAQVRTVLYMSTLVATRFNPQIKAFYERLLAAGKVKKVALTACMHKFLTILNAMLKHRTPWQPREVQS

SEQ ID NO: 503284 - protein, 340 aa, unidentified
MLHVGLDIHSTRITICALDERGQVVRRAQVRTIEEMLTTLKDLPDRFEVCYEASCGYGHYHDLLRPLAVRVLVAHPGQLRLIFRSKHKNDRNDAERLAKLLYLGETPAVHVPSPEVRAWRELINCRGQLVAKRTRAKNGARALLRSAGVVPPKKPGLWTKKGLAWLRRVELPTASQQLRRDLLLEEIEALTKQVRRVEQELNRQARKTPAVALLRTIPGVGARTAEAVVAFIDDPHRFRNAKAIGRYFGLVPSQDQSGDRNRLGHITREGPPVVRQLVAEAAWQAIRRSPTVRAFFERTHRDDPQRQKIALVATAHYLVRVMWAMLRHGTTWHESRAKAA

SEQ ID NO: 503285 - protein, 348 aa, unidentified
MNVTRIGIDLAKQVFQVHGVDEQGKAVISKQLSRDKLRPFFTQLPPCLIGMEACGGAHYWARELTALGHTVRLMAPQFVTPYRKNQKNDGNDAEAICEAVGRPTMRFVPIKTAEQQAVLTLHRARELLIGERTALGNHLRGLLAEFGIVLTQGIGPLRRALPGILEDAENGLPMLARDTFAELADRLTDMEKRIAEYDRRVATVVRETATAQRLMQLEGVGPLTATAVVATVGDAHEFADGRQFAAWLGLVPRQYSSGGKARHGRITKRGDRYLRTLLVHGARAVLIRSADRDDAKSQWVQRLRARRGFHKATVALAAKHARILWAMLARGADYRPDIKPTAAEPTAA

SEQ ID NO: 503286 - protein, 354 aa, unidentified
MESARVTVGLDLGDQYSAVCVLDAMGKVVEERRVRTTREGMEKMCGQWSDRRRVVMEVGTHSPWASRLVEGHGHEVVVANPRKVRLIFQTDRKQDKVDAEVLARLGRMDVKLLSPIRHRGARAQADLAVVKSRDCLVRSRTSMINHVRGVMKSMGYRLRKCSGASFHRRVLEEIPEELRPALLPVVGVIGELTAQIERYDREIERLCAEAYPETRLLRQVKGVGAVTALSYVLAIEDPGRFEKSRSVGAYLGLRPRVDQSGSSDRQLPISKAGDEFLRRLLVNCAHYILGPFGEDCELRRKGEEIAARGGKNAKKRAVVAVARKLAVLLHRLWVTGEAYEPVGYGKGKQAAVCG

SEQ ID NO: 503287 - protein, 349 aa, unidentified
MLADQVDYVVGVDTHRDEHVLAVVVAPTGAIVAQRSVRASARGYAQALRFAEEHADGTRVWAVEGAGHYGVGLARYLSGHGEAVCEIGRGPRDERRLRGKDDSLDATRAARTALASETLSLPRAGQRREALRLLLLARRSAVDVRREALAQLRSVIVTAPDGLREQVRGLLAGRLIQRCSRLRRSSSHTPDELATILVLRSLARRIEAATAEAAELEAEMLAHVRALAPQLLDEAGVGPIVAAQLIVAWSHQGRVRSEAAFARLAGVAPIPASSGQTNRHRLSRGGDRQLNRALHTVILHRRQHDPATKAYIARRVSEGKSGREAVRLLKRYLARHLYRLLQNQEPLMT

SEQ ID NO: 503288 - protein, 339 aa, unidentified
MKKVFIGIDFSKLKFDAAIYSVDTKAIVATEAFENEQFGYVDFLQWVKGNTRSQKSGILFCGEHTGYYSGNLSVFLYESGYDMWLVSGLEMKLTQGIKRNKTDRVDACKIAEHAYRYQDKVILFQPVSKALEEIRELLSYRERLVETRKVLTTSAKEMKRVKDNGSCDYIYQDSLEYIKSLNASVRDCEKRIEALLKQDISLNTNYKLVSSVVGIGLVNAALILVATANFTLFANPRKFGCYCGVVPFEHSSGSSVRGKTRVSKMANKHLKTKLTLAAQNAARFDPELKEYYQRKRSEGKNNWLVLNNVKNKLIHRIFAVVRDGQMYEKQYVHPLKQAA

SEQ ID NO: 503289 - protein, 338 aa, unidentified
MKKLSVTYFFGIDVSKKKLDFAFAKGLAFLSHQQIDNNYKSIIAFIRAKLKAEKISIAQCCFCMEQTGIYCNHLIRVLLDLGAQFSVSHSAHIKLSFGLTRGKNDKVDAKRIAEFAYRFNDKLKPYKPKRAVVDELDTLCKLRKKLMKMKNQISVPLNELKSFGAEAKHKLYKSNTAKSLEAIALDIKSVTKAIRQLIKSDERLKELDTWIGSVVGVGAVTTPAVIVVTNEFTNGFSAKQMCSFCGVAPFTHQSGSSLNGKNRVSHKANKYLKTLLNMCAMSAIQTNSDLGRFYHRKLSEGKNKMSALNAVRNKIIHRIFAVVAGERKYERKLSLPAS

SEQ ID NO: 503290 - protein, 413 aa, unidentified
MTEEIFGWFVGVDWGSEKHQVCILDQHGTIVGERNFPHGGAGLAELGDWLLSVAGTATAVAVGIEVPHGPVVDSLIDRGFVVHAINPKQLDRLRDRFSVAGAKDDRRDGYVLADSVRTDRRLFRGLHVADPRLVALRAWSRLAEELTEERVRLGNRVHHELWRYYPQMTKLTDDIAASWFLELWTIAPTPAKARQLRKATVGQLLKQHRIRRIDAETVIRTLREPAIKVADGVAEAASVHMRSLIARLHVVNRELREAERQLDKICAEIGAAEAASGDGLQRQDVMILKSMPGIGRINLAALLSEGSGPLSRRDYPALRTLCGAAPVTRRSGKSQVVIMRYAAHVRLRNTVYHWARVASQHDPTSKSRYAALRQRGHSHGRALRGVADRLLGLACVLLQRQTPFDPQYGHPAT

SEQ ID NO: 503291 - protein, 448 aa, unidentified
MVRRGKPAGLPIINPRAGAIDIGSRFHVVAVPPDVTDEPVQTFQAFTGDLQRMAQWLKSIDVTTVAMESTGVYWVPVYEVLESAGIEVVVANARDARSVPGRKSDVNDAQWLQRLHACGLLRPSFRPDREIAALRAYLRLRERHLDYAAAHIQHVQKALTFMNLQLHHVVTDVSGVTGMKIVRAIVAGERDAKALAAMRDVRCKATAETIEGALQGNYQPEHVFALKQALELHDFYQRQVEQCDVQIEAALTRLKGNKGTPSEPLPAPRHKTKAPNAVAFDVRPSLYQIAGTDLTQIHGIGPYLALRLVSECGTDLSRWPTVKHFTSWLSLSPGCKISGGKVLSSRTRKTANPMAAHLRLAAVTVGRTSTALGAFYRRLAARIGKAKAVTATARKIAVLFYNTMRFGIDYRDPGANYYETAYRERVIKQLHRRAATFGFRLATIDSVS

SEQ ID NO: 503292 - protein, 504 aa, unidentified
MKTKTSSQQPAASIYRNQNALLRALFERASGPRKVLCVALDYAKRKHVALCCDGNGDILRQPFAVDNTVEGVAFLVEQISATARRRKIPKCDIFLGGEDEPSYVANFTQELRGRQYLVLRVNAAEAAENRENLIASTDLLDLLGIAKTLLSRRARATGPAGSAGAKGKKAAEDIYFDIRELTRCRRNLVRQQTAASNRVHAMVDQLFPSFLEHEKSGLTPFCEASMALMKERFSATEIARRRPRTLAAFLARHGVRAPAEIAAKLIALASGALPPAPHRLAALQRTLAATVDLRECLANNANELRAQAAILLASTPYVMLTSISGIGFTLAAGMAGELGDPIRLSSVDSLCAFAGIVPHTFQSGGPDQPACQGHTPARCNHILKDWTVQSAQKIHLFGPPELKDRISRWNANGQHGIFAGARRYLRLLRSLVLNRVPYLDPRSRFSLASDQERADAALHAWLILIRKWRTIPDGIALISKESNPLGFWRHVVMESRSVHLPLQP

SEQ ID NO: 503293 - protein, 466 aa, unidentified
MQPFYMGLDVSKGYADFMIIDHRKQPVIRGFQLDDTFSGHSCLYDVLSRFFADHPDATLFAAMESTGGYEDNWYNALRHFQGVLNIRTARLNPLGVVHNSKADLKKNTTDKISAQNVAEYLVAHPEKVTYQQDDQMAGLRKQWGFIQMLTKQCTQIRNQFNTLLYTAFPELLNYCQDGVPDWVLKLSVKYPAAVKLKNARVITVAKVPRITIQRAQKLIAQAKDSVASTTDPVTQQLIKDTARQILRLKQTIATQKLRMAKQCQLPEIKLLKSFIGISDWSAIGLLIEIQTIKRFASAKKLASFFGLHPVYKISGDGSGSIAMSKQGRAAPRKILYMVALSAINSNPLIKQLYEKHQQRGKHNLSAIGICMHKIVRIIYGMLKNNQPFDPNIDLAHQQRGIKAAAKGRVESKARRFQDYDDSAPVSRRQRKKRLERKQSHSVTDTKSGISAPVPLGNILADILPQL

SEQ ID NO: 503294 - protein, 456 aa, unidentified
MARRSKVKATRRRTKLRIMYTRAAGIDVGSTFHVVAVPPELSAEPVQTFQSFTGDLYRLAHWLVEIGVTTVAMESTGIYWIPVFDILEAHGLEVLLVNAQHVKTVPGRKTDVNDAQWLQQLHTYGLLRGSFHPAQDWSALRVYLRHRERLVEYAAAHIQHMQKALMQMNLQLHHVLSNITGTTGMKIMRAIVAGQHDPAVLATYRDARCKASEETIRAALTGHYRREHVFALRQALELYDSYQARIEACDQEIQSTLESLQRDEVSMDTLPAARHKKRQSHEPLFDVRAALFRVLGVDLSQIDGFSAYTALKLVGECGMDMSQWPTEKHFTSWLTLAPGNKISGGKVLNTKTRRSANRAAAIFRLSAMNVGQTQTALGAFYRRLASRLGKAKAITATARKLAVLFYNTLRYGMAYEDPGVAYYEDRYRQRVLKGLHRRAKQFGYKLTEVGALEGVS

SEQ ID NO: 503295 - protein, 376 aa, unidentified
MGHHSEAFIGIDTSKLKNAIAIAEGGRDGEVRYLGEIDTTDAATRQLIRKLAAKYAKLTFCYEAGPTGYGLYRLITSLGHECSVVAPSLIPRKAGDHVKTNRRDAQSLARNLRAGELTAVWVPDERHEAMRDLSRARESAVDDLKSKRQQILSLLLRLGLHYPGKKTWGKSHRNWLASQTIGQREQRIVIEELFGAERQAQDRVGRLEQAIRAAVPDWSLAEVVTALMSVRGIDLVAAVTILAELGDLSRFASPRELMAYLGLVPSEHSTGDNIKRGGITKAGNRRARRILVEASWSYRYPPRIGRDKQAKVDAAPEPVRAIAWKAQTRLSSRFRMLSKKGKRPTIVATAIARELCGFIWAIHRAVTSPGLTTASY

SEQ ID NO: 503296 - protein, 355 aa, unidentified
MNSVRYVGLDVHRDTISAAVLNESGRMIQQSILATRAAAILDFIGGMRGTLHVTFEEGTHSAWLYDLLQRRVARLVVCNPRMNSLLKSGNKSDAIDARKLAELLRADMLSPVYHGEKSAMEVQHLARSYALLTEDTTRVMARIKAIFRGQAISCAGQKLYGHKHRHEYLEQLGACALRRRAELLYEELEAVRQLRRQGKREMIVECRKYPETKLLCSVPFLGPVRAAVLIGRVQTPHRFRTKRQFWAYCGLALEMRDSGEYRVVDGQVERRKKPAQIRGLNWNHNHELKNLFKAAATTASFSNGVFREFYLGLLKKNMQPEMARLTLARKIAAITLKIWKKGEAFDAELMKLQAA

SEQ ID NO: 503297 - protein, 344 aa, unidentified
MNVMIGVDPHKGSHTATMLDRDEHELRRIKVRAGHHQVGELLEWADGVTPRMWAVESAAGMGYLLAQQLVAAGETVVDVPATLASRVRVLASGQSTKTDPNDARSVAVAALRAPALAPVRASDHTTVCRLLVKHHTDLARWRNKLCCRLHALVAELIPGGISKEVVASQARSLLEETTPLGAAALERHRLAVELVAEIEHLDTVLRASRARITTAVAASGTTLTEIFGVGPIVAAMLIGYSGDPTRFATAARYASYTGTAPVEFSSGGRITHRLSRRGNRRLNHALHIAAITQIRNRHSVGRGFYDRKLAEGHTPREAIRSLKRRLSDIAWRHLIADVQRATRL

SEQ ID NO: 503298 - protein, 363 aa, unidentified
MKEVYYVGLDVHKDSIQMAILGRTGKEAVKTKSLTNNAMKIVKELSPYQEKGKVEIAYEAGCLGYTLYRTLNDFGFDCRVIAPHKVFHGKDLNVKTDKRDALDIAWMLRREEGESIAVPSEEDESVRDYLRCRGDMKDDLKRAKQRLLKFLLRKGIHYETTNYWTLKHRTWLNSLRFEREYERLAFVEYVAEIEHLENRLKGMDEKIEEIAESERYAEKVRRFRAFRGIDYLTALSLVVEIGDFRRFGKAESLMSYLGLVVKEQTSGKKRQQGGITKTGNGHIRKLLIESSWHYARVNQVSKRLAKRREGTDERVISYADKAMTRLHKKYMKLLSRGKPKQVAVTAVARELSGFIWGVMTMAA

SEQ ID NO: 503299 - protein, 348 aa, unidentified
MEADVLKHALGIDVAKDTLAICLGTLKTDLEKEFIFKGDVANDSSGFQKITGWLNKLNILKEKLVVVMEATGVYHEALAVYLHQSGYTVSVMQSGRVKRYAQSLDQRSKTDALDSRMLAMLGCERKLTNWSPPDKAFQQLKALSRERSFLLKEKNVENNRLHAVETAAYSNKKEVKRYARRLKLLEEQLEEVEQEMRDLVASDEKLAQKMRYLESIPGVSFLSAATVVGETCGFNEINSAKQLTSYAGFDVVLKESGNFRGSTKISKKGNKHIRSILYMPSMTAIRVNPTLREFYLRLKPNKAKPIVALVAVQRKLLLLMYSLYKKEEFYSPLPQEKTARALSPCCAG

SEQ ID NO: 503300 - protein, 453 aa, unidentified
MSDAKRSRRRREMSPVHPDAAAIDIGATMHVAAVGPGRDAEPVRTFKTFTEDLHRLADWFTRCAVRTVVMESTGVYWIPVYEILEQRGFEVMLVNARDAKHVPGRKTDVSDAEWLQRLHEYGLLRGSFRPQGEIAALRAYLRQRERLLDDAAAHIQHMQKALTQMNLQIHHVVSDITGVTGMRIIRAIVAGERDPDRLAAYRDRRCHASVETVRQALVGNDREEHVFALAQAVELYDVYQTKVAACDTRIEAVLQRLRPASAKPVGPLPAARHNTRQPNAPAFAVREALYAVLGIDLTQIHGLGPYLALKLVGECGTDLSAWPSAKHFTSWLCLAPGNKISGGKVLSSRTRRSGSRVAALLRLVTVGRTETALGAFYRRLSARVGKAKAVTATARKIAVLFYNALRHGMDYADPGASYYEDRYRRRVLGNLQRRAKSLGYVLQQAGPTAKGVS

SEQ ID NO: 503301 - protein, 343 aa, unidentified
MQVVRIGLDLAKYVFEVHGVDQRGKVVLCKTLRRGSVSTFFANLPPCLIGMEASNGAHYWARVLTDLGHKVRLISPQFVAPYVKSNKNDRNDAEAICEAVGRPTMRFVPPKSPEQLAIQALHRIRQRLVRSRTRLVNQIRGILSEHGIVIARDIWRLRRALAEITGNATDDLNMLVRLLIGETQAELIELDRRIASCDRRIRELYRTNKLCQKLGEIEGVGPVTATALVAAVGDRSCFKNGRQFAAWLGLVPKQRSSGGRHQLLGISKRGDRYLRTLMIHGARAALGKAGGKQDPRSRWLVNLRQRRHPNVAAVALANKNARIAWAMLSGNLCYEPARSVQAA

SEQ ID NO: 503302 - protein, 375 aa, unidentified
MARLRGENYMENMLKTVDKNTALYVGVDVHRFEHTAVVANRFEEELGLLSFPNTLSGIESFRLWLLAIDNPQKPRIIGIEGSNGNGKLLTSIISSDYQEIYEVNPVYTKQRRDHGTTGDKSDAVDARLVIEVLTRKLDKLPKVTLQDQSEDIAILDQLTTFHNDLIRQQTRLKNQLHRLFSEDNPDYQSGRGSSFSLKALKSWKSYLGKQTNSTSSIMTPSGTRRMITKDKIKQFEQLRLLLKKADGHIHNLLGNNNLLTLPGAGIITTAKIISKTKGIKRFNLDGFIKYAGIAPIKKQSGKTKKHKQNKSGNRQLNNALYTIALTQLRCCPKAKAYFEKKIKEGKTKKHAIRCLMKRVACIVYGMLRTGEKYLG

SEQ ID NO: 503303 - protein, 360 aa, unidentified
MSSRCSIVGQLHEGRREVRIAIGIDSHKGSLAAAAVDELGRVRALTEVTNDPAGHRELLRWRASLAGEVHIGVECSGSFGNAAARMLVAAGEAVYEVPANLSHREARRQNRGKSDPTDAVAIARVVAREDALPRPRINQRFEDLKLLSDHHDHLKRLRTQLTNRIHKHLMIERPGYDRSLGSLTTEKAKKAILMMLRRDVSVRAALIKRNVRELRRLDAEMKELKADIRRAVAATGTSLTAQCGIGSVIAARVLGEVGDVSNLRSKAAFARLTGTAPLPASSGRTLRHRLNRGGNRKLNHALYFIAVTRCRLDDETKRFMARKLSEGKSKKEAIRCLKRHLANVVYRTMVADGRRLQEAA

SEQ ID NO: 503304 - protein, 391 aa, unidentified
MSVTSDRVVIGMDPHKRSATIEVMTSDETVVGGGRFDTGRDGYAAMRKYARQWPHRVWAIEGCQGIGRHIANRLLADDEQVVDVPPKLSARARVFATGQGRKTDATDAHSIALVGTRMAGLRPVVNDEQLALLRILVDRRRSLGEDHTRMVSQLHQLLLELIPGGAKKSLSAAQAKALLATVRPRDAVGKARRRVAAELIGDLERVYRRSKEADKELKELVASTGTTLMDLHGIGPSGAARLLVEVGDITRFPNRAHFASWNGTAPIDASSGEQVRHRLSRAGNRQINRVLHIMATVQLRNPTEGRAYFDRKKAAGKTSMEAMRALKRRLSDIVYRCMINDATAAAAGPGGQRGTTTDSSVTGSHPPAGSSEKSLPGPAETQDRTLLPAVS

SEQ ID NO: 503305 - protein, 404 aa, unidentified
MTESSDYESVQVFIGVDVGKDTHHAVAINRSGKRLFDKALPNDENKLRSLISDLKQHGQILLVVDQPATIGALPVAVARSEGVLVGYLPGLAMRRIADLHAGEAKTDARDAAIIAEAARTLPHALRTLKLADEQIAELSMLCGFDDDLAAQTTQASNRIRGLLTQIHPALERVLGPRLEHPAVLDLLQRYPSPEKLASLGEKKLAAQLCKLAPRLGKRLAADIAQALAEQTVVVPGTNAAAVVLPRLALQLITLRKQRDEVALEVEQRVLAHPLYPVLTSMPRVGVRTAARLLTEVACRAFASAAHLAAYAGLAPVTRRSGSSIRGEHPSRRVSKTLKRALFLSAFAALRESALQGLLHPQNESGKTTQSGAYRPGETTLRRSVRHDARRDFLYPAGVITCLTT

SEQ ID NO: 503306 - protein, 404 aa, unidentified
MYNAVGIDVSKGKSTVAILQPGGTVIRKPFDVSHTSQNLNELAKYLATLDGDTRIVMECTGRYHEPIRKALSEAGLFVSVVNPHLIKNFGNNSLRKVKSDPADARKIARYTLDNWADLRQYSGMDNTRTQLKTLNSQFSFFMKQKVAAKANLIALLDNTYPGVNKLFDSPARDDGSEKWVDYAYSFWHVDCVRGIGLKAFTERYQAFCKRHHYIFQADKPEKLFNASKELIAVFPKEKTYKLLIQQSIQQLNLTSEHVERLRREMNELASTLPEYDTVMSIYGVGKTYGPQLIAEIGDVSRFTHREALTAFAGVDPGVDESGQHKSKSNRASKVGSARLRKTLFQIMTTLLQNAPEDDPVYRFLDKKRSQGKPYYVYMTAGANKFLRIYYGKVKECLRSLEQES

SEQ ID NO: 503307 - protein, 343 aa, unidentified
MAYFAGLDVSVKETSVCIVDDAGKIVREARVASEPEALLQVLTNTIYRFTRVGLEAGPLSQWLYSVLAEAGFPVICVETRHMRAMLKAQINKTDRNDARGIAQMMRVGLYRPVHVKTLRSQKLRVLLTHRKLLQSKAIAIENDLRATLRNFGLKVGMVGTLKFELRIKELVEDLRDLAVLVEPLLLVRRVVREQLGILHRRLLAIVRDDDVCRRLMTIPGVGPVVALTYRVTVDVPARFRNSKAVGAVFGLTPAKYQSGENDRTGAISRCGDEMMRMMLYEAAQIMLVRSTKWSWLKAWAMKIARHRGMKKAIVALARRLAVIMHRIWVDGTDFRWTREVAPA

SEQ ID NO: 503308 - protein, 388 aa, unidentified
MIYVGIDVSKDKHDCYIVNSDGVVLADVFSVENNLDGFDLLLQRLKSVAPDLLNVKVGLEATGHYSYNILGFLLDKGLATFVLNPLHTNLFRKSTSLRRTKTDRVDARTIAAMMSSGIVLKSYTAISYHNEELKSLSRYRFDKVRQRAKLKQAVSRLVTILFPELEKLVPSLHIASVYALLAELPGAKQVASCHLTHLTNLLSAASKGHYDRSKAVELRNAARRSIGSAMPAKSLELQHTIRLIRELDAEISEIEAAIKQIMDQIASPILTIPGISYRMGAMILAEIGDFARFDSPDKILAYAGLSPSTYQSGKLDNAYAHMEKRGSRYLRYALYNAAKYVCHWDCAYLAKKRAEGKHYNVALSHAAKKLVRLIFALQRSGQPYCPTA

SEQ ID NO: 503309 - protein, 372 aa, unidentified
MADCSEVFVGLDTSKLRNAVAIAEGGRNGEVRYLGEIENAEAATRKLVRKLAASHQRLTFCYEAGPTGYGLHRQIKALGHECVVVAPSLIPKKPGDRVKTNRRDALNLAKLLRAGELTAVWVPDARHEAMRDLVRAREAAVDDLKSKRQQVLSLLLRLGLHYTGKRTWTRTHMRWLVGQKLAHREQRIAFEEMLLAVRQAEERVIRLEQAISAAVPEWSLAKVVTALMAVRGLNLISATIFLAEIGDLSRFASPRQLMAYLGLVPGEESTGDRVWRGGITKAGNHRARRILVECSWSYRHPPRVGKKKLAKVEAAPPAVQEIAWKAQARLTARYRALARRGKRPTLVVTAIARELSGFIWAVSRAVGAPATM

SEQ ID NO: 503310 - protein, 364 aa, unidentified
MHYVDNTELSSHEETRSQFNGGTGAIKLGVDVHQDFYVVVEQVGGGNPKPPHRFRKEAFLHWATRLKQKSGAQVHAVYEACGFGFALQRKLSALGIHCYVVCPQKLDEQNRRVKTDGLDAKALCLKLDRFVQGNRDALAIVRVPTEEEEQARAIHRQREQLVKARKQLEAQGRSLMVNHGLEPVQNWWKPHTFAALPMPQWMKELLANSQPILVALQQKIAALTVQLQSAAAPDQPRGLGKMTSVVIDREIGDWKRFNNRRQIASYTGLCPGEYSSGNTRLQSCVTKHGNPRLRAALVELAWRLVRFQPDYKPIVKWRATLTKGALATGAARKKAIVAVARQLAVDLWRIKTGRLSAEELGLIN

SEQ ID NO: 503311 - protein, 399 aa, unidentified
MEQFITSEMLVSLDIGCYKHNVAIGLDDGKLLDEFEVEHTQAGFNKFFTKIEYHRLSHRLPVSIAMEGYNGHARPLDRMIRARNYRLFNINNLKLSRFKEIFPGAAKSDAIDARKGLELFQLKKHLPQAKDVLQEIYATPIENEQLKRLSRRRRRMVDERVSVVNALQSDLQAVCPGILKMTKDVSQKWFLNFLMTTRSSLQELARKKKASLLKIKGVGKVMVERIIGWQNVAIFSDEVELVSPLILEDVKRIIDLNQIIQKLDEQLDELESRSEEAKIIRSIPGFGQTCTAEIAGEMGTVDRFAKEASLALYFGMATLDKSSGVSRGSKSPKQVNPKIKAAMMTAVDHHRKMVASSQAYYEKKRVEGKKHNQAIRALGRHLCRVIFKMLKEKREYKII

SEQ ID NO: 503312 - protein, 345 aa, unidentified
MEKLYLGVDLHKRSCWVTVLDADGHLIESRKLGTEKRELEEFFGKVGKPAAVAVEATFNWYYFLNVVEPLGLELHLVHPWKTRAIASARIKHDKLDSRVLAELLRTGFLAEAWMAPREVREERQLLRHRARSVQGATRAKNGVHGVVNRQGIRPPMESLFGPKGRAFLAEWQWAARDRWEVDDHLLRLDVLKEQIAKLDREIRRRGRENGGAQALETIPGIGPFIALLLVAEIGEIERFPTAKHLASYTRLVPSLYASGEHRWGGAITKQGSTLLRWGLVQAAHQAARRARFSAYYQRQRQRLGTAKAIVARARKLAVISFYRWRAAELHPSSPPAVKSSGAHLG

SEQ ID NO: 503313 - protein, 405 aa, unidentified
MNAVGIDVSKGKSTVTIRRPGDVVIMPPCDIPHTQSAINCLIEQLQNLDGDTKVCMEHTGRYYEPVATWLSDAGIFVSAVNPILIRDFGDDSLRTPKTDKADSKKIARYALDRWAKLKQYGNMDKTRNQLKTMNRQFGFYMAQKTAMKNNLIALLDQTYPGANDFFDSPARSDGSQKWVDFVHTYWHVDCVRSKSLNAFTEHYQNWCKRKGYNFSVGKAEKIYHLSADLIAVFSKDDNTKMLIRQAVAMLNNASETVESLRSQMNALAATLPEYPVVMDMNGVGSTLGPQLMAEIGDVTRFTHREALTAFAGVDPGKNDSGQHVQKSVKTSKKGSPYLRKALFQVMDSLIKRSPVDDPVYAFMDKKRAQGKPYYVYMTAGANKFLRIYYGRVKEYLATLPKNEEI

SEQ ID NO: 503314 - protein, 355 aa, unidentified
MNQEKYIGMDVHAATISAAVINAQGKVLTQCVMGTKASTILEFIQAQRGTLAVTFEEGTMAAWLHDLLKPHVSRLVVCDPRKNALMRDGNQNDRADARNLAELLLTNQVHAVYHGKHGIRALRELGRSYSTLTQDSTRVMNRIKSVYRSWAIPCAGTSVYSRRHRAEWLAKLVEPGVRIRAEHLYQQLDSLEPVRQAARRELLRESRKHAAVKLLRQIPTIGPIRSALLVAILQTPHRFRTKRQLWAYSGFAVQTYDSGEFRFERGKLKRNRERITVRGLNRNHNHDLKNLLKGAAISAIERPGPLQDFYAALVGKGMRPSMARLTLARKIAAIILITWKKGVSFDPKQLQRQTA

SEQ ID NO: 503315 - protein, 430 aa, unidentified
MKSNTQNAKIEAITEKTLVLGINVGSETHYARAFDYRGIEYSKKPFKFSNTEAGFVTFKEWILDLKERHEKDKVIPGMEPTGHYWFNLGKFLQDNEMKPILVNPHHVKKSKELDDNNPTKNDRKDPKVIAGLVREGRYMIPYLPDGVYADLRTASNIRFQLQAELTRIQNRISRWFNIYFPEYKTVYGKPDAKSGMLILKAAPLPEDILMLGIDGVNQIWRDAKLRAVGKARAKTLIEAAGHSVGSKEGAVSARMEIRMLLEDYESRNTRLQEVMVLIEELVKGIPMAEKLLEIKGVGIRTVSGFLAEVGDISRFNNPKELQKLAGLALVENSSGKHKGETTISRRGRKRLRYLLFEAAMSLVAKNPEFRELHNYYTTRRLNPLKKMQSLMVIATKLIRVFYAMLTKGADYDPKKMVSDIKRPAVYLQAV

SEQ ID NO: 503316 - protein, 376 aa, unidentified
MKKRSSSQKSQKSQKLTVKKKGAQERVTIGMDLGDKTSRYCMLSHEGEVLREGQVPTTKTGMLEKFGSLGPARIAIEVGTHSPWVSRLLRSLGHEIIVANPRQVKLITESTRKDDRLDAQTLARLARIDPQLLRPIQHRSEKAQTALMVIRVRAALLSARTSLVNTARGLAKALGERLPKCDADQMGVPKSESLPANVRKVLEPLLKEVESLTEKIKESDHEIEQIARKDYPETALLQQVGGVGPLIALTFVLTVEDKDRFQKSRDIGCYVGLRPRRCDSGQSQPQLRITKEGDPYLRTMLVQGAHYIISRRGPDSDLKRWGLHLAGHGGKRGKKKAVVAVARKLGILLHRLWVTGEVYEPLRNHNLRQQGKKIAA

SEQ ID NO: 503317 - protein, 336 aa, unidentified
MEVYAGIDLHSSNSFVGVIDGQDRRLYRKRLPNDLDTILSALAPFRKDLVGVVVESTYNWYWLVDGLQEDGYKVHLANPAAIKQYEGLKHTDDRWDSFWLAHMRRLNILPEGYIYPKEQRPVRDLLRRRLLFVKHRTAHILSLKSMIARNLGTRMSVNGIKKLTEADADDLFNSPTLAFTAKDNIAVISHLTKIVKSIEKEVVSQVKLRKEFKPLLTVAGIGNILALTIMLEVGDIRRFPNVGNFSSYCRCVRSERLSNGKKKDENNRKNGNKYLAWAYVEAANFAIRYYPRAQRFYQHKKAKTNGIVAIKALSNKLARASYYVMRDQVPYDENKI

SEQ ID NO: 503318 - protein, 349 aa, unidentified
MLVLGIDAHKRTHTVVAIDSTGRKLGEKITTATTTADHLDMLRWAEQFGPERRWAVEDCRHLSRRLERDLLAAGEAIVRVPPKMMANTRTRARTYGKSDPIDALAVARAALQEPDLPAAQLDGPAREVRLLVDHRDNLVSERTRQTCRLRWHLHELDPSWDPPSQTLNRYKRIDEVIVRLGDFDGLVARLALEQAIAIRDLIRRVNDLEREIKQLVTQLAPTLLAMPGCGVLSAAKIIGETADVTRFKSKDAFARHNGTAPLPVWSGNRERFRLSRAGNRQLNCAIHRIAVTQGRCHPPAKEFLERRMKLGNTRMEAIRAFKRRLSDVVYRDLPADAEHTTREQLRPAA

SEQ ID NO: 503319 - protein, 429 aa, unidentified
MPHDIVVWVGIDWATEEHQVCGVDGQSKTLFEWKVKHTGDAIETFVERLLEHVGGAAERIAVAIETPRGSIVEALIERGIAAFSINPKQLDRFRDRHTMGGAKSDRLDAFVLADSLRTDLRLYRRIELGDPMLVELREMVRAREAMVADGVALGSRLREQIHRYYPQFLKLGSVYEDGWLWALLELAPTPARAARLTRAKVAHLLRQHRVRRLTAEEVLAVLRETPLVVAPGVVEAASAHVRLLLPLLRLHRAQVADCEEHIEQLMKRVGRSPDTATPAPVDADGESSGPARQHRDADILLSVPGLGVLTSATMLAEASTALRDRDYQMLRAQTGVAPISAQTGKQRKPTVSMRRACNLRLRNAVYHWARVSTQCDEVARAHYARLRQVGHSHGRALRGVTDRLLSMLVSMLKSGTLYDPTRRTLPVTA

SEQ ID NO: 503320 - protein, 464 aa, unidentified
MTAGKQLWRNRKEKKEWARRLQSEDPGLEVVHPHAAGIDVGNSTHYVAVRPDRDPEPVRRFECFTADLHRLADWLQSCGVKTVAMQSTGVYWIPLYEILEEHGVEVYLVNARHTKNLPGRKSDVQESQWLLKLHTYGLLNNSFQPVSEIRVLRTYWRQRGEHVRGAATCIQRMQKALTQMNVQLANVISDISGLTGQAIIRAIVAGERNPLKLAMLSDPRVHASQEEIAKSLEGNWRPELLFVLQQEVDMYDTYQKRIAECDQRLQKHLASFTRPLPIQPPTQKLKTKKPAAKNAPRFDLSSELQRVTGVDLTRIDGIDVMVAQTLLSEVGLDMSRWITESHFASWLGLCPDNRISGDKVLSIGTRRVVNRAATALRQAANTLMRSRSYLGAQYRRLRTKLGAPKAITAMAHRLARLVYRMLKYGQTYVDKGTEYYEERFRQQQIHLLRKRAAKLGLQVAEIHA

SEQ ID NO: 503321 - protein, 343 aa, unidentified
MKLTRIGVDVAKQVFQVHGVDRHNTTVWRRRLPRERWLQAVSEIAEPGCEIGIEACGGAHHWARQLQWRGYRVKLIAPQFVKPYVKSNKNDANDAEAICEAMSRPSIRFVAVKTIQQQDIQAMHRIRSGLIEQRTAKGNQIRGLVAEYGLVAPKELSSLRRAIPCWMEDADNGLSACFRQLLDGLWRDLRAVDDRISELDRTIADLAQADPDARRLQQLRGVGPIVATALIAAIGDARQFANGRQMAASLGLTPRQHSSGGKDRLLGISKRGDAYVRGLLVHGARSALRTAPAKDDRLSQWATRLAQRAHPNVACVALANKTARLAWALLRHGTHYQPALAAA

SEQ ID NO: 503322 - protein, 462 aa, unidentified
MLQAINPRAAAADVGSEAIYVSIAGAKPVFFGTVTRELHRLRDYLHEHQVETIAMEFTGVYWIPLFEILEESPIKTCLFNGAQIKALPGRKSDVADSQWAATLHAHGLIRCGFVPSAEIRELRDYVRLRTNHISQASTHVLQMQKALELMNVKIQDVLSDLMGASGRRLIDAILGGTRNPQILLELCDQRILSKKEQRMREALEGTWSEQHLFALKQAYSAWKLCQGHIKACDQKIHGVLRAMAAATKASGKEPAGEDPKSDGGDGGTTEPDTKAKRMGKNAPKILGFNSLMEKVLGGRRPGRLPGLTQYTVLQLVSETGTDLSAFPDKKHFTSWLGLAPGKRQSGKRSRRESRKGARAGQIFRNVAQTVGRTLDAGLGGFYRRIRAHKGGLVASKALGRKLAALYYDVMTKGLEFAEEGLKKSEERYRAQEKAKLERLARKMGMSLQPLTIEEPQIQAATS

SEQ ID NO: 503323 - protein, 341 aa, unidentified
MQNVTLVGIDLGKHSFHLHCKDRQGKAVFRKKVNRKQLIEFLATLQACTVVMEACAGAHYMARKLETLGHQVKLISPQFVRPFVKGNKNDFVDAEVICEAASRPSMRIVSPKTEAQQTLSALHRVRESLIRDRTKTVNQIHGFLLEFGISLPVGLAVIKRLPAVLTEHPLPPRLVSILERLHAHFKYLSEQIGEIDKELSQQLAEDDLGQRLLSIPGVGPITASVLAAEMGDGKQYGCSRDFAASLGLVPRQYSTGGRANLLGISKRGDKNIRRLLVQCARTYMQRLERQTGRLADWVRVMLMRRHSNVVACALANKLARMAWALAAHHTAFKADVAAPQA

SEQ ID NO: 503324 - protein, 311 aa, unidentified
MANFAQSILCGVDVSKDTLDIATSDEITRQIPNTREGISQWLASLPTGSKIALESTGRYHEAVLDLALGAGFDVYIVNGHQLHHYRQAVGPRAKTDTHDAQLLRRYLCHEYGHLTSVNPLNDQQKRLWQLLKRRAMLIKMRTQLTLSMKGDPDFQSISQGIVSELNLAIKKVEQLMFALAKAQHWERAIQHCRSVPGIGPLNALALVTCFHRGTFQRVDQFIAYMGLDVRVRDSGRMRGKRKLTKRGEPEMRRLLYMAAWSFAKHPKFQPLYEQMRSRGLSSTAANVAMARKLARIAFALMKKGEDFMLAA

SEQ ID NO: 503325 - protein, 333 aa, unidentified
MQCIAGIDVSKNTFDELVLVGGKEKHRQFPNKKEGWVQFWTILQSLGADEIYVCMEATGLLWEDLAEFFYHKGVTVFVVNARRIKGFAMSEDKRTKTDKVDAGVIARFCRAHLSELNPWAPPASHTRHLQSLTRQQASLVEDRARQRVRLQSALLCVEVSESIKLYIEFLDKSIEKIDRSIEALIRTNSVLKEKEALARSIKGVGPITARVVLAECRLFNELSHRRQVSAFAGLDVTEFQSGTSIRSRPRLSKRGNARIRQVLYMAAMTAKRYNPVFKTFYERLVANGKTKMQALGACMRKLLELIFTVVTTGREFDSAYTSQPSKAVKVVAA

SEQ ID NO: 503326 - protein, 338 aa, unidentified
MPTDQTGQTYALFVGVDIAAQSAMVASQRPGAKASRSFTIEQTPEGYTSLLRQLQATGFVPGQVLVVMEATGSYWISLATRLVHEGFAVSVINPAQAHHFAKALLKRAKTDAIDAQTLAQLAMILQPEPWTPPPQIYYALQQRLAQRDDLLNLRQQVRNQLHALVQHPEVIAEVRTRMESLLATFASQLTEVESEITAALSQDSAWAAAATRLQSIKGVGWVTAAWTLVTTLNLTSCDTVDSLTAYAGLAPMPRQSGSSVWHRPSIGHTGNGRLRTAFYMATLSAAQHNPVIKAFYTRLREVGKPEKVARCAAARKLLHIAWAVVKKDQPFDPNYALG

SEQ ID NO: 503327 - protein, 346 aa, unidentified
MEHYVGLDVSLKLTAVCIVDQTGRIEREGVVHSDPEAIAAFIKSNAPHVARIGLETGATSTWLWTELNRLGLPVICIDARHAKAVLKMQINKSDRNDAVGIARIMQCGWYKEVRVKDLDSHAVKALLVSRALLVKIKRDLENQVRGLLKNLGLVIGRAKMNAFAWRAAELIQDQPELAAAVTPLLNARVAIERQIADLDRKVLKLARNNAQVQQFMTAPGIGPITALCFLATIDDPKRFRRSRSVGAYVGLTTRRYASGEIDWTGRISKCGDKMLRSYLFEAANVLLTRVAKWSALKAWGIRLAKRSGLRKAKVAVARKLAVILHRMWVDGTDFKWSSKETADQTA

SEQ ID NO: 503328 - protein, 412 aa, unidentified
MDVVYRCCCGIDVHKDSVTVCVLWAETKGKSRQEKRMFATFTQDLLALSDWLHACGVTHVAMESTGVYWKPVWHILEGHFELLLVNAQHVKAIPGRKTDRKDSAWLAELLQHGLLKSSFVPPEPIRELRDLTRYRVNLAQECNRIANRIQKVMEDANLKLASVATDALGASGRAMLKAIITGERDVEKLADMSRGLLRRKIPELQLALEGYVSQHHRFLLQELLDHLEFVESKMTRLEQEIAERLRPFEDTVRRLCTVPGIDRVSAWGIISEIGLDMHQFEDAKHLASWAGLCPGNWESAGKRKSGRIGKGSAWLRRHLCQSAWGVSTKQKNYLSALFRRLAARRGVKRATIAVAHALLWIAYRILRDPVEYRDLGPDYFDKLHPVRLKNRLVKRLEGLGFQVTLEARSLPA

SEQ ID NO: 503329 - protein, 343 aa, unidentified
MQIASIGIDLGKTTFHLVALGPAGQVLVRRKFSQKQLLTYTANLTSSLMGLEACSGAHFLGRALRAQGHDVRLIPAQFVKPFVKSNKNDFLDAEAIAEAVARQNMRFVPIKTDDQLDLQAIHRVRDRLIACRTSVINQLRAFLLERGMTFAKSPAKLKLAMPEILENADSNLTPRMRNLVADLWTEWKSLDQQIRASDLEVEQIATSDPACQRLRSIPGIGPLIATAIVAAIGNGAAFRKGREFAAFVGLVPRQYSTGGKARLMGISKRGNSYLRKLLIHGARAAVVRMKRERAPFGGWLNGLEQRAPRNVVVTATGNKLARIALAVLSSGDPYRPLTIATPA

SEQ ID NO: 503330 - protein, 436 aa, unidentified
MTLINFVAANQKYYAFNLLSVFIMVFWSVQYLLQHLLVQTQVSHQLLQPLILILQLPQTPQFRHARPGKFFLPVNGMDYFLPLRLTVRNVLTRRITMNIVFLGIDLAKNVFQLCGLNQAGKPVYTKRTGRKELLQTLANIPACLIGIEASTGAFYWQREFEKLGHKVKVISPQYVRPFVRGQKNDGNDAQAIAVALMQPTMQFVPPKSPEQQDIQALHRARQRIVNHRTATVCQIRGLLLDRGIPIGSAVSRARRAIPLILEDAENGLSSRMRRTIAELYDLFNDLGRRIHFFDKEIETVFRQSEACPRIAKVKGIGPKTATTVVAAIGKGTEFKNGRHFAAWLGLVPRQHSSGDRQVLMNMTKKGDKHLRTLFIHGARAVVRVATNNNDGHMNQWVNQLKERRGFNKTTVAVANKNARIIWSMLRNDTGYQVVCN

SEQ ID NO: 503331 - protein, 335 aa, unidentified
MEFAYFIGTDVSKNELDFAVMHGKTLLFHKEVRNVPTAIKSFIKELIKLPGFNLTEAVFCMEHTGIYCNYLLFQLHEKKASICLEAAMQIKNSLGNLRGKNDKVDAIRIAEYAYRNRDKLRLWQPKRDVIQQLAHLSTARSRLVEIQKTIKTTLKEMALFIEKSQGKLNKILCSKTLKGIDADLEKIEKTIDDVIAGDPELKRVFTLVNSVSGIGKVTSVMIIVATNEFKNIKDPKKFACHAGVAPFVKESGLFKGRAKVSHMANKKLKTLLHLAALNSIRYNEELKQFYERKVLIEKKNKMSVINAIRNKLVLRVFACVNQNRMYEKNYSRLVA

SEQ ID NO: 503332 - protein, 402 aa, unidentified
MKKFNAEPIGLEMASALETIQPLEAGHKHPGYIGLDVHKESIVVALARAGRDAPQTRREIANKPKAVAKLVERLNQEFGGEVLLFCYEAGPCGYGLYRQLLGLGHDCQVVAPSLIPKKPGDRIKTDRRDACKLAQALRSGDLTAVWVPDEEQEAMRDLTRARADMKAQERKARQQLNAYVLRHGHAWASNKTRWTKTHYNWLEGLRFAHDWQQVVLQEYIDAVRAASQRVADITAQMERVLPQWSLAPVVDSLVALRGIDKLAAMVLLAELGDISRFDSPKQLMAFLGLVPSEHTTGGRRRQGAITKTGNRHARRMLVESAWSYRFPARQTAHLKRKATSASAEARDIAWKAQKRLCGRYRTLTRAGKETKLVCVAIARELVGFVWDIVCREMPKVQLHKAG

SEQ ID NO: 503333 - protein, 337 aa, unidentified
MTIIRIGLDTAKHVFQVHGVDENEQTVVRRQLRRGEMEKFFNRLAPTRIGLEACGASHYWARLLRGLGHEVVLLPPQYIKPYVKRGKNDANDAEAICEAMSRPGMRFVPIKSAESQAELMLLGVRDLLIKQRTAVINTIRGYAAEFGVIAAKGPVKVAELLQQAHAEEANVPALALDMLRLLAAQLDALGVKLKLLETRLMALHRENPLSQCLASQPGIGPIGAVSFALRVTEPKSFRSGRHFAAWLGLTPKDNSSGGKRRQGRISRQGNEALRKLVVLGATAVIRFARPGHASPWLLNLLARKPKKLAAVALANKMARTLWAMMVSGEVYRRPLPA

SEQ ID NO: 503334 - protein, 381 aa, unidentified
MNAVGIDVSKGKSMVAIMRPFGEIVSTPFEIKHTSSDINSLVKLIKSIEGESRIVMEHTGRYYEVLAHQLSEANLFVSAINPKLIKDFDNDSLRKVKTDKADSVKIARYALDKWQNLKQYSVMDELRNQLKTMNRQFGFYMKHKTAMKNNLIGILDQTYPGVNTYFDSPARSDGSQKWVDFASTYWHVDCVRKMSINAFIDHYENWCKRKKYNFSKSKAEEIYGKAKELVPVLPKDDITKLIIKQAVDQLNSASITVESLRTLMNETASKLPEYPVVMAMKGVGTSLGPQLMAEIGDVSRFTHKGAITAFAGVDPGVNESGSYEQKSVPTSKRGSSDLRKTLFQVMDVLIKTHPQDDPVYQFLDKKSGSKETVLCLYDCRC

SEQ ID NO: 503335 - protein, 355 aa, unidentified
MNDAKYIGMDVHQATISAAVRDSSGNLVMEATLETKAETILEFVRGLRGSLRVSFEEGTCAAWLHDLLKPHVTAVLVCDSRKNALLRVGNKNDREDARKLAELLFLNKLHSVYHGETGIRALKELARSYLTITRDLTRVMNRLKAIYRGWGIACAGQQVYAPRYRAEWLAKFTEAGVRRRAEIYYQQFDVLAALRQEARRELLAESRKHPAQRLLRQIPAIGPIRAALLIALMQTPHRFRTKRQLWAYCGLALRTYDSGEYRFVGGQLKRSKKAVTIRGLNKNHNHDLKNIFKGAATRAAATVGPFQNFYEARIASGMKPPMARLTLARKIAAITLLVWKKGVRFDANQLKQQAA

SEQ ID NO: 503336 - protein, 331 aa, unidentified
MKFKEFIGIDISKLKFDVRIHSNQKESVFENNNAGFKSLMKWIMKNVNCEKEKILCALEHTGIYSLPIAAFFSENHCHFVLLPGLEIKRSLGIQRGKDDKIDARRIAEYVYQKRDKITPSQLPFKNILKIRRLLSVRDRLVKHKAGFLKDKGENNKFLKHSENKILFEVIEKSVTDIDKQINKVEKELENIIKSDELINKQFQLIISIKGVGKQTALFIIAYTNCFTSFDTWRKFASYAGTAPFPYSSGTSIKGRSKVSHLANKKIKALLNMCARSAIATNPEMKIYFQNRKAKGENGMSTINIIRNKLLSRIFAVVKRGTPYVDTYKFAA

SEQ ID NO: 503337 - protein, 341 aa, unidentified
MDKIASQPAAWCGIDVSAQELVVALQRGDRAVQHRTFPNRSVGHQALIRWLARSTGTVRVCLEATGLYSLDLALSIHEALGIELAVLNPKAVCRFAETLRRSKTDPADAMVLLDYARRMPWQSWQPPSATALVLRSITRRFAALTKQHTMEANRLHAAEASKTVPRCVRQDLRQSLRQIECRLKRLQSEARELVARDAELEQRYTLLRSIPGIGESSALQIMGELEVLAPDLDVRQWVAHSGLDPMHHTSGSSVHRAARISRAGNRHLRRVLYMPAVVGVRFDPYLRTFYERLLERHKTKLQAIIAAARKILHAIYGMFRSRSRYDGSKLFPLLQPTAQAA

SEQ ID NO: 503338 - protein, 391 aa, unidentified
MIFVGIDVAKDKHDCFILNSEGTVLADVFTIANNRIGFETLLSRIQSCSLGESKIKVGLEATGHYSYNLLGFLLDSGLATYVINPLHTNLYRKSLSLRRTKTDRIDARTIAMMLMSDVDLKSYSNTAYHNEELKSLTRYRFDKVKERAKLKSSVARLVNILFPELEKLVSSLHIAVVYALLSNYPGASYIANANTEELAETLCTASKGRYTKSKTAEIQVAAGVSIGSKMPAKSMELKHTIALIRELDKEISEVESAIDKITSQMDSPIFTIPGIGRHMGAMILAEVGDFSNFASADKLLAYAGLSPSTYQSGQLQNCYAHMEKRGSRYLRYALFNAAKYVCLWCPTFSAYLEKKRSEGKHYNVAISHAAKKLVRLIFAMQRSGKAFLADY

SEQ ID NO: 503339 - protein, 348 aa, unidentified
MTVYCGVDFHARQQTISYCDTADGEIHRQELHHQRDDVRGFYAQFAGEVIVGLEASGYSAWFEEMLEELQRTVWLGNAAEIRRKAPRRQKNDRRDADLILELMMKGDFPHLHRFSAESRMVLRQLRYRHKLVKVRTIAKNSLHAISINAGLPLKRGLLTKGGIERLQALALPPVLAQQREEWLQLVMVINQRIAQVETMLEQVASGDEAVALLRTHPGIGLLTALGLRYMLMPVSRFSTTRKVTAYVGLDCMEDMSAGIRRMGSISKAGSRLLRFLLNEAGHTACRKDPDLKRFYQRLVHRRDRPKAKVAVARKLLVRSFIMLRDQIDYAEFRRRGVAARSAREAHRL

SEQ ID NO: 503340 - protein, 412 aa, unidentified
MLFVGDDWAEAHHDVEVEDADGRRLARARLPEGIAGLARLHELIAEHLSDDDVDPETGFVGQSVAIGIETDRGTWVSALVAAGYQVFPINPMSVARYRDRHATSGAKSDRGDAHVLAEIVRLDRAHHRPIAGDSSEVEALKLVARSHQAFIWDRTRHLLRLRGALREFFPAALEAFPELNSPDALELLERAPDPARAARLSRSKISAALSRAHRRDPEAKAEAIQAVLRAPALRQAPPIEAAYAVIVASAVRLIGQLNVQIVELQAVVAEGFGRHPDAEIVTSQPGLGPVLGARVLAEFGDDPHRYADAKARKNYAGTSPITRASGTRRVVLARYARNKHLADATHQWAFCALTASPGARAYYDAIRGHGVSHHAALRQLANRLVGILHGCLKTRTLYCEDTAWPCHITQAA

SEQ ID NO: 503341 - protein, 344 aa, unidentified
MSKHSVRGGDFAGLMERFAQLQEKARLRTGQSFRIIVVQEAGLDGFWIHRALQNEGIESHVVDAASIATSRRRRRAKTDKIDGETLVRALLAYKRGEPRVCAMVKAPTPGEEDRRHLCRERKALTAERVRHVNRIKGLLFSQGISGYQPLRRDRRQRLEELQTGDGRAFPQHLKALVNRELDRLELLLKQIKTVEAARDALLAVEQTAMPAPAAMLLDIRGIGPEFAAILWSEGLFRHFENRRQIAAYAGLAPTPWQSGAVDREQGVSKAGNPRLRTTLIQLAWLWLRNQPRSALSLWFHERVSRNGGRLRKTTIVALARKLLVALWKYVTAGVVIEGVTMKVA

SEQ ID NO: 503342 - protein, 356 aa, unidentified
MASIALERSDVIVGVDTHKDQHVAVALDGFGGDLDDRVIVATNDGYAELRAWALGLGRVVAFGVEGCGSYGIGLARFLRRHGHKVIEVSRPPRKGERRVAGKNDLIDARHAASEVLAGRVTATPKTASGSIESIRLVKVVRDTAVKAHTTAMITLKATLVTATDELRGELEPLSDFKLITACAALASNGDLTDPGDAMRHALGALARRWLELHEEIKIHSRQLKTLTSQAAPELVEAFGIGPDIAGELLVAAGDNTDRIRSDAAFAKLCGSCPIPAGSGRTNGRHRLNRGGNRQANAALYRCVIVRMRWHAPTVAYVERRTAEGLSKKEIIRCLKRYVTREVYALLPAPTAIPVHQ

SEQ ID NO: 503343 - protein, 351 aa, unidentified
MPRTATVHAVTAIGIDMGKNTLHMIGLDSRGTIVLREKVSRGRITSRLANLPPCLIGIEAGMATHYVARELAVLGHDVKQVPPAYAKPFRQGHKNDFRDAFAVAEAVQRPTTRFVPAKTNEQLDLQALHRVRSRLVSERTAVINQIRGFLLERGIIVRQGLRFLRQALPDILAKRTDVLSPRMMRIVADLASDWRQLDERIEPVTDEIETLAKSDNSCRRVMTVPGIGPIISSAMVAAIGSGAAFARGRDFSAWIGLVPKQMSTGDRTILGRISKRGNSYLRTLFMQAARVILLRPVSWPKHGFGVWLARAAQRLHPNVLAAALANKLARIAWTVLVQERSYEARFTKAAA

SEQ ID NO: 503344 - protein, 387 aa, unidentified
MIYLGIDVAKNSHVAAAMSSEGEVLLMPFPFANSADGFALLREKLNSLPRLPLLVGLESTAHYGENLIYFLCGNGYHVAVINPLQTAAIRKSAIRKTKTDKVDAFVIAKSLMMEGYTELQQADLQILKLKGLCKTRQNLILMRTRCKIQLGSFVDQLFPELNQFFRSGLHINVSYTLLKAHPRPAEVCSLHLTYLSNLLRKASRGKYTKEDAIRLRELARNSIGTDSPALALQIRQAVSQIELFSTQLEQVENEISTIMDSLHSPIMTVPGIGHLNGAMILSCIGNIQRFSSPAKLLAYAGLDPAVVQSGNFHAKSTRMSKRGNSMLRYALINASHNVVRNNETFAQYYNSKIAQGKSHYCALGHTAHKLIRVIFTLLTKNVAFDLA

SEQ ID NO: 503345 - protein, 392 aa, unidentified
MFIVGIDIAKRFHEASVIAQDGSLVRKALRFANSQAGYNKLMNMVRGLNEPVVFGMEATGHYWMTLFTHLRNDGFTVHVINPIQSDALRGMYIRKTKNDAIDSMIIADVIRFGRYCETSVQPGDLQAMRELCRQRFYVIDMASDLKRKVLALLDQVFPEYEKLFSDTFGASSMELLSQYTTPEEMLSVSTEKLAELLETASRGRLGLAKAEEIQEAAKNSFGIVLASGSFALIIRQYIEQIRSLESSIAVFDTEIARLLAGFDTQLTTITGIGPTLAAVILSEIGGDIKRFSSPAKLAAYAGVDPTVKQSGDFTGTRMKMSKRGSPYLRRAIWLASTVAAFKDPAIHALYERKRSEGKDHMTVIGHVCRKMVSIIFAVLRDNTPYSPAVISD

SEQ ID NO: 503346 - protein, 458 aa, unidentified
MRKPSNRKQGGRQNTKDWDTLPALNRNAAGIDVGNAEHHVAVPAGRDEQPVQKFGSFTADLHRMAAWLTACEIDTVVMQATGVYWVALYQILEEHGLQVNVVNAQYTKTLPGRKTDVLECQWLQKLHTFGLLNNSFLPPDKIRVLRTYMRQREKLVTAASTAVQHMQKALTEMNVQLANVISDISGLTGMAILRAIVKGERNPDKLADLKHTRIRASSQEIAQSLEGNWREEQLFVLEQSLALYDLYYQKISECDQRIASHLRSMDSKAGQPTVEAEIPPRRSKKSSGFDLRAQLCRIAGVDLTRLDGVDVGTAQTVISEVGVDMNRWKTEKQFASWLGLCPDHRISGGKVLKRGTRHVVNRAATALRMSAWSLIRSQSALGANFRRLRRRLGAPKAITAMAHKLARLVYRMLKFGKEYVDKGTTYYEDKFRQHQLNWLTKQAASLNLQLTPIMDIRS

SEQ ID NO: 503347 - protein, 458 aa, unidentified
MVESSRPSSTTIFKVREKAAGIDIGAEEHWICVDPGLTDNPIRRFGGFTGDVIEAVLWMKNLGVTSVAMEATGVYWRELFTRIEEAGIEVILVDPRRTRNPRGRKTDMQDCRWIWELHAHGMLDGAYVPGPEVQCLRTYLRFRKTRVEQAGIALKEVQRALSLMNIKLQHVIADIGGTSGQDIITAILGGERDARVLAKLRNYRCKTDESTIIKSLTGTWRVEHLFLLQQAHEDYLHQVAFIATCDAQLAQLIDHLPQRSSDDGAGLEVKRPSGKRDFSFDAQQASYRLTGIDLTAIDGIGPNTALCFLGEIGFDLTAWPTSKAFCAWLGLCPNPKRSGGKTIGTMPTTANRAAQILKEAAMGLRGDKRNPLSKVYAKLAIRRGSSQALKAIAHKLARIIYALFTNRTAYDRSKLEPKVTDRVISRMTDRLAREAKKLGYTLQKTISQPIAEQGSASC

SEQ ID NO: 503348 - protein, 348 aa, unidentified
MDQYIGLDVSLKDTAISIREDGKRIWRSKCPSDPSLLAQLIRKHAPHAKRVVFETGPLSTWLYHALTAEGVPAICIEARHAQKVLNETLNKTDANDADGLAQLAEAGFYKAVRVKAFDSMLTRTLVGARNQLLSVSTQLSNQIRGLMKTFGLIVPKGTGRMFDGNVRELLAGNGDLTTIILPLLEAWRDIRKRAADLDRQLLAAARESQATKLLMTIPGVGAVTAISYVAAIEDPDNFRTSRSVGAWLGLTTRRYQSGEVDYDGHISRRGDNHLRGLLYEAATVILTRIRARNESSLKSWGLKLRERLGFKRAAVAVARKLAVTSARNSSRKSGAPVSLSKPASRGSP

SEQ ID NO: 503349 - protein, 346 aa, unidentified
MKHYAGLDVSVKETAVCIVNETGEICREVKVVSHPDDLTAVLKDPAWDFDRIGLEAGPLSQWLFEGLAKAGLPLICIETRHTKAFLKAQPNKSDRIDARGIAQMMRVNLFRPVHVKTMISQKRRALLTARKLLQEKAIAIENDIRGLLRNFGLKVGMVSAVKFEQRIRELVDGMPDLAEIIEPLLDARSKLRRNSAALHRKLLVIVRNDQVCRRLMSIPGVGPVVALAYTATIDIPARFRNSKAVGPVLGLTPVLHESGESRRIGRISLCGDGMMRTLLYEAAQVLLTNVRKWSWLKAWAMNVAKRRGRQKAVVALARRLAVIMHRMWSDGTQFRWTRKEIMPVAV

SEQ ID NO: 503350 - protein, 357 aa, unidentified
MQTKISESTFAGQQIFVGIDVHLKSWKVTIMAGDLQLKTFSAPPEPKKLFCCLQAHYPGATYNTAYEAGFSGFWAHRELVKLGVNSIVVNPADIPTTDKERKQKEDRRDSRKIAKTLQAGQLRGIFIPSEKMQQDRALLRSRDAILKDLKRNQVRIKGLLYFHGIKYPERFENAGWSKQFLDWLRSIEFDHNGGRSALDALLSMVEHQRTVLLRLTREVTELSKSDAYKKEIELLLSVPGIGILTAMRFLTELGTLHRFPSFPKFCSYIGIVPSTDSSGDKEVAMGITPRRNMQLRTAIIESAWIAVRRDPALLRAYQTLRNRMPVNKAIIRIAKKLLNRVWHVLQKKEDYEMGIIR

SEQ ID NO: 503351 - protein, 352 aa, unidentified
MAATAQSAIAVIGIDIGKNSFHVVGLDGRGAIVLRQKWSRGQVETRFANISPCLIGMEACVGAHHLSRKLKALGHDARLMPARYVRPYSKGQKNDFRDAEAIAEAVQRPTMKFVVTKTADQLDLQALHRVRERLVSQRTGIINQIRALLLERGIAVRQGQRFLRVELPRILATPPDVLSPRMVRVIEGLASDWHRLDERIEGLSSEIEELAKRDAGCERLMSIPGIGPIISSAMVAAIGTGDSFSKGRDFAAWLGLVPRQISTGDRTILGKISKRGNRYLRVLFVQAAWVVLVKVKPTRWQGHGLRPWIEAAKKRLHHNVLAIALANKLARIAWSVLAHGRAFETNKLQAAA

SEQ ID NO: 503352 - protein, 358 aa, unidentified
MTDTTKIKAKKFTYFIGIDVSKNKLDYAVMNGKTLLFHQEGKNEPDDILAFVTKLKTLKAFTIAKAVFCMEHTGIYCNHLLNSLKKIKANIVVENSMHIKKSLGLTRGKNDKADSIRIAAYASKNKDELRLWVPRRQVLLDLMNLIAVRNRLLGFSMALNTPLKEETTFIKKRLQNQNKQSCKKSAEAIKADLTGVDLSIEMLIDADEHLKWLKQLITSVPCVGPITAIQIMISTNEFKDIKSPKKFACYAGVAPFKNESGSSTSKAKVSPIANKKMKSLLHLCAIRALRCDAELKAYYIRKTETEGKAKLAVVNAIRCKLILRVFACVNQNRPFIKNYTRPNNPAASELTKSLSLET

SEQ ID NO: 503353 - protein, 349 aa, unidentified
MVVLGADLHKRTHTVVAVDEHGGRLAERTVTATREGHLELRRWAAQWPERRWALEDGRHLSRRLEADLLRAGEHVVRVPPKLMAGTRRSAREPGKSDPIDALSVARAALREPDLPTATLDGVEREVRLLVDRREDLVGERTREVQRLRWFLVELEVPEPAPAALDRVVVQTRLAAELASRPELVARLAREILARVVELSHTIRRFEREIEARIRPLAPHLLALVGCGPLTAAKLVGETASVSRFRSKEAFARHNGTAPVPVWSGNTVRHRLSRGGNRQLNVAIHRIAITQVPLGGLAKGYVDHRRAAGDTKTEAVRALRRRLSDEVFRRLRLDEEAHVKVAATLTTAAA

SEQ ID NO: 503354 - protein, 341 aa, unidentified
MRQVNTIGLDIAKRVFQAHGADASGRVVFRKRLVRAKVLEFFAAQPPCTVAMEACAGAHHWARELGKLGHTVRLIPPAYVKPYVKRQKNDMADAEAICEAAQRPSMRFVPVKSEEQQANGVVFRARDLLVRQRTQCINALRGHLSEYGYVFPQGITHADAVIAHVEDPGSSVPESARAVLKVLIGTFQALEAQIQALDAEITQRAKADPVARRLMTIPGIGPIAATAITALVPAPEGFRAGRDFAAWLGLTPLQKSTGGKQKLGAVSKMGERTIRRLLILGASAVVRWAGQRGTPAGSWLTQMLARKPKMLVTVALANKTARIVWALLVKGGVYRAPAPAA

SEQ ID NO: 503355 - protein, 328 aa, unidentified
MCAVDADGEVIRETKVPTEPEAIIAALAAAGAGWKRVGLEAGPLSQWLFSALVEAGYPAICVETRHMKAALSARINKSDRNDARGIARMMRVGLYRPVHVKTLASQERRLLLTDRRLLQDKMLDIERELRGTLRNFGLKVGIVSRAKFEARVEELVTPHPRLAVLVRPLLAARRALREQFALMHKMLLDLVRDEPVCRRLMTAPGVGAVVALAYRVTIDVPARFERSKAVGAALGLTPRRYQSGELDRTGRISKCGDGMLRSLLYEAAQVLLTRASGSWLKAWGLQLAKRRGVKRAIVATARRLSVILHRMWVDGSDFRFTRQQDASA

SEQ ID NO: 503356 - protein, 334 aa, unidentified
MHQITTIGIDLAKSVFQVHGVDTEGAIVVKRKLRRAQVLTFFAGLEPCLVGMEACAGAHFWARELAALGHEVRIMPPSYVKPYVKRGKTDAADAEAICEAVTRPTMRFVPVKSAERQAALLEHKTRDFLVRQRTQLVNTIRAHLSEFGIVVAKGIHNVDRLLEASSELPDAARPAIDLLAEQLRETQEKIDAVTARIEAAQKSDPLARRLATIPGLGAITASAIAATTPEVDNFRTARDYAAWLGLTPQPHSSGGKERLGRISKAGNRYLRRLLYLGAMAQISARRGRRPGDDWLWRMLEKKPVKVVAVALANRMARVVWALIRTGESYRATPA

SEQ ID NO: 503357 - protein, 356 aa, unidentified
MNKRTKLDFSSQPIYIGLDVHKKSWSVSIFTQHGEYKSFSQTPKAETLINYLQRHFPGAQYHSVYEAGYCGFWIHDQLREKGIQNIVANPADIPTQDKERRNKRDRVDCRKLARGLRSGDIKGIYTPPRWKLEDRSLIRTRLSMGRKQGRCKNQIKSMLLFYGVEIPEQREMGHWSRRFIRWIEGIRMERASGDMALKIHIEELCHLRQIIAKLNRAILSLSRTEEYKGWVSLLRTVPGISTLSAMIVLLELGEINRFPSLDHMCTYVGLIPDIRGSGEKEHVGGMTQRGHSYLRWLLVEASWVAVRKDPAMMEAFNEYCKRMKKSKAIIRVARKLLNRIRYVLKNKAEYVPCVIE

SEQ ID NO: 503358 - protein, 343 aa, unidentified
MIIIGVDAHKRSHTMVAIDEQGRALGERTVQATTPGHHHAFRWARKSFGSELLWAVEDVRSLTVRLERELIDAGHRVVRVPTHLMARSRKTSRTPGKSDPIDALAVARVALRESDLPVATHSPRTRHLKLLLDRRDDLVQYRTAATQRLLWHLHEIDPTYEVKPGALSWSTTQAAVADMLTRHHGLVAEIAGEELWDVQDATPRINELQRRIGTVVRSAAPSLLELHGCGPLTAARIVGETADVGRFKSEAAFARWAGVAPIPDWSGTTRGQLRPFRGGNRQVNAAVHIIALTQIKKGAPGEQYYRQVRDRKGSHGAAFSALKRRVVRSIYTRLRADRSLLAD

SEQ ID NO: 503359 - protein, 322 aa, unidentified
MSQPGSLCVDIDVSKAILDIAASSAIEQFSVGNDSDGFDAIIAELRMYAIALVLMKATGGLETAIVCALQAEGFELAVVNPRQARDFARAMGYLAKTDSIDARVLSQMAEVLNRHPERERFIRALPDTECQVLTAMVVRRRQLITMLVAERNRLHPAHPLNRKSINIIIKALEDELARLDADMNSHIHSHFKELAKRLSSIKGVGTMTAAALLAEVPEQGNLSRREISVLVGMVPVNRDSGTMRGRRTIFDGRAGVRTALYMAALVATRFNPVIKVFYMRLLAAGKPKKVALVTCIRKLLTILNAMLRKNEEWNESYHHVAP

SEQ ID NO: 503360 - protein, 414 aa, unidentified
MLADERGRRLARERDTLLSRRSSASCSDLNLQELLDSITMPAPLDPSKLWLFDDQGLGRKEPDMMIIGVDYHPSFQTIAFLIEETGECGERELNHSDGEAERFYRELKERGVSVRVGMETTGHTRWFERLLAELGFELWIGDPAEIKTKRVRKKKTDREDARLMLKLLLENRFPRIWVPSPENRDLRQLLWHRHRLVQMRTRIMNQLQAVAMNEGYRWKKKLFSEKGRGLLEKLPLAPWASRRRKELLELLDQLDPKIAELTAAVEQEANKRPEVLRLMTHPGVGPITGLVYVLVIGTPDRFPCGKQLGSYTGLIPCEDSSAGKQRLGHISKQGNKLLRYLLGEAAQAAARCNPDWRRRYVHLMMRRQKKIAKVAMARKLAVRLYWMWRNNWQYSQLVEYGSNAGKLGIVHGVK

SEQ ID NO: 503361 - protein, 341 aa, unidentified
MGEVSTIGLDLAKAVFQAHGADLSGAVVFRKKLRREQLLAFFAGQPRCLVAMEACASAHYWAREIAALGHETRLIPPVYVKPFVKRQKNDMADAEAICEAAQRPTMRFVRPKSAEAQGAAVVFRTRDLLVRQRTQLINALRGHLAEFGFVVRQGPGHVSKLIELVAGPASELPADARSILVVIADSLQSVQAKIVVLDREIATRAKSDPAAKRLMTIPGIGPVVATALVALAPPASTFRRGRDFAAWLGLTPKQHSSGGKERLGRTSKMGERSLRRLLILGASSAARVAARDRSRASPWLIGMLARKPRMLVTVALANKMARIVWALMAHGGSYRAPAPAA

SEQ ID NO: 503362 - protein, 350 aa, unidentified
MNETGLYWIGLDVADLTFDAAVARPGERATAAAFKRLPAQTFERTAEGVKALAAWLETLMPGPGPLPARAVMEATGNYSIGLAALLSKACPELRPAIANPERTAAFRNSLGLRNKTDRLDARALAFYGRDRQPEPYEPLSREQARLRELSRCREGLIASRTAHENQLAEVSSCPLVCKTLKAVIARLQKAIERLEKEMRRLIQAHPSLGADYELLTTIPGVGFVTAAVVLAEAGDLRRFGKARQATAYAGLTPRHSQSGKNSSPGRMSKKGNGRMRRALYLAAVSAITYNPPLAALYRRLVAEGKKPMVALGAVMRKLLVQMWAIVNSGKPFHAGGKPRKNFKLQLQKTP

SEQ ID NO: 503363 - protein, 438 aa, unidentified
MTSIAVRNVAVTRVLRLVCRHDADDDQERAMDLHRPHDYEVYCGLDVGKSDHHACALDPAGRKIHDKALANDEAALRAVFTKLLTRGRVLAVVDQPAAIGALAIAVARDMGIDIAYLPGLTMRRLADLQPGQAKTDARDAYVIADAARSHPHTLRRVGTDDETLADLGVLAGYDDDLAQQATRLTNRLRDALTHVHPALERLLSKHMDRGGVLDLLAAAGTPTALATLGEHGIADLLRPRSPRLARTLPALIITTLTQQSVTIAGTAAFSRVITGVAAQLREVRDERAALAVELEARLEAHPLAEVLTSMPGVGVRTAIKILTIIGDGSAFTSAAHLASYAGLAPVTRRSGSSIRGESHSQRGHHALKSALFLSAFAALGDPASRAYYDRKRAQGKLHNAALICLARRRIDVLFAMLRDRQPYRPQTSASSAEVAVAA

SEQ ID NO: 503364 - protein, 324 aa, unidentified
MKNEPESFALFVGVDVSKAQLDVFLPDSKTRLTIENSTDSIVRELVKVLKHKSRVLVVMEATGGYESTLVRVLGERQIAVAVVNPRQVRDFAKGIGRDAKTDAIDAEVIATFGQVVKPAPMAAKSEAEEKIAALVTRRAQLLDLISQESNRLLQTGDREVKDYIRQTLESLKKQLKVLDSRLEKCVAADTVNARKVEILNSVQGVGAVTISTILADLPELGKLNREQIAKLVGVAPINRDSGTWKGQRFVMGGRVHVRRVLYMATLVATRCNEKIRAHYQHLLARGKAKKLALVACMRKLLTILNTILKNDVLWSNEKIVPSQP

SEQ ID NO: 503365 - protein, 400 aa, unidentified
MRVVFGIDVSKASSEVAILVNGEKVHGYTISNDAIGFARLLGDLRTVHKPEIIFEATGVYSRRLQAFLNEHGYAYTRLNPLEAKKQLDSLRVRKTDQIDAEKLAQSQFVLNRKPTYVQEEVYQNLRDLSRFYQNLTEDIVRAKNRLHKVLQVTFPELENILSTPSGEQYWNLVIAFPCKDFVLDLSKDKLSESIRQSTSKRISDKRVAYLAEKLIALANQSYCAVKKNSPMLEEVRYYTKELLRLSEQRQAVLDEMVELAQPLPEYDILLSIPGIAETTATSIIGELGDIRRFQSANQINAFIGIDLRHYESGNFIAKEHITKRGNPYARKILFKCIHNIASASHTNPCHIADFYKKRKRQSQTTSTKPHTIASIHRLIRTMYYLIMHNKLYDYASTQNR

SEQ ID NO: 503366 - protein, 428 aa, unidentified
MHSLQTRIRRITPTTIIVGVDVAKDLHWARITDCRGLDLMKPVKVHNSIDGFESLLAKVEKQRIKHGCDHVIIGMEPSGHYWRALGWYLKLHESKPELVGINPYHTKQAKELDDNSQTKSDPKDALTIAHLIRNGNYFDTYLPEDEYAELRQLNSERQRLMKQISRVNNTLIALIDEFFPEYDTIWSNTTCPTSLELLKVYPFPSDIMAADKETLLAEIKRASGGIEGVKLMGELIQTAGRSVGVKEGQRSVRLRMLSLIDEQTYFQGKKEAVEAELEAVMNTLQLGKILQSMLGVGTIISSAFLGEVGDISRFSNWKQVRSLAGLNLVENSSGKHKGKTKVSKRGRPYLRHMLYLAGEGACTHNPEMRKFYRYLRDRKDNPLNGPQAFVATGLKIMRILFHLAKTGETYDPNKALGAVRLQQIASLG

SEQ ID NO: 503367 - protein, 355 aa, unidentified
MSQEKYIGMDVHQATISVAVMDGKGKLIMECILETKASTILEFIQGLHGSLSVTFEEGTSAAWLHDLLKPHVAQLIVCDPRKNALLKDGSKSDRIDARKLAELLRLNKLNPVYHGEHGVRTLKELGRSYLTITQDLTRVMSRIKALYRSWAIPCSGTTVYAPHHRSEWLAQIQEPGVRLRAQRLYQQLDLLQPVRQQARHDLLLESHKHPAVKLLRQIPTIGPIRAALLVALLQTPHRFRTKRQLWAYSGFALETHDSGEYRMVRGKVRRNRERLTVLGLNDNHNHDLKNLFKGAAISASTRPGPLYDFYVGLLAKGMRPTMARLTLARKIATITLTMWKKGVDFNANEFQRQAA

SEQ ID NO: 503368 - protein, 420 aa, unidentified
MSPDEKAAFARTFLVHVGVDTGKRFHVLVARGPDGLRRKPVKVLVSREGFERADAELQALFPDTERSRMLIGLEFAGHHGFTFAHFLASRGYPIVNVLPAHTKRTKELEDNSPLKTDVKDAGVICKLVADGTFVRFPFLESPYAELRVLVSFRHRLAVEATRFKNRLQGLLDLAWPEFVAQFSTLAKHTPIGLLERWPLPQDLLAAHKATVRAYARKISKGKFVTERFERLYTSAQQTIALPQATTERRMEIQGTLARWRLVRKQMLEAEARISELMARLPSAQALLTVPEVSAVCAATILAELGTPGDYAHPRQVLKLAGMNLIEKSSGSSQGRRRQSKRGRPMLRRQLFLLAGRWCQRRGLYRSYYEALLARNGGLKTKAVCAIARKLVPLVLAVLQRGEPFDKTRWQAARHQPALTH

SEQ ID NO: 503369 - protein, 264 aa, unidentified
MYDHYIALDWAQSNMALARITKESSAVKGVNVASSLKELQIYLSRLRGKKILTFEETSTSQWLYVELKNYVDEILVCDPYRNHLLSDGPKTDELDAVKLAQLLKGGFLKPVFHSADEFIYLRKLISGYEDVTKAGVRLKNQRAALFRAQGKDKSQKNLTQKPEGFVLEGVERGIDAYEREKTRYEREMERQRRKHSMIRNLDRIFGIGVIGAVKIVARVVDARRFEDKGKWLSYCGLVRQEKISGGRSYGWKGSKVLPDTEGCV

SEQ ID NO: 503370 - protein, 420 aa, unidentified
MDAIIERCCGLDVHQATVVACLLTGKANSKPKKELRTFRTVTRDLVAMAEWLREHGCTHVAMESTGVYWKPVHAVLEGGFELVVGNAHHIKNVPGRKTDVKDSEWIADLLRHGLIRASFVPPKPLRELRDLLRYRRKLGESGASERNRLLGVLETANIKLASVASDVFGVSGRLMLEALIEGKSTPEEMARLAKGRLREKLAELQLALEGSVGEHHRFLLGMQLRRLKTVEEERALLDQRIDEKLKPYRAQHTLLMTIPGVDWYVAAVLIAEIGVDMSVFLSAYHLAAWAGVCPGNNESAGKHKASKARRGNVHLKTALVGAAVSAGRAKGTYLRDKYHRLKARRGGLRAAVAIAHKILVAAYHMLCRDAPYHDLSDAYLDKLDETRTANNLVRRLERLGFAVQLDRKTADSLPAAEAFS

SEQ ID NO: 503371 - protein, 342 aa, unidentified
MNEVTTIGIDLAKNVFQVHGVDASGASVIRRQLRRSQVLPFFRKQASCLIGMEACVGAHHLSRQLQALGHDARLMPAQYVKPYLRGQKNDFHDAEAIAEAVQRPRMRFVPTKSVEQLDLQAMHRVRSRLVRHRTSVINQIRALLLERGIAVRQGVRFLRAALPDILGQESERLSPRMVGVIADLSGDFRHLDERLDDVTAEIETLAKADDACQRMMTVPGIGPIIASAMVSAVGDGAAFGKGRDFAAWLGLVPRQMSTGGRTILGRISKRGNTYLRTLFIRGARVILLRPENWPKHSFGPWLLAASRRLHRNVLAVALANKLARIAWSVLAGERNYEARRAA

SEQ ID NO: 503372 - protein, 346 aa, unidentified
MTIVGCDFHPSWQQIAILDMETGEVRECKLVNGNGEAERFYRQLPSPTLIGIEACGNSQWFLDLLQRLGHEVWIGDAAQIRASYVRKQKTDRRDAAHILKLLIEGRFPRLWTPSAEQRNLRQLLIHRHKLVGIRVQVKNGLQHLMLNRGVQLKEKLWSQAGQKALRELTLAGWAAQRRKDLLNLLASLNEQIGQLDLATEKAAKENEDARLLMTHPGVGPITALAYVLTLGDVTRFKRGKQVAGYLGLVPREHSSSGKQRLGSISKQGNSFLRMLLVESAQAVTRLDEGFRKQYQRRCHHMAKGVAKVAAARRLSVRLFWMLRTHTAYPEIVRIESSPGEALVGES

SEQ ID NO: 503373 - protein, 408 aa, unidentified
MAEGSWVGLDVHARTVVAGVLDAGSGELRTLRAPPRSVETVGWLRQLPAPVRVAYEAGPTGYGLARACAAAGIACTVAAPSKIPRAAGDRVKTDRRDAERLARLLRLGELVPVRVPEPHEEAARDLVRAREDARGDLMRARHRLSKLLLRHDLVYDASAWTLAHDAWLRRQRFAGRPLALAFDECYGAVLQAKTRRDALDSAIVELAAESPFAEVVGRLCCLRGVSTLTALALTVELGDWSRFRPQSLGPFLGLTPSEDSTGERRRLGAITKTGNAHARRLLGEAAWHQRRPLRASATLERRRRGQRAAVQARADQSARRLHARWHALSAVVTQRCETRATTQEPGRDLGSRDALRGARAAPPGGPSVGGGGHARDRAAATRPLSDLPGARGTGARLHPWDPDASAAP

SEQ ID NO: 503374 - protein, 343 aa, unidentified
MDQYVALDVSLQKTAVCVLNVSGRVLIEADVPSEPAALIAFIQTHAPRAARVGLESGPTSPWLWHSLKAAGLPVVCMDARHAHAALSVRPSKSDRNDARGLAEMMRIGWYREVQVKSLAAHERMALLGVRRRLVDMRVEIDGQIRGILKTFGLVVGRGNKGAFAQRARMLAQDHPVLSALIDKLIEVREVAVAKVAALDKEIRRFVRNDLTLRRFMTVPGVGPVTALAFRSTIDEPNRFKRARDVGPYLGLTPRRYQSGETDRQGGISKCGDRFTRTCLYEAASVLLTKVQRWSPLKAWGTRLARRIGSKKARVAIARKIAVILRCIWTDGTEFWWTKETATA

SEQ ID NO: 503375 - protein, 382 aa, unidentified
MNRIVKIGMDVHSTNYTLCAMEPVLDGEDRVFANIQVMPDYKNVLQFIENLKNKLGSDDSYSIECGYEAGCLGYSLYHQLTSAGVKCVILAPTTMLTQQGKRIKTDKRDAVMIAQCLSYGGYHAVHVPTNKDDSVKEYLRMRDDHKLALKKIKQQINAFCLRHGYFYPDTKWTIKHLQWLRKLEVKDLFRETLDEYLASYDEQTAKIERFDKRIEELASDPDYKDNVRKLGCLLGVKTHTALSLIVETGDFVRFRKGSTFAAFLGLAPGESSSGEHINRTGISKAGNTHLRRLLIEGAKGICKGRVGHKSKELRSRQAGNSAEVIAYADRGNTRMRSKYYRMIRHGKKKNVAVAATARELACFVWGIMTNNIDPHTAGKKAA

SEQ ID NO: 503376 - protein, 317 aa, unidentified
MAEVTFPQLIQRACGIDVHLKVVVATIDGLGITRETRSFKTFTSSLNELKEWLLSNGITHVAMESTGVYWKPVYKVLEGSISNVWIVNARHIKNVPGHKTDKMDSEWICKLLLAGLLKPSYIPPKEQRQLRDLTRYRNKLIGHIASEKNRSMRILEDCNIKLSSVVSNTTGVTATALIDMLCEGKKLTLEDIESVYHGRLAASPQELLEACTGFVEEHHVYMLQMIRKDIEQTQKLIDDLSTRIKNLLSKYDNALELLKEIPGFSTKVVEDLVSEIGLDMSHFPSEKHLSSWAGLSPGNNESAGKKKVQESLTGTNK

SEQ ID NO: 503377 - protein, 393 aa, unidentified
MICVGIDVAKDKYDCFILSSEGEVLADVFTIPNNAEGFDTLLQTIRRCARPEDKIKVGLEATGHYSYNILGFLLNEGLDTYVINPLHTNLYRKSLSLRKTKTDRVDARTIAAMLMSDVDLKSYTDTAYHNEELKSLTRYRFDKVRERAKLKQSVSRLVTILFPELEKLVSTLHTASVYALLSEFPGAKQVAGAHLTHLKAALYDASKGRYGRDMATTFRDAARCSVGSVMPAKSLELRHTIRLIHELDAEIEDIEAAIQSMMDEIQSPITTIPGMGVRMGAMILAEIGDFSRFDSPDKILAYAGISPSTYQSGQLSLSGAYSHMERRGSRYLRYALYNATKYVCLWNPTFAAYLAKKRAEGKHYNVALSHAVKKLVRLIYALEKSKRPYSTAA

SEQ ID NO: 503378 - protein, 367 aa, unidentified
MLYLGIDQHKRQLTVNLRSEDGSVILKRQVSTEWEKVRAFFADLAEKAGPEGGFLAILEVCGMNDWLLTMLQEYGCRETVLTQPTERSKQKTDRRDAGELSHLLWVHRQQFLQGKHPFGLRRVQPPTAEEAHDRQLTALRAKLTRKRTAVLNGIHKILRKHNREQESPTKVFQTQKVRCWLAEIELPVVDRLELNLLLPQWEMLDEQMEAVEAKIAERVEANEQAKLLESVPGIGHYSALAISSRIGDIGRFPRADSLANYFGLTPGCRNSGEATQRLGSITKRGSKLVRYLLGQAVVKVLRFDGAMRAWFKRIKKRRGTKIARVAVMRRLATLLWYMLKRKQKYRYDSPIKKHQEFAAFEGQTEAA

SEQ ID NO: 503379 - protein, 348 aa, unidentified
MRFYTQQHQFYCGIDFHARTMDLCILNQQREMLVHRNMPAGPEPFLKTIAPYRTALVVCVACICTWYWLADVCARAGIPFVLGHALYRKAIHGGKAKNDKIDAHKIAVLLRGGMLPQAYVYPAAMRATRDLLRRRMHLMRKRAELLGHIQNTNSQYNLPEIGTKIAYKANRDGVAERFLDPAVQKSIEVDLALIDHYDRLLRDMELTILKTAKQHDAQTLSLLRPVPGIGESLSLVLLYDIHDMPRFPRVQDFVSYCRLVKCAKESAGKRYGTSGTKIGNASLQWALSEAAVLFLRAHPAGQKFLARLEKRHGQGKALTVLAHKLARAVYHMLKRTTAFDRQMFLQSS

SEQ ID NO: 503380 - protein, 437 aa, unidentified
MTSHCRYCNYKISGGVLLAFKIFRFNCCGLDIHKTWIFACIGLTDANGRTEYKEKRFSSFSRGLRDLAAWLASYNCTDVCMESAGKYWIPVFNVLEKTCNVILAHPKYTKPQKGNKTDRKDAKWICDLFMCDMIKPSFIPPAEIRHLRDLVRYRFKLTNMLTGEKNRAQNCLTVSNLKLDDVFSDVFGKSSRSITEYILAHPGETFDVTPFVDRRCKTPIEEIQAAVDGAVSPEQAIKLRQCLDHIDELEMHKKEMEREILRVSDPYSDALELIRTVPGFDKNPFTAIQILSEIGGDMSVFPTDQHLVSWAGCCPRNDQSNFKIKSTRISRAGSYLKPVLVQVANALIKSKKHPEITERYRRIKSHRGHKKGIIAVCRMLLTAIWHILTDLKPYTAEGYLSPRPVKKDKILTTSQAFSLLKLRGYVIKDDDSSVTAF

SEQ ID NO: 503381 - protein, 341 aa, unidentified
MNHYAGIDVSLKSSSVCVVDANGKIVREGTVASEPEALIAWFSEIGPEVTRIGLEAGPQSQWLYAAMRQAGLAVELLETRHVRDAFKAMPVKTDRKDAQGIAQLMRLGWFRSVHCKSIEAQETRAVLTARQFVQSKLHDIEMSLRGTLRGFGLKVGKTTPNRFAARINELVEGHSTLQVIATSLLAVHAVLLREFKVFEKRTRVMARQDERTRLLMTTPGVGVLVALTYVSAIDDPGRFTSSKRAGAHFGLTPKKYQSGETDITGRISKIGDKGVRTALYEAAHIILTKPVKGSALKSWAAKIAKRAGMNKAKVALARKLAVIMHRMLVDKTPFNPAAAAA

SEQ ID NO: 503382 - protein, 297 aa, unidentified
MSQTLNAAIAVVGIDIGKNSFHVVGHDERGAIVLRQKWSRGQVEARFANMPPCLIGMEACVGAHHLSRKLKALGHDARLMPAKYVRPYSKGQKNDFRDAEAIAEAVQRPTMKFVATKTADQLDLQALHRGRERLVSQRTGIINQIRAFLLERGVAVRQGQRFLRAELPRILATPPEVLSPRMVRVIENLAGDWHRLDERIEGLSGEIGTIAREDAGCERLMSVPGIGPIISSAMVAAIGTGDAFAKGRDFAAWLGLVPKQISTGDRTILGRISRRDNRYLRTLFIQGARSVLLRRQS

SEQ ID NO: 503383 - protein, 406 aa, unidentified
MNMNAVGIDVSKRKSTVAILRPGGEIVKKPFDVPHLSSDFRSLTRLIQDLDGETRIVMECTGHYYEPIARRLSQAGFFVSAVNPHIIRNFQGHDNPLRKVKTDKADSVKIARYTLDSWGNLKQYTLMDELRSQLKTMNRQFSFYTKHKTAMKNNLIGLIDQTYPGANTYFNSPVREDGCQKWVDFVDTYWHVDCVRKMSLTAFINHYQKWCHRRRYIFSKSKAEEIYGKAKELVPVLPKDDITKLIIKQAVDQLNSASITVESLRTLMNETASKLPEYPVVMAMKGVGTSLGPQLMSEIGDVSRFTHKGAITAFAGVDPGVNESGSYEQKSVPTSKRGSSDLRKTLFQVMDVLIKTHPQDDPVYQFLDKKRAQKKPYYVYMTAGANKFLRIYYGRMKEYLASLPES

SEQ ID NO: 503384 - protein, 402 aa, unidentified
MNCVGIDVSKGKSMIAVMRPFGEVVVSPFEVRHTANELSELAGLLKSLDGETRVVMESTGNYHAPVAWLLHGAGFYVSVVNAMLVHDYGNNSLRRGKTDKKDAVKLANYGLDHWLTLPRYVPEEDTRLMLKTCYRQYQQYSKVQTMLKNNLISLLDTAFPDANRLFTSPPRADGSEKWVDFVATFWHCECVCGLSKKAFTAKYQKWCRKHGYNFSQDKALDIYASACGRFGVMPKTNTAKLLVEQAISQLQTTSAALAALKQEMQSLAASLPEYPVVMGMFGVGPTLGPQLIAEIGDVRRFHSKKALVAFAGIDAPPYQSGQIDVRSRSISKRGSASLRRTLFLVMGVLLQCAPIDEPVYQFMNKKRSEGKPYRVYMMASANKFLRIYYASVKAYLDSLEHD

SEQ ID NO: 503385 - protein, 331 aa, unidentified
MSKAHVPKKVVTVGIDVAKAHLDAAVSGARQVRRFGNDPPGHAGVIEWIRSAKLRPLLVCMEGTGGYEKPLAAALQAKGFPVAVVNPKRARDFAKGMGLLAKTDRVDARMLAEFAAAIARSDSLQRHVKAAPDPKREWLTALVTRRRQLLTMQQAERQRIEQTPKALHPGLQTIIEVLQEQIHGIETQMEQTIREHYAALDRLLQSASGVGRQTSSMLVGGLPELGRLTRRQIAALVGLAPFARDSGKHRGRRKIQGGRFDVRRVLYMATLTATRYNPVIKPFYQRLLAAGKLPKVALVACMRKLLTILNAMVRDGREWNPKRAPVAQANA

SEQ ID NO: 503386 - protein, 360 aa, unidentified
MEQKHDTSLSFKNQDFHIGIDVHKKQWTLSIMCSNMLIKRRLSIDPSPSALLNYMQRHYPDGNYFAAYESGFSSFWAARQLNNLGINCMVVHPPDVPASQKERLNKNDRVDSRKIARSLSNGELIPIYIPAKLAEEYRHLNRHRLRTVKDQTRLKNRIKSVLHQFGITIPLQYQERRWSGVFIKWLLTIKFDTEYGQFAYEDLVDQLIGTRTRITKQLKIMRLMTEEQNPFSIIIPLLLSIPGIGFITAMTLATEIIDMSRFKTLEKLAAYVGLVPSIQSTDEKEINYGISPRRNKYLRSMMIEAAWKAVKIDPALTMKFNQLSQRMNRNKAIVRIAKILLNRIRYVWKNQKPYVLSVVK

SEQ ID NO: 503387 - protein, 379 aa, unidentified
MEGTLMKLGMQFIGIDLHTNKFTCCYRNENSPLSGKDEKQTQTFELTDYGLAAFYKTLTPETYVLIEATITTFCFARLIQPLVKEVIVANTYELKQISLSRKKTDKVDADTLCRIVKMQVLSGEKAVSPVTIAPVEIQELRGLFSTYRLYKKQTTQIKNRIHSLLKERLYGFTQEEIFGLKKRNVIRDIESGSVMSFQVNELLDSLEYFEGRIEALQNKIMEQAEPFMREIEILTSMKGVSVFIAIAIIADIIKVDRFKDSKSFTSYLRSAPRVENSNTSKRNKGTNKKGRKLSATLLTQSLNHVLAASPKLSRWYIRLTKYKKAGLVRTGLRRRVLAEIYQMLKKGEYHYGRDERNHEAKLVQYRKFLEKRKNLLKVA

SEQ ID NO: 503388 - protein, 315 aa, unidentified
MGTQVFVGIDVGKDVLFVAVRPFGESLEIPNREDGIADLVKRLRFLEPTLVVMEATAGYETPVAVAIYRAGIPVVVSNPRLVRSFARATGRLAKTDKIDAGVIAHFAEVIRPEPRRLDDPDEERLGQLVRRRKQLLRMIVMEKNRVAKGPMGMRKDIQKHLDWLAKELERIDQTLSNFIQASPIWSAKNELLQSVPGIGKVGAQAIMSDLPELGKLNRKQIAALVGVAPLNRDSGNYKGRRSIWGGRAHIRTVLYMVAVVASRCNPVIRDFYKRLCEAGKPKKVALTACIRRLLAILNAMMRNGTRWGEFKPAVT

SEQ ID NO: 503389 - protein, 373 aa, unidentified
MPRYSTAFGMDVHLRSTTVCALDAETGEAVTRRFRGNPWGEVAEWMSGFPGPSLAAYESGYLGFAPQRELSGLGVDCVVAAVSRVPRSSADLSSKNDRNDAARMAKAILSHDVTPVWVPSPEIEGLRDLAGAHDAATARLAAAKQRLLAFLARRGYVYGGTTPAGNPRRYWTYDFLRWLDKVRPADDGGIRALAALRNEVEAADEAREALLAEHRAAVAAGPLSAEVEALQSIKGCGFVLAAAFASEVGDFSRFRSGRQVTAYFGLAPKQRSSADSVRLGGISGAGNALVRRLAVEGSWSYVQASHQPKLMPKGSGVPLEVRMHGRKGSERLLRRREEMLARGMPQAKANAATAAELVRWLWALGAMCREATE

SEQ ID NO: 503390 - protein, 318 aa, unidentified
MLNESFVGIDVSKDWLDVGWEPAQQTERLVHDEVAMVGLCERLAQERPCLIVLEATGGLETHLASALAAAGLPVAVVNPRQVRDYARACGRLAKTDRIDALVLAAFARAIRPQVRAPKDDETLELGALLARRRQLIDMRVQEKLRLERASPVQRDSIKEHIIWLTERIARLDTDLTHRLRSSSLWRDQEDLLKAIPGVGTITRVTLIALLPELGRLNRREIAALVGLAPFNRDSGQHRGERVIWGGRAQVRRVLYMAVVAAIRSNPVIRTFYQRLRAQGKPGKVALVACMRKLLTIMNAMLKYNTPWNPNALDLEHSC

SEQ ID NO: 503391 - protein, 414 aa, unidentified
MEVIHSRCAGMDVSKRDAKVCVRVAGAGRRRTVETVTTWGATTNRILALRDHLVSEQVSLVVMEATGAYWKPFYFLLEDAGFEVLLVNARQVKNLPGRKSDVSDAAWLAQLGAHGLVRGSFVPPAPIRELRDLTRARTMMTRERGREIQRLEKLLEDAGIKLSSVASDITGVSGRLMLQALIEGEQDPVVLADLAKRRLRAKLPELVEALTGRFSSHHAFLASMYLAAIDQRSQAITDLSQRIEVVMEPFRPFADLIATIPGIGDQTAEVIVAETGADMSVFPTAAHFASWAGTCPGSHESAGRVKSTKTRPGNPYLKAALGTAALSIANSHGTYLSAKYRRIAARRGPMKAIVAVEHAILVAIWNMANTGAVYDDPGPDYFTRRDPERARRNATNQLERLGYHVTLDPIAASA

SEQ ID NO: 503392 - protein, 339 aa, unidentified
MNEVSIVGLDIAKKVFQVHGVDAAGVVKVRRSLRRSQVVRWFAKLAPCLIGLEACATSHYWARELRKLGHEVRLIPPAYAKAYVRRNKNDAADAAAICEAVSRPGMRFVAIKTEAQQAIGGVHKVRALLLKQRTMLINHLRGLMAEFGHVVATGPQHVGELLAILADPEEGGLVEPLRGALLGMTEVLRGLERRIEAIDRQIVAWGRSNTTYRHLITIPGYGPILASAVAALVTDPTTFRSGRDFSAALGLVPRQEGTGGKVKLGPISKRGNGYLRRLLVNGAMSVLGSKRARQDPWIAKLLASKPRKLAAVAVANKLARIGWAIMMRQEDFHTQPALA

SEQ ID NO: 503393 - protein, 315 aa, unidentified
MDERTQTIVGIDVSKEQLDVHLLPSGEHFTMPRDDAGLKTLSKRLAKQALQVVAMEATGGLEGPVAAALHAAGLPVRVVNPRQVRDLARGLGMLAKTDAIDAAMIARFAEAAKLTGAPVPDAEAQHLAALVARRRQLLGMATAENNRLQQTADKRIRRSIQRLLRSIEAELEDVDRDIGNAIKASPLWCDLAKLLDEQPGIGSVTAHTCIAELPELGRVSNKKIASLVGLAPHARDSGTMRGKRTIWGGRAKVRSALYMAALSAIRCDPILKEFYRRLLARGKLPMVALVACMRKLLVHLNAIAAKYYAQLEQIA

SEQ ID NO: 503394 - protein, 348 aa, unidentified
MTRILAIDLGKFKSVACIYQEQAGEAVFRAFPTTPSAMHDLLVEVAPARVVIEVCGIAGWITDLARSLGLEIEVVDTRHDAWRWSKVKRKTDREDALKLARLSAMRQVSTVHIPERDVRQWKSLIAYRHTLVDRRTAVKNTIRALIDVQGLRMPGGASGWTAAAVARLGELARPVGECDRTELWRGQLTTELRALAQVNDLIVEIQETLDRIAAADERVARLRTIPGVGNRLAELVVATLDRPARFKSSREVGAYAGLAPRQFESGTMHRSGRITKQGPGLLRRLLVQIAWGMERRSARAKEIFERVSGGQKSRRKKAAIAVARKVLIWCWAMLRDGTRWRESAPSVT

SEQ ID NO: 503395 - protein, 401 aa, unidentified
MPDGITVGIDWGGSLHQVAIVDAAGRQIANFGVAHDVTGLAALDERLGAYGEGLPVAVERAEGLLVEHLQARGLRVYPVSPRIAARIRERYRVAPVKDDAFDAFTLADALRHEQTRWRPLAEPSPLLAELRALTRDRERIVAEQVRVKSQLHASLESYHPAATRLFSSLDRKTALAFVRDYPTPAQAALVGERRMARFLARNGYTGRVPAAVLAERLHDNLITAAPGTVAGKRFSACRQADLLELLTHTREAYDARIAELLARHPDAEVFLSLPGVASVLAATLLAEIGEDRERFPEAAALLAEAGLAPVTRQSGKVRRVRFRRAASHRLRQAFTWWAFNSLTESPWARQVYDANRGRGQRQYRALRGLAACWGRILYRCWQDGVPYDAGRHPGARALIEA

SEQ ID NO: 503396 - protein, 362 aa, unidentified
MWIIGCDLHARQQTLAILDTATGEVVNETLAHEGDGVREFYSRLPSPVRVGIEATGSMKWFLNLMEELGIDCQVGHPATIRAAEPRRQKHDQRDAELLLKLLVENRFPSIWQPSKELLDLRALLLHRHQWVRLRTRIQNALQAIALANGLRRGSSLWSQRGQQAIRSLPLATHTAHRRSELQAMYERFEAEIEELNERVLEQANRRTTAGLLMTHPGVGPITALATDVFLGDPKRFRDGKALASYIGIIPRENSSGGRQRLGGLTKQGNPLLRFLWCEAAVHAVRRDPELRQFYRRKLVQKGLGKARVAAARKLGIRLWIMLRDQIDYQEFCRRGQKQQRSGDACAGMPGMRYGAKSHRLID

SEQ ID NO: 503397 - protein, 437 aa, unidentified
MNREVPTMKFNTQNAKIEAITEKTLVLGIDVGSEMHYARAFDHRGIEYTKKPFKFSNTEAGFMALQAWILDLKEKHEKDKVVPGMEPTGHYWFNLGKFLQDNEMKPVLVNPHHVKKSKELDDNNPTKNDRKDPKVIAGLVREGRYMIPYLPDGVYADLRTASNIRFQLQAELTRIQNRISRWFHIYFPEYKTVYGKPDAKSGILILKTAPLPEDILTLGVDGVNQIWRDAKLRAVGKARAKTLVEAAEHSVGNKEGAVSARMEIRMLLEDYESRNIRLQEVMALIEELVDQIPMAEKLLEIKGVGIRTVSGFLAEVGDISRFNNPKELQKLAGLALVENSSGKHKGETTISRRGRKRLRYLLFEVAMSLVAKNQEFRELHVYYTTRKLNPLKKMQSLMAVATKLLRVFYAMLTKGVDYDPKKMVSDIKRPAAYLQTE

SEQ ID NO: 503398 - protein, 319 aa, unidentified
MYVGIDVAKESLDVYLLKAEGGIHYQVRNEPAGFRELHRWLKKQHASSAHVCMEATGVYGMDVAQFLHDNGYRVSVVNPARIKGFASSQMRRSKTDRLDAEVIAAFCKALEPSLWTPPEPAWYELRALLRHLEDLQATRQQQVNRLHAATTEVVRDQLRQHIAFIDQQLQQLKQQIRAHLQQHPNLRDQVHLLTSIPGIGELTAWRLVAEIQALSIFQDVRQLVAYVGLDPSRHDSGSTVRGAHSISRQGRAALRAALYMPALVAIKHNPILKSFAARLSAAGKLPQQVIVAVMRKLLHLAYGILKSGLPFNPNHPLPA

SEQ ID NO: 503399 - protein, 333 aa, unidentified
MKHVIAFDISMEKSYMVVYNAQKQCILETEIKHSKPAFKELQNKISELTNEAGELPAIVFEATGVYSRQLERFMQNNQYIYYLLNPLKAKLQCASLRIHKTDRSDAHQLAFTHFTTSRREKTITDHLFCQLKSLSRFYNELDAELSVIRNRLHKVLQLTFPELEQIFTTKSDLFLKFIQLFPHPDLVQNLSKTVIKNRIRASTQKNISIRIAEQRAVEILEAAKLSYPAVDSDDVLCEQLKIYARRYQELLHQKECCINKMVHLAEQRTEYGIILSIPGIGPNTAVRLMGEIGDITRFANNKQLNAYAGIDIRRFQSGKTLYKDKINKRAINI

SEQ ID NO: 503400 - protein, 417 aa, unidentified
MNTMTMQPFAAFVGIDWADTKHDVCIQSANSLRREFAVIPHKVEAIDEWAQSLHRRFSGPIAIAVELSKGPIVYALQKYDYFVIFPINPSTLAKYREAFQPSRAKDDPTDAELALDLILRHPERFEPLQPQSVEIRELAELVEQRRRLVSDRVRLTNRLRSTLKLYYPQTLEWFNRIDTRLFCGFIERWPTLMQVKRARTTTLTTFFRAGNTRNPALLETRLASIRSSQHLTLDEAVIAPNKLRVLMLVGMLRVILDAIKSYDQTIAELAPEHDDYHLFSSLPGAGPSLAPRLLVAFGEQRSRFKNAAELQKYSGIAPVTERSGTKHWVHWRWRCPNFVRQTFVEWAAQTINKSYWAGEYYYQQRKKGSAHQSALRALAFKWIRILYRCWQTSTPYDEATYLKALERRGSPLVAKAV

SEQ ID NO: 503401 - protein, 348 aa, unidentified
MRFYTKTHKHYCGIDLHAKKMYICILDREGNVVLHRNINSNPNEFLRIIAPFREELVVGVECMFAWYWLGDLCRRENIEFVLGHALYMKAIHGGKAKSDKIDAHKIAALLRGGTFPFSYTYPPEMRATRDLMRRRNFLVRKRAELIAHIQNTAIQYNLPEIGFNLACESNRKEVAVLFPDPEVRKTIEIDVAMIDSYDDVLKILELDIEKTAKKHDKHALLLLRSILGVGPILSLVLLYEIHDINRFETVQQFASYCRLVKCSHESAGKKKGTGGAKIGNPHLKWAFSEAVLLFIRYNPPAKKLVDVLAKIHGKGKALAILAHKLARAIYHMLKNNKPFERDKFFATA

SEQ ID NO: 503402 - protein, 448 aa, unidentified
MRQGKRPASRGVARRNAKLKALRELVGKDRAIVAVDLASQRQAAVVCDHDSVVLARRMFRGSAWCVSEILAWAEPVAKKAGFAGLVLACEPTGHRWKPLVVTARAQKIPAVCVQPLLVRRAREGEDFTRSRSDFGDAVIIARLAAELRCYVPYLPEGPWARLRHLGARREGLVERCVADRQQVRDLLECAWPAVLEAAADPLESLTWRAALAVSVDPAVIAAMSEQEFLAVLREKLVALGGKKVWRRIALAVRVAAADPGGIAAERDAIVERAAFAYQDWMSALAALADVESRMLAVLDELGLTRLVTTIPGLSAVGAAVILAQTGDPARYDTPRAWVKHAGLAPQANESGKYRGKTRQSGRGRPGLRTAAWRAIWGALRCNQVYATRHGQLTTRERNRLTNGQAHAALAAALLRQLFVVVTRRIPWDAAIASGAAAPAETTVVVPAA

SEQ ID NO: 503403 - protein, 410 aa, unidentified
MEQIHERVAGLDVHRDSVSACARVPGVRRDVVSHKARYATTTAGLAALADWLAGEAVTVVGMEATGVYWKPCFYALEDRFEVWLCNAHHVKNVPGRKTDMSDAAWLADVVAHGMVRPSFVPPPPIRQLRDLTRYRKRQTDTRAAEVQRLEKVLQDAGIKLTSVASGVLTMSGRNMIEALIAGNRDPEVLAEMAIGRMRTKKAALTEALSGHFGPHHAVTARQILDHIDFLDARIAAVSEHVAARMAPFAAAVELLVAVPGISRISAEVIIAETGGDMARFPSPAHLASWAGVAPGNHESAGKRRRVGTTNGNRWLRRTLIESARAAARTQASYFAAQYRQIAHRRGPNKAAVAVAHSLTDVIWHLLTTGEVFEDLGVDFYQRRRDPEREARRLVDKLEALGHTVTLTQTA

SEQ ID NO: 503404 - protein, 370 aa, unidentified
MSNVKLFVGLDVHKATIAMSVAKAGRNGEVRYIGNFANNPVAIISQLKRLSERHGEIECAYEAGPCAYTLYRKLTDVGICCMVVAPSKLPAVRGRVKNDHRDSLTLARLLRSGDLVAVWVPDPTHEAMRDLVRARQAASFDVRKARQRIQSYLLLRDRHYVSKPWTSRHKIWLADQAFDHPAQQITLQTYINALEQAESRRAGLDQQINDLLPSWSLAPIVKSLQALRGVASVIAIALVAEIGDFERFASPRDLMAYMGLVPGEHSSGASVRPRGITKQGNSVTRALLYEAAWCYRQSAKVGQWMTARRPRDLPQYALDIAWKAQLRLCSRYRKLVARGKKSQVAITAVARELLGFVWAIAREESRHVPT

SEQ ID NO: 503405 - protein, 344 aa, unidentified
MIWVGLDVHKSYSRMGMFDPGSGAIQDLGTVRNEPSALEEKLSELSSPKTVVLEAGRSSYHMAGLLEAMAEQVWIVDPGEVRKLQRRVAKTDRRDAAALAWWAAKGVIRPQWRPEAELLDLRELTRGKTVLTRLSTQVRTRMRGLLARHGYECPHRDLLGERGQLWLDEVELEGHAGQLLAALGEILVVIQAKADEFERLVEQESSTHPVAHRLRTIPGIGPFLGLALAAEIGDINRFPSPPHLRGYSGLVPAVYQSGDKDARGPLTKTGNAWLRYAAVLATQRMAQMRHPDPTLKRIFLSVAFRHGRNPGKVAAARRLLDLVYHLLKEEEDYQAPIARAASTI

SEQ ID NO: 503406 - protein, 433 aa, unidentified
MDSSPPYDLIVGLDRSDRKADLHLIQTATGQRRSQTIDTSPEVLWEWLLQLRQQHPQARLALCLEQPAAHLIAFLEAYDWITLYPINPITLQKYREAFVTSRAKDDAKDALYLAELLLNHHDKLKAWAPEDSQTRAVQQLVFHRRAVVDERTGLTNRLKALLKQYFPQALLLCGEDLWRPLATRFLLKWTSLQVVQKTKPATLKQFYHLNGSRSAKLMERRLALIQKAVPVTDDKAILDSFALRVQLICRQLQDVVTTIKTFDLRIAQAFKEHEDHQIFSSLPGAGPVLAPRLLATLGSQRERYDKAANLQHYTGIAPVTKQSGGKCHIHRRYLCPKFHRQSFHEYAKESVLWSRWAAAYYLQQRTKGSPHHTAVRALAYKWQRIIFRCWQNRKPYEEKTYEAALRKANSPLLTLLDKVELGKSPYKNHVNKN

SEQ ID NO: 503407 - protein, 340 aa, unidentified
MGKRYIGIDLHRNRFTCCIRLENERTYVTEWELEDLGKFVKKLRPSDEVAVEITGNTRLFYDAVAPHVARVVVVNTSQFQVIRQSVKKTDAHDARALALYLSKNMLPEVRMKDKERGQLASLTQTRDTLVKLRTALKNKINNILSARGLNLAKEALGSEKKLDEVLALPFDEMVRIELRVIVQQIRSLNKSIAELEKTIGEEGSKLEGHKELSSIKGIGKITGAILLSVIGDVNDFADEGRLASYFGIVPRVSNSNETAHSGRIHKRGTRLGRTALVQSALIAAKYSPYLKRFYERVKARRGAGKAIIALARKFLGIIYRTLKNKWVFEDFPNFVLAEAS

SEQ ID NO: 503408 - protein, 326 aa, unidentified
MAKPITICAGIDTGKRKLDVAIDGSPERLQVENTSEGHRALVEWLRRHRVKRVGIEASGGYEQAVVAELRRKRFVVVVFQPAQVRAYARFRLQRAKNDKIDAALIAACTAAVKEIHPAPDPRLLPLAEHLTMIDQIGEDIARLKNRLETCRDERIRQAWKQEIARLETNERIELKALVAAIRKHSDLAKRLDLIHSVGGAGLPTAVAVLVRMPEIGQISREQAAALAGLAPYDDDSGDQLGARHIWGGRERLRRALYAAALPASFRWNPQLIALYKRLIAAGKEHKRALIACARKLLIFINTVVARGTPWQDQPEAAAIATGPSTA

SEQ ID NO: 503409 - protein, 344 aa, unidentified
MENSNQNQKRHWIIGIDVSKESLDVCLINNSDGQLFNGKFNNNLAGFKRFKAWCKTHACECDQQSLCCMEHTGLYTRQLVHYLLTRQVNVWLESSLHIKRSMGLVRGKSDAIDAQRIARFAHAHQKDAKSLNLSSLTLDKLKDLNANRNRLMKAVQSLQVSTKELKEVDPESGKTIARVNREAIHGLEKSLSAVEEKISEFIKADENLNKQFDLITTVKGVGKIMALLVLIYTQGCTKIMDGRKLACYSGVAPFEYRSGTSIMGPTGVSKFANSELKRVLHMAAISSVQHNPELKQYYKRKVAEGKSKMSVINAVRNKLLHRIVAVIKRGTPYQATPKNNLQLS

SEQ ID NO: 503410 - protein, 358 aa, unidentified
MESTSKVLNYSGENIYIGLDTHLKNWKSTILVGNTFFKTFSQDPEADVLAKYLKKNFPGANYYSAYEASFNGFKAHRELTRLGIRNIVVNPADIPTTDKERKQKEDARDSRKIAEQLAASKLEGIYVPGIELEGDRGIIRFRKTLSKEIARNKCRVKSFLYYHGIRIPKQFSNKNRWSKGFTTWLKELDLATASSKSTLDAIIELVLFLRVQQYQTLKNIKTLSQEKKYKDNVALLMSIPGIGLITAMTLLTEIDDISRFKNLDSLCSYIGLVPMTNSSGELDSVGHITKRQNKVLRSMIVESSWVAIRNDPALMLAYQKLIVRMKPTKAIIRISKKMINRIRYVLKNQRPYVKAVVE

SEQ ID NO: 503411 - protein, 394 aa, unidentified
MIYAGVDIAKTDHVIGAVDERGAEMCPPMPFKNTEAGLERAVAWLEGLAGSPSDVVVGMEATGHYWMACYSFLVARGYSVAVINPMQVKAVRKLKGLDKVKNDRVDAGLIAEALRIGQYDETRLATDEVASLRSLSRYLQSLRGMVAELKTQCICLMDAHFPEYAGIFSDMFGAGSRAVLSKSPLPFELARRRADSLARDIAEASRRGGESSGYAAKIKAAAKSSIGVRLGQEAASFQVKSLIRQIEFADSECAGVEARLRSLLDEVEPLVLTIPGVSYVTGAQIVSEIGDVSRFRNAPALVSYAGLNSSVSQSGQFDSGGGPITKHGSPYLRRALWLAANRARQYDPGLRAFYDRKRAEGKPHRVAVTAVARKLCHIVFAVMRDQVPYDPGRE

SEQ ID NO: 503412 - protein, 360 aa, unidentified
MSSMPHPQPSDADEVILGVDTHKDVHVAAVLTALGVLLATSSFPTTAKGYRQLLAWARGFGALHRAGVECTGSYGAALSRHLSSEAVTVIEINRADRGDRRRRGKTDTIDAETAARAVLSGRATAIAKSGDGPVEMVRMFKLVKASAIKSRGQAINQLKAVLVGTDPALRDSMTGLSNPALFRRCAELNHSNPTDTPSAAAFTLRLLARRILELSSEIDELNAQIATTIEARAPQLLQRYGVGPDTAAALLLAAGDNPERLHSEASFAALCGVSPIEASSGKMHRRRLNRGGDRQANSALYTITIARLRWDKRTQDYVQRRVAEGKTRREAIRCLKRYIAREIYHDITSTRAAPTARSAA

SEQ ID NO: 503413 - protein, 438 aa, unidentified
MSATHGLNSTASVAPVLYVAFELSSGQWKLASTTARGQRARVVSVQARNTAAVLREIARAKARFGLAESAAVFSCYEAGRDGFWLHRCLHHHGINNAIVDSSSIEVNRRARRAKADSLDAVSLVGLLVRYREGETNVCSTVSVPDPADEDQRHMHRELDQLRRERTDHTNRVRGLLAAVGIKIAGKDIVPDQLDRLRQWNGEPVPEGLKRRLLHELERMELLARQIKAVEIDQAEQIRDDQTRHVEKVRMLMGLKGVGPTSATILVYEFFGWRRFANRREVGALAGLTPTPYQSGESNHEQGISKAGNVRVRWIMAELAWSWLHFQPKSPLSQWYQRRFGSGTSRMKRTGAVALARKLLIALWRYVEDAEVPEGAQEMDWEAKLKRVLAIRRPGSRGEGDLTLQVPSPRPGGALLRSPGKRPSPAFGRFSRHYVSDRS

SEQ ID NO: 503414 - protein, 346 aa, unidentified
MKNTIVGVDLAKKVIQVCKTTNRTVRSNEEMTPHEFTLFLVNSKSMTVVFEACSTSSYWKQQALRNGHDAKLVSAKLVASVRQSQKTDKNDALAIVQATLLPDVNFISGKSIEQQQLQSTMRLRELCSKQKTALGNQLIALLAEFNINSSNRNGGLRGAIESTLEDASNGFSDEFRKALDEAWKLYLTVSESLVIYDECLEASIEVHPECKKLLKLEGVGPINAINLYIALGCAELGSFTKGKDASACIGLTPLQHSSGGKNKIGSIGKHVKNTTIRSQLITGAAASVRHIIRRDAKTYKEKWIQDLVARRGIKCAAVALANKTVRTAFAMLTQGTEYKAKIILDC

SEQ ID NO: 503415 - protein, 370 aa, unidentified
MSNATTFVGLDVHARSVKACAFVPETGETIRRSFGYEPCEIASWASSLPQHAKCVYESGVTGFHLCRELRSMGVDCVVGAVSKMHKPAADRGRKTDRRDAQFLAVQLALGVVTEVHVPDAECEGARDLTRALADARDDAVRAKQRLSKFLLRHGFVYDERNSAGQRRNRWTRDFWAWVGRIDLGDGAAMATLDHYCVRVREADAAKAALEAKVKALAQQPRWKPTCDALKCLKGVDAVTAVSIACEADGFARFAAASGFAAWVGLVPSEHSSGESQFHGGITKAGNKHLRKLLVEAAWHYKGASRSPKGLVKGQIVDEATRRHANAGVRRLVDRRRAMDDAGKQSSVANVAVARELACWCWAVGRMAEGA

SEQ ID NO: 503416 - protein, 345 aa, unidentified
MLYAGVDTHKKYSKVVVTDGTGNRVAEASLANDLSSFQEFFGHSEEPVKAVVEAGRTWGVIYDILESIGVAPVVANPLKTRAIAEAKIKTDTIDARTLSDLLRADLIPLVHVPSREVRAQKNLLRQRLWLVGLRTMVKNRIHHILDRNHVILSPCSDIFGASGRSQLDQAEIASPDNLLLKAHLELLDNIHDQIKDAEKWINQALSHHSGMAISRTIPGLGKILSALVALEVDDVHRFSHPGKLCAYAGLVPSTYASGGKVRHGHLLPTCNRWLRWAYVEAAWIAQRTSPYCHNYFERIKRRKGANSANSALARRLCEITWYCLKENRAYEERELARLPSKVLGR

SEQ ID NO: 503417 - protein, 335 aa, unidentified
MQIKHFIGIDVSKDTLDLSVVVDGKSLQYFCIKNRTVEIKSTINKIMKGLGATVDDTIFCMEHTGMYNLPLVKWLQSHQGKMWLESGVHIRKTLGVVRGKNDKVDSSRIAMYAYTNRHQIKFWNPPRKLIERIAALLSQRARMNKAKKQLNTANKEQKRFLDKDIMRTLNKYTQKTILVINKQIEALEKEILGLINDDEKLNRIYKIITSVHGIGFVTASYILVTTNEFININNPKKYACYSGVVPFEYSSGSSVRGKNRVSHMANKNMKSLLHLSALSAIQMQGDLQEYYKRKVSEGKNKMSVLNAIRNKLVLRVFACVNQNREYEKKYEYILV

SEQ ID NO: 503418 - protein, 362 aa, unidentified
MSSIALERTDVIVGVDTHKDEHVAVVIDGLGGRLGEYYLSVTNSGYAELLAWAKSLGRVHAFGVEGTGSYGMGIARFLRRHAQTVIEVSRPPRAGQRRLDGKSDPIDAEHAARQVLAGQASATPKVSDGAVEAIRLTRIARNTAVKAHTQAIVTLKATLVTASDELRAKLQPLSDYKLMTTCVGLDSDGDPSDPNVAMRHVLCSLARRWLDLHEEIKAHTKRLKKLTTATAPHLVDAFGIGPDIAGELLVAAGDNTNRIRSEAAFAKLCGVCPIPAGSGKTSGRLRLNRGGNRQANAALYRAVIVRMRWHTPTISYVERRTAEGLSKKEIIRCLKRYLARDVYNLLPPPRGTGESLSPACDL

SEQ ID NO: 503419 - protein, 480 aa, unidentified
MAEKTARESDKTQRLTRKQRKELGRRIWSEHPGLDVVHRDAAGIDIGSREHYVAVGPDRDAEPVRMFGCFTADLQRMAGWLKECGIATVVMQSTGVYWIPVYDVLEQNGFDVWLVNARETRNLPGRKSDVQESQWLLKLHTYGLLRKSFRPAQDIRALRTCWRERAEYVQQAGTCIQRMQKALTEMNVQLSTVLSDLSGVTGMRILRAIAAGERDGMRLAEFRDPNVKASKEIIAQSLEGTWVPEQLAIVKRQLADWDHLQQQIAACDVDLQAMMKKLPDAKTEPKPPSPDPTGPRKRRRKNGRSSSNEPKFDLSAELKRVAGVDLTRIDGIKVLTIQTIITEAGLDMSKWATEDHFVSWIGFSPRNDVSGGKILKKKTRRVVSRLATALRMAATTLRKSESYLGAQFRRLRTRLGAPKAITAMGAKLARLVYRMLKYGQEYVDKGTEHYNTRYREQQIKLLQKKAAQHGFTLVPQPLPA

SEQ ID NO: 503420 - protein, 355 aa, unidentified
MSQEKYIGMDVHQATISVAVMDAQGKLIMECLLETKAATIVEFIRGLHGTLSLTFEEGTSAAWLHDLLIPHVSRLVVCDPRKNALLKDGNKSDRIDARKLAELLRVNQLHPVYHGEHGVRTLKELGRSYLTITQDVTRVMNRIKALYRSWAIPCAGATVYSPRHRAEWLAKIAEPGVRVRAERLYQQLDLLQPVRLEARRELLAESHKHSAVKLLRQIPSIGPIRSALLVALLQTPDRFRTKRQLWAYSGFAVQTHDSGEYRSVRGKLQRNRERMTVRGLNDNHNRDLKNLFKSAAISASTRPGPLRDFYVARVEKGMRPTMARLTLARKMAAISLTIWKKGVEFDPQQLQRQAA

SEQ ID NO: 503421 - protein, 403 aa, unidentified
MNMNAVGIDVSKGKSMVAILRSYGEIISKPFEVKHTVSGIRSLIEQIQSIDGESRIVMEHTGRYYEPLVRELSKADLFVSAINPKLIKDFGDNSLRKVKSDKADAVKIARYTLDSWTELRQYSLMDEIRNQLKTMNRQFDFYMKHKTTMKNNLISILDQTYPGANTYFDSPAREDGSQKWVDFSATYWHVDCVRKLSLNAFIDHYQKWCKRRKYNFSRSKAVEIYEASKELVSILPKDDLTKLIIKQAVEQLNTASQTVEQLRTMMNEAASKLPEYPVVMAMKGVGKSLGPQLMAEIGDVSRFTHKGAITAFAGVDPGVNESGSYEQKSVPASKRGSSTLRKTLFQVMDVLIKTKPQDDPVYLFMDKKRAQGKPYYVYMTAGANKFLRIYYGRVKEYLSSLPE

SEQ ID NO: 503422 - protein, 322 aa, unidentified
MAMLSFGGIDVSKDRLDIIVLPDEQCSWVSNDAAGWAELVEQLRGSSITAIGVEASGGYERGVVQALLAAGMSVRQINPFKLRQFAKASGTLAKNDRLDARMIASFVAIMPTRPAQRQAPMIEQLAAMLTVRRQLSDHKVATENASRLLEGAMLQRLSRRRIAGLTADIDLLDQRLVEIVTADPALAHRFRLLTSMPGVGAVLACTLIALLPELGQMSRKQVAALVGLAPYDFDSGKLKGRRCIWGGRARVRHVLYMAALSASNWNPGLKAFHDRLEATGKKPKVVIVAVMRKMITTLNAMLRDGTTWVDRYSGRRSASTAR

SEQ ID NO: 503423 - protein, 438 aa, unidentified
MSNKVIFNLDELFISVGIDVGADFSWMSIALPNQQFVGKPYKILHNSIDSLTTAVSKIKEAEELYSLESRIFLESTGIYHYPLFCYLRDKGFNCSVINPIITKNSTNINIRKVHNDRFDSKKAALVGLKPDLKVSLMPSDLALNCRNLCREYFDLIDNRSAYVNKLQGELRMAFPQYLGIFSKVTINTSLTLLETYTSPSAFLEADKQEIIDLIKSTARFGLTYAQNKYNAIIQAATDANQFGYIIESNIKRIRLYISFIRKYDEEINSILESLHELVDANEDSDFVKQIHLIETFKGAGFLSAVSIMGEIGDFSAFSKPKQLFAYFGLDPAVKQSGKFEGTKVQMSKRGSAIARRVIHTLTLQSISISRNGEAKNPVLREYYLKKCDSKPKLVAMGAVSHKVCNMIFAILRDNKPFKIIAPQEHIKQYNAAKCDIAA

SEQ ID NO: 503424 - protein, 416 aa, unidentified
MNAVGIDVSSRKSTVAVLRPLGEVVCLPFDVSHDADGLASLAEKLKALDGETRVVMEHTGRYYEAVAKALHEAGFFVCAVNPLLIKEYGANSLRRVKTDKADAVKIARYALDNWADLRDFTPMDAIRYDLKTLNRQFQLASKQRTASANNLIALLEQSFPGIRKCFDSPVRSDGTQKWVDFAHSFWHVDCVRKQPFAAFCERYRKWCKRHAYFFKLSNAEEVYALAKRAVVLTPKSKVVKVLVQEAANQLISISRSVEVYRAEIDRLAAMLPEYPVVMAMYGVGKSYGPQLMAEIGDVRRFERKQALVAFAGIDPMPNQSGDKNVRSNKSSKRGSPYLRKTLFNVIRTYLQCAPQDEPVFQFLNRKRAEGKPFYVYMLAAANKFLRRYYAKLRDYFASLDTLQSVDPIPATLKASL

SEQ ID NO: 503425 - protein, 348 aa, unidentified
MLADQVDYVVGVDPHRDSHALAIVHVLSGAVVFETTIAASSQGYAEALQLVDAYAPGRRAFAVEGSGSFGAGLTRFLSSRGERVLEVSRLRRERRSGGKTDALDAVRAARSVLGQERPATPRAGGERRALQALVAAREGAVNAKCAGLAQIRDLLITTPEPLRSGLRPLTQAPLLRRLAATRPEGRRDPELRGSMLALRSVARRVLQLQAEERELGRQIEALTRKLAPQLLDQPGVGPHAAAQLVLSWSHHGRIRSEAAFARLAGAAPIPASSGQTVRHRLDRSGDRKLNRALHMILITRKRAHPPTIAYIERRMHEGKTRREANRCLKRYLARSPYRLLEHGPPIAT

SEQ ID NO: 503426 - protein, 392 aa, unidentified
MVVSVGVDVSKDKHDCFILSSEGEVLADVFTIPNNLDGFRFLLQRIRDCTHAQGKIKVGLEATGHYSYNLLGFLLDNGLPTYVLNPLRTNIYRKSLSLRKTKTDRVDARTIASMLLSDAGLKPYTSAAYHNEELKSLTRYRFDKVKERAKLKSSVSRLVCILFPELEKLVPSLHIASVYALLEAFPGAKQVASAHLTKLKALLEAASKGRYKRDMALKIRDAARNSIGSRMPAKSLELQHTIRLIRELDAEIAETEEQIQSILDELHSPITTIPGLGFRMAAMILAEVGDFARFDSPDKLLAYAGMSPSTYQSGQLKNCYPHMEKRGSRYLRYALYNATKYVCQWEPGFSAYLAKKRAEGKHYNVAISHAAKKLVRLIFAMEKSGTPYHLTV

SEQ ID NO: 503427 - protein, 470 aa, unidentified
MAAVMIGVDPHKASHTAVAISAAEEPLGELRVRACVAQAERLLAWAAAWPQRTWAVEGAGGTGHLLAQQLVSAGERVLDVQPKLGARVRLLAAGDVNKNDPNDARSVAVAAMRSAGVQEVRADDHAAVLKIWSKRYRDLGRSRTQVVCRLHAVLGELIPGGVPKAITAARAARVLKAIRAEGAVQAARWELAAAFLEDLRGIDAGIRETRKKLAAAVAAAGTSLTGLFGVGPVIAAAVIGDVRDVSRFPGRDHFAAYNGTAPIEVSSGQRKVYRLSRRGNRRLNHAIHMAAITQIRNRHSQGRVYYDKKLTEGKTPKEALRALKRQVSNAIFACLQADARRAAARAKGPGGQQGNDSVASAAGSHPRHRLFGQATPGPGHHTTTVTGGPPPGPARGRDRAGHSSIAATLPPATPKVQVERPQRSEDERPGGAARRRPHSAARKATGQTAQVKKQRPKGTSQAAERTDGTP

SEQ ID NO: 503428 - protein, 388 aa, unidentified
MNSVGIDISKGRSTVAVMRPFGEVVISPFEVRHTDSELSELARQLKSLNGETRVVMEATGNYHAPVAKLLHDAGLYVSVINAKLVHGYGNNDLRRVKTDRKDAVKLANYGLDRWLTLPRYVPEEDTRLLLKNCYRQYRQYSKVQTVLKNNLISLLDTVFPNANRLFSSPARADGSEKWVDFVAEFWHCACICKRSEKAFISKYQKWCKKHGYNFGEEKACAIYAEANGHVGVMPKSETTKLLVEQAVVQLRATSAALTALKREVLTLAAQLPEYPAVMGMFGVGPALGPQLIAEIGDVCRFYSKKALVAYAGLDAPPNDSGDVTGRHKSMSKVGASSLRRTLFLVMSVYLRRAPLDEPVYQFMDRKRTEGKPYRVYMMASANKFLRIY

SEQ ID NO: 503429 - protein, 321 aa, unidentified
MEIDVLGIDLAKQIFQLHGADRRGHVVHRAKVSRSSFFESVRALNPKVVVMEACGTAHHWARRFQSLGIEVRLISPQYVAPFVKTNKNDRNDAEAIVEAASRPTMRFVTIKSVEQQDIQAAHRMRAVMLRHRTALINQMRGLLGERGLAISRSPEAFKRAMPEILHTSAIEERVRLIEASIQSFMKKSTLCKKIAEIPGIGPITATAVVAAVGDARQFRNGRHLSAWLGLVPRQYSSGGKPRLHGISRRGDTYLRTLLIHGARAVLRYAPTKTDPQSVWLQHLMARRGHNCAAVALANKNARIIQALLSSDATYITRTATA

SEQ ID NO: 503430 - protein, 369 aa, unidentified
MLGRREQKIRQVGQAVLPWVPDAVDEQGRSTPDSESPNSCLVHDTVSLQGWARKECSMSDAVYAGIDVAQEWLDVALSFSETGKRWANDEAGIAAAVTWLKEQQPTLVVLEATGGLEVPVVAALACGSVPTAVVNPRQVRDFAKALGKLAKTDRIDAQVLARFGAAVKPSSRRLPDAQAQELNSLVARRRQVLEMHTAEVNRRHRALPVVRRCIDQVLRLLEVQLAELDKDLQDRLKASPLWREQEDLLQSVPGVGNVLTFTLIADVPELGSLNRKQISALVGVAPLNRDSGNFRGKRRVWGGRASVRAILYMATLAATRWNPIIRSFYQRLLAAGKPKKVALTACMHKLLVILNAMVKYKTLWNPRFV

SEQ ID NO: 503431 - protein, 333 aa, unidentified
MNPISEVGIDIADASFEAKKRLGGRTYARRFDNTAAGHRQAICWILKGAQGARVCLEATGVYHLQLALSLARTPGIELMLVNPRGARRFAEAQLIRAKTDKVDADGLLQYLARMPFRAWTPPADEVLALQCLAHRLAQLGKEKKREQARLHAAQRAGSHTRLVQQNLRAHIDYLAQQQQAIEREALALTQRHAALAEDLRLLDTAPGVAERSAVKLLAEIAVLPPHLTASQWVAQAGIDPRPDESGDKTGPRRISKQGNARIRAALFYPAMTAAQHDPHVKAYYQSLIARGKKPLQAQVAVMRKLLHAFWGMLHHREPWDGNKFYRLDAFKTA

SEQ ID NO: 503432 - protein, 381 aa, unidentified
MSFTMRSSVELPVGVSYVGLDVHRKSVVATVLDEGGQLVHQSKFGPTDRELVEFLGQLPGHRKVALEACSMWQHYYDAAVSAGAEVVLSDPFKTRLIAKTNRKTDKIDSEALATLLRLDSLPSVFAPPPKLRVLRSIVRERRFYRRSAAAMMSRIYHEMISRGIEYEDGILVYRRKREVLRQLGLPLVNRGLDAIRVMEDTAKLLDRAIEEAWEASPDAQLLTTIPGVGKLTAVALVAFLSPIERFRSADEVSSYVGLVPSTFQSGDHLYHGRLKKDSNGMLRTILVEASWTHRQRCRSGAVSKIAKRVGRRAGRGKGSIAAAHKLLKIAYAMLKQREVFRANAPGPSTAMQPVRRPRTTALQSLRRATLGSLTANSLSAS

SEQ ID NO: 503433 - protein, 321 aa, unidentified
MHDFHLGIDVAKLKLDCTLRLTSGKFRHKVVQNNQQGFQDLGVWLNKQGASIAHVCMEATGVYWEAVAYYFVQHKFPVSVVNPAQIKAFGVSRLVRTKTDKIDAQLIAEFSFERKPELWIAPSLAEQSLRAMVLRLDALQVMRTQELNRLDVARDAIRQGIVDHIEWLDKEIKSLIRSINDHMNNDPDLKDKQKLLDSIPGLGDRTIAVLLSYYADTKRFTSVKRAVAFAGLDPQHHESGSSVCRKTKMSKVGHTFIRKALYMPAMVTLYRTTWGKAFQQRLAAAGKPPKLIIGAMMRKLVHVALGVLKSGKPFDASLHLA

SEQ ID NO: 503434 - protein, 415 aa, unidentified
MALKIVYKICCGIDVHKNFVVACIAKTDKQGITTYESHHFSTYTKGLKELLKWLLDRNCKDVCMESTGKYWIPVYNVLEKDCSIVLAHPKYVKAIRGKKTDKKDAKWIADLFKHDLVAGSFMPPADIRQLHDLMRYRFKLTCFKSSEKNRYQNCLTVSNIQLASVVSDTFGKSSQKILDKILENPDDASFDIESLIHGSMKDKLPKLELAIDGYITPEQAAKLKIIKEHFDNLESRKAELEELILALASPYQQEIAIILTAPGFKNTFSAISVISEIGTNMEAFPSAKHLCSWAGLTPTNNESAGKKKSVRVSKAGCYIKPLLVQCANAAIKSKKHPEIRDRYLRIKKRRGHKKAIIAIARMLLTALYHMLKNGENYNSDLYKKSDILPTTREITVEQAILMAQFQGYRIKSATE

SEQ ID NO: 503435 - protein, 359 aa, unidentified
MMIVGCDFHPKWQQVAVLDSETGEVEERKLLNGDSEAERFYRQLTQPARVGIEACGNCQWFLELLQRLGHEVWVGDAAQIRASYVRKQKTDRRDAAHILKLLVENRFPRLWMPSAAERDLRQLLIHRHKLVEIRTRVKTGLQHLAMNRGLQKQRALWSKRGMSDFQNLSLEGWSLKRRDDLLHLLSELDGQIGELDTAVEEAARADKRARLLMTQPGVGPITALAFAVTIGDVSRFKDSGRVSSYLGLIPSEHSSGGKQRLGHITKQGNRFVRMLLVEAVQTTCRLDEGFKKEYAARCHHKPNGVAKVAAARKLAVRLYWMLKTNTSYPEIAHVESSSEVALAGNRHTDDLIERSRTRR

SEQ ID NO: 503436 - protein, 414 aa, unidentified
MEQIHDRVAGLDVHRDVVVACARVPGARGGTVTEKERFQTTTGALARLAGWLADRYVTLVAMEATGVYWKPVYYALEDSFEVWLCNAHHVKNVPGRKTDMSDAEWLADVAAHGMVRPSFVPPPAIRELRELTRYRKTQTDARVAEIQRLEKVLQDAGVKLTSVASKVLTQSGRLMVEALIDGQRDPAELANLAKGKLRPKIPELTEALNAHFGAHHAVAAARILAHVDFLDATIKALTEQIDVRTKPYQAARELLMAVPGFDRLTIDTVIAETGADMSKFPGPGHLAKWAGVCPGNHESAGKRRRVGVTPGNPWLRRALVEAARAAARTKGSYFGAQYRQIAKRRGPNKAAVAVAHSLSDLIWHMLSTGEVYHDVGDGYFQRRRDPERETRRLVAQLEQLGFQVALTTLQDPAA

SEQ ID NO: 503437 - protein, 302 aa, unidentified
MTRVICGVDVSSRTLEARIGRDGQFVSFPNSVEGIASLGRFCRDHAAGLVAMEATGGYEQRAFAQLSGQGQPVAILNPRAVRQFAQAMGLLEKTDKIDTGAIAWYAEVKKSQPAELASASQQKLRALVTRLRQLTETRASQRNQARLVTEAEVAASFERLLDLIEEQIEQLAASIAALIAEDPLWRELNQAFRSIKGVADRTVAGVAPLARDSGQFQGKRAVRGGRATVREILYMAAGVAGLHEPDFMDFRKRLKDAGKPGKVVRIALAHKLLVRLNAKAREVRQRMESSASRGEQPLAAAV

SEQ ID NO: 503438 - protein, 341 aa, unidentified
MNAIYYIGLDVHKKTIAYCVKKIDGTLVRHGVVAAERKALQQWQSELPGPWYGAMEATIFTGWVYDFLRPHAVELKVAHPAMLKAITAAKKKNDRADAEKIADLLRVNLLPESHMMSEELRELRRILRYRNMIVRTAVKMKNKMSGLLMEVGAQYSKKRLYGKKYFSALLERVEDVPNSVKELLKLSRSGFELYDGIQKRLVSALRENKQIQARVLRLMTIPGIGEVTALTWVLEIGELDRFSSSRHAISYCGLCSAQHESAGKDQRGPISKQRNKHLQTTLIEAAKLAPRWNEQLAVLHEKELTRGNRNRATLAVARKLVEFMMAVDRRESEFETTKLAA

SEQ ID NO: 503439 - protein, 456 aa, unidentified
MGIDVSKGYADIILLNFKKELVEKSFQLDDTSAGHRVLKTKLEIFFTNNPEAIIYAALESTGGYENNWYRLLRNLGEEMAIQVARLNPIGVKHYWKAKMEKNITDKISAKNIAEYQIVHKEKIGYSKEPCFSSLRKQWKFVRMITKQKTQFYNQLESELYLANPEMLIHCRNGVPKWVLQVLKKYPTAEKLSKAKVNILSKIPYVTAMKAEVLISNAKRSVASAGDEMAANLIVCLVEQIQSQEALIKSQMDYIEAKCELPREIEILKSFIGISTYTAIGLMLEIGTVDRFEDAKHLASYFGLHPVYKESGDGRKGVHMSKQGRSEPRALLYMAAKTAAARNPQIKEIFTKQIKQGKCYNSAIGVCMHKILRIVYGMLKNKEMYNPEKEKEYQEKITTEKGPKIDTGLRRFQPPDQSAPISRKQNKKRKEREKAQNEINSLIAGSDPRSLETKLRL

SEQ ID NO: 503440 - protein, 472 aa, unidentified
MKDTYRRCCGIDVHKKSVTVCVLPPVGDRQSAIKRRKFRTFTRDLRQMRGWLKNCRVTDIAMESTGQYWRPLWNLLEGEFSKLLLVNPQHIKGLNGYKTDPKDARWIADLLEGDRLRGSWVPPRPIRELRDLTRHRVNLLGDLNRAKNRIEQLCQTGNIKVSSVATDLFGVSGRQMLKDLIAGHKDAGWMADCAKGRLQAKKRELTLALEGSFTVEQRWLLDTEIRQVEWLEQQIETVEREIEQRVSGLEDPIRRLDTIPGVDRKTAWTIVAEVGVDMEVFADAQHLASWAGVCPGNRESGGKRKSGRVRKANRYVKRAMCQAAWAASHTKDTYLSAFYRRMCVRKGALKAIMALAHHMMVMVYQILKRKEEYVEMGGDYYDQRNKPKVVERLVKRLTRLGYQVQLQPAEVPAAVAAEPLPAAEAQVAASVAPRRKRGRPCKCAERGISCRHRTGTEVNSEILEQLVAGEFS

SEQ ID NO: 503441 - protein, 315 aa, unidentified
MSDVPCFVGIDVAKAQLDIALRPSGERWAVPNDTSGVATLVDRVQTLHPTLIVLEATGGLERAATSALAAAGLPVVVVNPRQARDFARATGQLAKTDALDARALAHFADVIRPTPRPLPDAQTQELRALLGRRQQLIVMRTAEQNRLAGTSARLTKDITAHITWLNADIATLDDDLETLLRASPLWRENDDLLQSAKGIGPVCAHTLLLELPELGTLTRQQIAALVGVAPLHCDSGTLRGRRTIWGGRAHVRTVLYMGTLVATRFNPQIKVFYERLLAAGKVKKVALTACMHKFLTILNAMLKHRTPWKPQEVQN

SEQ ID NO: 503442 - protein, 336 aa, unidentified
MGQYVGIDLHRRSTTIVRMAPDGEVLGTERFVSQPFELAQAMAAAGPEPEVVLESTYGWYWAADVLQELGAHVHLAHALGNNWGNRRVKNDVRDAQDLAAMLALGRLAEGWIAPPEVRELRELVRYRYSLIRHRTSAKAQIHGVMAKNGILPVVGELWGPTGQAQLDRLELPEAYAMRLDSLRNLLDVYEAAIAELDAHIHAQLKADPGYQAVMTLPGVGKVIAAIFVAEIGDVGRFDSAKKLCSWAGLTPKHRESDEVVHRGEITKQGSPLVRWAAIEAVGNYRAKGNEKLRADYKRIAEHAGKYKARVAVARKLLTLVFYAMRDGEVRCLESAA

SEQ ID NO: 503443 - protein, 347 aa, unidentified
MKVTTVGIDLAKNVFQVHGVSEHGKAVLKKQLKRHQVIEFFANMPACLIGMEACSGAHHWARRLQALGHTVKLMAPQFVKPYVKTNKNDAADAEAICEAVARPNMRFVPIKNVEQQAVLALHRARQGFVKARTAQANQIRGLLAEFGLIVPKGIAHVARRVPELIEDASNELPGTFRLLAQRLVEHLKELDRQVGELEVQIATWHRNSDVSRKLAAVPGIGPITASALVATVGDAKNFSNGRQMAAWLGLVPRQNSSGGKNVLLGISKRGDTYLRTLLVHGARAVIYAAQRRTDKAAGWLSDLVARQNINVAAVALANKNARVVWALLHHGREFRPDYAAAAAAAAA

SEQ ID NO: 503444 - protein, 358 aa, unidentified
MEPFILKQSVGIDVSKDSLSICLCTLLSDLCRTYDHLEDQPNNINGFKRISTWLNKQQVEGVQLLVLLEATGVYHERLAEYLYTSGKSVSIMQSGRVKRYSQSLDQRSKTDLLDSKMLAMLAIERPLKLWQPPSATLRKLKGLSRERSVLVTERGMLGNRRHAIEEGSYVNKQSMRRYAKRLKMLNAQIKEIEAEMQDLVNQDEELCTKIAYLRSIPGISFIASATVVGETLGFSNITNAKQLTSYVGYDVVQRESGNYKGKTKISKKGNKHIRAILHMPSMAAIRVNPTLKPFYRRLKSTKAKPIIGLVATQRKLLLLMYTLWKNEENYDPEIAKRKAASQKELAAQDSKLKIQLTS

SEQ ID NO: 503445 - protein, 483 aa, unidentified
MNDAKLYVGIDLARRANHKAVALKGEEAASPQAARSKPVSFAHDREGFLALRDRLLEHAGAQTLDGVTVNMEPTSGVWETLAGFLRAQGADVFFTRTDVVSALRKVHSKFAKTDRIDARTQAGIPRSFPERLIPVVAVEARIRTLRQLSAQRQRLVEDQTAWKNRLVAKLDVTWAPLMRALDKEQRFSQLACAFFKRFDRPAKVVAWGRERFLTWCKAQAHAHTHPDTFETFWQGAVESAALWTLLDDCRAIAVDWDSHHEQVRQDLRLIEVFEKEIRTTEAQIRQTRHDVPECDVVQQLPGVGPVVSVTLTALLSPTTRFANTKKCGAYTGFTSRKKSSAGRDIEGLKITKTGNRRLKRDLALAADVAMRQDPQLAAFAIRLLRAGKHYNKVRVAIGRKLAVRAYSLLKRYAAGQTDVAYIWRDIQGRPIQKRQAQELARSLWDAHEAQQKHKGSSPIPALPWQSEDSTTQTLDELPGGNHV

SEQ ID NO: 503446 - protein, 343 aa, unidentified
MRIVGGLDIHRRQITFDYLDERSGETRHGRIAPADRMLLRGWLQMLVGDAGTPTAFAVEGCTGWRFVVEELQRAGIEAHLAEPADTSAARGPKRRAKTDWADARLLRDLLADGRLPESWIPPAQVLEMRARLQLFRDLREQHTAWLQRIHAILLHHGAPTVTGSLLGLDSRRRLEAGEGLSPAGQEAVAAALRIVDALDAELDPLRKQITAFAGRQPGCRALQADYGIGPITATALWTELGDSRRFSASRKAVRHTGLDITVHSSDGKRPPGRLSRQGSPLLRWALFEAAQCAARPGSPDHAYYRRVADRVGGNRAALSVARKMVRRAHHTLRALGDEALAPV

SEQ ID NO: 503447 - protein, 342 aa, unidentified
MNKVAIAAIDLGKNSFHLHAQDDRGHELYRKKFTRTALVQHLVNLEPCTVVMEACGGAHFMAQQAVKFGHTAKLIAPHLVRPYVKSNKNDFADAEAICEAATRPTMRFVPVKTQAQQALAMLNSTRDSFIKDRTATVNRIHAALLEFGISLPAGFKSINELTALLEASSLSDPIRKLLTRMHDHFDYLHEQIKSLDKELESQVAEDDLAARLMTIPCVGPITSSALAAELGDGKQFKCGRGYSASIGLVPKQHSTGGKTVLLGISKRGDRNQRRLLIQCARVYLMHLDRQKGVLAQWVRHLIATHHHSNHVVCALANKLARIAWAIAAYHTEFDAGPSAMSA

SEQ ID NO: 503448 - protein, 312 aa, unidentified
MDGTINVGIDVCKQWLDVVVGAGAASQRFDNTEAGHDSLIKAIETRTIERIVLEATGGLERPVVVALAAAGLPVVVVNARHIRNFARATGRLAKTDAIDAEVMTQFAQAVAPEVRPIASAEHHAFKELVARRRQLVMMHTAESNRLKQAHDNVVRRSIRAVLKVIERQINDTERKLDDVIERSPIWQVRRDLLTSVPGVGDQTARTLIAELPELGHCSRQQIAALVGVAPINRDSGMMRGRRTTWGGRTNVRSALYMATLVATRHNPVIRDHYQHLQEAGKRKKLALVACMRKLLTILNAMLRNGEPWRQTT

SEQ ID NO: 503449 - protein, 363 aa, unidentified
MKNYIFVGCDSHEKTLVNKIAHNDGPIEGTRCGANRAGRQKLIQYLKERSGRAGGAAVVVAYEASGHGFIFCDELKEAGFICHVLAPTKIERSSKQKRNKNDDRDAERLLDILRGHYLAGTKLPAVWVADLQTRDDREPVRARQDLSDKQTTVKTQIQMLLKRHGLEKPEGIGTTWSKRYQGWLKAISQDGPAMQLGMRQTLKSLLRQMQFLEQEVQQMDQVMRELADTPRRKPIVDELMKEKGVGLMTSLKYATDISDFKRFRRGRQVGAFFGLAPSSDESGENNDRKGHITREGSPSARKLLCQATWSRVQHDEQERAIYRRLVSRNPKKKKIALVACMRRLAVRLWHIGLQAQLRMEIAR

SEQ ID NO: 503450 - protein, 331 aa, unidentified
MPFIFSRATRLFEVEQSRTNGRDSGVPERCSFNNSNKQTHLMKKELYLGLDVHKDCILTAVAEEGRKGEVRDTGAISNDLHAVEKWIGRLRKVHGREVILRACYEAGPCGFGLARRLRQLGVECEVVAPSMTPTRSGDRVKTDKRDARKLARLLRAGELTPVYIPEATDEAIRDLCRARTDAVDDRRRSRHRLKGFLLRHGYHYQGKTSWSAAHERYLRELVLPHPAMKVILEEYLQGIAAGGERIARCEEAMQTLLEKWRLASAVRALMAMKGFQTVAAMILVSELGEVHRFAHPRQVMAYLGLVPTENSSSDRRRQGHITKCGNAPARW

SEQ ID NO: 503451 - protein, 321 aa, unidentified
MSQQTTNRAPARFVGCDVGKQHIVVFDSAGGKAFQIENRPRALAAFARSLDKDCLALCEATGGHEATLLEALAAAGIPAHRADARKVKAFIRSWGTLGKSDGIDARALARYGAERHEHLRRWSVPDRQRARLQALVRTRRDLVDERTAHNNRLGAPGGKIAAPYLKTLIACLERQILRIEADIQTLLADCEELDRCRRALTEINGIGPTTAATLIALMPELGTLTRRETAALAGLAPHPNQSGLTDGYRRTRGGRTEIKQALFLPALTAGRHHPTLSPFHKRMIQDGKKPIVAATAVMRRLIVIANAKIRDEFAHDSNLAA

SEQ ID NO: 503452 - protein, 328 aa, unidentified
MFEHYIGVDLHQAFFQACAVTASGDRAWEGRFPRTDAGMTALLARCDQRTAMAVEASTPTWHFADAVCPRVGALRIVDPVKTKLKAGYAAKTDRLDARRLADALRRDSVVGIYYPPVAIRELRELCRFRHAVVQVRTALINRVRAVLLRQGLVDRRRLARTVSDAWLETLTLPPRAAASVAGLRRVLAAVRTEAAAADREVLTLAAADPIAIALQQIPGIGPVLALLIRAEVGDMRRFPTPGHLASYAGLVPRVDASAGRVRYGRITRRGSPWLRWALVEAAMHGTRRRDRIGRWGRSLAIRKGALKARVALARALCDEIYRQWLAVV

SEQ ID NO: 503453 - protein, 378 aa, unidentified
MQSKQTWCGIDVAAKALEARRRRGEELAGETFANDAAGHRALLKWVGKGAQVCMEATGVYHLQLALTLRAGGVRVMVINPRVAKDFGRALGNRSKTDQVDAGTLLQYVERMRFIDWEAPREGVLELREHGRRITELVQTCVDEKNRAHAKTSSRLSRVILADVEAHIAQLEKRIGRIEASAMNVIESDSDLLEQYEILKRIRGVGRRSAILLLTELAVLDPTMNVKQIVAYAGLDPRRYESGTSVDKPPRISKTGNARLRAILYMIALSAVRHERGARLFFARLVARGKKRKQALVAVMRKLLHGIWIALQRRIRFDASVLFAASLAQAESSDSAVAADQPEPGQDHPKGRSEAEELRQQLDPDSAEATRARKRRPAA

SEQ ID NO: 503454 - protein, 351 aa, unidentified
MKYYKTTTKYNCGIDLHTRQMYICVMDLDGNILVHRNIRNNDFGFFLKLVEPYKDDLTVTCESCFVCFWLADACEDAGIKFVLAHAFYVKSIAANKHKNDKEDARELTECLRTSRIPPAYVCPRDLRPARKLLRRRNKYVKNRAELTGHSTCEVMAAGNQPLTISANSKERWREGIRSSFDNPLDSFTAEMELSIVERYDEIIMKMEQRIEKHARDFKQQDYRLLRTAPGIGKILALTILYETIDIKRFPTVKDFISYCRLVCGTNESGGLDPAAGVECDHLFVSRGAGHRTGSNLADTEQEATQAANGSDTKRGSARVAEHGGDASADGAAAVWMRLEADGVRSAAGERC

SEQ ID NO: 503455 - protein, 375 aa, unidentified
MNTSITHVAMDTHKKEHTVAVGYPGQDKPEILTVANTVVEIRRMVRRILKQAPGEVVFCYEAGCCGFALQRRIESYGGHCQVIAPSLVPVKRGEHVKTDRRDAIKLLKLFRAGLLTVVQAPDPQQEADRDLTRLRQSARENLQRVRHQILKLLGRHGYVYTDGDHWTVRHRNWMRTLEWDSLLLREVFDEYSTEMQHCLQRLESLDRRVLALAQEDRYRETVGLLGCFYGIDTMTAIVFLTELFDLARFASPRQLMSYLGMTPSEESSGDCHYKGPITKSGNGRIRRLLVQAAWHYRHPQATTPKTLRDRRKDQPQWAVNLAERAGHRLRKRYWHLLNKGKPPCKVVVAVARELAGFLWAMLRESALRRTPRTIE

SEQ ID NO: 503456 - protein, 360 aa, unidentified
MRIQRTSVGLDVHARSVVGCAIDEDTGEVIRHRFGYDPAAVLEWVRSLPQPAAVTYEAGPTGFALARLFTAAGIECLVAAPSKLQRPVGERVKTDARDAMHLARLLRLGEIVAVAVPTIEQETARDLVRAREDNRGELMAARHRLSKLLLRHGIIYDGKQAWTGAHDAWLRRQRFDHPGLQAAFDADYEAVQQVRARKDRLDAIIEQMAATSNYAPVVRRLGCLRGISTLTGFGLAVEIGNWERFTGSSIGAFVGLVPSEHSSGQSRSQGSITKTGNTHARRLLVEAAWHHRKPYRPGAVMQARWAAAPSLAVSRGDDGNRRLHQKWQHFTARKKRPTIANVAIARELAGWCWSLAVMPD

SEQ ID NO: 503457 - protein, 430 aa, unidentified
MKQYELLHSLFVGIDVSMKENVVHAMPFSPEDHPGHAHLRFSAPNTPAGSVGIVEKVSDFLKFYPDVIQVVIALEATSVYSFHLATFLSVAHFNGHIPAIVYSVNPKEIHAYKKTFTDVGKDDYVDAMVIADYARSNKIRSRPWKGPELLGLRVLTRLRFRIAKLMGIVKNSTGNSIYLECSGLMTGENPFCNVWTTTCQELLTTFQGPDEILSLSDEELLNFITEKGHGRFSHPLDVVEKVKKAARNSYRLDKRVYEPLTSGLSVSFFIIHSLEAAIKKLDKSIETMAKSFSSDSYQILLSIDGVGPVIAGGLLAEIGDIKRFKTDDALAKYIGLTWRGKQSGQSESPVKHLSKAGDVYLRYYVLLATGQIINYSAKYREAYERIRSRKTLFPYRAALNLVARKIVRLIFTLLDKHQLYSDNEVMVTLE

SEQ ID NO: 503458 - protein, 392 aa, unidentified
MYIVGIDIGKNHHEASIVSPEGKQIGPSLRFATTHKGADSLMSFIFKNIGNSPCVFGMEATGHYWYPIYSFLKAKGYTIYVINPIQSDSLRKMYIRQTKNDSIDSFLIAEVIRFGQFSTTSMADENILAMRQLCRYRDSVISSRTEIKLRISTIMEQIFPEYEKQFSSLWLSTSMGILEKYLTPENIQNAPLDELHGIIKDKSHNRLTMDKALSIKEAAADTFGIKIAQEAFSFQLKQLIDRMHFLDQQIEALDCQILGYYEKFDCYLHTIPGIGMIGAATILAEIGDTKRFKSSSALVAFAGIDPTVRQSGEFNSIHNHMSKRGSPYLRHAIFLAATTCSFHNSPLNAYYKKKRDQGKHHLTATGAVARKLTTVNYAVLRDGKPYEPKKFC

SEQ ID NO: 503459 - protein, 329 aa, unidentified
MKVTAIMGMDVSKNTLDCHLFVQQRSLVPVSNNSKGFKVIKRWLVKELADMEGLLVVMEYTGIYTYGVERFFEQQQIKFVKRPALDVKRSLGMVRGKSDKVDARFISKYGWMRKEELQPMLPLSDNQLSLQQLMNHRDKLVADKASYQNKLKELMSQMGEKINEKIAGSMNYIMDVLTQEIKETEAAIKELIGSGPSLQTNYDLACSVTGIGFATAVHLLIATENFTRFSTVRKLICYCGVAPFEHSSGTSIRGKVRVSHLANKKLKSLLTMAAISAIQHDPELKAKYEQKVKEGKAKMCVINIIRAKLIERVFAVIKKQKAYEIRIAA

SEQ ID NO: 503460 - protein, 415 aa, unidentified
MSENIITAVGIDVSKGKSMVAVRQPGGKILLGPFQVEHNALGLKQLTETLKCIDGEIRIVMEHTGMYWRPVALTLKEAGLFVSVVNAILIRKFSDNSLRKVKTDKADSLKIANYALAFWNELEEYSLEEENRQMLKVQSRLYERTIKGSVALRNGLISLVDQVFPGANDFFSGSPKESNGHFKWVDFIRHFWHKDCVTRLSLNGFAEKYRKWCNREGYRFISSDVARIYKAALESTATFPKSDSTKILIRQAADSLNAVYDTLHILRAEMLRLARLLPEFDVVMYMYGVGNITGSQLMAEIGDVRRFHSKSALVAFAGIDAPPFQSGNFEGSNCHISKRGSPHLRRTLFQISSTILKKSNPDSSIYQFMDKKRSEGKHFYVYMVAGAAKFLRIYYARVTGYLDAIEATENNNLTG

SEQ ID NO: 503461 - protein, 457 aa, unidentified
MARKARSASQSQQLPPSLKQVHLNAAGIDIGAESHYVAVPEGRDKQPVRTFSAFTPDLEQLADWLKACGVDTVAMESTGVYWIPLYELLDRRGFKLYLVSPQYLKRVPGRKTDVLDCQWLQQLHTFGLLAGAFRPEDQEVVLRSYMRQRGMLVTYAAQHIQHMQKALVQMNVLVHQAVEDITGVTGMRIIRAIIAGERNPNTLAAMRETGCKKDAATIARALQGNWREEHLFALRQAVELFDSYQEKIGDCDQKILDQVHTMEDRSHTGTGTPPRPEGGHARKNQLTFDVATEAYRLSGVDLTKITGIKGHTAMKILSEIGTDVGHWPTSGHFSSWLTLAPSNRISGGKRLSQRKGPPKANRVAQVLKIAAQSLHHSHSYMGAFYRRLAARVGKSKAIQATARKIAIQVYYALKYGIDYIERGQNYYEENYRKKAIMGLARKAKEMGYCLVKAEISV

SEQ ID NO: 503462 - protein, 342 aa, unidentified
MTTYHIGADVDSRITELAVLGGRAIKYFTVPTTIPPLLEVLKSLPSRKVLVMEEGPMADWLCRNLRPVVDEMVICDPRRNKLIYQDGDKTNRIDAKKLAELSRAGMLRPVYHSDSQDRICLKQWVSLYLDRVAQAVREINKIRARCRMWGLRPPRGALRNQTIREPWLKSLHAALAGQLRLLFLAFDAISEIVCCCRRELARRGKAYEIVARWQKLPGVGLIRSVTFLAYMDTPWRFASRKKVWRYCGVGLQRFASGTDKRGREKVGSLRLAWAVNKRLKNVVMGATMSAINQGDNVIAQGYKERIAKGMTPGNARHTAARKQLDRMMAIWKTGSEYSPDLA

SEQ ID NO: 503463 - protein, 413 aa, unidentified
MHTRFFGFDVHQEFTQIAMLEGDQLTQLGRIPTTPAALREFAETLSTQDQVVLEATTNTYAIVQLLQQHAGRVVVSNPLQTRAIADAKIKTDKVDAETLVRLLAGGWLPEVWEPDADTQALRQQVAYRIGLVRQRTRVKCRVHSILSRNLIASCPRSDLFGKGGRQWLLEQALPQLPIHEQAVVTASLREFDTVSAELATIERTLAGGALPRPEVRRLMTIPGIDVIAALAIMAAVGNVQRFRTPSKLVAYLGLDPRVRQSGSGPVKYGRISKRGPGHARAALVEAAWAAVKSPGPLRVFYHRVRNRRGGQIAVVATARKLVVLAWHLLAREQDYAFVRPSLVAKKWRALELQAGHPPRRGERGAAYAYYLKPLRDQEREIGVQAERAYTLLTQHWQPRRATQDAGAANGKRL

SEQ ID NO: 503464 - protein, 325 aa, unidentified
MEIKKLCCGIDVSHTTVDVCYQNNLGELFHLKVGNNNKGFAKILEHTGTGYHFVMEATGVYYIRLAFYLHQQDCQLSVVNALSIKRYIQMHLERNKNDKKDAGWICRYAIEQSPSYWEMPDSAYFESKQLYNTIREYAEQIKGFNNQLHSVRLLPVPSKATIMSLEKMKQQLEKEMKNLEENLQVILQQWQPAQLKSVSSIKGIGKRATAMLIVYTQGFKNTHNHRQLISFAGLSPTEYSSGSSIQGKPRIYKRGGKNLRDVLYMCSMNAIKTNTACKALYERLRTNGKTGKQALIAVCNKLLKQVFAVVKNNSLYQPNYCSASL

SEQ ID NO: 503465 - protein, 380 aa, unidentified
MEKACGLDVHKDSVFACILDEQGKKIFEKRYGVLTPNLMELRDTLVALGCGRVAMESTSIYWMPIWHVLYGEFTLSLANPYFIKQLPGRKSDVKDAQWIAECLQKDLIKSSFVVDGILQQMRQYTRQHRRLTKHRVRLEQQLDNQLQRCNIRFSNYVSNQGTNVSLRKIIKAILSGERDPVMLCGLVHGRTRNRHGTKVITDSLSGVVQEADVEMLRQCMEQIDLIEKQQATCLNHLEELANKYFAKEISLLCTIPGIQKFSALCILAEIGNDMNAFGKASHLVGWAGLRPRNEETAGKIKSRKILHGNKYLRQILVEISWSAAHSGKSFLGKKFYILSKRMKSQKALIAITRKILVIIYNVLKTKQPFDPIRNMQTITV

SEQ ID NO: 503466 - protein, 355 aa, unidentified
MSQTPNTAIAVIGIDIGKNSFHVVGHDARGAIVLRQKWSRGQVEARLANIPPCLIGMEACVGAHHLSRKLASLGHDARLMPAKYVRPYSKGQKNDFNDAEAIAEAVQRPTMKFVATKTAEQLDLQALHRVRERLVSQRTGIINQIRAFMLERGIAVRQGIGFLRTELPTVLATRTDALSPRLLRIIEELAGDWRRLDQRIDGLSGEIEALARQDQACSRLMTVPGIGPIISSAMVAAIGTGDVFSKGRNFGAWLGLVPKQISTGDRTILGKISRRGNRYLRVLFVQAAWVVLVRIKNWERYGLKSWIEAAKRRLHHNVLAIALANKLARIAWAVLAKGRAFELTRTDDAGVVQPT

SEQ ID NO: 503467 - protein, 343 aa, unidentified
MTRFVGLDVSQKLTWICVVDDVGRRHWRGQCATDPGHIAEVVRRHAGDDARIGIETGAMTPWLVHELRAQGLDITCLDARHASAALKMQMNKTDQNDAEGLAQIMRTGWYRSVHVKSLDAHRARSLLGARAQLVGMTTRLSNHIRGLLKTFGLLPGAMRGLPFDRRVEALLADRDDLASIARPMLVAWRHLREQIAAFDKEVRALAKNDPTCRRLMSVPGIGVVSVLAYVSTVEDPTRFRRSRTVGAHMGLTPRQYQSGEVDRSGRISRCGDTLARTLMYEAAVVILTRVKRASSLKDWALGIAKRSGIGKARVALARKLSVILHSIWRSGEVFRWSEQPVRS

SEQ ID NO: 503468 - protein, 386 aa, unidentified
MQASTQGTPTADNCGTIFVAIELSQKKWLVTLHSPDRGRMSRHNLEGGDHAGLLALIAKVRARAAQKLGYEPRVVSCYEAGYDGFWLHRLLVAAMITSFVFDPSSIAVEQRSRRAKTDRIDGELLLRTLMAYLRGEPRVVRVVHVPTVEQEDARHAGRERDVLVKEQTAHTNRIKALLRLVGMAVGNPRRKDWLSWLERQRDWQGQAVPPHLMSEIKREHARLMTVREQLAAVEQSLEQSQIGDAAAAPTVLAKQCQLLRRLKGFGPAFAMSLASELFYKDFRNRREVASYCGLTPSPWQSGSIDREQGISKAGNRRVRQKVVELAWLWLRHQPESALSRWFCSRTLNAGKRARRIAIVALARKLVVALWRYLETGLVPEEAVMKA

SEQ ID NO: 503469 - protein, 393 aa, unidentified
MESIYKVVTEPGEHHFPQRAFGTGSSELQQLADWLRPEGVREVVRESTAQYWRPVWQKLEPQCQLHLAQAHSNRAPKGRKRDFEDAQRLVRRFVAGELILSFAPDEQQRLWRIMTRTRQPLTRHRVRWRNQLEGFLEESRLKLSSPLSDLFGSSGIRRREALAKGATDPAAIAALADPSVRASQAQLADALTVASPLIPQRRKILKLFLERLQLIDSQREALAKSVAECLREHERAVTRLAETPGLGADSAQQIVAEIGPRATSFESPERLASWVGCCPGRAESASVSRSDRSPKGNRQMRRLLNQAANAAVKAKGSVFADTYRRLVPRLGHAKAIWAVAHKLCRIIWKILHDGATYRERGRGPDPKAIHRRVSKMVRHLRELGYSVQLDPIA

SEQ ID NO: 503470 - protein, 428 aa, unidentified
MENRLHVGIDFSRDRADVCLLSPEGETIVRHRTFRNSPSGYAMARELITQTLETHGYQALDISAEATANYWMPYYWQFDADLAGYDCHLFVLEPRWVRWYKHCHSEDHKRDRTDPFYIADRTRALGNCIPWHADLHGWRLRTFTRLRFHLTQALVHEKGFLRTHLFLWASGYVQEPPLSDIFGHTSRAILARSGLWSQLDTLSDDEVAASLDQLSRHRLRDPRATAAKLRQAHRNSFRPPIELEEPLQEIWDLGIDHLSCLEALIDRLDKDIAREAQAYPGARCLATIPGFGLVLASGIAAEIGNLQRFRTPLKPDRRGGYRPRNLRDVEDAVAKFAGLWWPESSSGDFVAEERRLSKRGNRYLRYHLILGADALRRYVPKYQEFYARKHREANRHKHWRALVLTARQSVGLIVGLLHRNEPWRSEEG

SEQ ID NO: 503471 - protein, 414 aa, unidentified
MCNPLLVGVDVHRKTNTVAMMNSQGQEVAPRFTIDNNRPGCQALVRQVAHQVIAGDFDAIQIAAEATGWYWFHFFQTLQQDPALQHWSPQLYPFNPRLTANFKKTYVDLDHTDDIDAFVMADRLRLGRDLPAPFYYDETYLPLRFLTRYRYHVVHELAREKSYCLAILYLKCSEYSHPDRKPFSNVFGAASRAVIQEFASIEDIAALPFDELMEFIDVKGKRRFPDPADNARKLQQAARNAYALPTALQQPINLILNLSLQHIACLERQEKRLNSAICDLGQACPNTLQTIPGFGPVFASGIASEIGDIQRFEGNQAKVAKYAGFKWRKYQSADFQAEDTRLTRTGNAYLRYYLCEAANAVRMHDAEYAAYYQSKYREVRSHQHKRAIVLTARKLVRLVVRLLTTNQPYQPRRR

SEQ ID NO: 503472 - protein, 345 aa, unidentified
MIIGCDFHPSWQQVSWLDSETGETGEQKLVHASGNAKVFYQQLEAPVLIGMEATGNSQWFVELVEDLGHEIWIGDAAQIRASYVRKQKTDKRDAAHILKLVVEGRFPKLWTPDREQRDLRQLVLHRHKLVEIRSRVKNELQHLSMNKGLQKKRTLWSQAGQKMLRELPLKPWASCRREDLLGLLGMLNQQIGTLDAAVQKAAEENPQAQLLMTQPGVGPNTALAYVLTIGDVSRFPRGKQVASYLGLIPREESSGGRQKLGAISKQGNCMLRSLLVEAAQIAVRFDPGYRKQYLHRCHQKPKGVAKVAAARKLAVRLYWMLRTQVGYPEIVRIESSPRVPLVGAS

SEQ ID NO: 503473 - protein, 338 aa, unidentified
MEAYAGIDLHSSNSYIGIIDEQDRRHFSKRVPNSLIHILMALEPFKKDLEAVVVESTYNWYWLVDGLQEEGYKVHLANPSAIKQYEGLKHTDDKWDSFWLAHMKRLNILPEGYIYPKEERPIRDILRRRLLFVRQRTAQILSLQSAIARNLSVKMSGRAIKKLKGEDAEGLFDSPFLVLTAKSNIAVIQFLTKTIKAIENAVKSQAKLRKEFQLLKTISGIGDILSLTIMLEVGDIDRFPKVGNYSSYCRCVKSEKLSNKKKKGENNKKNGNRYLSWAYVEAANFAIRFSPEAQKFYQRKMAKTNKIVAIKALSNKLARASYYIMRDQVAYDPGKLFG

SEQ ID NO: 503474 - protein, 346 aa, unidentified
MLADELDYAIGVDTHRDQHSLGVVSAATGGVVLVEPALSACPRGYERALALAQAHAPGARAFAIEGTGSYGAGLARFLAERGERVLEVERPARARAPRGKSDVLDAVRAARGLLGQDKLAQPRAAGRRAALQALLRVREGALTARRAALCQLRALIVTAPPPLREELRSLTRARLLRRCAALRAGGALEERGTRLALRLLARRIQLLDAEERALKREIAALVEQLAPSLLAQPGVGPISAAQVAVSWSHHGRLRSEAAFARLAGAPPIPASSGLIVRHRLDRGGDRQLNRALHTVIVSRRKHHQPTIAYIERRLREGKSPREAIRLLKRYLARQLFRMLEGMPQPA

SEQ ID NO: 503475 - protein, 315 aa, unidentified
MSDVPCFVGIDVAKAQLDIALRPSGERWAVPNDASGVATLVDRVQTLHPTLIVLEATGGLERAATSALATAGLPVVVVNPRQARDFARATGQLAKTDALDARALAHFADVIRPTPRPLPDAQTQELRALLGRRQQLIVMRTAEQNRLAGTNARLTKAITAHITWLNADIATLDDDLETLLRASPLWRENDDLLQSAKGIGPVCAHTLLLELPELGTLTRQQIAALVGVAPLNCDSGTLRGRRTMWGGRAHVRTVLYMSTLVATRFNPQITVFYERLLAAGKVKKVALTACMHKFLTMLNAMLKHRTPWKPQEVQN

SEQ ID NO: 503476 - protein, 357 aa, unidentified
MRRPKAKSNDKLIAGIDLHGNNLVIGVINQDGTRLMHRKLDCSLEQVEEFLRPLKHRLQSMAVESTFNWYWLVDGLRAQGYPIDLANPAKIEQYSGLKHADDKDDAFHLADLQRLNILPKAHVYDPELRPVRDLLRRRTNLVHQHTALLLSLQSLYARTTGQRLDLGEAKKMEPKQAPQLYEHPANQLIAQVQVEHIGALAKSIHRIEKAVLDCAREIPLYEKLLTLPGVGRILGMTITMEVGDISRFKTAGDFASYCRMVDAKRFSNGKCKTDNNQKCGNKYLAWAFVEAANFARRYDESCRRWYDRKAAKAGKIIATKALGCKLAKAAWHVMAQQCNYDEKRVFPELANKPMKTS

SEQ ID NO: 503477 - protein, 438 aa, unidentified
MSSKIRYVGLDVHKRIVEACIIDHAGKVTARHRFDNLDRETLAAFARRHLRKTDRVALEASTNTWTVVEILRPLVAEVVVSNPMQTKAIAAAKVKTDKVDAKVLAQLLRCDFLPQVWMPDEPTRRLRELCGRRSALVAQRTAVRNRIHAVLAVRLIVPPGGDLFGVANLAWLEQVEIDPQGRLMIDCELRLHETLETQIATLDAELAKHGYADDRVKLLLTLPGVDLVVAQSLLAALGDVSRFADGARAASYLGLVPSTRQSATRCYHGPITKRGRSHARWMLIQAAQHLDRHPGPLGHFFRRLMNKKNRNVAVVAVARKLVAIGWQMLTRGEPYRYAVPRTTEDKLRRLRIRATGRRRRSGLPKGRKAKRLLPDGGRTIKSLDEVYQSENVAPRGDLPAAERRVIEQTETGTFVDGLSQTKIVPLTGVTNREPKQTP

SEQ ID NO: 503478 - protein, 341 aa, unidentified
MKQFIRIGVDLAKNYFQIHALANEGGPAVTRKLKRSKMHEFFTQIEPCFIGMEACGSAHYWARELKTMGHEVRLMPPAYTKPYVKRGKNDAVDAEAICEAVSRPGMRFVPIKSAEQQATLMLHKTRELLIKQLTMSVNALRGHLSEFGIVVAKGIGRVDELLELAESDTTLPEIAKTAVKILAQHLEGLEKSIDDLEKQIGRTHAQSEMSRLLDQVPGVGKIIASIIAASVPDPSVFKSGRDFAAWLGLAPRQNSSGGKQTLGGITKQGNRYIRRLLVLGATSLLNVVGKRQGALRDWIVALLAKKPARLVTVALANKLARILWAMTKTGECFRAEIFAKA

SEQ ID NO: 503479 - protein, 408 aa, unidentified
MEVLYARCCGIDVHKESLVACLRQQDGRRKHSEVQSFGTTTAEILRLHAWLSAAGCTHVAMESTGVYWQPVFNLLEGSFRVVLANAHHIKAVPGRKTDVKDCEWLADLLAHGLIRASFIPPAPIRELRDLTRHRKSLIRDRVKAANRVHKLLEGANIKLGNVVSDVLGVSGRAMLNALVAGETDPTWLAGLARGSLTPKVKQLAETLRGRFTAHHGFLLGQILTLLDQLAALIASCDARITDVTHPFEAHIQRLQTVVGVGRRSAEVLVSEIGVDMSRFATSAHLASWARICPGTHESAGKRRSAGTGTGNNWLRTTLLESAWAASHSRGSYLGAQYRRISKRRGAKRAAIAVAHSILVIAYHILRDEVTFADLGADYFDRMNSTKAKRYHLRRLEELGCDVSKVTAA

SEQ ID NO: 503480 - protein, 366 aa, unidentified
MEKYKFVGLDVHKATIAVSVAEANGGEVLYVGEIANTPEAVVKLVRQLKKEGAIPKFCYEAGPCGYVLYRQLKGLGLECLVVAPSLIPTKAGDRVKTDRRDSLNLARLYRAGELTAVWVPDGAQEALRDLTRAREDMKHFEKQAKQRLLAFLLRHGKSYGGETNWTKMHFRWFETVKFEHPVQQIVFQEYVDTVLAMVKRVEGFDGQIRTSAAASVFWPVIEGLMALRGISLLAATIVMAEIGDLRRFASAPQLMAYLGVVPSEYSSGSTKVRGAITKTGNGHVRRILVEAAWTYRHPARKTEYLQRRAKHVPEAIQEIAWDAQKRLCGRYRLLEAKGKLKQKVCTAIARELTGFIWAIGQALPQQ

SEQ ID NO: 503481 - protein, 404 aa, unidentified
MSHGCGMDIHKEVVVATVRGLGIPQDTRSFCTFTSSLTELRDWLMSMGITHVAMESTGIYWKPIYNVFEGHIPNVWVVNARHMKNVPGRKTDKKDSEWICQLLMAGLLKPSFIPPRLQRELRDLTRYRRKLIQMVSANKNRIIRALEDGNVKLSSVLSDTSGKTATTLIETLCEGKELTLQDIESIRHFRCHHTAEEMLEACTGYMNDHKRYMLQRIRECNRKLTVEIEELNKRIKEITAPFQEVTDRLCEIPGIDTRTCEEIIAEIGLDMSQFPTAGHLCKWAGMCPGNNESAGKKKSTKTPKGDKHIRATLVEAAWAASRTKGTFFSERYARLIGRKGSKKALVAVGHSVLTAVHYVLSTGGRYKELGDNYVPERMEKRRREYLKSELKKLGYEVTLTKKKD

SEQ ID NO: 503482 - protein, 366 aa, unidentified
MALCVGLDGHSKRCVYLIQDEHGNGAGEGSVPTTIEGLQLMRDRHQLPPGTRVALESGTMAFFVARRLVRLGLDPVVVDAHEVRQKALRPNQKSDRRDALELCEGLRRGIYRSVVHVPPEPIERLRETLGRRRHFVGLKTMQVNAVKRLLRAAGLQGLGRSLGTDAAWEKLLRAVAIDPSLHAFCTTHRAVWWCAHEQVATLEASLRAQGEPLQRDLDRLQTVPGVGPIVALTVLAVFSDVRRFPTAKHAASYAGLVASTYDSGERVQHGRITRRGSNELRSMLCEAAHHAGRPSHPLNPYFSSLCVRRGYKMAVVAVAHRLCRILYAMLRHGTDFDLSKLAIEQGHFERTTVRHYRRKSNAAVSA

SEQ ID NO: 503483 - protein, 321 aa, unidentified
MKTVLGIDQAKKKFDVALLLNGKYKSKVFENKPAGFSALLAWLAKNDVATVHACMEATGNYGEALARFLHEAGHSVSITNPARIKAYGQSELLRTKTDKTDAKLIARFCEKMNPTLWQPPPAEIEYLRGLGRRRDALVSMRTQEINRQETSNETVNSSVQTVLECLDKEIEQISKLIRDHISKHPDLKHKHDLLDSIPGVGPATIEAILSEINAFEGFETIEQVVAYMGLSPKEHTSGTSVKGKSAICKIGNSRLRKALYMPALSAIIYNPIVRALYLRMKAKSKNGMVIACACMKKLVHLIYGVIKTNKPFDPAYILKTA

SEQ ID NO: 503484 - protein, 339 aa, unidentified
MNIITVGLDLAKNVFHVVCLNEHNKEVKKRMLRRNQVGQFFAQLPPCQVAMEACATSHYWGRKLIVMGHDVKLIPPQHVKPFVQGNKNDYNDARAIAEAVNRPRISFVAIKTEEEHDIQAIHRIRSQCLRDRTALSNSTRGLLGEYGISFSKGIAVLRRRIPELLEDADNGLSFRFRNILARRYEQFVELDEHIAFYTKELELVSQQDDACQRLQTIPGFGPIIASAFRSTIGDGQSYACGRHAAASLGLVPRQHSSGGKNVLLGISKRGDRYLRTLLVQGARAVVLRAANRDDPLCRWIIRLLERRGWHKTVVAVANKMARIGWAILRHNVRYEPNLA

SEQ ID NO: 503485 - protein, 318 aa, unidentified
MTRSADVEWSSVGIDVSKAELVIAVAPSGERWTSATTSEALVAFVARVKTLAPSVVVMEATAGYDVPVAVACAAAGLPVAVVNPRQIRAFAQAIGRTAKTDPIDAEVIALFGERVRPEPRPLPDADTQALAALVARRRQLLEMLHAERQRLEQATATAVRRDLRQHVTWLKRRVADTDDELQKRIQKSPAWREKDDLLRSVPGIGPAVSRTLLAELPELGQLDRRTIAALVGVAPMNRDSGRFRGKRMIWGGRASVRQALYMAALVASRYNAPLRTFYQRLQAAGKPKKLALVAVMRKLLTILNAMVKHNTEWHQQAA

SEQ ID NO: 503486 - protein, 452 aa, unidentified
MARKRINKTKKVTLPVMNPDAAGIDIGATEIYVAIPPDRDAEPVRMFATFTRDLNALADWLQQREIRTVAMESTGVYWIPLMQILEARGLEVYLVNAKHVRNVPGRKTDVSDCQWLQYLHSVGLLRPSFRPAQDICAVRSLWRHREALVELATCHVQHMQKALNQMNLQIHHVISDITGLTGLAIIGAILNGERDTQKLALLRDPRIRASHETIAKSLEGDYQQEHLFTLRQSVEMYQQYRKRILECEAEIQCLMEKLEGQADPLSLPPAKDSVKKCKVMKPAKALTLRSEGYRILGVDLTTIPGISVLHVQTILAELGPDHSKFRNAAAFSSWMGLCPDNDISGGRVLWSGTRKVKNRIALALRMAAQSLQQSQSSLGEFYRRMRTRLGAPKAITAAAHKLARIVFRLLITKEPYDDSVFARSEESCRQRAKKRLAAQARELGFNLVPVFC

SEQ ID NO: 503487 - protein, 343 aa, unidentified
MSVTIGVDPHKASHTAAALDQAGQLLDQQQFPATDAGYQALRRWAESWPQRCWAVEGAGGMGRPLAQRLVADREHVLDVPAKLAARVRVLSTGHGRKTDPVDAVSVAAVAHNAAGLRQVVVEDHAVVLHLLTNRREDLVGMRTQTLNRLHRLLADLIPAGASRNLTANRAAGLLGQVRPTGAPATLRRELAADLIADVRVLDRQIKAIEARIKTAVVQSQTTLVELFGVGPVLAAKVLGEVGDVGRFPSKHHFATHTGTAPLEASSGQVVRHRLSRAGNRQLNHALYLMAIVQIRHPTAGQAYYRRKRAEGKAPKEALRCLKRRLSDAVYRCLLADQHYSPGI

SEQ ID NO: 503488 - protein, 408 aa, unidentified
MQVLYPRCAGLDVHKDMVMARVRCVSEPAHDEVRSFDTTTSALLELGDWLAEHAVTHVAMEATGVYWKPIWHLLEERFELIPANAQHIKNVPGRKTDVNDAAWIADLLAHGLIRSSFVPPAPIQELRDLTRTRKQLVREISQHSLRIQKTLEDANLKLGSVLSDVLGKSGRAILAALVRGETDPQKLADLAQGNARKKRTELVEALRGRVRPHHQELLRIHLNLIDALHQALADVDARVGKTLAPIKDSARLLTTLPGVSDLTAQVMVAEIGVDMGRFATDAHLISWAGLCPRNDESAGKRRSTRVRKGAPWLKTALVTAAWAAVRVKGSYLQAQFLRLKARRGAKRAILAVAASMLTAAYHMLKNGVEYQDLGADHFSRRDRSKAIQRLVRRLNELGCEVQLTPQAA

SEQ ID NO: 503489 - protein, 417 aa, unidentified
MQYARSVLPDQPVNGLTSGIDWARDDHALSIVDGRGCEVHRYTVEHSAAGLRELVAVLAGAGATEVAIERPDGPVIDALLNAGVTVVVISPNQLKNLRSRYGSAGNKDDRFDAFVLADTLRTDRARLRPLVPDSPATVALRASCRTRKDLITHRVATANQLREHLKAVFPGPIGLFDNLDSPISLKFLTRFDCQDRADWLTPSRLANWLTSVGYTGRTTPATLHARLTAAPRGITGAASEGFIAITHALVTVLDTLVQQIKTLDKQIARRLAAHADAHIFTSLPRSGTVRAAKLLAEIGDCRARFPTPEALISLAGRAPSTRQSGKTCIVGFRWSCDKNLRDAVADFANDSRHANPWAADIYNRAIARKKKHPHAVRILARAWLYVIWHCWQNNTTYDHAKHRALQALLEGQQQPAA

SEQ ID NO: 503490 - protein, 409 aa, unidentified
MGLYCGIDWAENHHDFAILNDLGDVVSRGRVDNDAAGFARLLEAFAEAGDTAEDPIPVGIETDHGLWVAGLRASGRVIYPINPLAASRYRSRHSVSGSKSDSADAVMLANIVRTDAVAHRPLPADTDSALAIRVLARAQQDAVWSRQRFGNEIRSLLKEYFPAALTAFQSLEDGLTRPDARSVLAAAPTPTAAAALTRPQLKAALKRAGRSRFLDRDVERLRAIMRAPALRQPPQIEAAMGISLMTLLRQFDAACTAAETLAAHVSVLFSEHPDAKIITSFPGLGPLAGARVLAEIGDDRNRFATARGLKAYAGAAPITRASGKKTFVLHRHVKNRRLAAAGTIWAFSALQASPGARRHFDARRAGGDWNHQAQRHLFNRFLGQLHHCLTTREFFDELHAFPPPLPIAA

SEQ ID NO: 503491 - protein, 416 aa, unidentified
MKKVQDTRGYERYMALDIHREYILVGAWNAEKAWVLTPRRVSTEKFSEWAKKNIQAGDIVVLETTTNVWATYDIVAPLAGRVLVANAAEVEEIAKARVKTDKEDIKKLLKLLVGGIVPEVWVPPMEVRELRAFISYRGRLVKTSAMIRNRLQSLLHKHNLKLSETGLLDQVWWEAQKDISALEKMQIRQELTLLQEVEKLKSAVDEELQRQSTGTLWGKPALQLMQLPGVGFVVAMTVLSAIGDISRFESAKKLVGYAGIGAGVHDSGKTHKDKKITKKGRRELRWAMVEAAWRAVGMSPFWKAEYEKYLSRLRKKNQAIVVIARKLLVAIWHVLSKEETDIHASEEDLAYKMLLLSWSLKEDTRMGLTYKQFAKYALMQLGVETDITHFVRRDVPRRLAPKEEVLARMTELGLTA

SEQ ID NO: 503492 - protein, 387 aa, unidentified
MQRNDLSRSLVAFDQNSTLVSVVELSLKSWLVAGLVPGVARSPLKKQGADPDALVALLHRWRAEAIKAGGQVDRIVVAFEAGRDGFWLARWLRAREIEAYVMHPTSIPVPREHRRAKSDRLDTELLMRAVLGWLRGEAKHCSMVAIPTLAEEDARRPSREHETLVKERGRIVNRMKATMARLGIRNFNIKLRKALEKLQGLRTPEGVPLPTNTLDELRRDMARLRLIQEQTKEIEKARLARLKTAPQDGAHPMLLMLAKVLGIGVETADMLVHEALSRNLRDEKALGRYGGMTGAPDESGSKRREKGLAKGGNARVRRGMIQLAWRWLMFQKDSALAQWYRARTAGARGDVRKTMIVALARKLLIALWRYVTTGEVPAGAKLRPAAI

SEQ ID NO: 503493 - protein, 422 aa, unidentified
MEVVVEVCGGLDICEREVQACVRRPDGSGGRRVEVLTFDTFTGSLEALRDWLVAEGVTEVAMEATGPYWKPVWYVLEDVGAFELRLVNSRHVKILPGRKTDVSDAMWLAELLEHGLLRGSFVPPRQVRELRDLTRYRKKLIQAHTAECQRIHKNLEDAGIKLDSVASDVLGVSGRAMLKALLAGERDPEVLAELAKGTLRRKIPELQQAMRGRFGDHHVVLLGIILEHIEHLETAIAALGARVDELMDRPDPDDDGDRPFARARDRLDTIPGVGKRAAEVIVAEIGVDMSRFPTAGHLASWAGMCPGNNITGGKSRSGATTKGNVWLRDVLVQCAWSAARTKDTYLSAQFWRLARRIGKKKAAMAVGHSILVAAWHMLTADVDYDDLGADWFARKVNDDHRRDQAIRNLHDLGYRVTLERVA

SEQ ID NO: 503494 - protein, 314 aa, unidentified
MKSKKLVVGIDISKARPDVGIVPTSEHWSVPNTPDGLAELACKLSDLSPTLVVMEATGGLERPVRVVLEQAGLRCALVNPRQVRDFAKAMGILAKTDSLDAMVLATFGEKVAPEARPGKDPDSAELEAILKRRRQIIDMLTAEKNRLKMEPSAQVRGNIDKHITFLTTSLADIDKDLRTRIKDMPEWSEKDKLIRSVPGVGPITGFTILALLPELGRLNRKQIASLVGLAPFNRDSGTFKGQRRIWGGRGPVRSVLYMAALSAIRWNHVIKAFYTRLIEAGKRPKVAITACMRKLLTILNSMVRNHTMWQAPCS

SEQ ID NO: 503495 - protein, 416 aa, unidentified
MNTDWTQHTYFAALDWASDHHDVIVLDRHGAVQAEFRFAHTADGWAEFTQKMQPFTGAPITLETSSGPAVDQLLQRGWAVYPVAPTAAARYRERKVPSGTKTDRHDTWALADALRTDGHAWRPLRPQDEATATLRALCRDEIALIEQRTALVNQLQAALREYYPAALAVFDDWTAPHAWALVLQFPTPAQLQTAGKRKWEKFLHTQHLWRPQTVEERLKLFATAQALPASAAVTTAKSLLALSLVKVLLTLQAQLDEYRRRITEAFHQHPDHDVFGSLPGAKATLGPRLLGEIGSVRQEYPDADALMCQAGVSPVSYQSGQVAKCRLRRACNKVLRATVHLWANSSRLTCTWAEAYYQHKRAEGHSHASALRCLGKRWLKILWRLWQSGHAYDEAKYLAQLQHRHSLTWSKLQPTL

SEQ ID NO: 503496 - protein, 433 aa, unidentified
MKNRTNQRLEAITPTTLIVGVDVAKSLQWARFTDYRGIEIGKALSFKNNRKGFETIITRIEEICKGKFSRKSVKFNDVAIGMEPTGHYWKSLANYLINHDLTVVGVNPYHTKKAKELDDNSQTKCDKKDAITIARLVKDGRYFEPYLPKEEYGELRVLSNSRVSLSKRSSNIKNTITAILDEYFPEINTVFKNPLKGKAARQILKSCPFPNYILSMSDEEILCEIKKGVKKTVGMKKVRELVAVAKESVGVDYGLESAKMRIRCLIEELELLERQLDETESLMEQKLIETGYGELILGIKGIAVVSAASFLGEVGDPMRFNNARQIANYAGYNLVEDSSGKSKSGTCISKRGRKQLRALLYQMAFTMVGCNVEMRELYHHLTSRKKNPLKKKQALVVVSKKIITVIFSLLKKQEHYKPELVLGAVRKEIMLAA

SEQ ID NO: 503497 - protein, 383 aa, unidentified
MKMAQETLSAINNTKESVLYTAFELSNTKWKLAFSDGNKFRLVSIESGDLPRLRIELENAKKRFKLDEDIRVVSCYEAGRDGFWLHRYLASRGIENLIVDSASIEVDRRKRRAKTDRIDASKLLRMLMRYHGGEKKLWAIVRVPSVEDEDARNIGRERDVLKRERTSIRNRIKGLLIQQGLRVNNPSNKKFLQELTSLRTWDGREVSSDLKARIEMEYKRLRLVEDQIGILEKEKKERLKEPNTESLRKVNQLLLLRGIGSVSSWNFVMEFFGWREFNNRKEVGALAGLTPTPYDSGGSIHEQGISKAGNSRIRALSVEIAWAWLRFQPNSKLSHWYMKKFGHGGKRLKRIGIVALARQLLIALWRYLENGIVPEGAYIKPIE

SEQ ID NO: 503498 - protein, 312 aa, unidentified
MPCFGGIAVAKAQLDIAVRPAGERWAVPNDAGGVVTLVERLQALHPTLIVLEATGGLERVAPAALVTAGLPVVVVNPRQARDFARATGQLAQTEALDARALAHVADVIRPTPRPLPDAQTQELRALLGRRQQLLVMRTAEQNRLAGTTAYLTQAIEAHIPWLKARLVTRDDDLETLLRASPVWRDNAALWQRAPGLGPVWARPFLLALPAWGTLTRQQSAALVGVAPLNCDSGTLRGRRTIGGGRAHVRPVLSMGTLVATRHNPRIKAFYERLLAAGKVKKVALTACMRKFLTILNAMLKPRTPWQAQEVQG

SEQ ID NO: 503499 - protein, 489 aa, unidentified
MAREKRKNKQGVSGNKKPLQVRNATAKRRTPQRSGIPVDNAPPPIESLKQVNTNAAGIDIAANVHFVAVPKDRDPENAVRSFGAFTADLGAIADWLDQCRIETIAMESTGVYWIPLFEVLERRGFKVILVEPSQIKKFRRKTDVLDCQWIQTLHTFGLLTGSFRPEDQIIVLRSYMRQREMLIKCAAQHIQHMQKAMEQMNLKLTEVVSDILGATGTAIIDAILAGERNPHQLAKLRNDKCKNDEATIALALQGNWRDEHLFSLQQAMDLYRYYHEKVKEVDGQIEVYLRQFEDKSGGEPLAKPPRAKQRSKTTNEPKFDTRTLMYEILGVDLTSVDGIGAHSALQIVSEIGTNVDAFPSDKHFVSWLSLCPEANKSGGKKQKKGKSPTHRSSNRVAQVFRVCAQTLIQSKCALGAFGRRLRGRDGAASAITAIARKLAIIVYAMIKTGRPYKDIGSEAYNSRFQDKLVKSLRRRAIELGYDLQPTLSV

SEQ ID NO: 503500 - protein, 418 aa, unidentified
MDNKIIPFAAFAGLDWADQKHSYCLYLPDGSEIERGEIQHTPEAIQAWAEKLRGRFGGQPVAIALELNRGALVWALCEYSFLALYPVTPHASAEFRKALHPSGAKSDPADAVVLVKMLLYHRDRLRRLQLADTETRLLAELCRDRRAAVEERTRHVLQMTAALKDYFPLALEFVGPLKNDAACKVLCKWPSLGQLQSAPLHRVRKFLYGLNCRHDIEGRLELIAPAKPLTNDTAVIEAGRRRVQLLAELILALNQHIAQYEERIQEIFKNHPDRELFDNLPGAGEALAPRLLVSFGLDRGRYQSAAELSSYSGIAPIQISSGKSKYHQMRIACPKFLRQTFHEFAGKAMAYCPWSRKYYDAQMGKGKTHNQAIRSLAFKWQRILWACWKNNTPYNEQTYLQALSRNGSAYALEFNTAA

SEQ ID NO: 503501 - protein, 487 aa, unidentified
MAKRKMSTFERLRRGERLGRRERRALERCLQAEGPELEIVHPNAAGIDVGNKSHFVGIKPGSCEQPVQEFGSWTADLKRMVAWLKLHGVKTVAMQSTGVYWIALYEVLEQAGLEVYLVNARGTKNLPGRKSDVQECQWLRKLHTYGLLRNSFRPPEEIRAVRTLWRLRERHVREAGRAIEQMQKALTTMNVQLANAISDLSGATGLAIIRAILLAGERDPQQLAKLRDRRVEASEEEIAHSLEGNWRDDVLFELQQVLDGYDFLGRQIAGCDVELQKYMAALPSREVGESAPVASTSALEAGPLPQKARAKRKSKNAPSFDLGAELRRITGVDFLSIDGINVMTAQVILSEMGADLGAFPSESHFTAWLGLAPRRDISGAKVIGHKSRRVKNRVANALRMAAEALAHSDSYLGARYRHLRARLGGLKAVKAMARYLACLVYRLLTQGQAWVDRGSAEYERKRQGRELVALQRRASELGLRLVPVQAS

SEQ ID NO: 503502 - protein, 376 aa, unidentified
MNIIGIDLGKTVFHLIAMDQHGAITGKKRLSRPQLLTFLANTPPSLVAMEASCGAHHLGRRLVRQGHEVRLIPAQFVRPFVKCQKNDYVDAEAIAEAVQRPTMRFVPIKTEDQLDLQALHRVRDRLIERRTSVINQLRAFLLERGIVLRTGRMHLRKMMPALLADAEQHLTPRIFRLLCVVAEDWRQVEDEIQHLDREIEAVASSDAACQRLLTVPGIGPLIATAMVAAIGNGSAFSKGRDFAAWLGLIPKQCSTGGKAKLLGISKHGNEYLRRLFIHGGRSVQHRVARDQHAFGQWLSQLESRANANVVGVAMANKLARIAWVVLSCQEDYRRGPARSPLSTEEAGFGLQIVHEPVSAAHQGSSMNSLRSALTGA

SEQ ID NO: 503503 - protein, 360 aa, unidentified
MNSLPATVGDFYRYVVGVDTHAATHSYAIIEAPSGGLIDQNVFPTSPAGLRRAREWIARRTEGDLDGVLIAVEGTGSYGAVLSDVLQQVGYRVVEAPTPRRARARSKTDALDALLAARSSLVMPLTTLRDRRTGDLQSALQVLTGARDQQNADRLRCINALTALVRTHDLGIDARRALTGMQIATIASWRRREETLGTATARAEATRLAKQITTLERDLAENRERITHLVETTAPELLDLPGVGAVTAAVILTVWSHPGRIRNEAAFAMIAGVCPIPASSGNTTRHRLNRGGDRRLNRALNTIVLTRMRTDPATRTYIERRQSEGKTSREIRRCLKRYISRQIFRSLTVAHPVPDAAAAA

SEQ ID NO: 503504 - protein, 390 aa, unidentified
MTRLVEGTEGELRRGKIFAAIELSKSKWVVGIRLPHIEKVSLFEIDGGEVDRLLGLFDRARATVVAQGWEPTEICSCYEAGYDGFWLHRLLVSRGIRNSVLDSASIQVSRRRRRLKTDRTDAESLIRVFMAWHRGERQACSIVRVPSPEEEDAKRLHRSRANLLRERVRHVNRIRGLLHLQGVVHIHPHREGWTAALRGLETRDGRRFPERLMSEIKREAKLLAVVKKLLREVDLELVALVRAQESTRRSPRTQPAHPIASKLARIRGIGPTLATVLASELFYRRFDNRRQVASYTGLSPTPYSSGATSRDQGISKAGNSRARHNAIELAWLWVRHQPESRLAGWFRDRVTNAQGCIRRIAIVALARKLIVALWRFLETGLIPEGVILKA

SEQ ID NO: 503505 - protein, 322 aa, unidentified
MSLPNPLCVGIDVSKATLDIAATCEFAQFTTGNDADGFDAIIAELRKHSVALILMEATGGLEAAVVCSLQAEGFEVAVVNPRQARDFARAMGYLAKTDRIDARVLAQMAEVINRHPERERFIRSLPDAERQVLTAMVVRRRQLITMLVSERNRLHPAHPQSRKSINIIIQALENELARIDEDMNRHIQSHFKELAERLISIKGVGTMTAAALLAEVPELGSLSRREISALIGVAPVNRDSGTMRGRRTIFGGRAGARTALYMAALVATRFNPVIKAFYMRLLAAGKAKKVALVACMRKLLTILNAMLRKNEEWNESYHHVAP

SEQ ID NO: 503506 - protein, 339 aa, unidentified
MQVTTVGLDLAKNVFQVHGITDNGEVAFNRALRRAQVLAFFERLDPCLIGIEACSTSHHWARELIKLGHKVKLIPPVYVKPYVKRGKSDAADAAAICEAVTRPTMRFVEVKTPDQQAILALHRTRDLVVRQRTQTINMLRGQLAEFGVVFPKGVGHATQFAKRMLDGECPDLPEVAGGVVAELSEQLLFLHGKIAGYSREMTRIAKREERVALLQTIPGVGPITASAIVATVGTGRQFGNGREFAAWLGLTPLNRSSGGKERLGRISKMGDQYIRRPLVIGMMSRMRQIIQNPERYDPWFADILARKPGKVAAVAMANKTARMVWAVLTRNEPYKVRTI

SEQ ID NO: 503507 - protein, 405 aa, unidentified
MFEIEDVGVFLGLDVGKSAHHGHGLTPTGKKVFDKPLPNSEPKLRAVIDKLTAKFGTVLVIVDQPASIGALPLAVARDAGCRVAYLPGLAMRRIADLYPGEAKTDAKDAAVIADAARTMPHTLRSLELADEITAELTVLTGFDQDLAAEATRTSNRIRGLLTQFHPSLERVLGPRLDHQAVTWLLERYGSPAALRRAGRRRLVELIRPKAPRMAARLIDDVFDALDEQTVTVPGTGTLDIVVPSLARSLAAVHEQRRALEAQIHTLLEAHPLSQVLTSMPGVGVRTAAVLLTTVGDGTSFPTAAHLASYAGLAPATRQSGTSIHGEHAPRGGNRQLKRAMFLSAFACMNADPASRTYYDKQRARGKTHTQALLRLARQRISVLFAMLRDGTFYEPRTPKDIELAA

SEQ ID NO: 503508 - protein, 327 aa, unidentified
MKNIFIGIDVSNKTLDICIKENNSTTFYTIENSISSCKKFFNKFKNSASFTYVAMENTGRYNYNLYEVLEQFSFLVYVINPIHMKKSLGLVRGKNDQIDAERIVYFIEKNHMDLPQWEPNSLAVKKLKVLQTERKHRVKIKSSLLKQQYDYKLMKLIKMDKEFLKLNQNLIVNIEKQIKIIENKIELIIEEDQRLQEQSDRLQTIPGVGKVLTWMMITKTQGFTKINDPRKMACYAGVVPFDHQSGTSLRFKPKVSIFADKELKKVLHLAAMRAVRLDNELKIYYLRKVDEGKNKMSILNAVRNKIVHRIFALIKNETIYQKDFVMS

SEQ ID NO: 503509 - protein, 340 aa, unidentified
MELYGGIDLHSNNCVFNLIDENNHVVLKRRVKNNLEAILILLVPYRESLVGLVVESTYNWYWLVDGLMEAGFKVHLANTAAIQQYSGLKHGDDDSDANWLANMLRLDILPVGYIYPKEQRMLRDLLRKRLQLVQQRTKNLLAIQGLYDRHLNKRLSNHKLKQLSQEQLAADFTDVNVRMAVNGNLMILQCLTVQIKAIEQTLRQQLRLKDEFLHLTSIDGIGLILGLTIMLETGEISRFKAAGNYASYCRCVNGARYSNGKKKSTCNIKNGNKYLAWAFMEAANFAIRYSDTVKRYYQRKSSKTHMIVAKKTVAHKLARACFYVLRDQVEFDVNKAFGYS

SEQ ID NO: 503510 - protein, 417 aa, unidentified
MKEWKDITHYAGFDWARDHHAVVVVDKSGQIVADLEFPHSQEGWKNFVEKMAAYPNLAVAIETSQGAAVDQLLQHQFTIYPVNPIASESYRKRKAPSGVKTDHHDGWGLADALRVDGQGWKPLAPRDPLSEKLRLLCKDEVALIQQRTLLVNQLQQALVEYYPAALEAFDDWTAAFTWDFIVQFPTPQTLVKAGQRRWQKFLHTHKLWRPDTTEKRLEIFARADQFKGSEAVTEAKSQLALSLCKILRTVDQQLVEYRKQIQAAFKEHPDHDLFGSLPGAKKVLAPRLLAAIGSDPDRYGDHNVLQCFAGTAPTRFQSGQVDRVKIRWACDSFLRHTMHLWANSFRKATVWGQTYYEKKRQEGMSHACALRCLGQRLLKIVFRMITDKKPYDAELHARNQKNHGSWVLNLVNRTAAS

SEQ ID NO: 503511 - protein, 343 aa, unidentified
MGEVSTIGLDIAKSIFQIHGVDVDGAVVIRKRISRAKLLEFFATLPACLIGIEACPSAHYWSRRLEALGHAVRLMPPSYVKAYLKRSKNDANDAAAICEAVTRPSMRFVATKSEQQQCGLMLHRSRQLLVCQRTMLSNAIRGHMAELGIISAKGRNGTAELLEIIADEHDDRIPAAARLSLDVLARQYRGVRAEIVAIEKRIHAWHRSSEESRRLEEIPGVGPIVATALVAEVGDWKTFSSGRSLAAWIGLVPRQHSTGGKQRLGRISKQGNRHLRWLLVAGAMAVIRYARQRGTKRPWLARLMDRRPIKVAAVALANKIARMAWAMMVRGERFKEPKLLPAA

SEQ ID NO: 503512 - protein, 356 aa, unidentified
MKYYTSTTEFNCGIDLHAHQMYVCVMDRQGKKRVHCNVKDNDFEYFLKLIKPYRHDLTVVCECMFGWYWLADACQAEGLTFVLAHALYLHLIHGGKNKNDRIDSEKLAHLLRSNLIPPAYVYPAAKRPLRALLRQRITYVWNRSELLARIHSHQLAYNRTPAKQTRRVRDSWEEALLTAEPHPLRQLALKNDLAMIRHYDQQIFQLEEELQRQTKRVACREFALLKTIPGIGESLGLTILYEIGDIERFPTVKDFLSYCRLVKGTVASAGKIKGLRGAKLGNPYLRWAFGEAAVIAKRDHYRLKPLAQQLEARLNGNKFKTNTIIAIKLARAAYFMLKNKTVFDPERLTAVLAKAA

SEQ ID NO: 503513 - protein, 342 aa, unidentified
MSFYCGIDLSARESQICVIDEGVKKVLEVKVPNKLEHIKQLLAPYQADLQIVVESTFNWYWLVDGLQAAGYNVVLAHTLGLHMITAAKVKTDRRDAFALAKLLLAGMIPTAYIYPTETRPVRDLLRRRGWLVQVRAGEYGSLRRLLLRHGILSHKQQEIKQATEEDLEKWFTHELVRLHASQELERIHLYSQQIETLEKTILERAKKARAFEKLQQLPGIGPIIALSIYYEMGELGRFASVKDFSSYCRVVPGVAQSGQMSRRGRGSKQGNPYLKWALSQAAVHAVRCYPGVRRYYERQLQRHRGRARQMVVHNIIAHKLAQAIYHVLKEGSEYREELLFGK

SEQ ID NO: 503514 - protein, 405 aa, unidentified
MLNAVGIDVSKGQSTISILRPAGEIVRKPFNVVHSVKELSELVSVVGSLEGDTRVVMETTGHYHEPILKAFLDAGIFVSAVNPSLIKRHDSDENPLRKVKSDPADARKIAKYTLDKWEHLHQHSAMDTTRIQLKTLNTQFHFFMQQKVSLKNNLISLLDLTYPGANALFDSPVRSDGSEKWIDYVHSFWHVDCVRKIGLKAFTERYQSFCKHHGYNFQPRKPEELFNASRELVAVVPKDPVYKQIILGNIEQLNTVSKQIEEFRHKMNEPASSLPEYQTVMSMYGVGPTYGPQLMAEIGDISRFDHRSAITAFAGVDPGVNQSGTMNYESNRASKHGAPRLRKTLFQIMTTLLQLAPSDDPVYRFMMKKKSEGKPYQVYMTAGANKFLRIYYGKVKEYLAAGAAE

SEQ ID NO: 503515 - protein, 339 aa, unidentified
MSIVFVGIDLAKNVFALHGVDEHGKAALVRPAVRRDQLMEMVAKLPPCTIGMEACSGAHHWAREFEKFGHHCRLMAPKFVVPYRMSGKRGKNDAADAAAICEAMQRPNMRFVPVKSELAQSRLSVHAVRQGWVEARTACINRLRGLLSEFGVVLPLKAQTVRREAAAHLERLPGWMKTAGMDLLDELHRLDERVDQYDAHIKMMAKAEERSDRLMQIPGIGATTASALVASVGNGHDFANGRQLAAWLGLVPGQYSSGGKQRLGRITKAGDAYLRTLLIMGARAVLAAATKKTDRLSRWATTVADRRGYWKAVVAIAAKNARMAWAMLAKGEGFKPLTS

SEQ ID NO: 503516 - protein, 413 aa, unidentified
MLDGRQLQIQIKEVNMNAVGIDVSKGKSMVCIMRPFGEVVISPFEVTHTVRELGKLAKILKSLNGETRVVMECTGNYHLPIARALHMVGLSISTVNPQLIHDFGNNSIRKRKNDKADAVKIANYGLANWLELPKYAPEEEIRQSLKAFSRQYNKYNKVKTMLTNNLLSLLDQAFPGLNELFTSSARESDGHKKWLDFAARFWHCECVGSLSLTAFTETYRKWCKRNGYLCVNASGIHAAARACVFVMPKNETTKSLITNAVAQVNAVVETLNATAREMKRLATLLPEYPVVLGFRGVGEILGPQLMAEVRRFAKKSSLVCFAGLEPVDNESGKFRGDEEISKQGSPHLRKTLFQVMDGLLMQSPADDPVYRLLDRKRAEKKHYYSYMNAGSAKLLRIYYARVKEYLTKLEGLA

SEQ ID NO: 503517 - protein, 365 aa, unidentified
MKKSNRIKAVSQAEINDAGESLTIGIDLGDRRSHICVLNRTGEILREEDISTSPHSFENYFKTVPSALVAVEVGMHSRWASRVLHECGHEVIVANASKVKLIFSNDQKNDRVDARSLARLARVDRRLLCPIRHRSEDAQAALSVLRARDSLVRARTRIINCVRGLVKPTGVRLPASNAEGFSSRVNEYIPTTLRPAVALLLEEIQVLSDTIGVYDQYVEHLVATRFQHARLLQQIPGVGSLTALAFVLTLDDPWRFSKSRQVGCYLGLRPRQDQSGERDLQLGISKGGDEFLRRLLVNAAHYILGHFGPDSDLRRWGLKIAERGGRKAKKRAVAAVARKLSVLLHRLWVTGEVYDPFYKSRAVAA

SEQ ID NO: 503518 - protein, 337 aa, unidentified
MEQQTQYVGIDLHRRRSVIVRRTGAGETLDTVRIDNDPVALAKELAKAGEHPEVILEACYGWYWAADVIQECGGNLHLAHPLGNNWGNRRVKTDERDATDLVDLLRLGRLAESWVAPPPQRELRELVRYRAKLVHLRTSLKAQVHAVLAKEGVPVPMSDLFGVAGRRLLDDVHLGEAYRLRVNSLRDLIGHVDREIELVENQVAPIFAGDLGFHAVQAIPGVGPVLAAVFVAEIGDVSRFTSARHLCSWAGLTPKHKESDVVVRRGHITKQGSRLVRWAAVEAVARQSTDSPIRRHHRHVGERRGTKIGRVAAARKLLIYVYYGLRDGEIRCLAQGE

SEQ ID NO: 503519 - protein, 336 aa, unidentified
MTIIRIGLDTSKHVFQLHGVDEREEPVLRRQLRRGEIERFFKKLPGTRIGLEACGASHHWARMLRGLGHEAVLIPPQYITPYVKRGKNDAIDAAAICEAMSRPEMRFVPVKSAEEQAALMLLRVRDLLVKQRTMLINAIRGHAAEFGVIGAKGPHKIADLLQRIGEDDNLPALAREMLASLAGQLAALELRLEGLEAKLMARHKAEPRSRLLATIPGIGPIAGLSFALKVPDARVFRSGRHFAAWLGITPREHSTAGRQRLGRISRQGDEGLRRLLVLGATAVIQQAKPGRTSPWLLDLLARKPKKLAALALANKMARIIWAMLISGELYRRPVAA

SEQ ID NO: 503520 - protein, 344 aa, unidentified
MQITTIGLDLAKSVFQVHGVDAAGQAVVRKSLRRSQMLPFFAKLPSCLVGIEACGTSHYWARELIKLGHEVRLMPAAYVKPYVKRGKTDAADAEAVCEAVTRPTMRFVPVKSPEQQAALSMHRTRDLLVKQRTQLINMIRGLLAEFGVDIPKGLERALLMARQIVDGKAPEVPIEAARIVATLSQQALDIHVRLRGIDRDLAVWLRGNDVARRLMTIPGIGPVSATALAASVTDPHQFRSGRQFAAWLGLTPLQKSSGGKERLGRISKMGDKYLRKLLIVGMTALVRRAKYSPEKIDPRLADLLARKPTRVATVAMANKTARVIWAIMARGETYRTGHQPALAA

SEQ ID NO: 503521 - protein, 385 aa, unidentified
MLAHPTQTQAAARCQANTLFVSLELSKVRWLVTVSAPASDKLSRYDVPGGDGQALLKLLARLQAAASERTGAPVAIVVIQEAGLDGFWIHRLLVRNGIDSHVVDPASIAVNRRHRRAKTDRIDGVKLVRTLMAWMRGERQVCSMVQPPSPEDEDRRRLTRERARLLKERIQHTNRIKGLLCGQGIPDYDPLHRDRRARLVALTTGDGHSLPERLKTEIGRELDRLEVVVSHLAAVERERDALMAQTIAADPCAAPAALARLRGIGPELASLLWLEALFRPFDNRRQIAAYAGLTPSPWQSGGIDREQGIAKSGNPRLRRAMIELAWFWVRHQPGSALSRWFVERVGTARGRVRRIAIVALARKLLVALWRYVTQGVVPEGAVLKA

SEQ ID NO: 503522 - protein, 465 aa, unidentified
MAKFGKSKSQRGRKQQNRAKLKPQDWTLGLSVVHPKAAGIDIGNEEHYVAVPPSFDSEPVRRFGCFTADLNALADWLQQCGIETVAMQSTGVYWMALYDILSERGIRVFLVNARDTKNMPGRKSDVQECQWLLKLHVYGLLKNSFRPEEEILVVRTIWRQRQQHIADAARCIQHMQKAMSQMNLQLANVLGDICGVTGQAIVGAILKGERDPWQLAQFRDPRVKASKETIAKSLQGNWREELLFVLKQEFEGYQEFQRKIGECDDKLYEKMQRMEEKADPKQLPPCPRNKRARGNVPESFDLREELYRVIGVDLTTIDGVNSLTVQTVTAETGFDMSRWASEANFVSWLNLAPNNKISGGKVIGRDKRKVVNRAGQALRQAASSLLQSQSYLGAQYRRLRTKLGNPKAVKAMAAKLARIIYRTLKYGQAYVDKGSEYYEQRYRQQQIQFLAKRALALGLQLVDAA

SEQ ID NO: 503523 - protein, 362 aa, unidentified
MVQVRSWVGLDVHSAKVVAAMMDRQSGELRMRRLPGATSEIVAFCAALPGPTRVAYEAGPTGFALARALTAVGVQCVVAAPGKIERPTSDRVKTDERDAQRLLRLLMIDGLHAVRVLSTEEEALRDLVRAREDIRGDLMRARHRMSKLLLRHDIRYDGSAGAWTTHHRAWLGKVDLGERGAQITLMDYLGAIDTLLVRRETLETSIDELVPGSPWADTVARLRCLRGIDTLSAVGLCAEIGDWARFPKPAHVMSYLGLVPSEHSSGQTRRLGSITKTGSGHGRRLLVEAAWHYRRAPARGQALKRRQDGQPPHVIAISWKAQQRLHRTWQRLDAERGKRRTLVAVAVARELAGFCWATANAD

SEQ ID NO: 503524 - protein, 328 aa, unidentified
MNVCGIDVSKNTLDVVTIVNEEVSKAMQFENNTLGHKALIKHLVKRSISHVCLEATGHYHLDVALMMDQQISIKLMVINPKVAHNFAKVLLQKAKTDKTDAFVLAQFTLRMEFEQWQAPDQSLFAIRSCGRHMSQLIKMQTKLKNQLHACKTTGFTPDFIIDDITVNIEQIKRQIQNLIDHTTQIIDDNPMAKQMYDCLVSINGIAAKTAIKLIGELALLDPEMKPKQLVAHAGLNPTIVQSGTSINKKSRISKAGNKYIREALYMTALRMAHHNENVSAYYQHLINDNHLAKKQAICAVMRKLLMSINCMLRHNTQFDSHRFYRLQA

SEQ ID NO: 503525 - protein, 335 aa, unidentified
MKTPVIGMDIAKHVFQLHAVNVATGKIERVKLKRGDVSNFFAKRERSLVVIEACGSAHHWARQLGQLGHDVRLICAHSVRPFVLRNKSDAADARAIWTAAQQPEARFVAIKSEAQQSVLALHRIRAQLMKVRIMQTNALRSILYEFGEILSEGYQSFAKEIAPALARTSERLPSMLVDSLREQWARIQAVNEDIAVLERRLSHALRDSPECQRIAEIPGVGLLTATATVSTIGDPATFHSGREFAAWLGLVPRQTGTGGRIRQLGLSKRGDTYLRTLLMHGARAVIARCTHTPWLDDLLARRPFNVAVAAVANKLARTIWALLSRQTRYEAPFHA

SEQ ID NO: 503526 - protein, 353 aa, unidentified
MTDQRRAVVAGVDAHTDEHHLAVVDLQGRLLGAAAFPTTAEGYSRLIGWLRGQGEIERVGVESTGAYAAGLVRALLAERIRVVEVNQPHPHARQRLGKSDPIDAELAARAALSGQATALPKQTSGIVEAIRQLGVARAGALKARTAALQQLDDLLITAPEALRSELRRGRTLKARAALCLHLRPDSERLHEPAQAAKLALRSLARRARELEREIAELDQQLERLVTLAAPRTLQLFAVGTQSASQLLVTAGQNIERLRSEAAFARICGAAPIPASSGRTTRHRLDYGGDRQANRALHMIAVCRLRYCERTRAYARKRTADGLNRREILRCLKRYIARQTYYTLRADLEALNGA

SEQ ID NO: 503527 - protein, 376 aa, unidentified
MTQIAPHSATVHLAIELSRSAWLVAARLPGVEKPSLHRIEGGDTAALLALAETLRARAAARLGAPVRVACCFEAGRDGFWLHRLLTAEGLAAYVLEPTSILVSRRARRAKTDRLDALGMLRVLAAYLGGDRQVCSMVRVPTPEEEDAKRPHREREDLVRERVRLENRIAALLATQGVRERPSLRNWERDLAALRTGDGRPLPPHLRAELDRLRRRLVLTLELIREVEAERDAALAAEPRDAVGRKIAALCRIRGVGANFAAVLTREVFYRAFDNRRQLAGYVGLTPVPHQSGEADRDRRISRAGNPRARTTLIQLAWLWLRYQPDSAPARWFRDRVGALRGRTRRIAIVAMARKLLIVLWRYAETGLVPEGVEVAA

SEQ ID NO: 503528 - protein, 296 aa, unidentified
MDTTKYIGMDVHTEAISVAVRNSAGKVVMESILETKANTILEFIEGLRGNVQVTFEEGTWAAWLYDLLKPHVTTVVVCNPRKNALLKDGNKGDKIDARKLAELLRLNNLKPVYHGEHGIRTLKELSRSYLTITKDLGRVMNRLKALYRSWSIPCAGQQVYAPRHRSEWLSKITEAGVRRRAEYYYQQLDALQALRHDVRRDLLAESRKQTATKLLRQIPCIGPIRAALLIALIQTPHRFRTKRQLWNYSGLGIETRDSAQYRFVGGELQRSKRPQQLRGLNERVCSSKEGSQPWHA

SEQ ID NO: 503529 - protein, 415 aa, unidentified
MEIVYPRVAGIDVGKKIVAVAVRTPGDRPGQRHQQLRKFKTFYPVLREMVGWLVAQGVTQVAMEATGVYWKPVFHALCEAEQLEVLLVNARHVKNVPGRKTDAKDAEWLAELCEVGLLRGSFIPPAEIAAVRELTRYRKKLTQARTSELQRLCKVLEDGGVKLDSVASSITTVSARAMVEALIAGERDARVLAELARGVMRKKIPDLAMALQGRFGAHHALLARMHLEHVDQLNGMIQRLDGEIDQVVAPFAEQVGLLRTIPGIGERTAQVLIGEIGVDMSRFPTADHLASWAGLCPGNNESAGKHHRARTRKGNREVREALVEAAWAAGRTGTYLGARFRRLHRRFGKQGGSKAAVAIAHNLLVIVWFVLHDRAGYRDLGADYFTRHDNPDAKKRRLIRELQTLGYTVDLTPAA

SEQ ID NO: 503530 - protein, 399 aa, unidentified
MLAVGIDISKSKSVAAILNQDGSMHTSPFEFHHTQPELDAFIKYILNSNQSATILMENTGHYHYPVLKAFREAGLPVCMVNAYQIKKFGDMDLRKAKTDKKDAVRIARYALEKSYSLVPYTSMEQKYEDLRFLARQYNQRMLTLKNNKVFLLNLLDETMPGITNILPLTTRAPGTSLSVLFINRFKSYDRIKKMGKSRFLDAFEKIARKSRNRQTKTYGLAIYEAALRNITTRGENEYTLAAQDQCLELVCESQKAADSIILKMQTLAETLPEYAVLRSMAGVGDRLGPLILAEIGDIRRFHSGKALNAYAGNDAPPYQSGTFESHNRHISKRGNAALRKYCFEVMQALKLTRPQNDPVYLFLLKKEQEGKPYNVAKMAGVNKFLRIYYARAMETLKQQ

SEQ ID NO: 503531 - protein, 432 aa, unidentified
MEVVHPQVAGIDVHKKVIWVAVRLPGQGPGQRALTVRRFKTFWRSLQKMAGWLAELGVTDAALESTGVYWWPVYHALAGAGIEVCVCNAAHMRNVPGRKRDITDCQWIAELHEYGLLRPSFIPGAQVAALRQRTRYRKKLIGQRTSEGQRLAKVLEDAGVKIDSVASRLLGKSGRAMIEALIAGERDPARLAGMALGVLRRKSDELQMACDGRFTAGHGQMCRLHLDAYDRLTVQIAELDKLVAEAAAPFERLIARLVTIPGVGQRTAEVIVAETGGDMARFATAARLAAWAGLAPGDNESAGKRKKAPTRQGDRQLRTAMVEAAWATWRTATRPGARFRRLARRFGKGNEKKAAVAVAHTLLCIAWAVMRYDADYIDAGTDYYERRDQRNREHLVRYHQNALARLGVEVIVTPPGDGAPPPATPDNPGQAA

SEQ ID NO: 503532 - protein, 421 aa, unidentified
MPTILCVGGDIHQDELHLRATDKTDGHEVGQRLTVKNNRPGADQAIAHLVQLLTQHGYTPLEFGLEATGLFWLPFYVYLQQSTALTPFQPTWVCFNPKLVAKFKEGVTLSEIKDDDHDALAVAERLRFGHLPVSYVPSSEWLALRMLTRYRYRLSRQIAQEKLRALTRVFLKASEWHRGQPFSDVWGATSATLLTEFTTAEIAAMSLSQLTDLIQEYGRKHFDDPQATARQVQRTLQNSFPVTPDLDAALTVVLQVAWTHIRDLEKLMRRLDRKIAQRMERITNPLLSVQGLGPVITAGILAEIADIHRFPDEPQLAKFVGLVWRKHASGQFVAEETRLVKAGNVYLRYYLIEGANLMRQHNLEYQAYYRRKFAEVPKHQHKRALVLTARKLVRLAFALLTKNQPYVRPQAVQSQEATPVQ

SEQ ID NO: 503533 - protein, 352 aa, unidentified
MNTSTIAWLGLDAHSKNCVLGQLDDQGQEIKWWRFATQPQQLIQHVQSIPATDKRLMLEESNLARWLSQLLKPHVQQLIVCDARRNRLISHDHHKHDKRDAFALARLLRLNEFKPVWQPIEPQRVLFKRIAKSYENAVQRQTRLKLQLKSLFQHWGLFPAGATVFSKPGRNDWLKQLPYDPLRSQARLLYELLDQALAGQNQFRRLLCQTGQQFPEIQRLRTTPGVGLVGAHLFVAYVQDPKRFPKFGRLSRYCRLGIRDRTSDDKPLGYQQLDREGIGTLKAISYRAYLQAAKRRSGPVWDFYQLSLRHTGSTTHARLNTQRKILLTLWTLWLTGREFDPDQFFRSQPLDA

SEQ ID NO: 503534 - protein, 411 aa, unidentified
MRIVGLDVSRSVAEIAYLEDGTLHAGGRTGLRRDELERFAAKLHATDHVVLEATGNTTAIVNVLRVHVARVAIANPLQVRLIAEARVKTDKIDAAVLAQLYASGFLPEVWMPDEHTLALRRQIARRSQLVRQRTRLKNEIHAVLIAHLIERCPATDLFGKKGRAWLGVQPLPLDERLGVEQRLRELDRLGDDLREVEQALAQATIDDARLRVMLTITGVNTTVAIGLLSAIGDIARFPNPEKLVSYFGLNPSVYQSGPAPARHGHITKRGRSYARAMLVEAAWGATQAPGPLRAFFLRVRDRRGQQIAAVATARKLAVIVWYVLTRGEPFAWDRPALTAHKLRALELQAGMPAQHGSRKGSAAAYSLKSVRQQERAVAEQSERTYQRLFNRWKQSRPKSDSAPIRWPEARA

SEQ ID NO: 503535 - protein, 421 aa, unidentified
MADCLSPRSGGETICNDPQVCRIVDLPVYYELETNNGNRDYRIQIGGHYMNYNTVYVGMDVHKESFTLCSCKYEDEKASHYQRTPASYKNVLRYLAFLRTIYGEDTRFVCGYEAGCLGYSLYHQLENFNVECVILAPTTMLEQRSKRRIKTDKRDAEIIARSLAQHNYSPVHIPTETDNQTKEFIRMRDDHKAELKKIKQQILSFCLRQGYQYDGSGNWTAKHVKWLRSLKPAGLYKEILDEYLLTYTILTDKLNRLDQRIEELASKEEYKESVSKLTCFLGIKIHTALSVIVEVGDFQRFVSARKFAGYLGLVPGQHSSVDDRNGLGITKAGNTHVRRLLVESAQSYTRGKIGYKSRVLRSRQAGNSPQVINYADRANERLRRRYYKMVLKDGKKYNIAKTAVARELACFIWGMMTDNIY

SEQ ID NO: 503536 - protein, 337 aa, unidentified
MIIIGCDFHPSFQQIAMLDTETGATEEHKLMHAGGEAENFYRKLTAPAIVGIETVGNDQWLVQLLQKLGHEVWVGDAAQIRASYVRKQKTDRRDAKHILQLLIEGRFPRIWIPDAGVRDHRQLLMHRHKLVQIRTRVKNELQHLMLNQGMQKKHKLWSTEGRAALASLPLEPWTDRRRKDLLNLLAMLDAQLDSLNDAVTRVAQEYPNISLLMSQPGIGAVTALAFVLTLGDVHRFPRGKQVASYLGLVPREHSSGGKQRMGGISKQGNRLLRFLLVEAANIAVRFDPELRKEYLHRCHQKYFTVAKVATARKLAIRMYWMLRTQTPYPQVLSSRVA

SEQ ID NO: 503537 - protein, 346 aa, unidentified
MTSLTIGIDIAKRVFQVHAIDNETGEVSSTKLARRDFLAHFQKLSPSLIGMETCGSAHHWARELSAMGHEVRMMNPMYVKPYVKRGKNDVVDAEAICEALTRPTMRFVAVKTVEQQSVLAVHRTRALLIRQRTMLVNALRGHLAEFGVVAPLGIERIPELVGRVLGREGDELGITPLVRSVVTMYAEQIEKIKEHVRMLERELRLWHRTNEASRRVASVPGVGTVTATAIVAAMPDPSMFESGRAFAAWLGLTPRSSSSGGKERNGRITKAGDRHIRVLLVLGATSVLRRVRSGQPTPLYGWVKKLLDRKPPRLATVALANKMARIAWAVMARKMNYQPELAAAVA

SEQ ID NO: 503538 - protein, 349 aa, unidentified
MRYFVGLDVSLEETSICIVDETGKIVKELRATSEPTALIVTLRDTGLSLERVGLEACSLTAWLHDGLTQAGLPAICIETRQANAAMKTMPNKTDRNDARALAQIMRTGWFRQVHVKSRQCRLWRSLLVARRTILNEMRSIENVVRAILREAGVKLGTPGRAAFVERVRELVGGDSEVMPLVEPLLAILVTMLREFTHLTKRVHEVVRKEAVCRRLMSAPGVGPITALAFRATIDRPDRFQHSRDVGAHLGLTPARYQSGETDIQGRISRCGDELARTALYEAAHTLLTRSSKWSSLRAWGMKIAKHRGIARARVAVARKLAVILHRMWTDDVGFRFGKEPTAAAVALVA

SEQ ID NO: 503539 - protein, 288 aa, unidentified
MSELALVGIDLGKNTFHLHGQDKPGRELFHKKLSRQQMMKFFCNLPACTVVMEACAGSHFVARELIAMGHKAKLISPQFVRPFVKSNKNDFVDAEAICEAAAHPTMSFVTPKTEVQQLLSMMHRMRESLVHYRTKVVNQMHGFLLEFGISLPKGSAMIKRLASILSEHELPIRLTVLLQRLHKHFSYLDEQIKEMDKELIGQLAGDDLGSRLLSIPCVGPITASLMAAEMGDGKQYGCSRDFAASVGLVPRQHSTARAARRLCWESANEAIRTSEDCWCSASGFTCLG

SEQ ID NO: 503540 - protein, 325 aa, unidentified
MTRVICGVDVSSDWLQARIGREGASASFPNTPEGIAGLAGLCHAEAIELVAMEATGGYEQQAFAQLSQAGLPVAILNPRAVRQFAQSMGRLEKTDRIDAGMIAWYAEVKQSPPACLAPQNQQQLRALVTRLRQLTDIRTAQLNQQRLVTDRSVQASFAKLLAFVVRQIRDLEQRIAKLIGQDPLWRELNQEFRTIKGVADRTVCRLMAEMPEIGTLSNKTVSKLAGVAPLARDSGKYQGKRAVRGGRASVRDILFIVASVVGRYEPDFMAFQQRLRAAGKPPKVVRIALAHKLLVRLNAKAREVRQRILGLQPCSPDLLLETKSI

SEQ ID NO: 503541 - protein, 341 aa, unidentified
MGRYIGIDLHRNRFTVCTMAENGRTYHRTVEIGHLVSFAATLRSDDEVAVEMTTNTRLFKNSIEPHVARVVVVDPWKFKVISESVKKTDKHDAEQLAFFLSKNMLPELRMKDRDREKLHSLCQTRDKLVKQRTQLKNKINNVLASYAILLKREELSSDKALRRVLAMDIDPVVNLELKVLVDQIRSLNQSIRELDHAITDEGSKYEEHKILKSIKGIGDKGASILLSIIGDVNDFDSSKKLASYFGIVPRVSNSNETSRSGRITKKGTKLGRTTLVQCGLIAKRYSPYLFAYHDRVKQRRGSGKANIAVARKLLEIVYQALTNRWVFTDFPNFRYVELPAA

SEQ ID NO: 503542 - protein, 402 aa, unidentified
MQVDDIDVFIGIDVGKSEHWATALTTAGECLHDRPLPNDEARLREVYEHLGEHGRLLVVVDQPATIGALAVAGAQDMGITVGYLPGLSMRRIADLSPGSAKTDQRDAAVIASAARTMPHTLRSITSSDEDAAALSMLTGFDLDLARQVNQVSNRIRGLYTQIHPALEGVLGPWLEHDSVLEVIATWSTPAALRKAGRARIDAKLKANGCRRHAAWAQAIVEALSKQTVTVAGTDAAGVVLPHLARQLIALHTQRADIAAQVEALVEAHPLYPVLTSMPGVGVRTAAVFLAGTLGKTFTTGAHLASYAGLAPVTRRSGSSIRGEHVSHGGNKRLKRAMFLSAFASLRTDPVSRAYYERKRAQGKRHNQAILALAHRRILTLHAMIRNGTLYNPQPAQPLTTTA

SEQ ID NO: 503543 - protein, 369 aa, unidentified
MSNDSTVFVGLDVHKESIVAAYSVGLGEVQSLGNIGVRDCDVDKLCNRMQGKASKAVFVYEAGPCGYGLHRYLTRKGFECLVCAPSLLARKPGDRVKTDRRDAEKLVKALRNGDLAPVHVPDERDEAFRDLVRAWGAAKQDLKQARQRLKSFLLVHGVRYTGSADWRDAHRRWLSEFTFPEPWSQMAFQEHRGAIEDRLAQCVRLEALLRDAAPAWRFYPVMQALQALRGVQFTVAVGVIAEAGDLSRFDNPRQLMAWLGVVPSEHSSGPRIRQGGITKAGNGYARRLLIEAAWSYRYTPKVSRIIQLRHEALPKPIIDRAWDAQLRLCKKFRKLTQKGKHPNVAVVAVARELAGFVWDIARRTPLPVA

SEQ ID NO: 503544 - protein, 326 aa, unidentified
MTYQLGIDISKAKLDVALLNADGKYRSKVFPNDATGFKSLLQWLHTHVPSGKAEVHVCMEATGSYHEALALFLSDQGVAVSVVNPLLVKRFIEVDRVRNKTDDGDAKCLARFCQMTQPELWEAPSVAVRTLQALVLRLDTLQEMRQGELNRLEVAHASVQQSMRDVIAGLERSIEAVREQIRQTIDDDPDLKQRQGLLASIPGLGDKTIPQLLAYIGRPERFKSVKALIAYAALAPLIRQSGTSLNHHKGTHPQGHRELKSALYYPAMVAGKYNPLIAAFWQRLKAQNKPGKVIVVACMHKLLAIAYGVLKSRKPFNADHLKPIVT

SEQ ID NO: 503545 - protein, 350 aa, unidentified
MIDSNQVMTKILKQVVGIDVAQNELVVSLGKVDQSLFTEVYAHKTFANKASGFAALLIWIKKHSDQQVTVRYVMEATGVYHEQLAYYLSDLGLEVSIILPNKISSYMKTLEIKTITDKTASQAICRLGLERVLELWQKPKKVFRDLKQLTRERDQIVAERTIVKNQLHAEQAEAFPNDRSIYRANQRIQLLNEQEREIKKEIVEFIKTDKGLLEKVELITSISGVGSLTAVIAIAETNGFELIRSKKQLVSFAGLDVISKDSGTSVKGKPRISKRGNRHLRKALHMPSLTAIRNDERFKAIFVRLVAKHGIKMKATVAVQRKLLEMIYTIWKTGKPYDKQYLQKESTLPT

SEQ ID NO: 503546 - protein, 432 aa, unidentified
MIGCSSKIVGLNFSIERDFDWFLPASFGMKMSAIAKLVGPNEPDNFLCTRPSEINAPARWWYSGDVEVFRNQSLQEGASMSYKYHIGVDYHKKYSFMVVKDEQGKVLRSGQVPNQKKYVEKFVEPFAAGGHAVIEATRNWVVMHDWLEEMLDEVQLANPLKVKAIAEAKIKTDKIDSNVLSDLLRVDMIPRAHVPSLQARNMRTVLRERMFFVRLRTMVKNRIHTIFDRYPEETKKFKPQTDLFGKEGREQLKAVTVSQTDRILIDRELELLDRLNEFIKQSESTIKEQSRGNENVTRLKTIPGIGEFLARLIDAEIDDINRFRVPKKLACYAGLVPSTYSSGGKTFNGRIIKGGNKWLRWGFVEAVIPAVGCDDELKEDYERIKAKKGYNKAKVAIARRLLTIAFHVLKERRNFRPLNKHERELKKVLRSS

SEQ ID NO: 503547 - protein, 414 aa, unidentified
MELLHPRCAGIDISKRDAKVCVRIAGSGRRRAAETVTTWSSMTNQVLALRDHLTQERVTCVVLEATSDYWKPFYYLLEDASFEVMLVNPRHVKNLPGRKTDVSDAAWLAQLGAHGLVRASFVPPEPIRHLRDLTRTRSAITRERAREVQRLEKRLEDSGIKLSSVASEIMGVSGRAMLEALIDGQRDPAQLAELAKCRLRSKIPELTEALTGRFTAQHAFLARMHLDLIDKHTEAIDNLTSRIEVVIEPFRGFRELICTIPGISTGVADVVTAETGADMSRFPTPGHLASWAGTCPGSNESAGRVKSTKTRPGNPYLKAALGTAALSASQSKGTYLAARYRRIASRRAPIKAVVAIEHTMLTTIWQMAQTGALYDDPGGDFYTRRHPEKAKRRAIEQLRAMGYHVTLEPLQEPA

SEQ ID NO: 503548 - protein, 343 aa, unidentified
MSEYDGRQFVGIDLHRRRTVIVRQSEGGEQLGWTRIVNDPMALAAEIGKAGESPEVVLEATYGWYWAADVLAEAGAQVHLAHPLGIKGFAQRRVKNDLRDAADLADLLRMGRLPEAWIAPPEVRELRELVRHRAKLVAVRSGFKAGVHAVLAKQGLHIPVSDLFGSRGRAELDRAPLDTAYRARVNAYCRLIDTLDIEIELAAGWIAARLATHPGYRAIQQIPGVGPTWAAVFVAEIGDVTRFASARHLCSWAGLTPRHRESDTTVHRGPITKQGATLVRWAAVEAVQKLPPTAGWLVSTREQIAARRGRNIAKVAVARKLLILVYYGLRDGHIRALHNAGAA

SEQ ID NO: 503549 - protein, 438 aa, unidentified
MSNNVIFNFDELFISVGIDVGADFSWMSIALPNQQLVGKPYKILHNCMSSLTTAVSKIKEAEELYSLESRIFLESTGIYHYPLFCYLRDKGFNCSVINPIITKNSTNINIRKVHNDRFDSKKAALVGLKPDLKVSLMPSDLALNCRNLCREYYDLMDNRSAYVNKLQGELRMAFPQYLRIFSKVTINTSLTLLETYTSPEAFINADKQEIIDLIKSTARFGLTYAENKYNAIIQAANDANEFGCIIDSNIKRIRLYISFIRKYDEEIKGILESLHNLIDANEDTDFVRQIHLIETFKGAGFLSAVSLMGEIGDFSVFSKPKQLFAYFGLDPAVKQSGKLNCTKIQMSKRGSAIARRVIHMLTLQSISTSRTGEAKNPVLREYYLKKCESKPKLVAMGAVSHKVCNMIFAILRDNKPFEIITPQEHNKQYNAAKCDIAA

SEQ ID NO: 503550 - protein, 371 aa, unidentified
MKETITSYVGLDIHKDSIAIAVAEAGRSPPRFIGSTPAELATLCKALTRCGAKRSNTLVVYEAGACGYGWARHLSKQGWRCEVISPAHITRKAAEKRLKTDRLDAVLLARESRAGNLVRVAMPDERDEAIRDLCRTREDARGARHRARLQLKAMLLRHGRAYHGKSSWTLAHERHLASIKFEHPAQQIAFDEYRQAVKDNHERVERLTQALREQCEHWRMKAVVNAVMCLRGMDFVAATVFIAEIGDLSRFAHPKALMKYLGLIPSEFSSGSTRRQGSITKAGNKHARRLLVEAAWTYRFNPRVSRPIEVRQEGQPKAIRDIAWKAQLRLTYRFRKLNAGRKMVQNKCCAAVARELAAFIWDIARRVKIPA

SEQ ID NO: 503551 - protein, 341 aa, unidentified
MDIAVLGIDLGKNSCSVAGLDASGKVILRRRMQRKTIVGLASKLSPCVIAMEACCGAHHLGRVFSAQAHTVRLMSPEYVRPYVKAQKNDDRDAEAIAEAATRPTMRFVTLKSEEQLDMQTLHRARDQAVRERTSLMNQLRAVLLERGVIVPQGRAKLRLRVTELLRHGTGELSSRIQLLIEDMLTRWQGLDERIAVFDAEFTAEAKRDEAARRLTSIPGIGALNATALVATVGDAETFARGRNLAAWLGLVPRQATTGGKPRLLGITKRGSKYLRKMLIQGARAALPTLSRSNTRLGQWLRGLLARAHSNTVVVALAAKMARIVWALLRYGTTFEPRAIAI

SEQ ID NO: 503552 - protein, 355 aa, unidentified
MHYIAFDSHKRYTLASIEKAQGGIVDETRIEHERGAVRDFLSAWDRGSPVAVETIGNWYWIVDEIEAAGMVPQLVHARKAKLMMGSINKTDKLDVRGLNLLQRNRTLPTVWIPPGELRDQRDLPRTRMVLAKQRCRLKNRIHATLAKYALSVTGVSDAFGKAGQEIMKQQIERLPPHTRYATEQLLEQLGVIEEQVTSFEQRMKQALQETHEVKLAMTLPGVGFILGAVIALEVGDVGRFPSAPQLASYAGTTPRVHSSGGKTRYGQLRSDVNRYLKWAYMEAANTICLHRRHFPDRHVSELYERIAHRKGHQKAIGAVARHLAEATYWILSKRERYQEPRNRFVAHGETSAKVA

SEQ ID NO: 503553 - protein, 343 aa, unidentified
MEYYVGLDVSLKQTSICVVDQAGLVVREGVVGSDPEAISVFVRSKAPGAVRIGLETGPTSTWLWTELKRLDLPVICIDARHAKAVLKMQINKNDRNDAIGIARIMQTGWFKEVHVKDIDSHSVRALLASRALLVKIKRDLENHVRGLLKNLGLVIGRATFNVFAVRAEELIEDRPDLVAAVRPLLEARNAVEQQVSELDRKVMKLARRDAQVQRFMTVPGVGPITALAFKATIDDPARFARSRSVGAYVGLTSRRHASGEIDWSGRISKCGDAMLRSYLFEAAGVLLTRVPKWSTVKAWGMRLAKRNGLRKAKVAVARKLAVILHRMWIDGTEFNWSKKEIAA

SEQ ID NO: 503554 - protein, 342 aa, unidentified
MEHTTIAVDLAKSVFQVAVSHQPGRVDEERRLSRDRFLEFFAQRPPATVLLEACGSAHYWARQLQPFGHSVRLLAPHDVRPYVRRNKTDRTDAKGLLEANRNEEIHPVPVKSIAHQAIASLHCLRSTWLSTRTARLNTIRGLLREFGIFIPVGAHHVVPRVRALLADSTAVPVLLHTALTAACDEIDGLEANMCAVERQLAALAANMADVTRLQTVPGVGLLTATALVALVTDIRRFRSGRHFASYLGLTPKEDSTGSRRRLGAISKQGDVYLRMLLTHGARSLVWHARAAKQPTALQRWAVHTEQRRGHNVAAVAVANKLARIVWAVWTHERAFAADHRAA

SEQ ID NO: 503555 - protein, 347 aa, unidentified
MTIVEAARGVTGGVDTHLDVHVAAALDPLGALLGSESFAPTPAGYKELLGWLESFGAVTKVGVEGTGSYGANLARFLRRGGIEVVEVDRPNRQARRRSGKSDSLDAIEAARAALSGRASGKAKTRDGAVEAIRVLVVAKRSARQARTKALVQMRHLGFSAPDQLQCRLKGLSVCALVDEGAKLRPSRSSDPVMAATKASIASLAHRIQSLEREIAELDDTLAPLLSATAPELLALYGVGPDSAAALLVAAGDNPERLRSEAAWAHLCGVAPIPASSGKSTGRFRLNTGGNRQANSALWHIVITRLAWDPDTKTYFERRIKEGRTKREVIRSLKRYVAREVFRNLPRA

SEQ ID NO: 503556 - protein, 323 aa, unidentified
MIHPDVIGCDIAKAHLDFFDSGLERHFRIDNTPAAISAWLDGLDGRGVHIVFEATGRYDRQLRIALETRELPYSRVNPARARDFAKAIGLLAKTDAIDARLLARMGQSLPLSTQAPDDPARHVLARLHTRRDQLVAMRQQERTRLHETEGIERDSAESHMAWLDAEVARIEMACRDVLKAEKTLQEQEARLRSIPGIGPVAALTLIAHMPELGNRSAKAIAALAGLAPFNVDSGTSRGKRHIRGGRKRIRDALYMAALTASRMPRAFKSHADQNEGGRQALQGRHHCACPQIARHRKRHHQGQNNLPTNHLTNTVASQSKSQR

SEQ ID NO: 503557 - protein, 417 aa, unidentified
MKDGEKASTCRYIALDIHKHYSVVAGVNRDGEEILPPCRVEHLNLEDWLGKHLLDSDRVVIESTTNAWHVYDLLEPLVAEVLVANPIKVKQIACARVKTDNKDTLILARLLAANLVPTVWVPPKHVRELRQFISHRRRLANMHTQVVNRMHSVAHRHHLNHPKGKRFQEKTTGWQQDASLSRLEKMQLGLDMATRAHLEGQIEQMTRELGRMSHEEPWASDMLYLMQVPGCGVVTGMTILAAIGDIHRFENPKALASYSGLTPGLEQSGVKVRGKGITKEGRRELRWALVEVAWRAVKADPHWRKYFEELKRRMHPNQAIVTIAHHLLVVVWYVLTKHEPYRHYSSERIAYKYLTWSWALDEEQRQGMTRPQFARYYLLRLGIGDELTRVALNPEFPYKLASVEEVLALRPELRPPE

SEQ ID NO: 503558 - protein, 414 aa, unidentified
MEKERINIYHKRNTCFVGIDMHKDTHCAVVIDCWMNKLGEINFENRPSRFPAFVEDVRKICGTKEVVFGLEDTRGFGRNLAAYLVGRKFEVKHVNPAYTSAVRLANPIIYKDDSYDAYCVARVLRDMVDTLQDAKHEDIFWTIRQMVKRRDLIVKSNVMNKNQLHSQLAYSYPSYRKFFAIIDSKSALCFWENYPSPEYIWNTTPEEIYHTIKPVHQALKIQRIHEIISMIERDGDTRKDYQPERDFIVRNIVKDIRHNKELIAEIDGELRKLIPLTGYKLHTMPGIDLVTEAQIISEIGDINRFPDSDKLARFMGLAPVQFSSAGKGKDQRCRNGNRALNAIFHFLAIQMVAVSASGKPRHPVFREYFEQKVKEGKNKPQALVCVARRLVRIIYGMMKTRTEYRPFEKADDKN

SEQ ID NO: 503559 - protein, 353 aa, unidentified
MKTYYVGMDVHRATIVIGVLNGAGKVVMESVIETGAERVRAFLKQLRGKVYVTFEEGTQANWLHDVVRGLVTEVVVCDPRHNKLLQSGNKNDRVDALKLAELLRNRSLKAVYHGDNGVRTLKELVRNYDCLVGDTTRVMNRLKAIFRGRAIACAGHEIYRQDRRKQWLEKLSESGAKQRADFLYEQLAALKPLRHRAKLVMVKEARRQAAYPWLMSVPQLGAVSVAQLIAVVGTPYRFRSKRQFWTYVGLAVVTCSSADHEVVNGVLRRSTRPQATRGLNRNHNHLLKRVFKNAATSACHSGPFQAGYDARVKRGMAPSLARLTIARQLAATTLTIWKRGEQFSPERMKQQAT

SEQ ID NO: 503560 - protein, 373 aa, unidentified
MTDYNAFVGLDVHKDTIAVAVADAGRAGKVRFWGEIANTPDAVASMLRKLGGRHSRIHFVYEAGPCGYGIHRQIMATQHHCEVVSPAQTPRKPGDRIKTDRRDAIILARLSRAGELTLVWVPDETHEAMRDLIRLRQAMVKDLRAARQRVKSFLLRHGRVFKGTSWKRSHRIWLGNQSFEHPAQQIAFQSYLNAVDQAQARRDEVDVQIRQFAAEWSMAPVVEALQALRGVAFTTAVTVVCEVGDIRRFAKPRQLMAFLGLVPGERSSGETRRQGGITKAGNVLARAVLIEAAWAYRTPAKIGAQMMLRQEGIPQAAKDIGWKAQVRLCGRYRRLMARGKKSPLATTAVARELVGFIWAIAHTTEPSGAKGAA

SEQ ID NO: 503561 - protein, 361 aa, unidentified
MKKPAQHPIAEVPLRQAKVEMTVGIDLGDVWSHYCTLNEDGEVVDRGRFRTTPKAIEKWFKDVPQARVAMEAGTHSIWISEQLQELGHEVMVANVRELRAISHSDRKSDQVDAEKLARYARLDPEILRPIAHRTVEQQEALTLIRARDLMVRLRTAAVNAVRGLTKSCGYRMPASSTRCFAKRSLAVMPPGLQQALGPVLQQIAETTAKIQQYDRQIQLLTQTEYPETQALLKVQGVGYITALTFVLTLGNKERFGRSRDVGCYLGLRPRRSQSGDHDPQLGITKAGNVYLRSLLIECANHILRPHGKDSALRQWGLHLAARGGKQAKNRAVVAVARKLAVLLHRIWVTQEPYVPFYAQAA

SEQ ID NO: 503562 - protein, 274 aa, unidentified
MGRSIGVDLHRDCFTTATLAENGRCYLREWKLKDLGKFAETLAYDDKVAVEMTTNVRLFRDAVLPHVEKVEVVNTRQFKVVTESVKKTDKNDAVLLARFLAKDMLPTVHLKPKELADLASLTRTRDTLVKQRTTLKNQVNNLFAASGVKLRRERLSSNKALFEVGCEADALLSFAESLEVEVLLGQIRAINDGVSKLEKEIEAEAKEQPGYVELTSIKGIGTNGAAILISTIGDVKRFENEGKLASYLGIVPRVSDSNETEHRGRITKRGSKLV

SEQ ID NO: 503563 - protein, 345 aa, unidentified
MTDVTTIAIDLAKKVFQLCGLNRRNKVVFNRSVKRGQLLQVVREYPDALFAMEACATSQYWARTLTGMGLSVVLIPAQHVKAFTRGNKNDAKDALAIAEAAHRPGMHWVPVKSGHQQDIQTLLRIRSGYVDSRTALVNQVRGLLAEYGMVMPRGVGRFRQALPELLADGENGLTPRVRAAMGMQYQAFLELCDRIRAADAELREVAAQDPICRKLMRLRGIGPMTALALYASVGGAGQFTNARQFSAWLGLVPKHTGTGGKVTLGSMSKRGDRAVRTLLVHGARSVLTWAHRRDDAFSQWALAVAQRRGKHKATVAIANKTARMVWVALNRGIDALPRHHLSAAV

SEQ ID NO: 503564 - protein, 324 aa, unidentified
MSKIKEFFGIDISKDVFDVVDASDKHHQFKNDPSGFKEFSKLLSEKSHCVMEATGSYYQGLATWLYDSSIIVSVVNPLSVKRFIQMRLKTSKTDKLDAQMIRMYGESEQPKLWNPPSKQIIEATELHKLIELLVRQRAGLKNRLHALESKGITRSLVLTSVRRQIRNLSNEITDLELKLESVIKEYEPDLLTRLCSIPGVGKRTAIYLIVLTQGFEKFESSRQLISYFGLNPIIRESGSSVRGKSRISKTGDNQVRKLLFMCAFTACEHNKACREIYQRLTAKGKSKKLALIAVANKLLKQSLAIAKSSLYYDENYRSVNVNLG

SEQ ID NO: 503565 - protein, 346 aa, unidentified
MKDITVLGIDLAKKVFQLHGADSRGKKIFSKQVRRAGLFKFVGNLKPCVIAMEACGGAHHFARLFRRYGHEVKLMSPQFVKPYVKGNKNDSADAEAIAEAVSRPTMRYVGIKEVVDQDIQGLHRYRERLVKNRTQLMNQIRGLLQEYGIVVEQGKSRLLKVLVSLQDHEGYEELTEMNKELFWDAYEELIDLNERIVKYTRKLEDLSKHDERSQDLLTIPGIGPMTATAILAAVGDPHVFESGRALSAYFGLTPKHKGSGQKTRILGISKRGDRYVRSLLIHGARSLVKVVNKKTDPRSQWIKQLIDRCGINKAVVAVANKNARIVWALLTKQTCYEENYGLNEAA

SEQ ID NO: 503566 - protein, 343 aa, unidentified
MKLSRVGVDLAKNVYQLHGVDRHGKAVWKRRLRRGQWLQALIDKVEPGCEIGMEACTGAHHWARELQSRGYVVRLIAPQFVKPYVKSNKNDANDAEAICEAMSRPHMRFVAVKRIEQQDIQATHRVRSELKAHRNAKANQIRGLGAEYGLVAPQTLLALRRAIPEWLEDAENGLTDYFRSLLHGLWDDLLTLEGRLKELDKEIDKFARSNDVARRLQQLRGVGPIVATALVATVGDGAQYKKGRQMAAALGLTPRQYSSGDKHRLYGISKRGDAYLRTQMIHGARAVVSQAKHRDDPLSRWVTDIARRRHPNVAAVALANKTARMAWAMLRNDTDYDPGLSTC

SEQ ID NO: 503567 - protein, 394 aa, unidentified
MISLGIDIGKNKHVFTIVDLETGNAIGKPVTIQNNIDGFKKLEETIKSYSKDNIKIGMEDTGHYHFNLLWYLIDKGYDVYLINPVTTDADRKLTRNITKNDELDSKQIARILGEAEWKHLYRKVDKSFFELNEMKSLTRLHSDLTEALNPVGNKIQKSLDMLFPEFNSLFSSHYGKTYMNILKAFKSAASIAKADIKEIRKVMNQSGRGRRVRFTAEDLKALAQRSVAMPNIGEEYALESHLNQYMLLNEELTKVDKKIEEFSKKTNSPILTIPGISHTSCITILSEIRRISNFNSVSKLTKYIGVAPMHYESSQYEQRHSAITKKGNKYLRKVLYQVITPVINNNKVFKDFYDKKRSEGKSHRCAQGHCVRKLIRILFHILTTGELFDSAKLV

SEQ ID NO: 503568 - protein, 390 aa, unidentified
MQVTADRPEAPSAIRSDLGAIFVSLELSRSIWLITSLSSGSGEKMSKHSVPAGDICALMARFSELKQKALARTGKLFPIIVIQEAGLDGFWIHRMLQNEGIESHVVDPASIAISRRRRRAKTDRIDGEALLRTLLAYKRGEPRVCAMVKAPTPEEEDRRRLCRERKVLIAARVEHVNRIKGLLFSQGVSGYEPLRRNRRQRLDELKTGDGRVLPDHLKAQISRELDRFELLIEQIKAVEAERDALFAAAKAAAPTPAPVTMLLDIKGIGPEFAAVLWSEGLFRHFDNRRQVASYAGLAPTPWQSGSVDREQGVSKSGNPRLRTTLIQLAWLWLRHQPQSALAQWFEERVTRNGGRFKKTAIVALARKLLVALWKYVSAGVVIEGAVMKTA

SEQ ID NO: 503569 - protein, 361 aa, unidentified
MDESTIIVAFDQHAASVVAAVLLPGQRTPSLQALSADVPTIGRFVAQLARQGAVRCCYEAGPCGFELQRFLSGRQIDCDVIAPSLIPRRPGDRIKTDRRDAGQLAILYRAGALTAIHIPTDQEEAARDLLRCREDIRADLLRARHRLSKFLLRHGRRFTTTKAWSKQHAAWLRAQTWPLAALDQTHGAYLRAVDEAVARLRAVEQDLRGLLTLAPLRPRVERLRCFRGIDDLTALTIAAELGDARRFGSAPRTMAFVGLVPSEHSSGSRQARGAITKTGNAHLRRILVEAAWHYRHRPFVGDALRRRQAGAPAAIIAQAWTAQQRLYRRYHRLAARGKPTQLVITAVARELTGFVWAALIQ

SEQ ID NO: 503570 - protein, 286 aa, unidentified
MITIGIDPHKRSLTAVALDPHSRLLGQQRLAATSQAGQQLLAWAKQWPERRWAVAGASGLGRGIAQLLVGASEQVVDVPAKLAARARLLGTSSARKTDLADAASVAAAAIHHRQLRRVTLEDHTVIFRLLSDRRDDLVAERTRTLSRLHVLLADLQPGGAARELSATRAAALLRKIRPITAVDIERKRIARELLADVRRLDRQVKTASQAIRTAVREHGTTLTEVYGVGPVLAAKLLGHAGDITRFPDRDHFASYTGTAPVEASSGDVRRHRLNRVATASSIPPCT

SEQ ID NO: 503571 - protein, 318 aa, unidentified
MTQDLFIGIDISKAKLDVAASPGEHSWSVSNTEEGIQELIAKIRQIGTPKIVLMEATGGFERRPLAMLGAAGLPVAAINPRNARDFAKSLGLLAKTDKVDAKALALFAEKIQPPCRPLPDAQTRALQDLIVRRRQMVDMISAEQSRLAIVENPKVRRELVQHIAWLKKRIHIADYDLDQAIKNSPAWQPKSDLLKSVPGIGPVTTSTLLALLPELGALTNKQAAALVGVAPFNRDSGTMRGRRCIWGGRTSVRNVLYMATLAATRFNPTIRAFYQRLCKLGKLRKVALVAAMRKLLGILNAMVRDQTPWRSDNVEISS

SEQ ID NO: 503572 - protein, 317 aa, unidentified
MTIKPNIVHIGVDVSKKHLDLSPFDKGPRRIPNTPAGRRKLIRRIQALQSETIVTCEASGGYEQALLEDLLDAEIPVARVNPNQVRYFVRSQGVGAKNDRIDAAMLSRFGEFRHGEGRLFLALKSEEGLAELRGLLQRRSQLKAAIRQEKNRLDPSPCKLVASHIRSHIKYLEKSLAKIEGAMKEWEKEHPVYKELRKRLLSVKGIGRITVLTLLAFMPELGKVSDRRLSALVGVAPYDRQSGDSQMQSKIAGGRVEVRRVMYMAALAAGRSNPILRAFKERLVAQGKAKKLVLIAILRKLVVLANKIAANPDFKPA

SEQ ID NO: 503573 - protein, 316 aa, unidentified
MSNKPFVGIDVSKDTLDVATFPATKPLTFSNDEAGWGELLAHLRSLRPALVVLEASGGYQTLAASFLAADGLPVAVVNPRQVRDFAKSTGQLAKTDRIDAGVIALFAEAVKPEPRLLLDAEAQAFKALVARRRELVDMRAAEKNRSQAPLAGPVRDRIVQHIAWLDAEIDDIERDLGRRVRSSALWREKDQLLQSVPGIAAVTSHKLLADMPELGWISGREAAKLAGFAPHNRDSGNLRGHRTIWGGRTEVRSALYMATVTAVRYNEDIRTFFQRLKAGGKPHKVAMTAAAHKLLLMLNAVLRRGTPWRPSTCQTP

SEQ ID NO: 503574 - protein, 339 aa, unidentified
MNILKQTIGIDVSYKSFDARFGTTNTQQQITLSPSKSFKNSLAGFKLFLRWLKKYVLSDDIPLVFVMEATGVYYEQLAHFLFQHGYQVAVILPNKIRNYAKSLESKSKTDPLDAAVITRFGLERQLHLWTPPSETVKALRDLCREYQSLKTNCTQIKNQLHALNASFKPHRESFKRKTLHLKFLQRQIVLIQKELRALVKTEPHLALRLKNIKTAKGLGDITILTVLSETRCFELVSNLKQLASYAGFDIVFNDSGLKKGRTSISKKGNTFIRKALFMPALSACRANPQMKQLYQRLVAKGKNKKLAIIAVARKLLLLIYTLWKSNSPYRPDFKSVQHL

SEQ ID NO: 503575 - protein, 395 aa, unidentified
MPAERYVGLDVHKRHVVVAAVDVQQNVVMCSQKIPVERFETWAQEPLCAADRVALETTANAWEFYDQLTPLVVEVFVANRYQLKVISASARKTDRHDALVLAKLLAAHLLPAVWVPPHSVRELRAVTTHLAELFSERSACKNRLHGLLHRHNLALPKGNPFTQSNEQWWNRLLLSAVEQLQVRHLWLLIHQLNTALEETEAQIAQLSVASDWDQGMTFLVQLPGIGLYTGITILAAIGNIDRFPSLTHLVSYAGLGARVRASGDTRKTGKISQQGRAELRTALIAAAWVAVRFSPHWRSTFQMLTKRLGKQKAITAIARKLLVVIWHVLSKHELDRRADPTTIARSLMAWSSLHHLARSQAKHRLDFVRHHLALLGILDQVSAFRASGRLQSLAT

SEQ ID NO: 503576 - protein, 344 aa, unidentified
MEHYAGLDVSVKETSVCIVDRAGKVIREVKIATEPEAIRAVLVDETFTIERIGLEAGPLSQWLYSGLAEAGLPIICVETRHMKAALSAQLNKSDRNDARGIAHMMRVGLYRPVHVKTLASQKRRMLLTARQLLQAKAFDIENDLRGTLRNFGLKVGTVGAGKFEARICELVADHPDLAAIVEPLLIARRVLREQLGVLHRRLLAIVRQDDVCRRLMSVPGVGPLVALAFRATVDVPARFKNSKAVGAVFGLTPRRHQSGEIDRIGGISKCGDAMMRRLLFDAAHVMMTRTIRWSWLKAWGMKIARHRGMKRAVVAVARRMAVIMHRMWADGTEFHWTSTDAAAA

SEQ ID NO: 503577 - protein, 441 aa, unidentified
MLPTLNPHAGGIDAGSTHFFVAVPNGTVTSFESFTADLYRLRDHLQAHGVTTVAMEATGVYWLALHEVLEAAGIDVCVVNGAHVKNVPGRKSDVQDCQWLQQLHAHGLLRKSFVPPEQIRALRSYTRLRDDHIRTGAMYVHLMQKALDQLNVKLHTVISQINGVSGLAIVRAILKGERDVAQLANLCDERILKKKRAEVERSLHGLWKEEHLFALKQALGGWEFCQAQVAECDAALTTQLSALTRDLPPPPPDAPGPKKKNHARHHVPQVPELHASLLTLSGGRDAAQLPGFTPSNWLKLLSEVGTDLSRWPNEKAFCAWLCLSPGKNQSGKTKRRARRRGKTTAGQIFRLAAHSIAKSKYQALGGFYRRLKARTSAAVANVATARKLAVLFYYAMTEGMAYVERGLEAYEATYRKHQERFLHKRAAQLGFTLVPAHAQTT

SEQ ID NO: 503578 - protein, 457 aa, unidentified
MVAEQEPEQVEEPVELVGRVAAIDVAKDSGMVCTRLPHPSRAGRRVQKVWSVPARFAAVSELADHLVEVGVERVVLESTSDYWRIWFYLLEARGLSVWLVNARDVKNVPGRPKTDKLDSVWLCKLNERGMLRRSFVPGEDIRDLRALTRLRAVLTAEGSRHKQRVEKILEDALIKVSAVVSDLFGASGRAMLAALVAGERDPKVLAELAKGQLKVKKAQLAEALCGRFRDVHAVEVGMLLDLIENLEAKTAQLTQKITAHLAALPGVGPACTSCAVIGGHTPLCPDQNLPLPSLIDRLDEIPGIGEYTAQVIIAELGLDMSQFPTPAHASAWAKLAPQTIQSGATTRPGKTGKGNRWLRAALGTAAVAAGKTDTFLGERYRRLRRRRGKTKAMVALGRTILEIAYLLIDDPTLRFRDLGADYYDRRDPARQTRNKIREIERLNPGVKVTLTTTNAAA

SEQ ID NO: 503579 - protein, 344 aa, unidentified
MGGLQMNISLLGIDIAKDVFQLHGADSLGKKLLKKRISRNELADYIIKLPSCTIVMESCGRANYWARKFSKMGHHVKLISPQFVKPFVKTNKNDANDAEAIVEAASRASMNFVPIKQVEQQDIQSVHRVRSRLVKNRTALINEIRGLNLEYGITIRTGATTVKRSLRAIIDDLTNELTSSSRELMQELYEELAEIEERLKIIDKKIKNTCKNNEQCQRILQVPGIGELTATAIVAAVTNPGEFKNGRHMAAWLGLVPRQSSSGNKQVLLGISKRGDRYLRTLLIHGARAALCLCKNIKGKYGDWLNNKKATLSLNKAAVALANKNARIIWSLLHTGENFNCNQK

SEQ ID NO: 503580 - protein, 428 aa, unidentified
MNKSESKQTVEYAALIGLDWAAEKHDTSVWDTATGKSRHQVIEHTPEALAEWLNELQTRYPGQRLALCLEQSRGALIYALMGHAFLDLYPINPVTLARYREAFAPSRAKDDPVDARLLSEILRLHRDKLAVWKPDDEQTRTLGFLNEERRKAVNLRTKLVLRLQSALKLYFPQALQWTGTDMASPMACAWLLKWPTLEAARRARPQTIRAFFYAHNCRSAKHIEGVIAAIPAAKPLTQDAAVLAVQPLTVQMLAKQLQLLHKSIAAYEKQIQALFEQHPDAFLFESLPGAGKILAPRLLCAFGTDRARYPTAQNVQTYAGVAPVIERSGKGCWTHWRWNCPKFLRQTFHEYAKSSILYSAWARAYYDQQKQRGKRHNAAIRSLAFKWIRIIHRCWQTHTPYDENLYLQTLARRGSPLCALIDTSAQVA

SEQ ID NO: 503581 - protein, 356 aa, unidentified
MSIVAHTRPFVIGVDAHARTHALAVLACPTGEVLDEAQFPATTAGLARAVAWVARRTGADLDALWVIEGVGTYGARLARAAADAGYAVAEAPRMNARANRGVGKSDPLDARRIAQAALPLDHTQLRLPRTDEGARAALRILIASRDHITNERTAAINALIALLRVVDLGIDARGTLNTGRISEIAAWRARAEELSIGVARAEAVRLAKRVRTADRELGDLTRQMTALLNESPAAGLLDQPGIGPVTAAIAYAAWSHPGRIRSEAAFASLAGVNPIPASSGNTVRHRINRGGDRRLNRALHMAVVTRMRMDPETRAYVDKRTAQGRTPREIRRSLKRYLARQIYRQLNATITPAAAA

SEQ ID NO: 503582 - protein, 423 aa, unidentified
MKYALVRVLPEVPPGGVCAGIDWASADHAVCVVDLAGQVADRFAAAHDRAGIAGLIARLRGRGAAEVAIERGDGVLVDALLAAGLTVVVIGSRQVKNLRSRYGSSGAKDDRFDAFVLADTLRTDRARLRPLVPDSPATLALRAAVRARRDLVAHRVSACNQLRAHLAVAFPGAIGLFSELDSPVSLAFLAAFPGQQAAARLDEQALAAWLATIPRRGNTAPAGVLAARLAAAPRGAAGADAAQAAVTTQLAAATAGLAGRVRALEAEIAAQLAAHPDQHIFTSLPRAGTLRAARLLAETGDCRARYPDPWSLAGLAGVAPVTRRSGTYISHEFRWNVNRQLRDAICDFADGSRHASPWAATVYAAARDRGKDHPHAVRITARAWVLIIWRCWQDGTSYDPAKHRALQDVLTRQAAAGTPQPHR

SEQ ID NO: 503583 - protein, 321 aa, unidentified
MTYVGIDVSKATFVVAYSSAKSSETKTFKNTTKGIREFIRTISPEENHCVLEATGNYSMLLVYLLSKAGFTVSMENPLKIKNFARVMLSVVKTDEIDARLIALYGERMQPAPFKLRSDSLLLLKQKRTVLRQLKKQLTANRNLEGSLKVLPFIDSKCKKVLEKTIKFLEKQIEEMEKELTSLAEIEYKKQMDLLTSIKGIGATLAAALIIATGGFTYFDNAKQLTRYLGLSPTYQQSGTSVNVKGHINRNGDAYLRSQLYIGAMASLRCNTECKACFERLRSNGKPGKLAIVAVANKLIRQAFAVVAHEKKYIDGYKSVKP

SEQ ID NO: 503584 - protein, 341 aa, unidentified
MDHLAIDVGGRESQICLRSPTGEIMREKKVRTQDLPTLFASLPPSRVVFEACAESFWIADCAVERGHDIRVVASTLVMALGIGSRGIKNDRKDARVLSEASCRIDLPSIYVPNLVSRERKTMLSMRDALVSSRTAMVNAVRGWMRGRAIRIRTGEVDTFSRRVREACAEALPIAIGRVLETIEHLGQQIDATDKELKQIAKKDDACRRLMSAPGVGPIVAVAYVSTLDTTSRFESAHHVQSYLGLTPGEYASSDKHRRTGITKAGSTRLRWLLVQAAHTARRCAPNDPMVLWSKEVEKRRGKRVAVVALARKLAGILFALWRDGTLYSPLENAPPLEATAA

SEQ ID NO: 503585 - protein, 409 aa, unidentified
MTPIVERGAGLDIHQATIVATVRQPDGHGGRTVTTQTFGTMTVDLMTLRDWLQACGVTHVAMESTGAYWKPIYYLLEDGFTVILVNMQHLKIVPGRKTDVSDSAWLAQCLEWGLLKASLIPPPAIRDLRDLTRYRKKQIEDRTQEVNRLHKVLEDAGLKLSTVLTDVLGASGRAMLAALVGGTTDPAVLADLARGRLRQKLPALRAALHGHYRAHHAFLLSQILAKVDFLEEAIAHVTDEIDRQVRPFEPVLMRLTTVPGIARRTAITIVAETGGDMTRFPTAGHLCSWAAMCPGQNESAGKRRSGKTRAGNRYLRGALIEAGWACTRAKGTALQARYLRIKRHRGHKKAVVAVGHQLLEIAYYIMRDGVDYRELGAEYYARRDRERATQRHLRQLEALGYRVTLESAA

SEQ ID NO: 503586 - protein, 370 aa, unidentified
MKQRLLYVGLDVHKKTTDVAIANGRSNGKVRSYGKIDSTLDALNKLIKKLQDGDKELRFVYEAGPCGYQIYRHLDGKGIHCSVVAPSMIPRRSGDRIKTDRRDAINLARLFRAGELTSIYVPTPEDEAIRDLIRCRDDMKRFERKARQRLLSFLLRHGYQYSGKKNWTKGFYTWLATVRFSHPAQQVTLQEYIDVTNECSERIKRITQQIQVHVEEWNRAPFVKAYQALRGVSIIVATTVVAEIGDMNRFQSPKHLMAYLGLIPSEHSSGKTVRRGPITKTGNSHVRRVLIEAAWTYKMQARVSNILLNRQKGLPKSVCDISWKAQTRLCARYRRLYARGKSRQTVVTAIARELSAFIWAIDKEIQLAVL

SEQ ID NO: 503587 - protein, 332 aa, unidentified
MLHIGLDKNKEFVQACFVNDEGKKIKEERYPNTPVGISKLCAAAQNNKCVLEASTSCITIYDALLAKGVRVRVANPLKIKAIASAKLKTDKVDALMLAQLERADLIPEAHLPDKLTREMRELVRQHVSLTNERTDIKNQIHALLAKNGIRLPFKSPFAKKSQNWLSKNTSGVPKLALDQTFQRIQLLNQQREIIDDEIERQAQNNTDAVLLKTIPGLGWFSAFLLAVEIDGVERFVDEEHLQSYAGLVPSVRQSGNTTHVGHISKQGNRLIRWVLVQDAWMAIRRSKRYKKKYTRMVRRHKKKTVAILAVARKILRDAFFMLQRRQVFNENA

SEQ ID NO: 503588 - protein, 314 aa, unidentified
MEQIYIGVDVSKDTLYISAYPSKQIWQYKNIPKGIAKTVAKLKLLNPKLIVMEATGGLEKPLSEALHESGLPVAVINPRRIRDFGRAMGLLAKTDKLDAQAIAYFAAKIEPAPRPGADETSQKLERLVTRREQLSEMVTAEKNRLKQSKDELIRCQIKEHIAWLESEIKGLERGLKENLQQNPAALAKFNLYRSMPGVGHILSYSLVAELGELGCLNQREIAALVGLAPFNRDSGHYRGKRTIWGGRARVRKALYMPVLAAIRCNAVIRSVYQRLIARGKLHKVALVACMHKMLTILNSMAKNNNPWRCAETMT

SEQ ID NO: 503589 - protein, 435 aa, unidentified
MNEVCLQTGIDFGAQWVDVCVLSPTGEPLVAHQRFANSLPGYRQAKQLLLDTLAAQPEHGLNIAGEATGMYWLPFFLQLAADPELATYAPNLYLLNPRWVAWFKKCFAQDDKSDQKDPFYIAERTRTRQPATTWLPDTDNLALRFYTRYRFHLVQRLAQEKCYFSAYLFLKANTYRCVKPFADVFGVTSRLVLNQHPTLDTLSAIPVAELAAQLDELSHHHLPNPQHNAQQLHTVATESFPLPQRLTTPVQRILTATLAGIAFLEQQIAQVETWIAAELPTHPSIQQLLSIPGIGPVFAAGIGAEIGNPQRFLDGTKWDRRKQRYRPKNLRDAEDAIAKLAGLWWPRANSGGFEAEDRRMAKSGNAYLRYYLIQAANQLRLHIPEYRRFYRRKFSEATKHKHKRALVLTARKSVGLIVGLLHRNEPYRSEEERRT

SEQ ID NO: 503590 - protein, 408 aa, unidentified
MNAVGIDVSKGKSMVAALRPMGEVALLPQEFLHTEVGLEQMAYAIIALGGDTRVVMEATGRYHEPVAAALHEYGIYVCVLNPLFIKQSGGGSIRKVKTDKADAMKIAKYGLDNWVDLREYTPMDTVRQQLKLCSRQYNLYMKTVVSLQNNLISLTDKTFPGVNELFSSPERADGHQKWVDFVMTFWHCDCICRVSEKAFTERYQKWRKRKGYHFSAEKALDVYAGSCGHFTTLPKNDNTKLLITTAAQQLLAGKITLAALRAEMTRLAKQLPEYDTVRAMYGVGETTAAQLMAEIGDVRRFPRRSSIVGFAGVDPAVNQSGKHEAQSTPTTKRGSPHLRKVLYQIVCTYLKKSPVDEPVYQFLDKKRSEGKPYFVYMTAAQNKFLRIYYARVKECLEAFDARQSSTQS

SEQ ID NO: 503591 - protein, 461 aa, unidentified
MSKKKPAGKQKGSAQGKVDWKALDIVHPDAAGIDVGGSEHWVAISPDRDPEPVRRFGCFTADLREMARWLVERGVRSVAMQSTGVYWMPVFEVLEQHGLEVYLVNAQHTKNVPGRKSDVQECQWLLKLHAFGLLNNSFQPTDEIRIARTLWRHRGNLVAEASSAIQRMQKALIEMNVQLSSVLSDISGVSGMSMIGAILDGERDPWALAALVQSGVKATTEDIAKSLEGNWREELLFVLRQEVELYRIYQEKIDDCDLQLRKHLESFGSVVDLKTQPIGPKPKGKRGSRNAPQFDLRTELYRITGIDWAQVNGIDVLTAQTVIAECGADLSAFASEKNFASWLGLCPTNEQSGGRILKRRTRKVVNRAATALRNAATTLLRSESYLGAQYRRLRTRLGAPKAITAMARKLACLFYRLIKHGQQYVDKGNEYYETKYREQQIRSLSKRAQKLGLQLVIPKPA

SEQ ID NO: 503592 - protein, 354 aa, unidentified
MTIVAHSRPFVVGVDTHAKNHVYAIITAGTGELIATRAFPTTGAGINRAIAWVARHTGADLAALWVVEGAASYGALLAGAVGAAGYEVAEAARMDARQGTGKSDPLDAHRIAAAVLPLDEQQLRQPRLNEGVRAALRVLVCAREAMTTDRTRAVNALTALLRVNDLGLDARKPLTGAQIAEASRWRSREEPLALTVARSEGVRLAKRISELDADIKTNNRQITELVQISEAAPLLQEPGFGPVTAAICLTAWSHHGRIRSEAAFASLAGVNPIPASSGNTVRHRLNRGGDRTLNKALHMVALSRMTFDPATIGYVHKRQAEGRTKKEIRRCVKRYLARRTYRTLNATNTDPRHP

SEQ ID NO: 503593 - protein, 415 aa, unidentified
MLRIVYPTCCGMDVHKSFVIACIASTNPQGVTTYKSKRFSTFTGDLRRLAVWLAENDCRDVCMESTGKYWIPIYNILEPTCKNVLAHPKYVKAIHGKKTDKKDAKWIADIFKHDLVSGSFIPPADIRQLRDLVRYHWKLTNFTTGEKNRAQNCLTVSNIKLDDVFSDVFGKASSAIIEHILQDPSKKIKDVSAFRTKGMKASNEEVLAAVDGEMCAEQAEKLRIIRSHMDGLELCKLNLESLILFTAEKYLPQINLVLTVPGIQSFSAIGILSEIGVDMSVFPTSKHLCSWAGLTPQNNESAGKKKTTRISRAGAYIKPLLVQCALCAIRAKQNPEIRNRYLSLKKRRGHKKAIIAIARMLLTAIYNILKKNEPYNPDLYHQSDKPPVHREVSADEAIFILQRQGYLVSKPASTP

SEQ ID NO: 503594 - protein, 450 aa, unidentified
MQQNFYLGIDVSKGYADFIILDKDKKVVEDNFQLDDTFEGHNQLNKIISGFVIRHPEAKIFAAVESTGGYENNWLGYLSKCQSKLQLSVARVNPFGVSYNSKATLKRIITDKESAKNIAEYLISHPEKIQYNNEDYYSSVRRQWTFIKMLTKQKVQLLNQLESLLYIANPEVLIYCSSKVNLWTLKMLKQYPTAKHLAKVKLSTLSKIPYITEPLAKDLIDNAKKSVASGVDDTTAEIIKALVEQILQLRKLIYLQTKQLEEACNLAEVELLKSFKGIGTYSAVGLMIEILSVERFSSVKKLASFFGIHPVFKQSGDGLSGFKMSKRGRKEPRQILFNVARFAVVHNPYLKEIYVMHLKKGMPKMAALGAVMYKILRIIYGMLKNNKPFDPEIDRANRAKHNSVDIHTKPDYTRRYQPRDIKAPISRRQIRKRKEQEKSQNLKPLNAEPI

SEQ ID NO: 503595 - protein, 384 aa, unidentified
MLARARLPEGIAGITRLHALIGQFAGPDIEPGEVAVGIEIDRGLWVMALRAAGYTVYAINPRQVSRYRERHGTSGAKSDKADAHTLADMVRTDSHQLRPVAGDSAGAEAIKVAARAHQTLIWERTRQVQRLRAALREYFPAALEAFEDLDAPDVLELLARAPDPARAARLTRAQVAAALKRARRRDITGKTDAILAALRGEQLRQPQPVTGVYAATVSSLTVIIAALNGEIAKMEQQVTACFRGHPDAAIYLSQPGLGEILGARELGEFGDDAHRYASAKARKNYAATSPVTRQTGKKKIVMARFVRNDRLADALHRQAQSALIASPGARAYYDEQRARGLDHDAALRALSNRLVGILHGCLKTGTLYDEATAWSHRVTVASAA

SEQ ID NO: 503596 - protein, 413 aa, unidentified
MLLLIGDDWAEDHHDIEIEDETGRRLAKARLPEGLEGITRFHALVAEHAPAAWAELPAEDVAGRVIVGIETDRGPWVSALRAAGYQVFAINPLSSARYRERHSTSGAKSDAGDAHVLAEIVRLDRDHHRQVAGDTDLVDAVKLVARAHQTAIWERTRQTLRLRSALLEYFPAAVEAFEDLAAADTLILLGRAPSPARAAKLTRSQVVSALRAARRHHAEVKADALLAVLRTPGLRQPPTTETAYAAVVVGQVGVITALNAQIAQLQEVVAEHFGRHPAADIYLSQPGLGVVLAARTLGEFGDDKKRFVDARARKNYSGQSPITRASGKKTIVLARYATNRRLGDALHQQAFSALRASPGARAYYDALRARKIGHHAALRQLANRLVGILHGCLKTGTKYDENTAWQHHTAAVA

SEQ ID NO: 503597 - protein, 428 aa, unidentified
MSERDYNRQTARRQRVSKATLIVGVDVGKAFNAVGFMNKDGNVLGSCSKLYNSREGFEQFVKMIEGLKARHRLRDVLIGMEPTGHYWRKLAYFAIEHGYEVRFVRTTALKHHRELDESSSAKSDRRDALTIANITREGKYIDTVIEDGVLRQLRTLSKARERLLRYSVSAKNSLHAALDDYFPELHEIFRSMGARSLWVILEKCPFPEDVVLMKTSILQEMIARSSRKKAGSARKAKALYEAAQKSIGVKQIGTAVRYRVRMCLEEVKRTVLTLKDMDRQLKSMAKDIPSASYLMSIPGIGPLSVAVFLGELGNPAHFHNARQIVKYAGYDPQESDSGSWIGRKFISKKGRWLLRKYLFFMSMRVVVLTKYFQEYYHRKLETKNRVGQLPRRKEILCAVAIKLIKVIFALLRDKRSFEDTASAAVVIA

SEQ ID NO: 503598 - protein, 341 aa, unidentified
MNNDIIIGVDLAKNVFQLHGARRDGHVLFRKKLTRPQFAKFCAKQPPCLIAMEACATAHYWARELKKLGHEVRLIPPVYVKPFVKRHKNDAADAEAITEAAVRPNMSFVAPKSAETQAMTMMMRTRDQLLEQRTATVNALRGHLAEFGLIAATGLKNIERLRTLAAETSDLPPLATEMAQLHFDRIERLTEDIESLSQKIKGHCTASKTARHLQTMPGIGPIAAMVIEAFAPDMKSFKKGRDFAAWLGLVPKQHSTGGKTRLGQTTKMGQKDIRCALIIGAMSCIAAAARHGKRCHAWLQDKLERKPKIVAAIALANRMARQIWAMITKQEDYQPAQAMAA

SEQ ID NO: 503599 - protein, 412 aa, unidentified
MGIDIGKYHHQATLINDEQQIVGQSIRFDNSLSGFASLLRMIKEHLPKSALIKVGMEATGHYFWHLKDYLLKSGFKDLYVFNPIMTQRLAKTRIRKVKNDRIDSLLIAQLTSKQPANFDLSGQANSQDLKQLKELTRFCEKLKSQKRFYQQQLSVLTERICPEFVGYFQSIFLATPIKIIKEYFLNNLNSEQLILQIVKTSRQRIGPSKAKDIISALDNSLGQGFRSQATGWQLKMILDSFDLIIKQITEVKDRIIQMSQEIEEIKYLDSCPGISPYIASVILAEIDDINRFNRPEQLTAFAGLDPSVKESGEYQRTQGNHISKRGSKYLRKQLYYAAKTAIIFDPELKAYYQKKKGQGKHYNVIVIAVARKILERCYVVLKQKRPYELRSRGQQDAILDPKCLTVLSTTRA

SEQ ID NO: 503600 - protein, 413 aa, unidentified
MLKIVYPICCGMDVHKSFLVACIATTNSQGVTTYTSKRFSTFTGDLRRCGAWLAEHNCKDVCMESTGKYWIPIYNILESSCNIVLAHPKYVKAIRGKKTDKKDAKWIADLFKHDLVAGSFIPPADIRQLRDLVRYRWKLTNFTTGEKNRAQNCLTVSNIKLDDVFSDVFGKAATAITTRLLGNPSEKITEVSAFRTKGMKATDEEVLAAVDGELCVEQAEKLRIIRSHMDSLDLCKANLESLILSVAEKYLPQLNLVMTVPGIQSYAAIGIISEIGVDMSVFPTSKHLCSWAGLTPQNNESAGKKKTTRIGRAGAYIKPLLVQCALCAIRKKSNPEIRRRYENLKKRRGHKKAIIAIARMLLTVIYNILKKNEPYNPELYAHVNTPPDHRTVSVEEAIFLLQRQGYLVTPSAT

SEQ ID NO: 503601 - protein, 351 aa, unidentified
MRIIGVDLHTRQQLVAMLDTDTGEVIEKTLEHEGDEVREFYSALPGPVLVGIEATGSMPWFLTLMEELKIECRVGHPAKVRAAEPRKQKHDRRDARLLLNLLAEHRFPAIWMPSTEQRDLRTLLRHRHQWVRMRTRVQHTLQSLALANGLRRGATLWSHVGQHALQALPLAPFAGQRRAALLALYPVFQKAIDELDQQVSEQALLHPQALRLMTHPGVGPVTALATEVFLGDPLRFVDGKAVASYIGLIPSEHSSGRRQRLGKLSKEGNALVRYLWGEATIHAVRRDPELKRFYQRKLMQKGLGKAKTAAARKLGIRLWIMLRDQIDYKEFCRRGQLRQKSGDARAGMPGR

SEQ ID NO: 503602 - protein, 342 aa, unidentified
MKFNQLTTNYVAGIDLHKSPIAVHILSKNDITLYQKTIKKNMRRGLKRVLLKYKDDITVCVESTYNWYWVADLCLQLNIPFEITHAFYAKKKMIGKNKNDRIDAAGLARMLLHEELPVAYNYPPEMRATRDLLRLRGSLKKMRAGRLQHHSCVEDQYLMSEISLEEAGYNEETIIDITTNMGVDEQCIDFLTTQMTGLEKHILSRVHVHDEDALVRLKKIDGIGDILALTLLYEIHIIDRFKSQQEFSSYCRVVNPQCESAGKRAGTGNKKAGNHYLNWAMHGIATYSCRYNKQVKEYFEKLKRKKGKKNAKRILAHKWAIVIYNILKKRIDFDIDKFLKNA

SEQ ID NO: 503603 - protein, 351 aa, unidentified
MLIIGVDYHPSFQQIAFLDQDTGECGERRLNHSDGEAEKFYRGLQQRGVRVRVGMEATGYSRWFERLLAELSVEVWIGDAAKIKTKRVRKQKTDRQDAQLLLKLLLENNFPRVWAPSPENRDLRQLLWHRHRLVQMRTRIMNQLQALAMNEGTRWKKRLWSEQGRSQLEKIPLAPWASRRRQDLLELLDRMNPTIAELTAAVEQEAKKRPEVLRLMTHPGVGPITALAFVIIIITPDRFPCGKQIGSYVGLIPCEDSSAGRQRLGHISKQGNALLRFLLVEAAQAAVRYDPDWRRRYLHLAMRRERRIAKVAMARKVAVRLYWMWRNGWEYSQSVEFGSHAGQLATGHGVK

SEQ ID NO: 503604 - protein, 339 aa, unidentified
MENNNNPYYKHYLSIDWSQQDVSIARMRAGSNQPETKMFPSDIKKIKEYLKGLQGKKILTIEETTGSHWLYVELLESVDKILICDPYRNSLLKEGAKNDKIDARKLCLLLRSGLLKEVYHTSNEDYKIRKLASAYIALVKSGVRIKNQNSALYRGEGLKYKKDKIKKGEEILSFVEEQQKRAIKLYEEEKKKYEEVFKELKKKNEVIKMLCQVSGIKETSGVKIYSVVIEARRFENKYKYWAMCGLVKHDRESGGKNYGKKNPRYSRILKNVYKSAALAAIGGNNDIREYYEVLLQKGHPIAEAKNQIARYIAKVTYAVMKNKKPYKAYQWRELNKQKS

SEQ ID NO: 503605 - protein, 364 aa, unidentified
MKEYIGVDLGKRKAVVVKKDRVGNVTGKATLAVTEAALEKYFSKQDPRSKVVVEATGNWMYLYETIEKHVPEVVLAHPLKTRAIAEARIKTDTIDATTLAELLRLDGIAKAYIPPQEVRDTRELLRYRASVVSLRMGLKNKVHAVLTKNGIECSFSNVVGKKSRQWLKTLSVRDCYRRELDGYIRLAELSTALLQEITTKIKEVVSVTPQAQLLMTVPGISYYSALLILSEIGQIERFPSAKHLCSYAGLVPSVYSSGRKSFHGRITKQGSRWLRWICVEISIHAANGDARFQSLYRRILRRRGLATAKVAVGRKILTVIYAMLKNNEPFRRRRPRQLILAKAWSKKSKESSGHPPGVMIQASA

SEQ ID NO: 503606 - protein, 344 aa, unidentified
MQSMYYIGLDVHKKTISYCVKDGSGTIHDEGTIPATRFDLDRWMKTLPQPWTAAMEATVFTGWIYDHLQPHAAALKVAHPLMLRAIAAAKKKNDRIDANKICDCLRCDFLPECYMASTAIRERRRTLRYRNLLVRQMVQMKNKISMLLMEAGVSYNKQRLHKAGYFRELLATNPAIDEGLCSLLRLCRETVVRLSKTESALVRSLERDSLLIDRVERLMSIPAVGPITALTWALEIGDPQRFPSIKKAISYCGLCGAEKSSANTAQRTPLSKQRNKHLQTTLIEAAKMAPRNSPELAMLYDKEKQKGNANRATLAVARKLVAYLMAVDRGQRNFQVVQTNCIAA

SEQ ID NO: 503607 - protein, 332 aa, unidentified
MHMLAIDLGKQSFHIYGISDDGEVVSRKVGRAKLVDAVTRLQPRLVAMEACASSHHWGRTFEALGHEVRLIHPRFVKPFVKGSKNDAVDAEAIFEAATRPTMRFVPLKSVEQQDLQALHRTRDRLVVQRTALINHTRGLLAEYGIVMPAGASRFRLQIDKMIETAELSDLAKPLFRQLVEEYRDLDARVSALDDMLVKICRTDDRCKRLTTLPGVGPIVATSLVAAIDDGQHFKSGRALSAWIGLVPRQYTTGGKPRLGGIGSRANHYLRRQLIHGARSALLRISKHEDRRSKWAQDLLSRAGHNKTLVAMANKTARMAWAILRSGESYKIA

SEQ ID NO: 503608 - protein, 388 aa, unidentified
MQNVADQSVAPTTIRADLCAIFISLELSRSTWLVTSLSPGRGEKMSKHSVSAGDIAALLARISELRRKAYARTGKSFPIIVIQEAGLDGFWIHRVLLSEGIESHVVDAASIATSRRRRRAKTDRIDGEALLRALLAHKRGEPRVCSMVRAPTPEDEDRRRICRERKVLIMERVQHVNRIKGLLFSQGAFGYEPLRRDRRARLDALQTGDGRRLPQHLKAQVCRELDRLELLLEQIKAVEAERDALLNAEQTKVSAPPPMLLGVRGVGPEFASVLWSEGLSRHFDNRRQIAAYAGLAPTPWQSGSVNREQGISQSGNKRLRTTMIQLAWLWIRHQPGSALTLWFKDRIERNGGRRRKTTIVALARKLLVALWKYVSAGVVIEGAMIRPA

SEQ ID NO: 503609 - protein, 394 aa, unidentified
MKLVGIDVGKNSHHFCVMDKETGEFNVTPSSFPNNKEGFDFLINSLKPYSKKSILIGMEDTGHYHVALLKFLLSNGYTVALINPKTTDLTRKMEGGITKNDKLDTITICDVLDTPERKKQYRITKVDRFDLYEQRQLTRHHHNLKEELNVYCNRLQKSIDLVFPEFNTLFSSKYGIVYMNLLKTFGSAEAIASTDIRTIRKCFEIKGRGNRISLTPEKLKECAKNSIGISSEVETIQIKHLVSQITLIKEQIAEIDKKIEEFSITNNSPILSIPGISHFSGTSILAELGDIGNYSKPSQIIKFAGVAPYHYESSQYNAQHTAITKKGSKYLRKTLYQIILPVINNNPVFKKYYLLKISQGKGHRCAQGHCIRKLLRIIYHLLETGQSFDPALLR

SEQ ID NO: 503610 - protein, 367 aa, unidentified
MSESKYIWVGLDVHIDSITAAVLEDDSNDAQVVKMSGDLMKVRRLFRRLSEKAPVKACYEASCAGYVLHRVLKRDGFHCDIIAPSLIPRKLGDHRKTDRLDAVMLVKLYRSGHLTPIHVPAEDHEAVRQLLRLRYSYQEQCKSTKRRICSILLAQGLIYRDGKSLWTKKHKLWLTELRHRLEGPLKTALTAELEHLEYLEMQRNALDRDIDMFSQQPPYNKYVDALCCLRGVKTLTAMTLLSEIDDINRFRSPRALMAYFGLVPSEHSSGSRERKGPITKAGNVHARRILIEAAWNNRHNAGADLILNRRRQGQSPEIVAIALKAQHRLSRRFYYLSHKKHLHVAITAVARELCGFVWAIMKAAPQH

SEQ ID NO: 503611 - protein, 310 aa, unidentified
MAFVGIDVSKNHLDVCVRPSGEAFRVDNGESGLAELVVKLVAAAPSLVVLEATGGYEAPVVAALAVAGIPLAVINPRQVRDFAKSTGKLAKTDVLDAAVLARFAEAVKPEPRPLDDQQTQELQAMLVRRRQLLDMLTAETNRMHTCRPTLRKSIYEHVAWLRRQLKDVDRDLDGRLRETPIWREKDDLLQSVPGVGPVLSRTLIAELPELGTLDRKQIAALVGVAPLNRDSGAMRGRRAIWGGRATVRGPLYMAALVASKHNPIIRATYERLVATGKAKRVALVACMRKLLVMLNAMLRDRRTWLPPLAP

SEQ ID NO: 503612 - protein, 445 aa, unidentified
MTNAMPATKSEPEWAAFVAIDWADQKHYWKLVPAGSQQQEQGELQNTPEAVETWAAGLQQRFRGRPIAVCLEQARGALVYMLTKYSHLVLFPVHPTTAARYRETFCTSGAKDDPNDTAFLLDLLLRHRERLRPLQPDTVETRLLQFLVEERRRTVNERTRQSNRLTDCLKQYFPQILLWFDGVDSPLVGDLLERWPSLDTLRRAHPGTLRQFFQKHNCRSAERNQERIDAIYAAVPATNDAAVLEAGTLTARGLVALLRTLRDHIAGLDRRIQQLVLAHPDGVLFASLPGAGAVLVPRLIVAMGTRRERYDSAFEVQCYSGIAPVKESSGKTSWVHFRRTCPTFLRQTFHEFALHSIGQSEWAKAYYQHLREDQNKTHHAAVRSVAYKWIRIIFRCWKNGKPYDEGIYLQSLRRRGSLIVGAFGLPTGAGWQTVAGFQKLSENNA

SEQ ID NO: 503613 - protein, 349 aa, unidentified
MNQEKYIGMDVHQATISVAVMDSSGKIIMECILETKAATILQFIQGLHGTLSVTFEEGTSAAWLHDLLKPHVSHLVVCDPRKNALLKDGSKSDRIDARKLAELLRGNQLKPVYHGEHGMRTLKELGRSYLTITQDVTRVMSRIKALYRSWAIPCSGSTVYAPRHRAEWLAKIQEPGVRRRAERYYQQLDLLQPVRQQARCDLLVESRKHSAVKLLRQIPSIGPIRAALLVALLQTPHRFRTKRQLWAYSGFAVETHDSGEYRYVRGKPQRNRERITVRGLSDNHNHDLKNLFKGAAISASIRPGPLHDFYIALLEKGMRPTMARLTLARKMATITLTIWKKGVDFDLID

SEQ ID NO: 503614 - protein, 405 aa, unidentified
MNKEHVVGIEVAGNGIHFQVQSAEGRVLKEGKASKSMEGFDSFKKACAQEGLRWKCTLVVIEATGRHHLPWSERLLGEGALVYALNPLLTKRLYSSKNAIRDNKDDRLEAHSLAEIGRLHGDDLERFTYRAQCEKIELQSLVSARVAVRKQCTNLLKSAGDLLDLVFPEAKRVELDLTHVGFRRLLLRTATPAEIARLPQSELTRTLGEKGAKLLKAARNGFTPEDISSACKPALQALVESIEELFRQLRHLEQSITQCLRKPRHEKDRHTEKLIRSIPGFGENTAPTIAAFLPEGFEQWGSKKKITAKLSAYFGCDPRRRESGTFKGKVKISKRGIEIVRTALFQASFCGLRHDPEGKEYYDKKKAEGDHHKKAIFDLVRKNLRRIVAVLVDQKEFEPRYEKTA

SEQ ID NO: 503615 - protein, 316 aa, unidentified
MEQTKFVGVDCHKNTIACYVNGKFKEFKTDFKGFKKALEWAGKDCYWALEGAYSYGLTFSTFLLDSGCKVYEFNALATAKARKALSICGEKNDWGDAKVISIFASQSKLQEVSTKTVKLKQIITKRKLLVTQRTQITNNLKSSFNQLGINAPFKNFATIKAYKWLQNNEDICIQQFGKILQTLNETIKTLEKEIENLMPEQAKRLTQITGISTLTAGTIYTEIKGKKMTKAQFANYCGVAPVDCSSGMSEKHRNNHRGNRILNSILYAIAIHQIRYDEIGSAYYLKKLQEGKAKKVARKHLQRQLSNLIWKKLFIE

SEQ ID NO: 503616 - protein, 351 aa, unidentified
MLLIGVDYHPSFQTIAFLVEETGEYGEQELNHSDGQAEKFYRDLKQRGICVRVGMEATGYSRWFERLLAELGFELWIGDPAEIKAKRVKKQKFDREDARLLLRLLRENNFPQIWVPDPENRDLRQLLWHRHRLVQMRTRIMNQLQALAMNEGYRWKKKLFHEPGRAQFEKVTLGPWASRRRQELLELLDRMNPTIEELTAAVEREARKRPEAVRLMTHPGVGPLTALAYVLIIGTPTRFQRGKQIGTYVGMIPCEESSARKQRLGHISKQGSSLLRFLLVEAAQAAARIHPDWKRRYIHLAMRRHKSIAKVAMGRRLAVRLYWMWRNGCEYSPSLEFGSYAGQLGTGNGVK

SEQ ID NO: 503617 - protein, 353 aa, unidentified
MKYVGLDWAYRQAQWCALDPGGEIAGEGRFAADRDGLARLVLELGDEVTACLEMMSGALWVRDELVACGWQVQVADARKVKTVAPLAAKTDKVDARLLAELSRRQLVPALWLPSLDERALRERLRRRMHLVRLRTSAKGRIFGLQTQWGVRISLRRLRRADGMTLLERAGMPAVWRHSISECLALIDFLDARIVPLDAELRPFAQADPRAVLLDTIPGVAELLALTIAVEIGEISRFAGPEKLVSYGRLAPRVRQSGEGRPHTGPLNKSGSRLLGWAAVEAAQHAWRESNPWHQLYLDVSRRSRNHNSAKAAVARKILIAAWHMLSRNEPFKPAPRSTADTSVPASSRFALAA

SEQ ID NO: 503618 - protein, 351 aa, unidentified
MQTQSKRIDFSRQNFYCGIDTHKKSWAVTIDTDDIVLKTFSQEADPELLVKHLRKNYPGGNFIAGYEAGYFGYGIQRQLESLGINCVVLHPADIPTSDKDRDQKRDPRDSRKIAKAIKNNEVSPIWVPPVSLEQDRQLLRTREKLSRDKTRIKNRIKAFLQIYGIKYPLTFSQPGSHWSARFIKWLETIQLNEPTGTEALRSLVRCLRFQRGEILTVSRQIRKLSQNDKYEQQYLRLIKKPGIGMITAMTILTETGDINRFKTADHYRAFLGIVPRAHDSGDKEHPGKITKRANTHLRYLLVEITWTAIRYNPYYLNIYKSYRQRMKENKALVRTAGKLTNEIYYCLKKEA

SEQ ID NO: 503619 - protein, 342 aa, unidentified
MEYGAIDLHLRRSQVRIIDEDEQVLLDCRIDTTREAFGEVFGRRPRLRIVMESSTESEWVAQHLEGLGHEVVVVDPNYAAMYGTRSRKVKTDKRDVAAMAVANRRGVFRRAHRASAAARALRQQLRVRRQLVQQRAALINLVRALLRQEGLPLGRGAAEHVLTRLDRVRMPPALATTLAPVRTMLATLTSTVAAIDERLEQRAVTDPITQRLMTVPGVGPMVALTFQAALDTPARFAADARRVSAFVGLVPSEDSSAERQHKGHITKAGPRELRALLVQSAWVVWRLRSSRAAALRTWAQALANRRGKRIAIVALARRLTRILFALWRDETDFTWKEPTAAA

SEQ ID NO: 503620 - protein, 418 aa, unidentified
MDNRPPFLYQATVGIDWADQKHDVFVRFTNGDSYRRKIDSRPEAIQEWLLELRSVCAEGKIAIALEQRRGALFYQLCTHLNWIDLYPVNPHSLSSFRLTFFSSRAKDDPIDSQLLEELVRTHADRLRPYRPESVTERKLDQYCRHRRSLLDLATKTELKLISTLKQYFPLAVNLFAAVGMKSDIALSFLSRWPTLSELQRAKAHTVRSFFYAHNSRSQSRIEKRLQQIGQAHNVTDDLALIEPLVLTTKCLVGQLRQFNHAIKEFDHEIKELFKSHPDHFLFANFPGAGEQLAPRLLSLFGSDRARWADATDIQKYSGIAPVIERSGKSVWVHRRLSRPKFICQTFHEFAQQSVQHSSWAKQFYQHQRDSGKSHHSAIRALAFKWIRIICACWKANKPYDESFYLQTLAGKNSPLPST

SEQ ID NO: 503621 - protein, 408 aa, unidentified
MQAVHERCAGLDIHKKTVVACVLTGSGKQIRTYGTMTRQLEALADWLAAEQVSHVAMESTGVYWKPVYNLLENRGLELLVVNARHIKNVPGRKTDVKDAEWIADLLRHGLLRASFIPGRDERELRELVRYRRTVIEQRAHDVQRIQKVLEGANIKLSDVASDIMGASGRAMLERLIEGEDDPVALSQLAQKGLRKKQDQLQQALAGSIGAHQRSMLRHLLDHVKFLERQIEELDGQIQERTRPFKQVIDHLDAIWGLGRRSVEEILAEIGVDMSRWPTHRHIASWAKISPGNHESAGKRYSGRTGMGNRWLRAILVEAARNVSRNPHSYYAALYHRLSQRRGKKRAMVAVAHSLLVAIYHMIKDGTLHHDLGSDHFERLDREQIARRAVRRLERLGYQVTIQEAAPAA

SEQ ID NO: 503622 - protein, 309 aa, unidentified
MLTAEADKCKTKVVVNTAAGVQTLLAWCAKHGAQPAQLHAILEPTGLYHEQAATALPQVRVSLVNPAQARDFAKALALRSKNDALDSYVLARYGQTLSPALWHPAPLHARQLRALLTRREALSKDLLRELNRKEKSQFSPSAPLVDGSIDKAIAFLREQIKQIERAIDQHIDNHPDLKQDCELLNSIPAIGPQAGNAILAVMHNRHIDSAQSLAAYLGVVPVQRQSGSSLNSCARLSKAGPSQVRATLYMAALVGTRHNPHIRALYQRLLKAGKSKKAALGAAMRKLVHLCFGVLKNRIPYQPNYAMNG

SEQ ID NO: 503623 - protein, 387 aa, unidentified
MPQADDLSRSLVPFQQDATLVAVIEMSQSSWLVAATVPGVDRQPRKKIVPDETALLRLLIRWRDEAIQSGRTIARITVAYEAGRDGFWLARWLIGHGIEAHVIHPTSVAVSREHKRAKTDRLDTAMLIRVFIGWLRGERGHCGMVAVPTIEEEDAKRPSRERENLVGERTRIVNQLKAALARLGIRGFKPELRRAVQRLETLRTPEGLPIPSNMLDEMRRDLARLAVIREQIAAIERARLERLKQTPNDRPHAMLQLLARVVGVGIETADMLVQEVLSRNLRDRRAVARYAGITGSPDESGSKRREKGLTKSGNARVRRGLIQLAWRFLLFQRDSALAQWFRSRTEGPKAARKTKMVVALARKLLVALWRMVTFGEIPQGVVLRQAI

SEQ ID NO: 503624 - protein, 358 aa, unidentified
MIKSSSSKYIGMDVHKESISIAVRNAAGKVVMESVIETKANTILQFIEGLRGDVHLTFEEGTWSAWLYDLLKPHVSKLVVCDPRRNALLKEGNQNDRVDARKLAELLQNNQLRPVYHTDHGLRTQKELVRSYLTITKDQARVMTRIKAIYRSWAIPCSGTQVYSARHRTQWLEKIREPGVRRRAEHYYQQLDALRLLRVEVRKDLLAESKKHKVWKQLRGIPSIGPIRAAVLLGILQTAHRFRTKRQLWTYSGFGVEGHSSANHQVVNGQLQRKKKPIEIRGLNKNFNHHLKNLFKGAAVRASTKPGPFQDFYAALLAKGMRPEMARLTLARKIATIVLIVWKKGVCFDANHLKPQTA

SEQ ID NO: 503625 - protein, 330 aa, unidentified
MYEVVIGVDVSKEVLDVAYSCQNETLYLIQVENTDLGIAKFLHAVKAVTGSNCNSSWFVCFENTGTYSKLLLSTLLAMDIPCIEENAMHIKRYCAVARGKRDDWDAMRICHYAVVHQKQLVPNKPASYKIDKLKHLFNYRTTLVDKRRALSNAVKEKHETLESRMMEEIYQINQNILKQIDDAIKTVEKKMREIIKNDEGLKGNYDLATSVIGIGEIIGTALIIKTENFKKFTDPKKFASQIGIAPFPHQSGKSYSKPKVSKRADIPMKTLISCGVNSAMIYDNQIRKYRQGLLANNKHKGIIRNNIKNKLIHRVFAVIKRGTPYVNIAA

SEQ ID NO: 503626 - protein, 388 aa, unidentified
MEARTVNALPPAAADHAAVRCLVAIELSKKSWIIAITTPLADKISRHTMPGCDWKGLLELMQRIRMRVARKVGGPVEMISCYEAGYDGYWLHRLLEDQGVHSLVVDPASVQVDRRARRPKTDRIDAVRLLRSLMAHLRGEPKVWSVVRVPSVAEEDDRRLHRERARLITERIQHVNRIKGLCAIHGIYDYEPMRRDRTLRLDQLRTGDGRELPPRLKAEVARELQRLELVLRMLKEIDAERNAIASARMSAHTNAKKIQDLVRLKAIGPEIATVLTGEVFYRPFGNRRELASYVGLTPSHLQSGSTSRDQGISKAGNPKARTTMIELAWLWLRHQPNSAFSVWFRERAGNLKGRLRRITIVAMARKLLIALWRYLETGMVPVGAVLKA

SEQ ID NO: 503627 - protein, 345 aa, unidentified
MALFVGLDVSLNTTSICIVEANGKLVWEGKALSEPVPLLKALAPWRKKIKLIGIEACPLSEWLYGALVESKLETVCIETRHTQRFLSSRPNKTDRSDARGIADMMRLGHFKPVHVKSRSSLLVRTTLIARKKFVDHMLSIELTIRGLLKVHGLKIGAVHRCTFAAKVELLLADAPELHAAIAPLLEARNVMRKQKVVLDRRLHQMARSDEVCKRLMTVPGVGPIISLAYKATIDDPSRFKSSKAVAAHIGLTPRVYQSGEIDRSGNISKCGDKLLRHALYEAANSHLRISKKNSVLKAWGVKLAKRIGNKKALVAVARKLAIIMHRMWVNGSTFQHSRAEMEAAA

SEQ ID NO: 503628 - protein, 368 aa, unidentified
MNRKRSKARIDRKMLMVHPNAAAIDVGATMHMAAVRADHTPEPVRSFGTFTTDLHRLVDWFTECGVETVVMESTSVYWIPIFELLDARGFTVFLVNARDAKHVPGRKTDVSDAQWLQRLHSYGLLRASFRPKGQIAELRAYVRQRERLLEYAASHIQHMQKALTQMNLQLHHVVADITGATGLRIIRAILAGDHDPKVLAQLRDYRCHARAETIEKALTGSYRPEHLFALEQALALYDADHEKVSACDVRIEAVLKELSIGRGRRSDSLLSPRRPRTNPVNGLAFDVRAALFALLGKDLTQIDGLGPYLSLKLVAECGDDLSAWASAKHFTSWLGLAPSNKISGGKVLSSRTRRCGSRAAALLRLAAV

SEQ ID NO: 503629 - protein, 348 aa, unidentified
MKGCFENKDIYVGLDVHKKRWVVSVRTYDLELKTFSMMAVAEELEKFFVDNYKDALLHIVYECCFSGFWIYDYFHNKGFDIIVTPTNRIYRDGSIVKTDKIDSRKLAFQHSRGLLRAVKVPTEKIREYRSIFRIYDKEKMREGQILRQIRCILEVRNHPLKWERWNKEFVEKLKEINFQEDIFNRKFKQLLQEYEYVKQQIKDSEQRIKEIGEDQELGHKIKRIEKINGIGIISSVRLVVFLFDMKGRFETGEKLAHYVGLTPGEHSSGEEIIRSRTGLIGNKQLRSIIIQLAWVAVRKDGSLLDKFERVYKKNGSKQKAIVAVARKLMMKVYAITEKEEEYEINKAA

SEQ ID NO: 503630 - protein, 339 aa, unidentified
MVYVGLDISVARTSVCIMDAAGQVVREKSVASTPEAIAAVIRASGMEVDRIGLEAGINSAWIARGLLDAKLPVIVIDATHAAAALKTGFRNKTDKNDARGIADLMRVNKFRAVSVKSVASQRDRALLTVREQLRQQSLDARNVIWSILQVEGLKPPKLTNPAFQALVAQSLDDEALAPMLRPLLAVVEHIDGQVAGLDKEIARRAKASSACKRLMTVPGVGPLVALTYAAGVDDPARFRDSRTVGAHFGLTPRRFQSGDVDWSGGISRAGDAGVRRALYQAANVLIHHSRGWCALKSWAVRVAKRRGLGKAKVALARKLAVVLHKMWSAGEDYRLKAEA

SEQ ID NO: 503631 - protein, 338 aa, unidentified
MPLYGGIDLHANNSVIVLLDDQDQVVYQKRLPNDLPSLLQQLSPYQASLQGVVVESTYNWYWLVDGLMERGYVVHLANTAAIQQYAGLKYTDDHSDARWLAHLLRLGVLPEGYIYPKEGRAVRDLLRKRSQLVQHKTTHLLSIQNLLTRNTGRAMRGNRIKQRTVADVDGLLPEPELALAVKSHLAVMRCLETQLATMAQTVTQRVKLQAEFNDFLTVSGIGQILALTIRLETGDIRRFPAVGNFAASCRCVGSQKLSNGKRKGSGNTKNGPKYLAWALVEAAHCAVRYHPCIKRFSQRKHAKTNPVVATQAVAHTLARACFYILRAQGPFDVSKAFQ

SEQ ID NO: 503632 - protein, 341 aa, unidentified
MEQYVGLDVSMRETSVAVRQNGKRVWRGKCPSDPKALADVIRQRAPDAVRVVLETGPLSTWLYHALKAEALPVVCIDARHAKAALDMAPNKTDANDADGLAQIAEVGFYREVRVKGYAPMLARTLVGARGQLLRISIQLSNQIRGVMKTFGLIVPKGAGRVFEAHARALLGTNEAVARVVLPLLEAWRAVRARAAELDRQLIAAARTSPACRRLMTIPGVGAVTAASFVAAVEAPENFGTSRAVGAWLGLTPRRHQSGEADYDGHISRRGDGHLRALLYEAAAAVLTRTRTDSALRSWGLELKEKVGFKRAAVAVARKLAVIMHAMLKTGAAFDPAPNTTA

SEQ ID NO: 503633 - protein, 451 aa, unidentified
MEKKKTQMDIINPNCAGIDIGSRSHFVAVGQAPEEIKEFGVYADDLTEICLHLKHHGITSVAMESTGNYWQNLYVELIKHGFEVTLANGKFTKNIKGKKTDVKDARWIQKLHSIGLLSSSFLPDETTETLRTFCRQRQNMLDLAAEASHKMQKYLKLLNFRLDIVVNDICGLTGMAIIADICKGNLDPEKLSDLRHGNCRKSKEEIAKALKGNNRADYLFGLKQEFESYNFYQKKIEECDKQINTFLKKQINTDPEKKKLKTDTKIHKRINKNAIKGIDLNQASYQYFGGVDLMKIEGVSHATILTIISEVGPQGFYKFETAKQFASWLRLAPNNKISGGKLLSSKTPKGSNRVKIALRNAANAIGNLKDLHLSNFFRRIAFRKGRTVAVSATARKLAIIIWNMVVKKMPYRPPSEYLFVDQKRKLAVLNRIKKQIDKFALTNQELGLANA

SEQ ID NO: 503634 - protein, 363 aa, unidentified
MEVAKEGRFVGIDMGKRGYVLRMIDGQNRITGWEGKTNPEGRRELYKRLRADDRIAIEACNLAFIMNREFKELTGTELYILNPGKLFQIYMTDKKTDKEDALKLAKEIRDKPEEDLPRVYAPTEEMKEMRKVVSEYRETVKFHTQRVNRLHTVYEHCGITDMKRSDLKTKTNREKNLELLSGYEKEEAERLMQVIDLLESQKDELEKKIKETERSNEKIQAVEQVPGVGKITAYAFVASVGGADRFANMAQVSSFLGFVPKIDCSSQTVHYGHITKKGNGYLRGLLVQAAWVLVRSKNGGALKEKYHNLVLHGLSKKKAIVAIARKMAELMYTLLKNKSLYEPRKFMVPLSRAERLANLAVAG

SEQ ID NO: 503635 - protein, 350 aa, unidentified
MKIIGCDFHTRYQQIAMMDEATGELIERRLDHESGDAHAFYRDLQGPVRVGIEATGPIRWFERLLAELGHELWIGDSAKIRASEVRKQKTDERDALLILDLLLAKRFPKIWVPTPAERDLRQLLWHRHKLVCMRTMLGNQLHALAMSEGLCRKRKLFTKKGRVELQGLALAPWASRRREALLQMLGQLEPAIAELDRAVMEQANRREDAVLLMTHPGIGPVTSLAFVLAIGPIARFARSKKIASYLGLNPTEASSGGRRRLGAISKQGNTMVRWLLIEAVYPAVRKDLVLRQDYQRLKFRRGHAVAKVAIARKLAVRMYWMLRSGAEYAQLVRRQGSPGATLVDASSSLG

SEQ ID NO: 503636 - protein, 367 aa, unidentified
MLYLAIDQHRKQLTVNLRDENAQVLVKHQVSTRWQAVREFLADIQERGRQAGGWMVIVEVCGFNDWLLKLLAEYGASEIVLLHPEERLRQKTDRRDANRLGELLWLNRHRLAGGLRVQGMRRVVIPSADDHVDRKLTSLRWRIGRERTRLLNRIKNILRRYNLEQECPTKSVTCQTGLRWLRQLAVSELDRLDLNQLLGRLEVVNTERAALEEKIRERQKRNVAAARIATVPGMGAYISLGLACRVGDVRRFPRPRSLANYWGLTPRTRNSGEAKQRLGSITKQGSAMARFVLGQAVLHVLRKDTVLRQWYKGIKRRRGSKIARVAVMRRLTTIIWHMLRKQQTYMLGGPQAKSKRRAKPVPATAEV

SEQ ID NO: 503637 - protein, 400 aa, unidentified
MLSIGIDVSKGKSTVCGMKPGGEIVYAPFEVQHTREGMSELVSLLRSSGEEVRAVLESTGSYHCPVVAALLENGIFVSVVNSLRMKRFCSQSIRKVKTDRIDAMQIALYGLAYWQELQPTRLPEDTYRELQLLARQYYQMTSLLIKAKVDFNAICDQVLPGMQELMNDHAGRHKLSDFVLRYHHTTHILEMGETRFRKDYCKWAEKKGYRNCERMAALIFATAQNGIPVLPNAPSTQIVITEAIRVLHTVEASRDAILTQMQALAKTLPEYSLVREMPCIGDTLAPRLIAEIGDVRRFHSKRALIAYAGIDAPPYQSGKFCANNRHISKRGNRYLRKTGYEVMQSYVMHKPANDPIFTFIEKKRSEGKCGKLAMVAGLNKFLRVYYGKVTELYRSLSAIE

SEQ ID NO: 503638 - protein, 392 aa, unidentified
MEIYVGIDVAKETHWACALDARAQVLLDRAVDNDQAAIERLVADLRGLGGEVVVGLDITGSLARFLEAILLAEGLRLVHAPGIAVNRAGQGFSGGERKSDPRDAHTIAELVRTRDLRPILPDDETAIALRLKVTRRRELSDDQTRRISRMRQLLGAIHPGLERRLDLTAKGPLVLVTRYVTPAEIRRAGLKRIMTHLKRTPHLHAVEALAQRALEAAEGQSIAVPGEASFADMVRELAAEALQAREAIARIDRDLEALLERHPDGALIRSLPGMGAVLSAELIANIGTIERFHSADALASAAGLTPVIRKSGKSRNWRRAYGGDKALKRVFFQSAFCAVSTRDPLSKAFYDRKRREGKHHTQAIIALARRRVTVLWTMLRTRQTFDPTQKAA

SEQ ID NO: 503639 - protein, 422 aa, unidentified
MSYCPVAGIDVSKRFSDMCILSPDNKIFAQEKIYHDETSINRANALLQKAERLFFSKPVIVMESTSHYHLILFQFFSEHGYDVIVVNPLQSNSMKDFSIRKRKTDRVDAFKLAMMYRTKTLRPSQIPQTATRALRQLCRHRAELLNDVSSYKNRLTALLDQTFPGYDKVFSDVGGVTSCAVLVRFPTPTILLVEEESELVEVIAAASKSGYSFAKKKAGLLISAAQKAQTLGIHSCADETLIVCTIQMLRTLSESVLQIETAIDNLLAQIKEMRNNVSLLQSIPGIGSHSAALLLGEIGDISLFKKPKQLAAYFGLDPTERQSGSFRGTKNKLSKRGSSYARAALHMGVVNSICKRGKDSAANPVLLSYYEKKCKNKPAKVAQAASMHKLVFIIFAVLRDQKPFELKTPEQHAVEQGFVKAA

SEQ ID NO: 503640 - protein, 383 aa, unidentified
MEAKRKGADPLEPERHRCARLGLRHNHTRDRGTTMNDVTTYGLDLAKRVFQVHWVDVQSGEVHRKTLPRTQVSVFFARAPRGVVAMEACGSAHHWGRLLQTMGHAVKLIAAQFVRPFVKTNKTDAADAQAIWEAAQRPEMRFVALKSEQQQAVLSLHRLRAQWVKVRTLQANQIRGLLYEFGVVVPLGWRALLNVATEQLTDPTEGSVPVLLRDELLKQLQALRDATARIVALEKQLASWQRTAAECQRIMAIPGVGLLTATAVVASVADAQQFRSARQFAAYLGLVPRQSGTGGRIKLLGISKRGDTYLRTLLIHGARSVLLSQSRHGRSVDPWLGALLQRRPSNVVVVALANKMARTIWALLAQRRTFDANWHRGAIHGVA

SEQ ID NO: 503641 - protein, 374 aa, unidentified
MDRKQVRQMAAKQRLTIGLDLGDLTSCYCILGEAGEIVNEGRLPTSKAGLDSLFAKMPSSRVALEVGTHSPWVSRHLAGLGHEVIVANPHKLKLITQSVRKNDRIDAQTLARLARVDPQLLSPIRHRGEQAQADLAVIRARAELMESRTALINCARGMAKPMGERLKKCDADQVGESLAEGLSEALQNVIGPLLKSVEAISQQIAVYDQKIEAIGKRYPEIQLLTPVYGVGPLIALAYVLTLEDAQRFGHSRDVGPFLGLRPKQRDSGQSQPELGITKAGDRLVRSLLVQGAHCILRKGAAESDLRDWGIGHVGSGGKNAKRRTVVAVARKLAVLLHTLWANGVVYDPLYNRKAVEAAKAKAAAKAKVKGKAAA

SEQ ID NO: 503642 - protein, 386 aa, unidentified
MRRAKKRGPGPSSVLVTPDHAANVVGIDPHKQTLTATVVDPRGGIVASEHFKVSGGGHRALEAWARQFGQIARWGVENAAGWGRHTAIFLAGCGYDVRDVCANRTPRHDRARQRGKSDTLDSERIARETLAHPLLPKAFKRAGQDQGPDELHQLLALWHNRRRSILTGRQHLVNEAEHLLCELPLELREQLPASKAVRPRLAALQRRNRRRRYDPPTRLRLQLLDGYHAQITALDREEKQVVAALEALVRQSGSTLGELCGLSTRSVAELLVETGDVRRFTEGGFRRFNATAPLPASTAEGPGEPVRHRYNPGGNRRINAVLHRMAVTQLRCEPRAQAIYANARASGHTKKEARRVVKRHLSDVVYRRMIRDLAAASHPAQPLAAA

SEQ ID NO: 503643 - protein, 474 aa, unidentified
MPLLGRNHNPTNMKSKTPKSKKKKQKVSVDQGWEAINPRAAGIDIGAREHFACVPAGATPKNVRSFGTFTADLSALADWFKECGLTSVAMETKGVSWIPVFQILEERGFAVILVNARQTKNVAGRKSDVQDCQWIQRLHTYGLLQASFRPEDPYCVLRTYLRYRDELVSARSTQCQHMQKALQQMNVQLTQVLSDVTGVSGRAIIQAILEGQRDPEALLSWVDVRVRATPARIKKALEGDYRPEHLFVLQQAFCLYGIYEEKIKACDQQIVRETAALSDKVDPQLKPLPTRKEGRPASKDKMQGQDMREVLYRKFGVDLTAIEGIGVTTALVILTEVGPNVTGFRTEKHFCSWLGLCPDNRISGGKVLSSHTRRVINRASDALRMAAVTLERSQSALGGFYRRMKGRLGAAEAITATAHKLARIIYRLIKHGEAYVRQGMEDYERKFRERKLHALRKTAISMGFNLIEQQQVAS

SEQ ID NO: 503644 - protein, 342 aa, unidentified
MTEVSIIGLDIAKLVFQVHGSDASGRVVMRRKVSRAKVLAFFASQPRCTVGMEACGSAHHWAREIAKLGHAVKLIAPAYVKPFVKRQKNDAADAEAICEAMQRPNMRFVAVKSEEQQASAMLFRARDLLVRQRTQLINAVRGHMAEFGWIAPKGSWHRAALADLIQDEGSCLPQAARRVLALMLASLTSLDGQIAELDQEIARRAREDEVARRLMTIPGIGPITATAIAALAPPAETFARGRDFSAWLGITPLQKSTGGKQRLGKISKMGERTMRRLLIIGSSAVVRQASRHGAPKGSWLEQMLARKPRMLVTVALANKMARIVWALLTRGEDYQAPVAASA

SEQ ID NO: 503645 - protein, 368 aa, unidentified
MDELITGFVGLDAHAESTAIGFAEAGRAAPRFIGTVGATRGELTKALGRLGEPGSLLIVYEAGPCGYGLARELEALGYRCEVVAPSKIPKKAGERIKTDRRDALKLASLARAGELTAVTIPDERDEAIRDLSRARVDAVRARLKARQQLQALLLRHGRRYTGKTAWTAAHERHLASICFRHAAQTIAFTEYRQAVSECDTRVKRLSEALAHEVESWRMQPVVGAIMTLRGLDLVAASTVVAELGDLKRFARPRELMGYLGLVPSEHTTGAKRRLGTITKTGNGHVRRVLVEAAWNYRFPARVSRALQIRQERQPAVIRQIAWRAQLRLSHRYRRLKARGLQHNKVCVAIARELAGFIWDIGRHVGPNA

SEQ ID NO: 503646 - protein, 401 aa, unidentified
MKRLSGGIDVGSASHHIIILDEEDNVLYNKKISHRINEFTENIKLFRKIEKKEGGKLSFALEGKNGHSAPLDRILLDEGFTLYNVDNLKLKRFRQAFAGEWRDDQRDALMLSKMLKLKDHINSEREKVFVEIEKPSPLTESLKLLSRHQQTLISERVRLINRLRKKLLEVCPQILELGKAKSKKLIAILAKYPDFSKYKKITLKSLLKIKGIGKKRAPFLLKRLDNIEYIPGLTDIYKTIILSHAKRISELQKEIKDIDKSLDGIGEKNKEVNHLKTIPGVATKLASRLIGEIGNINRFPSEKELAVYCGIACVDDNSGKVTKAKAVYKANKICKQALITMAGGSIRLSPQCKAYYLKKRAEGKSHNHALRCLARQLIKVIHKMLNEDRDYMVKKELKKVA

SEQ ID NO: 503647 - protein, 342 aa, unidentified
MKKSYYIGIDISKKTLDASIFVENMNEKRYPHVKEDNDKAGFKRILKWASSEKVDLKDCLFCMEHTGNYGLELCLFLEQKHIEYCAVSPLVMKRAMGISRDKNDKIDSARIATFAFEKAYKMKPSKMASEDILALKKLQAERNLHVRERAKYKGYLSDKCTKNDGLRKRMTIMVKTLDCQIEEVEKEMQAIIQRNHELSSNYELLLSIPGVGKVIAISTLVYTNNFKAFDNARQYACYASVAPFVHTSGTSIHGAPTVSKMGNSQIKSELSMGALNAMSNDPQMSEYASRKRKEGKHNGVILNAIKFKLIERMFAVVHRGTPYVATHEYKTLRHPNRVSEAS

SEQ ID NO: 503648 - protein, 325 aa, unidentified
MEKLYGGIDIHKEKLAGCIMDRDGNITREHTFPSSKKAVERFLCDIPSSGITIAIEACGMWRGTYKILTDMGYEVKLANPKKTHDIACKKKTDRVDAKILADLLRTKYLPEVWIPDEQTLKFRDLARHKSSLTRLKTQVQCKIKSYLLRKGVKYGKLWNEKTLSTLAQEDQNIQNLINVYNSLKKEEKEIMKRIKQIARNRKETTLLMSMPGIAEFSSLMILAEIGDIQRFRSPKELVSYAGLCRGIYQSASTERSVHNTAVNKWLKWIIYECSGRAIMLDQRFQQYFYPIQKRKGANTARRATARKMLTIIWYMLTNKETYRVS

SEQ ID NO: 503649 - protein, 350 aa, unidentified
MYYKENDMQEKASFPIWIGIDVSKDSFTAACRSILRGDETVFPPQGGFAIERKSVKEFMRWAAGVADGFPFGIAMESTGVYSLRLAALIRSVSPAQHVAVCNAASVSLYARSFTEEKNDKADAEAIARYGCDRNPRQPRIQGKEESRLRELVRERDRLVQLKNDMENGGEGLAGADVRRLHASAVKSLGKTVRKLDKLIQETVDSSEEIKEEVARMATAPGVGFLSAACVYAELGSLKNYTRRQISAMSGVCPVNRKSGTSVDRHAMSRRGSVLLRKILFLDSHQAIRGIPAMGEFHKRMLEKPNSSRMSAKCACMRKLLLILHAMVVNGMDFNPNYESEKKMEKSNQPT

SEQ ID NO: 503650 - protein, 342 aa, unidentified
MDHFAGLDVSVKDTSVCIVDGTGKIVREVKVASEPDALLRVLRNPAYRFKRIGLEAGPLSQWLFSALGEANLPVICVETRHMRAVLKAQINKTDRNDARGIAQMMRVGLYRPVHVKTLRSQKLRMLLTHRKLLQSKAIAIENDLRGTLRNFGLKVGIARWTKFEVRIEELVEDVPDLAVLVEPLLVVRRALREQIAVLHRRVLAIVRDDEVCRRLMTIPGVGPVVALTYRATVDVPARFRKSKSVGAVFGLTCSRDQSGERDRPGAISRCGDEMMRTMLYEAAQSMLVRSTRWSWLKAWAMQIAKRRGIKRAIVALARRLAVIMHRIWVDGTEFRWTREVTA

SEQ ID NO: 503651 - protein, 371 aa, unidentified
MAESSRTIYVGLDVHKDSIAVAYAPEDRGAEVVALGTSGTRQCDIDKLIRKLESKGATLVFVYEAGPCGYWLYRYLTRHGLSCHVVAPSLIPRKPGDRVKTDRRDALTLARLMRSGDLSSIYVPEIADEAIRDLSRGREDAMRDLKATKYRLKAFLLRQDIRYAGRASWNAAHLRWLSEVVCATRAQQIVFQEYVRAITEQHERLQRLETELHEEVKHWRLYPVVEAVQALRGVELTGAVILIAELGDLTRFDTPRKLMSYLGLTPSEYSSGDRRRQAGITKAGNTHARRALVEGAWAYRYPAKVSRHLQRRLEKLPAEIQAIGWKAQVRLCRRYRQLIARGKHVNQVVVAIAREMAAFAWAIARVVPRPS

SEQ ID NO: 503652 - protein, 310 aa, unidentified
MNDTIGVDISKPTLDVFWLGKREHRQFPNDRAGCAALIRWIGKSDVRIVFEPTGPYHRLFETSLVAASLQAVKVNPRSARRFAEATGKLAKTDRIDAAILARMGAVLDLEGRPAKTETFQDLRELAVARQALIKDRVAAANREQIAVNPVIKRQLRARLKQIGIQLKEIDGVIATLVDADPGLARRRDILASIPGIGTITAMAILIEMPELGALDNKQAASLAGLAPMTRQSGTWTGRARIRGGRSSLRTALYMPALVALRFNPDLKQKYQVLKEAGKPSKVAITAIMRKMLVLANALLRDDRKWNTKAT

SEQ ID NO: 503653 - protein, 474 aa, unidentified
MKIPTDIMAVGIDPAKGVHQGVALAYPEVELLNSQFENSYEAICSFDEKIMKLAQKNDLKVIYGLEDSGAYGKTIKDVLTSRFREIREVNPLKTNRQKDFYGGDKSDEIDARCIAQILLRSYESLPKIEEDNEIYASIREAERFREILVKMKTQNVNRLHFYLTKTWGGAYKNFFSSLQNKIALEFFRTYPVPQVLKETKAKELARFMYEASSHRLGRGNPRKVSIEKAKLILSSIKGIKDLPLTLEREMKKEIIKELVANISQVKASIKAIGRKLNKDLLPETHQSLTSLKSTDTVTASVLLGETLNPDRFSTRDKFARYNGSAPQERSSGGRAKHRARKGCNRRLKRTLRQISVTAIVREPLSRAYYQRCLSRGLSKSQALKRVDRKISDIVWKMMKTKEPYDRELAIKNIIKRSQRTKNLGRARWQSRLRIKESSDEIESLVLPPLDILAELEEIEKKDQSIMSVSERVLT

SEQ ID NO: 503654 - protein, 422 aa, unidentified
MLEETNDTEELIGRVAALDIGKAELVCCIRVPGAGKRGKRLQEVRTYQTMTRSLLVLADRLGELGVTRVVMEATSDYWRAPFYLLEAQGFEVWLVNARDVKHLPGRPKTDRLDAVWLCKVAERQMLRPSFVPPPEIRRLRDLTRYRADLVGVRTAEKQRVEKLLEDAQIKLSVVASDIFGVSGRAMLAALLAGERDPKVLAQLARTRLRAKLGQLEEAFTGHFTDHHGFLLATMLDRVDAVSADIATLEAKIDQEIAPFAAAADRLDEITGVGRGAAQVIIAEIGTDMGRFPTPGHLASWAKFAPGVKESAGKTKGKATTGHGNPYLARVLGEAAVAAGKTNTFLGERYRRIARRRGTKKAIVAVGRSILVIVWHLLADPTARFHDLGAGFYDTRINPERSKRNHVRQLEALGYKVILEPAA

SEQ ID NO: 503655 - protein, 344 aa, unidentified
MTNSSKPEVQVFAGIDVSARELIVVVHCGTEDRETVTTFRNNAAGHKALLAYLLRGNGRARVCLEASGNYSLDLALTLQAHRQVEVSVVNPRRARRFAESLGERSKTDPVDAGVLCEYAARMPWVAWQPPSSLALRLRAITRAIEALGVMHTQEKNREHALATSQALPVMLIQEMRRHQRYLEHRMERLRREALRLIARDRELDRRFRLMLTVPGIGETSALQILGELVVLSNTLDARQWVAFSGIDPSQFTSGTSVQKRPRISRGGSRHLRRALYMPALVALRREPHLRAFYQRLLSRGKARLQAVVAVMRKLLHALFAMFRSNQSYDGSKLCPIELTKKLAA

SEQ ID NO: 503656 - protein, 377 aa, unidentified
MKAPSTRPAAVLGLDVGKSSHWACLVDRDGEVLDSAPVRNREAELDALFASAPAGTLVVVDQFRNIGSLAVRRARAAGLGVAHLPGLAASRAAGLFAGEAKTDERDAAVIARTALGVPDSLSGVPGRGEALEAARALSSQRDHVVACATRDKNRLRAVLLESCPALEAAVDLSDRRWLELLAGFGGAWGIARSGAEGPRAEAAGEAAAASTAPPPALVEAENRQVRFLAARISEALDEAGALEAETAALLEGDETYACLLTVPGIGPRTAAQLAVSVDIGRFPDHDHLASYCGIAPRVRSSGTSVRSVRASRRGDARLKSLLIFSCNSLVRSSGRYGEYYRACRARGMGHGRALKAVARKRLRAIYAVMRDRVPYRE

SEQ ID NO: 503657 - protein, 421 aa, unidentified
MRKADTRKVKAIGDDTLIVAVDIGMEMNRGYCTTPDGRSSKTFKFDNTRAGMDTLWDMITINKNRFKCNEVIVGYESTGPYGEPMLHYLMKKPVRIVQVNPMHTKKVKEINDNSPLKTDDKDPRVIADIIRWGRALSIVIPEGDAAYLRRLNNSRERHVRERMALVNQLQQLVFLLFPEFRTVIKDIKCKTPLYLLRKYPTPETLSVLDKDVLGEEMRKRSRGKLKEHHADMLINLARNTVGIREGAAGLSMDMRHILIQLEMLTNLIAELESEMEIALGRIPYSPKLLSIKGLGVVSVAGLIGEIGDFKKFKTQSEIMKLAGLDLYEISSGKMKGQRRISKRGRSLIRKILYYTAIQTIRKDGILHDYYTRLTDGGMKRMKALIAVSRKLLGIIYAIVRDDSEYSANFDSMKRQVIKKAA

SEQ ID NO: 503658 - protein, 346 aa, unidentified
MEQYVGLDVSLKLTAICIVDRTGKIEREGVVASDPEAIAAFVKSHAPHIARIGLETGATSTWLWTELNKMGLPVICIDARHAKAALKMQINKSDRNDAVGIARIMQCGWYKEVRVKDLDSHAIKALLVSRALLVKIKRDIENQIRGLLKNLGLVIGRAKMKVFAVRAAELAEARPELAAAVEPLLKAREAVGRQIADLDRKVMRLARNDAQVRRFMTAPGVGPITALCFLATVDDPTRFKRSRSVGAYVGLTTRRYASGEIDWTGRISKCGDAMLRSYLYEAANVLLTRVLKWSTLKAWGVRLAKRSGLRKAKVAVARKLAVILHRMWIEGTEFKWSSKEVANQPA

SEQ ID NO: 503659 - protein, 359 aa, unidentified
MRGLYAGFDLHGNSNYLGIIDGDGKRVFGKKLSNDLGWIREVLVPFEAGVVGVAVESTYNWYWLVDGLMEEGYKVHLANPSAIQQYVGLKHADDKHDAFWLAEMLRLGILPEGYIYPKEERPVRDLLRKRGHLVRLRTSLIISLQNILSRNLGRKVNVNDVKALKEDRVTPLLESSEDLALAGRVSKEAIDFLTHQIRRIEGVVEKRIELREEYRYLLTLPGVGKILALTIMLETGSIGRFATVGDYVSYCRKVPSQWTSNGKRKGSGNKKNGNKYLAWAYAEASELARRFYSEPRAYYHRKMQKTNAPVAHSALAHKLARAGYYVMRDQVPFEAQKLFGRGRGWNGEPELGLVKNHET

SEQ ID NO: 503660 - protein, 387 aa, unidentified
MTVQSQVSAFIPRHYEIFAGLDVDKHSIAVTFTDHTKLLKSLRLPYSSEHLLNYARKHFPDRRLAFVYEAGPTGFGLYDDLMADGHPCLVVAPSMVPTAPGQRVKTNRLDSKKLSEGLRGGQLHSIHVPSPTYRQLRHLVQLRDTHVRQLTATKCRIKALLLYEGIAFPEAPAGGQWSARVLRQLEALPGAEAVRFKLNHLIGTLHFHFLSAATVQKQIRRFCQNDPELRQVIGLLTSLPGVGWIVAAHLIARLGDWREITNVRQIAAFLGLVSSEHSTGDQDNRGAITRSGDSRLRNKLIQSAWTTIGKDPELRAFYRRIYQRHPKKVAARKAIVAVARKLTTRIYAVLKQQRPFVLRPDSSSAPLTAEETAGPRGRLDAAQNEQK

SEQ ID NO: 503661 - protein, 342 aa, unidentified
MEVDILGIDLAKRVFQLHGADVRGRAVYRNKVSRAALIETVRVLHPRMIAMEACGSAHHWARRFQEAGVEVRLISPHYVSPFVKTNKNDRNDAEAIVEAASRPSMNFVAVKSVEQQDMQAAHRVRELLVQQRTAIINQARGLLGERGIAIAQSPAAFRRAIPEILIQSEGELTSFCQSLIMTLVQHLRALEEEIAIADGWIRSFMNRSALCQKIAAVPGIGPITATAIVAAVGRADGFRNGRHLAAWLGLVPRQHSSGGKSQLYGISKRGDKYLRTLLIHGARSVLIRVSAKLDARSRWLQKLIERRGFNRACVALANKNARIIQVLLSTEATYQPVALVDA

SEQ ID NO: 503662 - protein, 350 aa, unidentified
MKTILAIDLGKFKSVFCKLDTSSLKPEYSTVKTDPEKFHDIFADLDNDNSIVLFEVGSQAGWLSDMMRAMRLDFKVANVNHPAWKWSSNQNKSDKADALRLAMMYQQGFFPDVYIPVKAVRQKRSLIYYRQKLVTRITGIKSGIRALMTTVAVDLPIGRSCWTKKFIKELGQLAMSLDEIEDPCEFWRGQLYMELQQLITLQESLDKTDKQLDEIGNREKQIRLLQTVPGVGPRTSETIVAVLDDPHRFKSCRQVCNYVGFTPRRYQSGEMDRTGRISKRGNPHLRMLLVQASWTALRYDWARQIYDRVCRGSSKRRNIAIVAVARHMLMRCWAMLRDEKVWQYNVEKAA

SEQ ID NO: 503663 - protein, 339 aa, unidentified
MEEVSIIGLDLAKRIFQAHGADRSGKCLFSRKLSRAQLLGFFSSQKPCIVAMEACSSAHYWGREIAALGHEVRLIPAHYVKPYVKRGKNDAADAEAICEAASRPTMRFVEIRSAEQHSQAMVFSSRDLLVRQRTQAINAVRGHCAEFGLSAPTGHKGYEALKGLIGEATDLPEVAREVLELLMASIDQLEGQIGVLEKKMAQLAKRDPVNKALMSIPGIGPITALAVKALGPDARGFASGRDYAAWMGLVPSQHSSGGKERLGKITKKGNRTLRRLFVICAGTVITSIARSRTVPDPWLAKLLARRPRMVAVTALANKIARIVWALQVKGGVYQSPMTT

SEQ ID NO: 503664 - protein, 319 aa, unidentified
MSKLTLDICWAEQALHVRIDNNSKGFIAFKKWCKTHAIHLEETLIVMEYTGGYEYRFLQFCDSQSIRYCRIPGLEIKQSMGMIRGKNDEVDSFRIGRYGEQRADELNPSKPLDKNILLLKQLLTFRKRLVRDNAGLQSTLKEREHMYGQLKKDTISRIIFKKIKSNTKDIKQVEQEIMKIITCDEAILLNYRIITSIKGIGKINAWMTIAYTENFTSFKDARSYGVYVGVIPFGHTSGTSIKKPKRVSHIAHKELKQELNQAAKTAIIYDPELRAYAERKLKNKAYRLVLNNVKFKLILRMFSLVERGELYVENYRRVA

SEQ ID NO: 503665 - protein, 405 aa, unidentified
MFCGIDWASERHTVCVLDDAGTTISTFQVAHSADGLEQLVTRLCRLGDPDELPVAIERPDGRLVDRLLEAGHPVVPVQANAIKAWRDAEVLSGAKSDPADAAVIAEYLRLRRHRLRILQPFSPQTRALRAVVRTRGDLVDQRVAATNQLSACLEAFWPGAKAVFADVCSPIALDFLARSPTPESAERLGETRMRAFLTKHGYSGRRPATQLLHRLRAAPAGLVGTPEVEARRDAVLALVGVLRALNHAIKQLDRSVAAHLGEHPDAEIFTSLPRSGQISAAQVLAEWGDCRPAYDHPDAVAALSGIVPVTKASGKHRTVSFRWACNKRFRAAITGWADNSRHASPWAAKVYADAVARGCDHPHAVRILARAWVRVIWRCWVDHTPYDPAKHGAARKLTKMPASAA

SEQ ID NO: 503666 - protein, 356 aa, unidentified
MTRLTGTVDGVIGVDTHRDSLAAAVTDPVGGVLAQTSVTADAAGYQQLLAFARAQVPGRRCWAVEGAGSYGAGLAGFLQARGERVVEVGRPERLARRTGAKSDALDAVRAARQALIEDHPLSPCRRGDREALRVLLATRHGACVAKVSATNQLKALIVGAPEELRAELRRLASRQQIARCAVLRDRPARSLEHRMTVRALRSTARRIQLPAAEAAELRAELERLVAAVAPWLLELPGVGPISAAQVLVSWSHAGRLRSDAAFAALAGANPIPASSGQVIRHRLNRGGDRQLNRALHTIVLARLRDDPQTRAYAARRRGEGKSIREVRRCLKRAVARQLFKLLERYSRVGVEVMYVR

SEQ ID NO: 503667 - protein, 349 aa, unidentified
MKNTTIAIDLAKSVFEVGISDRPGHVSRNCRLSRSELSSFLATQPPATVVMEACSSSHYWGRKFENFGHDVKLLPPLYVRPYVQRSKTDKTDVKGMLEAWRNSDIRPVPIKTENQQQLTSLHRVRSTWMAARTMRINSARGLLREFGFVFPAGAADLPDHVRSLIENADAPLPILLRDLLHELVLEIGELEARIQTVEKHLEALSRQTPVIERLRTIPGVGLLTATALVGFVGDVARFPSGRHFACYLGLTPREHSSGGRRSLGRISKRGDAYLRMLLIHGARAVLWGARSKTEPDRLRSWALDLQHRRGHNKAAIGVANKMARIIWAVWKSGTPFASRPRPLAKGEQV

SEQ ID NO: 503668 - protein, 331 aa, unidentified
MQKKEFFIGVDVSKLTLDVAVHGTKNHIRIHNSSEGFKQLPAWLKSLNIELSDCWFVLEYTGGYEFRLVQFCQSKQITFTRVPGLQIKKSLGMQRGKNDKIDSKRIAEYGYEKREKLKEHKVCDAAITRLKQLLTQRSGFIDDKKAHEHRMKELLAMMDFKANDPIIKNYKAAVDFALKMIDKTEKEIKKIISKDEAMSRNFTLITSIPGIGEVNGWMTIAYTQNFECFADGRTYGAYIGVVPFDHSSGTSIKGKARVSHMANKPLKADLSMGAKASVQHDPEMKDYYERRASLGKHHMAIMNEVKFKLVLRMFAVVDKGELYVKKVKKAA

SEQ ID NO: 503669 - protein, 465 aa, unidentified
MEKHYELFVGIDISKGKADAAILQVSNLRSVKPKFLRKKLSFKFTRSDVLSFLSAVRSKYDDNCTHVTFGLEVTGIYSNNVYNFIKSQLNDLEEIRFLNTEFVNKWRKTHNIAKSDPLDAQTISNIIGTDPDVRFVNHVAFDNEKGYQDLKALIHRYYQVKKTYSQEINRLISTCDVYFPELQYVFEPKSAAFPAILSSYPTTQDIINASKSEVFDCAYEATKHRVTFDKIDKLFNYCNDTLTDFNISYTSRSIILDLAASVKRLKSLLKELEKKIKVQASMFDVYELLLTITGCGPITAATVIAETGDISRFHSADKFVSYAGASPRIDRSGKSVETIGRISKKGSKYLRHALYMIAEFARRHNPVLKAQFDRIKNGNKKRHRLAVIAIANKIARYIYSTMKNKSSFIITYESLMRLSEVTRNTFFQNITTEFSKRIRRQIYQYSDVNGEIHQFVYIQNKDIEI

SEQ ID NO: 503670 - protein, 343 aa, unidentified
MQATIAVDLAKNVFEIAISRFPGKVSERHRLSRTKFLRFFAQREASRVLLEACGSAHFWARELQKLGHEVVLLPPHLVRPYRGRHKKTDRTDAKALLEADRNEEIQPVPIKTVEQRSVTALHRLRSAWMETRTARLNCVRGLLREHGHFIPLGAKKVVPKVLELIADAENDLPDPMRLALGEACEEIRDLERRCAGVCKQLEALASTTPAVAHRLSVPGIGPLTATAMVAYVGDISRFPSARHFGSYLGLTPRVHATGQRRRLGHVSKQGDEYLRWLLIHGARSCLLAAKRAPNSKPLYTWALEVEKRRGHNRAAVALANKIARIAWTVWKEDRDFTLVRQAA

SEQ ID NO: 503671 - protein, 339 aa, unidentified
MDQVNTIGFDIAKHVFQVHGTDAQGRVFRRKLRRKEVISYFASLPPSVIGMEACGGAHYWARQLQALGHEVRLMPPAYVKPYVKRGKNDAIDAEACWEAVGRPTMRFVAIKSEEQQSVLMLHRARDLLIGQRTQTSNALRGHLAELGIIAKQGRGGTDELLALVEGHEEGQLPELARTALLVLADQLRELRVKINKIEREIHAWHRSNATSRRLETAPGVGPITASAIVATVPDPSRFKSGRQFAAWIGLTPNEDSTGGKQRLGHITRAGDPYLRRLLVVGAHAVLRHSGNAKSAPTKWAAELLGKKPYTVAAVALANKMARVIWAMMMKGEAFRDAAA

SEQ ID NO: 503672 - protein, 429 aa, unidentified
MSYRIAGIDVHKKMLAVVVSDVEIDNEYQFERRKFSSNPEQLRSLAAWLLEQEAEEVVMESTAQYWKPVWGVLERYWKPICEKREGARRKSGTLHLAQALSNHGPRGRKRDFPDAERLVKRLVARELTLSFVPDAEQRLWRTVTRKKYQLRCDRIRLQNQLESLLEEAHIKLSSLVSDLLGLSARRMLKAIAEGEANPATLAALADERLRATPEQLCDALGACTELNAVYRRLLKMALEELRLIDEQIGRLDQEMASLLSEHQDAVQRLAEVPGLGVDSAQQIIAEVGPTAATFPSEKCLSSWVGACPGDDESAGVNHTHRSPKGSRHMRRLLNQAANAAARTKGSIFEIVYRRSVPRLGHNQAIGAIAHRQCRLIWLILHQGVRYEERGPAVTKRSKQLRTWKMIRQLRSLGYRIEPPNPQPSQAQVQ

SEQ ID NO: 503673 - protein, 341 aa, unidentified
MKQYVGLDISMEETSVCVLDQVGGVTFEGCVPTDPEAIAKLLRRHASNAERIVFETGSLSNWLWHQLRALGFPVICLDARHASAALSMRINKSDQNDAKGLAELARMGWYREAAVKGTESWRTRSMLAARNKLVDLRRDLDNQMRGLCKGLGMVLGRAGSINLARKVNAVLAEAPDLQDIFAPLLLAQSCLTEQIEKLDRELVAMAKDDQTVRRMMTVPGIGPLTALAFVVTIDNPARFRHSADVGAYLGLTPRRYQSGEIDRTGRISKRGNHQARTYLFEAANVLLTVVRQGSALKRWGSKLAKRIGTKKAKVALARKMAVILHAIWTDGTVFQAEMRGA

SEQ ID NO: 503674 - protein, 554 aa, unidentified
MKVLHVLAGIAGAMIVAGATLGDRQLLYNDSPSVPLGFWYRTSTDDVRPGKVIAFRPPEPARQYVEDVLRRYLHDDLLKPVAHRERSVWGRHDPDGDKAAERPLAPSGSVMAGQQVSKVRLSRQHFGGRPTMTKRFSTHTDAVLVAIDMAKNRQEVLVERPEGGRRRRMTVLATKADYDGLVEQLTAIGRPIVVGFEATGNYHRTLAHRLLAAGFELRLVSSVALARTREALHNGWDKNDPKDAQVILHMLRIGATQRYVDPLVAGMNDLQELSKTHEVISRAKTQTWHRILTHYLPLYFPEIARFAGNSRSDWFLALIERFPTPASITALDREAFSAAAWPLVGRKVAKARLINDIYETARASVALPVAEDSIAITMFRMIIAQGRGLIRQRDEIEQLAHTVLADDVDYQLLRKIPGIGPINALTILAEAGDLRRFSHHRQFLKFCGLDLATCQSGTFRGRTKLSKYGNARLRRTFWMAAQVAARQRDNSFRDKLGRYLAGHVDDADRRRKAMTALTAKMARVAHAVIKTGTEYRPFLERPDARWKDPSLRVP

SEQ ID NO: 503675 - protein, 427 aa, unidentified
MSKIRSTQQEPEFAAFIGIDWADQKHIWSLQTADSEQRESGELEHTPEAVESWVAHLYQRFAQRPIAVAVEQSRGALVFMLSKYEPFHLFPVPAQMAASMRQALYPSGAKDDPRDADLLLDLLVQHRNKLRRLSPDSEATRRVQNLVEERRKLVDEKTAQINRLTDHLKVYFPQVLEWFGRLDTELVCALLVRWPALEELQKASPASVRAFFRKHRCRDRERIEHRMEAIRRALPAIQDRAVIEAKSAVVKVIVQLVRILVEGIEDLDGQIEEAAAAHPDFFIFNSLPGAGPVMAPRLLAAFGSQRERYRSAREIQSFSGIAPVTESSGKRKWVHFRWACPKFLRQSFHEWAGHSIVQSEWARVYYHQQRSKGNTHHAAVRALAFKWIRIVFRCWQDGVAYDENTYMAALVKRGSPLGAGVATGKTL

SEQ ID NO: 503676 - protein, 329 aa, unidentified
MSNLLKKVIGVDVGSKFLTLSFLDDEKGEQVLNLPNNERSILSFLSKISPSDYCFVIEATGNYSSRLLHFSIGKGFESSLINCMSVKHFARMKNIITKTDAEDAKLIRNYGEMFRPEFYIPKTQDIEYLDQEIKLLNDLEEEKRRYAVKLKALRFHPVLNPSTEKHYEKRLKQLEKEIKEVEARLPQLQDEEFTETKNLLQSVSGIGEKTSLQLMTATSGFKNFHSSKSLVKYFGLAPRIYQSGKKSYSPGKCRTSKTYIRSILYVCSWTAIKHNQKCKELYLRLLEKGKAKKLALIAVCNKLLRICFSVVKNKTAFQQDFQNKLKILT

SEQ ID NO: 503677 - protein, 415 aa, unidentified
MEQIFMIKENYMYVGIDLHKETHTAVIIDCYNQKLGEITFPNRPADFPKLVTKVKKCNTDGKEVVYGLENAYGYGRALAVWLIDKGYFVKDVNTAISHRQAKHRGAMYRKSDSDDAKAIALATLNMLDKLPDACPNDAYWSLGQLVHRRDNIMKQRTRLVNQLHEQLCIVYPSYKQFFNDISRPTALYFWEHYPSRKYLKGKSVEDLRAELVPVSHNKCSTKTCEKILDAIAGDKVKNNAYQDARDMVTLSIVSDLQHYDKQLAEVDKMLEQMYKMLGCTLTTIPGVNVITAVKILAEIGDIKRFSNANKLAQFAGIAPLHLSSSGKGKDVATKQGNRRLQATIYFLAIQMVQVSSKGTPRNSVVRAYYEKRKAEGKTSQQALICISRRLISIIYGMLKHGTEYRMPVVESAGEK

SEQ ID NO: 503678 - protein, 365 aa, unidentified
MLHRTSIGLDVHARSIAAAAFIPETGEVLQKSFGYDADAVVSWAKALPQPAWCVYESGPTGFDLKRKLDESGLECLVGAVSKMIRPSGDRVKTDKRDAVFLARMLAVGNVVECRMPDAATEAARDLARIRADCREDLMRARNRLSKFLLRKGIVYEGGKSAWTRAHSAWLSSISFGDPCEQLVFQECCEDVRALTLKRDRLDGAIAKRAGQNDISATVKALECLRGISTVTAFSLVAEIGDFSRFPDAKSFMSFLGLVPSESSTGGHVSRGKITRTGNKHARTLLVEAAWHHARTLKPLSRASLEGAPGVPAAIAEEAARANMRLHGRWTHLRSRGKSGAVANAAIARELAGFVWSIGRMAQAGS

SEQ ID NO: 503679 - protein, 361 aa, unidentified
MKKVSRELPKMEAGLVKPEMTVGLDLGDRYSHYCLLNSDGEVVEEGRVQSTEASLRRHFEGEDCLRIALECGTHSPWVSRLLNALGHQVIVANARKIPAITGSESKNDRNDAEKLARFAAFDPKLLSPLEHRSEERQVDLNLLHARSTLVRARTMIVNALRGLVKSAGGRLPTCSTESLPARVLAVIPPALSAVATPLVEQIVLLTAQIDGMDKQIEKLSAKYPEIVLLRTAPGVGPIVAAAYVLTLGQPDAASNRSAGAFLGLRPAQSQSGAADPQRRISKTGDSFLRSLLVQSAQYVLGSFGPDSELRRWGLKLAATGGKRGKKRAIIAVARKLAVVLHALWRSGQRFQPFPQQVALAA

SEQ ID NO: 503680 - protein, 317 aa, unidentified
MGGVNAAIEVGKHELKVCLGSEGELFSEPNQPRAINRIIKRLSSAGCARVLIEGGSYQSVLIAALRAAELPVVIVNPRRVREFAKSIGRLAKTDEIDARVLALYGERTEPPLRELADEQTQSLRTLSVRREQLIEMLVMEENRLEHVPAKAKAVRHNLRSHIDYLRKQIKQADDDLDREVRNSPLWDKYEMLSSVPGVGRVLSVALLSDLPELGRLNRGEIAALAGVAPFNCDSGTLRGQRKVAGGRTRLRRALYMAAVAAVRCNPVLKPFYLRLRAAGKPGKVALVAVMRKLLLILNAMLKTNTAWRALSCPNANS

SEQ ID NO: 503681 - protein, 413 aa, unidentified
MEVLYPRCSGIDVHKRFLVACLSLVQTNGHRHKELRQFSTMTNEILMLKEWLKASGCTHIAMESTGVYWKPIFHLLEGEFEIVLVNAQHMKAVPGRKTDVKDADWIADLLQHGLLKASFIPSGEHQAVRDLTRTRVRLIQERTRLINRIQKVLEDANIKLASVVSDLMGMTGQAIMTALLAGQEDPERLAHLARGSLVKKQDELQAALEGKLMAHHRMLLEELLHLIATLDRSIARFDREIAERLRRFDALISRIDAVTGLSRRSIEVLLGELGWDMSRFPDAAHAASWVGICPGNHETGGKHLSGRTRQGNRWAKTALIQAAHAAGHTQTYLGEQYRRISARRGAKKAAMAVGHSILVIFYHMVKTGESYHEKGVDYFTDVNKQKIQQRLVRQLERLGNTVILQPKAETTLA

SEQ ID NO: 503682 - protein, 403 aa, unidentified
MNMNAVGIDVSKGKSMVAILRPYGEIVSSPFEIKHTSGNIHSLVEQIKSIEGESRIVMEHTGRYYEPLARELSLAGLFVSAVNPKLIKDYGDNSLRKVKSDKADAVKIARYTLDSWTKLKQYSLMDEIRTQLKTMNRQFGFYMKHKTAMKNNLIGILDQTYPGVNTYFDSPVREDGSQKWVDFAATYWHVDCVRKRSFNAFVCHYQQWCTRRKYNFSQDQAEEIYRAAKELVPVLPKDDLTKLVLKQAIEQLNTASKTVEELRALMNQTASKLPEYPVVMGMKGVGPSLGPQLMAEIGDVTRFTHKGAITAFAGVDPGVNQSGSYEQKSVPTSKRGSAPLRKTLFQVMDCLLKTKPQDDPVYAFIDKKRAQGKPYYVYMTAGANKFLRIYYGKVKEYLASLPQ

SEQ ID NO: 503683 - protein, 355 aa, unidentified
MNQEKYIGMDVHAATISVAVMNAQGKLLMECVLETKAGTIVEFIQGLRGTLAVTFEEGTWATWLHDLLKPHVSRLVVCDARKNALMRDGNQNDRVDARNLAELLRTNQVKAVYHEKHGTRALKELGRSYLTLTQDSTRVMNRIKSVYRSWAIPCGGTKVYSRAHRGEWLAKLVEPGVRMRAQHLYEQLDSLQPVRQAARRELLRESGKHAAVKLLRQIPAIGPIRAALLVALLQTPHRFRTKRQLWAYSGFAVETYDSGEYRFVRGKLQRNRERITVRGLNHNHNHDVKNLLKGAAISAMERPGPLQDFYAALVEKGIRPSMARLTLARKMAAIALTMWKKGVSFDPKQLQPPAA

SEQ ID NO: 503684 - protein, 338 aa, unidentified
MGTYAGIDLHSSNNYIGIMDQDHQRLFGKRLPNNLEKILMVLEPFKADLQGVVVESTYNWYWLVDGLQEHGHRVHLANASAIKQYEGIKHTDDKWDSFWLAHMKHLNILPEGYIYPKEQRAVRDLLRRRLFFVRHRTSNILSLQSTITRNLGIKMSSDEIKKLNLDDACDLLDSSNLVFMAQSNISTIKHLTEIIKGIEKQVKSQIKLRKDFAMLTTIPGIGLILGLTIMLEVGDIGRFFKVGNYASYCRCVDSKRLSNGKKKGENNKKNGNKYLAWAYVEAAHFAKRYIAKAQRFYQHKMAKCNGAVATKALANKLARASYFIMRDHVPFDEDMLFR

SEQ ID NO: 503685 - protein, 350 aa, unidentified
MELHTIGIDLGKTVFHLVGLNPCGEVVMRKKFSRKQLLHFTANLQVKLIGMEACGGSHFLGRALREQGHEVRLIPAQYVKPYVKTNKSDYIDAEAIAEAVGRPKMRFVPIKTDEQLDLQSLHRVRERWVMRRTAVINQIRSLLLERGITLRQGRRHIDAALPGILEDASAQLSGALRVLLAQLKLELDHLQMRIDEADAVIQKKAGENEACRRLVAIPGIGPVTATAIIAAIGNGAAFKKGRGFSAWLGIVPGEYTTGGKQKLLGISKRGNSYLRRLLVQGARAVLQQSAKQSSGLSAWLAQLTTRVHSNVAAVALANKLARIAWAVLTKNEPYRPPMLVGAATECLACR

SEQ ID NO: 503686 - protein, 348 aa, unidentified
MAKIARVGVDTSKSVFQLHGVDAGEKIVLQRKLRRREFLAFFGKLEPTSIGIEACGGSHYWARELQALGHEVVLIPPQYVKAYVARGKNDAADAAAICEAMSRPRIRQRLVPIKSAEQTAAQMMLGIREGLVRRRTQLANTIRGHAAEFGLVTARGIDKIELLLALIADDAAVPALAKEMFAVLGQEFVELRARTAWIDKRLKAFHRDNELTQRLATIPAVGPIGACLLATKITNPHGFRSGRMCAAWLGLTPKDHSTAGKQRLGGITRAGDESLRAVLVSGATAYIQQVKRGRTTPSPWLAELLKRKAPKLAAIALANKTARIAWKLMTSGQRYDRGHAAAPAAAIA

SEQ ID NO: 503687 - protein, 432 aa, unidentified
MSFAALDLHKRIVEAVILDHEGNILRRDRFPATREALTEFARKHLSAETLLAVEATTNTWAVVELLEPYVAEVIVSNPMRTRAIAFAKIKTDKVDALVLAQLLRADYLPRVWYPDPETQTMRRHSTSRAVLVADRTRIKNRIHSILHHRLIPNPSGDLFSKTNLGWLAKLKLDDDGRESLERYLRLLTQIEEELEACTDKIAAHAYQHPGVKLLMTIPGVDFCVAETVLAVLGDFTRFPDGDHAASYLGLVPSTRQSGEHCYHGRITKQGSGHARWMLVQAAQHAANNPGPLGVFFRRLAKKKNRNVAVVATARKMVTIAWLMLKNNEPYRYSISRATDAKLSRLRIRATGKKQKGGFPKGSQRPEAYATGKATRAVRSIDAVYEKEGIPPLGPQSPGEKKMLAAKDLTAFATEVRTSKRVPRKSRAKRHQD

SEQ ID NO: 503688 - protein, 353 aa, unidentified
MDLGDRRHRFCVLDGKGEVVEEGTLSNKRESLSELSRRYRRALVVMEAGCHSPWISRHLEGAGCEVVVSNPRKTRAIYQHERKSDRRDALMLARIARMEPALLYPVQHGSAQAQHDLLRIKLRDSLVRARVGVINSLRFTLKSLGYAIANPSTERFHKVIQEQVPESVGSVIAPSVQALKELSLRIKLLDREIATLARSKYPETTWLEQIPGVGPITALYFVLKIQDPARFERVRDVGAFIGLCPRRDQSGENDPQLRISKRGDAYLRRLLVSAAQYILGPFGPPSALRQYGLALASGGTPRAKKRAVVAVARKLAVLLLTLWKNKSVYQAFPLSRDREKMRTSDLERLRCIA

SEQ ID NO: 503689 - protein, 321 aa, unidentified
MASLVIGIDVSKDALDAAAGPAGPARRFPNDLAGIADLVAWATGLTPDRVVFESTGSYQKAAVGALLAAGLPAVVVNARQVRDFAKGLGRLAKTDALDAAVLARFGEVVPTTVRPLPTPAVAEFQQQYDRRAQLVRMLAAEKNHRHAHAQGSAKVRKNIDAHIAYLERQIRGLEGQMDAFVEATAAYRAKDEILQSIPGVGPQVSRTLLAHLPELGTGTRQTLAALAGLAPYNDDSGTQTGGRHIVGGRAKVRIGLYQAAVVAITHCPEMKAFYARLKARGKASKVALVAVARKLLALANALLRTMTPYQTRANSVGPKTA

SEQ ID NO: 503690 - protein, 346 aa, unidentified
MDQFVGLDVSQEMTHLCVIGGDGKIVWQGKCFSTPEEIAGTIRSKAPDVVRIGLESGPLSTWHWHALKATGLPVVCLDSRHAQATMSGQVNKTDKNDAHGLAQIVKAGWYREVGVKSLDSHEVRSMLGARAQLVGMRVEVTNQIRGILKTFGTVLSRRTGEPFERLVDEACGANDSMLSQTVRSMLSVYSCLKEQIRQLDRRLLSRARESAVCRQLMAVPGVGVLTALAFVTAVDDPSKFAKSRSVGAYFGLTPRCYQSGEIDQNRGISKCGDGLVRTYLFEAAGTLLTRVEKWSAFRAWGLRLAKRSGLKKAKIAVARKLAVIMHRMWVDGASFRWTAAEPAAAG

SEQ ID NO: 503691 - protein, 348 aa, unidentified
MTMVCGLDLHRRQITFDAVDVESGQVWSGRVWQPDRERFRRWLRDDVTARAGGGAVSIAVEGCTGWRYVVEEVVAAGFEAHLAEPADTQAARGRKRHAKTDRTDSRLLRELLADGRLPASWIPPTVVLEWRERVRLYKTLVDQRSTWVQRIHAELYHHGVALPETSIRWARTRELLEDDGLEISPAGRQRVLTAYRMIDAITVESRPLKADLQRFGRRQPGCRALVDSQYGIGGLLAVVMWSELGDCRRFVRSEQVVRHSGLDVTVDASDRRRAGGFLSRQGPQTLRWALYEAAKNASHQRSPDHDYYADVKEHLNGKLATISMARKLARRCFHVLRAVDPDVIYATP

SEQ ID NO: 503692 - protein, 338 aa, unidentified
MTSFVGVDLHRNNFTYCIRENGEEKKIGKCEISELKGFASLLGKDTAMAVEATGNTFMFCRFLKAHVGRFVVVNPSQFKVISTSTKKTDKHDAKILAEFLEKDMLPEVRMKDDLQAKISSLTQTREKLVQLRTVLKNKVNNLLAANFIVLKREELSTETGLRKALSFHFDPITDTELFVVVEQIRSLNQSIEKLDKTIEDHGSKMDGFKNLKSIKGIGSKGAATLLSTIGNIHDFRSSKQLAAYIGIVPRVSNSNDTVCHGRITKNGSKIARTTLVQCALIAKRYSPYLHAFHESVKSRRGGAKANIALARKFLDIVYRTLKNNWMFEDFTQFKLVKN

SEQ ID NO: 503693 - protein, 282 aa, unidentified
MNHTAVGVDIAKSVFQVYWVDPHAGEVVNKAVKRDRFLVSFTNREPCLIGMEACGGAQHWARQLTKMGHQVKLMPPKFVKAFNIGNKNDPADARAIWMATQIPSKPVAVKTEAQQAVLALHRMRQQLVKFRTMQINSLRGLLAEYGEVMARTREALDKAIPEILAKLSDRLPAMLIDTLREQWNGLAGLDRQIAGIEQRLQAWMKDDVACQTIAAIPGVGLLSATAAVATMGDATAFRSGREFSAWLGLVPKQTGSGGKVQLLGISKRGVIFRHIGANQLPA

SEQ ID NO: 503694 - protein, 350 aa, unidentified
MNVNHYIGFDVHKKSVSYCVKTADGKIVDEGKLRATHDVLRQWAGGRPEPWRGAMEATLFSGWIYDTLQPFAAELQMGHPALMKAIAASKKKNDKLDARKIADMVRCNLLPACYVAPVEIRELRRMLRYRNLVVGQATRLKNKMSGLLMEVGAEYNKQRLHGKQYFTELLDTVAEVPESVKDLLRLSRGAMETFETTQQQLLARLRKEPLLSRRVMLLESIRGVGEVTALTWALEVGDPHRFSSVAHAVSYCGLTSALVSSADKQQRGPLSKQRNAHLQTVLVEAAKLAPRWNPQLAALHARELARGNRNRATLAVARKLVAYLLAVDKSGQPFEVRSAPATETEAQAVA

SEQ ID NO: 503695 - protein, 342 aa, unidentified
MGDYIGIDLHKTKSFVTRMTAQGHILEQVNLLHTTGALQQYLTALPADVHLAVEATGNWMWLYEQIEDRQLDLVLAHPLKVRAIASARIKTDKIDATTLAHLLRTDLLPTAYIPPRPIRDQRERLRYRASLVRLRTQVKNKIAAILTKTGVRTPTKTAFGVKSRRFLATVPVRACYRLALDGYLRELEHLTIEIRGADQVIADHVTADPQAQLLCTIPGIGAYSALLICSEIGDLHRFPDSRHLCSYAGLVPSVHASADTTRVGRLTKQGSSWLRWILVEVSVHAINGAPQFRSLYHRVAKKHGHNVGRVAVARALLKTIYAMLTTQQPFRPIRRRGSPVSA

SEQ ID NO: 503696 - protein, 419 aa, unidentified
MKVEYGNVAEDAVWAGVDTHAATNWLSVVDARGSELFSGEFATDPEGYRKLCDEIRRLGSPVAAGVECTGTYGAGLVRAMAAYGIACYEVITPGRPRRGPGCDKDDAADALRAAKQALSGENLAVPKSQDGWVEEVRNMTVAREELVKQCTSLANLALATVRKGPDEIRARLERLGTAKMMGVLAGWDEAEADPICDAVMFSLAALGRVWAEARRSARLLEERIERTLKAGNPALASMYGCGPISAAMLAIAAGDNPERMGSEASFAALCGVSPIRASSGKVERHRLNRGGNRNANKALHIIAMHRMRTDPRTTEYVERRRAEGLSDREIRRCVKRYIAREAYRLIMHPYDVPIEGKGPEMRAERIASGISQKDAAIALGVTASTLCDLELGHHQFRELALRYRQWIDDGFPLEAGIAS

SEQ ID NO: 503697 - protein, 409 aa, unidentified
MRYYLGVDWADQTHAVWVVDERGTKVAMRTVPHTAEGLSEWGRELDEWRAQGIELWAAIERPEGRVVDFLLDHGVVVYPVNPKALDRARDRFRQSEAKSDPFDARVLADFLRTDHLHLRALQPSSEAAQELKLLTDDYQRQIRQQTRLVNQLTTTLKAYYPRGLEVAELTTALAREFLQAYPTPAALTALTERQWQRWARAHRLSEARTQELWAVLQRPQLPVPAHVVRAKGRLMQSLVAQLTLVVEVVGAYREAIEDFFARIPAAQWIRTLPIGDHGITAPTLWARLGDAPGRWESFRHLQAQAGTVPVTIRSGKQQVVRFRFACDKSLRYVIDHVAFLSLRWSEWARAYYDEQRARGHSYRQALRALSAKWLKIIFIMWERHVPYDEQYHLATMTRQQLRLRQKKLA

SEQ ID NO: 503698 - protein, 351 aa, unidentified
MNINHYIGFDVHKKSISYCVKAPDGKIVEEGRLRATHRVLREWAQQRTEPWHGAMEATLFSGWIYDTLKPFAGELEIGNPAMMKAIGAAKKKNDRLDARKIADLVRCNLLPGCYVAPAEMRELRRLLRYRNKVVDHAVQTKNKMSGLLMEVGAEYSKQRLHGKRYFTELMGELEEVPESVKDMLRFSRNTLEMFEATQRQILDRLQKEPLLKKRVKLLQSIPGVGEVTSLTWALEVCDPRRFTSIANAVSYCGLTSALDASADKQKRGPISKQRNPHLQTVLIEAAKLAPRWNRQLAELHEREVKTGHRNRATLEVARKLVAYLLAVDKTGKPFEIRNQPVRSTGEETKVA

SEQ ID NO: 503699 - protein, 375 aa, unidentified
MKEKVRFLGLDVHAETIVVAVAEADGSVRSLGTIANRIESIRKLVKKLGPVEQLKACYEAGPTGYVLYWQLAELGVKCEVIAPTLVPMKAGDRVKTDRRDAEKLARCHRAGDLTAVWVPDAGSEALRDLVRAREAAKQDQLRARHRLSKFLLRSGQRPAAGLKAWTQLYMAWVRQLRFQQVAQESTRLDYLHEVEHMAERVLRLEQAIAEAVKLASPELQEVVKDLQALRGIAQISAVTIAAELGNISRFESARQLMGYSGAVPREDSSGGRTQRGSITKTGNAHLRRIAVEAAWSYRLRPGVGPALRKRHEGVPEELKEIAWKAQHRLHKRYSRLAAAGKDQRKIITAVGRELLGFIWAIGTKAETVARQRMTA

SEQ ID NO: 503700 - protein, 362 aa, unidentified
MQSTTVIAFDQHAATTVAAVLLAGHRTPALHSLTSDSPTILRFVQRVQRHHGRVACCYEAGPCGFELQRALTARDIPCDLIAPALIPRRAGDRIKTDRRDAGQLAILYRADALTAIHIPTEQEEAARDLLRCREDIKGDLLRARHRLSKFLLRHGRRFTGTKKAWSKGHDAWLRAQTWPIAALGQTHHAYVRAVDEARARRRSVEDDLRTLLALEPLRPRVERLRCFRGIDDLTALTIAAELGDPRRFASAPRTMAFVGLVPSEHSSGTKQARGAITKTGNAHLRRVLVEAAWHYRHRPFVGAALRRRQAGAPATTVTQAWTAQQRLYRRYHRLRSRGKPSQHVITAVARELTGFVWAALVQ

SEQ ID NO: 503701 - protein, 371 aa, unidentified
MGYATILGLDLGKFKSVCCVMNAATGTHAFATAATTPAALHELLVRLAAGADPAQTLLVIETCDAAGWVHDLAVALGVTVTVIHTSGDERRRWRRVKRKTDRDDALKLARLARLGELPQPPVHVPAPARRQHRRLVLHRRSVVTRRTQSRNAIRAIYNQQGLTLARGNKQWTRAGLAQLRADARPLEGCDDVDALDLWRGRLHAELALMDAADAQLRVLDARLDQLADTDPRVALLQTVKGVGPRLAEAVVLHVGDDPRRFRSGDHVASYAGLVPKQLTSGETVRLGHITGRGPALLRSLLVEAAWVVYRHNDWAQAFVAKTSRRSRARRKLAIVALARRLLILLWGMLKTNQPFRAPQVRTPKAAAMAMA

SEQ ID NO: 503702 - protein, 385 aa, unidentified
MQRNDLRRSLVAFDQNSTLVAVVELSLNRWVVQGLVPGLSKQPLKALGPDASALLALVNRWQLEGTKGGGRIKRIVVAFEAGRDGFWLARWLRSRGIEVYVIHATSIPVSREHRRAKSDRLDTELLMRALLGWLRGERKHCQMVRIPTIEEEDARRPNREHQTLVGERTRNVCRIKSTLVLHGIRDFNPKRLKASERLETLRCPEGGSLPPNTLAELRREMAQLRLISGQLREIEKTREERLKRAPRQGTHPMVLLLAKILGIGIETADMLVHEILSRELRDERAVGRYAGLTGSPYDSGAKRREKGMSRAGNARVRRGMVQLAWRWIRFQKDSQLTQWYNSRTESARGDIRKTMIVALARKLVSLWRYVTTGEVPVGAKLKAAA

SEQ ID NO: 503703 - protein, 402 aa, unidentified
MNCVGIDVSKGKSMIAVMRPFGEVVISPFEVLHTDSELSKLAGLLKSLDGETRVVIESTGNYHAPVAWLLHDAGLYVSVVNAMLVHDYGNNSLRRAKTDKKDAVKLANYGLDHWLILPRYVPEEDTRLMLKTCYRQYQQYSKVQTMLKNNLISLLDTAFPDANRLFTSPPRADGSEKWVDFVATFWHCECVCGLSKKAFTAKYQKWCRKHGYNFSQDKALDIYASACGRFGVMPKTNTAKLLVEQAISQLQTTSAALAALKQEMQSLAASLPEYPVVMGMFGVGPTLGPQLIAEIGDVRRFHSKKALVAFAGIDAPPYQSGQIDVRSRSISKRGSASLRRTLFLVMGVLLQCAPIDEPVYQFMNKKRSEGKPYRVYMIASANKFLRIYYASVKAYLDSLEHD

SEQ ID NO: 503704 - protein, 366 aa, unidentified
MTSMTDQALEVTGGIDTHGETHHAAVVDRLGRHLADQEFEATGPGYRKLLAWLLAQGTVTAVGVEGTGAYGAELARVLREAGLKVVEVDRPDRKTRRLKGKSDPIDAYAAAVAVASGRASGTPKTRTGVVEAVRALRVPRRSAVKSRTQAVNQARQLLVTAPESLRAPLRGLTAARLAKACARLRPGDDLADPLHAAKAALRRLGRRILALTEEIDELEAELKTLTAQAAPELLALQGVGADVAGQLLATAGDNPDRLHSEAAFAHLCGVAPIPASSGRRDRHRLNRGGDRAANHALHTIVLCRLRWDERTRIYMERRTQQGLSKKDIMRCLKRHVAREVYRVLMRSLDHRSTSRQTTQGDLTEAA

SEQ ID NO: 503705 - protein, 389 aa, unidentified
MRKAKTSGPGPSHLLMTPDHAGNVVGIDPHKRTLTATVADARGGIIGTAHFRVSGEGHRELEAWARQFGQIARWGVEGSASWGRHTAMFLTGRGQDVRDVCPNRTSRSDRARQRGKSDLLDSERIAREVLAHPLLPKAFKRAGQEHGPDERHQLLALWHNRRRSILTSRQHLVGEAEALLCDLPLALSEQLPDIKAVKPRLAALARRNRRRRYDAPTRLRLQLLDGYRTQITALDLEERHVVAQLNVLVRESGSTLGELCGLSTRSVAELLVEVGDPRRFTEGGFARFNGSAPLPASTAEGPGEPVRHRYNPGGNRRVNSILYMMAVTQLRCEPRARLIYENARARGHTKKEARRVLKRHLSDVIYRRMIRDLAAADRASLSAQPLLAA

SEQ ID NO: 503706 - protein, 340 aa, unidentified
MVHVGVDLDKRSSQIAVLTDDGEIVQQRLANDAVRLTNFFSQLPPQTPIAIEASGTWWWLVDLLERLGHQPVLSNPKQTKAIAAARLKNDRVDAERLALLLRGDLLPRVWIPPTTLREARELIRHRIQLVWLRGVIRNRLQAMLARRNLQPTSGKSWLTQRGQRELQRLPLGETPSRIREDCGALLPTLDAQIRRLDADLVTRWGADPRVRRLTTIPGIGPFIAIVLVLELGDIERFASAKRVASYVGLTPRVRGSAGRVRAGHITKEGNRLLRWVLVLAATQAIRRPGPLRAWFHAVKKRRGKKVARVALARRLAEIVFHVWKQECDYFTVVRHGVVRG

SEQ ID NO: 503707 - protein, 465 aa, unidentified
MITVEEEFVQDIKKFKKFGIGIDVHKEFSIVSVFSSNPHDGIHPDYEKTDRFQMTPQGLAEMIQYLSKFPAYVIGFESTGPYSLWVYKTLLTNAFPKEKLFCTNALFAKSLPGRKSDKIDAMNLAKYAFYGLLKASYIPEDTYQLLRRLTRGRKRVTKMMAAAENRIIMLLDRAGLRINHTIDLFAKYGLDFLVDLANGTSLQQFLATCPSNAHILQYKDQLLPFASIELLECEQEELKAALLEYCFLTKQVMEYERSLHNFIKQDGNKPLLGQMNILLSVPSIGPISAFEILAELGNLSRFNSLKKAQCYTGLIPSLVETGGKEKQTKILKRGNRHLRTTLFQCAQNFVYVLKNLSPPLREYITKLLTKHQKIKKKIKIVVAKKLLRICIALLRSGRTFESEAIIDPEKIRRRKEIKNGERQINYFKRQISRLNEQFNFSFTTLKDMVDEVADFTKTHSSLRAA

SEQ ID NO: 503708 - protein, 396 aa, unidentified
MKAVSGLDVHKDTIFACILQKGEPPFVKEYSTLTCGINELKKDLIAKAVKTVAMESTGIFWMPVWKILEEHFKMILVNPYYIKQVPGRKTDVKDAQWIATLLHKGLLKESFVPDELLSELREYERGYVRLNSHETRMEQAIERQLIKCNIRITSFVSQIGGATVMKIVKAICEGEARAINLEKLVHGRIRNKHKEKILHSLQGVIRPSDRLILKQSYQQYQLIKEQQAELMEQMNKICHEHFSNEMDVLCTVPGINNLSSMQIIAEIGVNMKSFPTDKHLVSWAGLRPRNDESAGKIKSKKITHGNKYLRRVLVQCAWAASRTKGSWFQGKYQQLCVRKSEKKALIAIARKQLMICYHLLQTKQDYVVPIRILTDKQKERKVKYLQKQLDSLLNLG

SEQ ID NO: 503709 - protein, 491 aa, unidentified
MNSIFQRSNPAIEKIFAEAGSPKKVMCVPIDYAKKQHTALVCNGEGMQLRGVFNVHNTAEGVDFLEDIIKGLCKKHSIRKAHVFFGGEDCTAFCYNFIHALLERKYLGIGINACEGAEARQNQLASTDKLDLLGIASVLINKKHGRTLSTEYGQARLLRELTHQRDSLVKAHSASSYRIHHWVDQLMPGFLDAKKSGLEPFSDASLWLMSQNFSPRQLLARKSDVLAEKLQLFMLKNTDAKVAQIRQLARTTLPPPAGLTDTLQDNLAREVALYQHLNGTLHDLNQQTARRLAATPGAMLTTAPGIGIILASGLYAEIGEPARQRNIASMAAYAGLVSRLKQTGGPDNPARSLGRSRRACVPLKRRIIDIALSIGQYGADELKADYRRRDEAGQDVRFTMGRRMLRICMHLVQHQDFFLPPSLLAQHATEDRKAYYSKAWDTILIKWRNAGAIQQAFADGAPLEQWRTMLNELYKLNLSKLSPQYDRLRDR

SEQ ID NO: 503710 - protein, 370 aa, unidentified
MLNTTTFVGLDVHARSIKAVALDAMTGEVRSATFGYDAAEVAGWVSSVDPSAKCVYESGVTGFDLQKRLSSMGIDCVVGAVSKMIKPSADRRRKNDRNDAEFLARMLSVGNVVEVWVPDDECEAARDLVRALDDARDDLKRCKQRLSKFLLRHGRAFSETTPSGRRKGNWTAAHWAWIRSISFAERADDDVLAYYIDATRQAMEDKARLERLVEAEASKPRWKRRVDSVRCLKGVDVMSAADLVFEAGEFSRFKNARSFAAWIGLTPSEHSSGESVRQGGITKAGNKHLRRVLVESAWHYLGCSPHSKDLAKGQAPDPGARRHAAKGVRRLVGRRAAMLERGVHKNKANVATARELACWCWAIGCMVENG

SEQ ID NO: 503711 - protein, 341 aa, unidentified
MESISTVGLDIAKSVFQVHAISYAGEVVVRRQLKRRQVLQFFAGLRPCLIGMEACATAHHWARELMKLGHDVRLMPPRYVKPYVKRNKNDAADAEAICEAVTRPTMRFVPVKTVDQQSVLMLHRTRQLFIRQRTTLINSIRAHLAEFGIVAGIGRNGVEVLLEVIAKGDEDIVPAEARACLLALAAQLELVKRQIVEMDRRVLAWHRASGLSRSLEAIPGVGPLISTALVASIPDPKVFRSGRDLSAWIGLVPKQNSTGGKERLGGISKAGNHYLRQLLVVGALAVIRRAKQLGYTRHPWLVRLMERRSVKVAVVALANKMARIAWAMMARNEPYRATLPA

SEQ ID NO: 503712 - protein, 351 aa, unidentified
MKETITLGMDLGDRKSMICELDAQGQQVSMQSVSTTAAGLRKYLRDRSNCLIALEAGTHSAWISRLLDELGHRVLVGNPRKLRVIWDSDNKQDTRDAEMLARIARFDPSLLYPIHHRGERAQSRLTIVRARDSLVRARKVLVGSARGLVKAQGGRIGSCAAGCFHKRLLAEMPEVLEPALEPIARSLETMSEQIRHFERQIEKLGQEHYPETQVLRAINGVGALTSLAFVLSIEESSRFKKSRQLGPFLGLTPKRDQSGTTDKPLSITKAGDTYLRRLLVQSAQYILGPFGEDCDLRRHGLKLAARGDKIAKRRAVVAVARKLAVLMHSIWKNNSQYDPDYQLRSTERLAA

SEQ ID NO: 503713 - protein, 349 aa, unidentified
MRFYTSQHQFYCGIDLHARSMYLCIMDRAGEVLLHRNYRAEPDALLRAITPYRQDLVVAVECIFTWYWIADLCSREGIAFVLGHALYMKAIHGGKTKNDKIDSQKIAALLRSGMLPMAYVYPQGMRSPRDLLRRRLYLARQHAELQAHIQNTNTQYNLPYFEKRIDRNSNRAGIAMRFTDPAVRTSVEVDGALMDALHQQILAIERQINAQVPEHDPVALHLLRSIPGVGKTLALVILYEIHDISRFPAVGNFISCARLVKCPHESAGKRVKGTHNKIGNVHLKWAFSEAACLFLRKNERGKLYHQRLVSRYGKAKALSILAQKLGRTVYTMLKRRTPFDAKRFFETVG

SEQ ID NO: 503714 - protein, 334 aa, unidentified
MEKDHYIGVDISKRTIDVAIYVKNQVKKGTFPHETFSNSEDGFKDMKRWLRKQNAVLPKSLFCMEATGNYTYELCLFLEQQSVDYSIQSPLHLKRSFGLTHGKNDKVDASRIAYYAYLHRDDIKSSKLASDNVRKLKLLIAERKSLVVEIARCKAQLKEVGEHTPNTGTIKRTEALQEFLENQVKSIEEEMAQTIDADEKMRTNYHLLLSVDGIGVVNAINTIIATHNFEMFDNARQYASYIGVAPFEHTSGTSVRGRTHVEPGAKMLKADLTGAVRSCINHDKEIRKYYDRKMAEGKAFGVVANAIKFKLLLRMFAVIKRGTPFVRKPDFIYS

SEQ ID NO: 503715 - protein, 321 aa, unidentified
MMMNCYPFSQFLGVDVSKATLDFALADDKKSLSIKNTEEEIVSRLIGSIDNPQTTIVVMEATGGYEQLLVELLHRHGIALAVVNPRRVRDFADAIGRDAKTDPIDAGVIAFYAQVVKPQPLAAQSEDQKKLKALVERRRQLLDLINQENNRLQQTTDQEIRGYIQKSLETLKKQVKTVDQRLEKCVQADSLNARKIEILQSVKGLGPVAVSTFLAELPELGTLNRGQIAKLVGVAPLNNDSGQKSGQRRTFGGRSYVRRVLYMATLVATRFNPRIKVFYQRLLGEGKAKKVALIAAMRKLLTILNTLIKNDELWNQEKASV

SEQ ID NO: 503716 - protein, 320 aa, unidentified
MSASSVVVGIDVAKAHVDVSVLGARLDAQRFDNQAEGHSALTAALKPLGVALVVMESTGGYEIELACALQAAGLPVAVVNPRQARDFAKSMGRLAKTDAVDARMLAEFAAVLLRREDLARFLRPLADAQQQWLAALVTRRRQLLTMLHSERQRLQITPKGLHPSIEAIVAAIKAQLDDIEAQMIGHVREHFGELDRLLQSASGIGPVASATLIAQLPELGRLNRREIAALVGIAPMANDSGASRGRRRIQGGRFEIRRVLYMAALTASRRNPAIKTFYERLLAAGKLPKVALVACMRKLLTTLNAMVRTNQPWNNSLHGV

SEQ ID NO: 503717 - protein, 386 aa, unidentified
MMVIGVDPHKSTHTATAVDPHTNRAVASLRIDASLADYRRMLAWARQFEHRRWAVENAEGLGRHLSSWLLARGEKVVDVPTTATARVRQLSRGGGRKNDQIDAAAAASVAALQGESRPLEPESVTDALALLDESRTNLAQSRVRLVNQLHALLCELLAGGAPRDLSASTAAALLRRIRPAGDVERVRKQIAAGLITQIRSVDALLKSNAAQISERVAASGSTLTGTVGIGAITAGRLIGRTGRASRFPTSASFANYAGAAPVEVASADKARHRLSRSGDRQLNAALHTVAITQIRTPGSRGHAYYNVKIAEGKTAREARRCLKRRLADYIWRTMITDERRVAASPGGHLGATLKSSATGSAPTASSSDKSLPGPARPDSTTPNSAA

SEQ ID NO: 503718 - protein, 436 aa, unidentified
MEQIIIGVDPHKLSATIEVVDKHEQRLGSGRFTTDRAGYAAMRTYAKSWPNRVWAVEGANGAGRPLAQRLLEAGEQVVDVPAKLAARVRLFDTGHNRKTDALDAHSIAIVAVRTTTLRVLQVDGELEALRMLTDRREALTRRRVQTVNRLQALLAELLPGQAKKDITPMQAKGMLARVRPRDVAGKTRRRIAAEELAELVAVDAKIKTATAELKSIVLARGSHLMDHHGVGPVVAARVLADVGDISRFADRNRFASWTGTAPLDASSGEQNRHRLSRAGNRRMNHMIHIAAVTQLRLDTEGRAYYRRKRAEGKKPMEAMRCLKRRISDGIYRQLIADQQCPGTAKFETGPGGHCGASQESSAVDLPPHIDTSDQPLPGPANPTVPGTKRDANPCAASAPRPSRRRAGAVKVERPTGRTTLTATSAGAPSAAPKPPS

SEQ ID NO: 503719 - protein, 309 aa, unidentified
MKQEVVYCGIDVAKEQLDVALGPKRWQVPNTKQGVGQLVKQLKAERSKVHAICEASGGYEKAIVIALQKSALAVSLVQANRVRQFARAAGVLAKTDQIDAAVLVHFGRAMHPPPSAAQSEQIARLRELDAQRRHLSRLLSAEQNRLAQLSCAELRSLSRSLLSKVKKQIATIDARIATLIAQDQNLCVKAQKLTSIAGVGPRTAALLLAQMPELGSLNRAQAAALAGLAPFNRDSGSMRGKRTIFGGRRTVRTGLYMAAVTAARCNHILAPFYQRLCAAGKPPKVALTAVMRKLLLALNSALAPALNPA

SEQ ID NO: 503720 - protein, 311 aa, unidentified
MSDKTTVGIDVSKFALDVWIDTSERLIHLENSASGIAQLLNEFEGLHISGVIMEATSRYHSLAESMLISAGLPVAVINPRQIKNFARAMGKVAKSDPIDARIICEYGRRMKPEFRPVRDKGLQDMALLLTRRRQLVQNRVMEITRLQEKSGAWIEKGIMDHITWLNVQIDALDNEIKDQLNQNAALSPKRKILEKVKGIGPVTQAAILSQLPELGHLNRRQISALVGVCPYDRDSGQLRGKRAIWGGRSGLRATLYMAMLSAVRYNPRIKDFYTSLVARGKPKKVAITDCIRKFITILNAMFRDQKDWVYS

SEQ ID NO: 503721 - protein, 482 aa, unidentified
MKKRTIYQNQSQELLHLFEEAGSSTKVMCVPIDYAKKDHLAMFCNGHGNILRKPFSVKNSPEGIEYLVDQVTRSCRQRGIKKKHVFFGGEDANSFTENFVSTLRYKGWLVAGVNAHDAKKQRANLQASTDRIDLMGIATMLLNCRANCCPVQSGIYRNLRTLVRHRRKLVEMLTEVKNRVHGIVDRLFPGFLNEKNSGIVPFTQSSLYLMEDRFSPKQIRRRRREKLIEILKRFGTSKAEETAFKLQQYASQVLRAPVEHIDTLQLSLAQHVKHIRCLQESVAQLEKEMAVNLAQTQGAFLTSVRGIGIVLAAGVTAEIGDPNEQKPLNNLVSYSGIIPRVKQTGGSDGKTYTGKVAKRCNRILKDYVVKSALHLGLHGPQDLMTDYKRRDASGQHADFGIGRRYLRTGMSLMRTSQIYLPPWLRKDDVTMEERAGYYLMIWPKLREKWVKFGALEVAFAEDRPLGLWRQMVQELYDIKLKL

SEQ ID NO: 503722 - protein, 358 aa, unidentified
MNATTYGLDIAKHVFQLYWLDPETGEIHNQRFQRQKLIEFLAKREPGRLALEACGSGHWWARKLIALGYEVKLLHAKFVRPFVQTNKTDAADARAIWTAAQQLDIPAVTPKTVEQQATLLLHRMREQHIKMRTMMINALRGALYEFGLSFKKGRQAGLAEMRERLAEVEEDVPARMFEALREQFDLIGRLDKGIEGLEGQIKAWSQTQPECQRLMTIPGIGMLTATALVATIGDARGFRSGRQLSAYLGLVPRQHGTGGKVRLGAISKRGDRYLRMLLIHGARAVLFRAKDKGLWCEQLARRRPTNVTVVALANKAARTAWAVLMGNEPYERNHELKKAERTKQTANSALGQLRLQRP

SEQ ID NO: 503723 - protein, 549 aa, unidentified
MVTNSKIGASGNTATVGKNGANGNIGTIRKRSRSQKFRTNVLGRPQGVIQARVQAVGPEKFGVVAIDCAKVRSKWMLADFYGKVLCQPTVVEHNRSAFDLAVLTLKQAVEKHGLKDLMVAVEMTGTFHKPPMRAFRKAGYETRLVHPFASSFYRQPEHGDDKTDDNDLSAIFRAAVNGFGLLEKAIDPTFQQLQILARHRRDLVRKRAKLQCQIRHHLELTLPGFAALFPDDELWSQATPVPLLEVIAERGGTVDVLRNAGQKGITQWLATARVRAHSKTIERITVWAANAAESDPMAAFHTRVWLSQLTDWKQKTQQILEAERDSAGLLAKTPYVLLLSHPGINVISAAELAGEMGPIENYASSKAVCGRAGLFPSRYQSDEVDRGGKLTRFRNARLRAAWMMVADNMLKCNMYWMKKAEKWRRDGHKPQDLRARVANRLTRSVFQMVAGREIYRHASRLDRGYVMDKLLAFHREHHTSPAVIVRDLKQAAEQLPKSCQPEERTRLQEAALKAQRSRQKGPQELGTLLVAVLARLGVAAKDNDTLEST

SEQ ID NO: 503724 - protein, 408 aa, unidentified
MEIIFPRCCGLDVHKLSVMACAVTPEGRETRTFGSMTKELLQLKQWLHELGVTHVAMESTGVYWKPIYNILEDNFTLLVVNARHLKAVPGRKTDVKDAEWIADLLRHGLLRGSYIPDRLHRELKEVVRYRRVLIREQSRIISRIQKILEGANIKLSSVASDVVGVSGRIILQAMINGIEDPKELAAMAKGKLRKKMQSLEDALQGQMGSHQRRLLESELDHLDFLDRKIIKLDVDIAQRLQPYEHMLEQIDTVHGIGRRAAEEILVEIGPDVVSRFSNAHHLASWAKVCPGNNESAGKRRSGRTGHGNPWLRSVLVEAAWGAVRVKDGYFAGFYHRLAGRRGKKRAIVAVAHCILVTIYSMLKHNTCYQDLGVCFHDLINPQRVIRRAIDRIERLGYKVTVDALAPSS

SEQ ID NO: 503725 - protein, 420 aa, unidentified
MPATFSIPRTNDLERAMTAVMIGVDPHKGSHTAVVIGPAEEPLGEIRVRASAGQAEKLAEWAAAWPERTWAVEGAAGLGRLLAQQLVAAGERVLDVQPKLASRVRLLQAGDTNKNDPNDALSVAIAALRSRTCRQVAAEDHPAVLKVWSKRHRDLARLRNQVACRLHAVLCDLVPGGTSKQISAAQAARILGQITPSGAAGLARAELAAEFLQDMRHLDAQLRGTRKKLAAAVKVSGTTLTEVFGVGPVIAGTIIGDIADVSRFPGRDHFAAYNGTAPVEVSSGNHKIHRLSLRGNRRVNHAIHMAAITQIRHKHSEGRTYYEKKLAEGKTHKEALRSLKRKISDAIFARLQADARQAAAARAKGPGGHPGNDSASSAAGSHPARQLFGQATPGPGTSLRPGTTTGTPPKPVSKKTRPTT

SEQ ID NO: 503726 - protein, 394 aa, unidentified
MKLVGIDVGKNSHHFCVMDKETGEFNVTPSSFSNNKEGFDFLINSLKPYSKKSILLGMEDTGHYHVALLKFLLSNGYTVALINPKTTDLTRKMEGGITKNDKLDTITICDVLDTPERKKQYRITKVDRFDLYEQRQLTRHHHNLKEELNIYCNRLQKSIDLVFPEFNTLFSSKYGVVYMNLLKTFGSAEAIASTDIRTIRKCFEIKGRGGRISLTPEKLKECAKNSIGISSEVETIQIKHLVSQITLIKEQIAEIDKKIEEFSITNNSPILSIPGISHFSGTSILAELGDIGNYSKPSQIIKFAGVAPYHYESSQYNAQHTAITKKGSKYLRKTLYQIILPVIKYNPVFKKYYLLKISQGKGHRCAQGHCIRKLLRIIYHLLETGQSFDPALLR

SEQ ID NO: 503727 - protein, 400 aa, unidentified
MMCASRRLAPHNVHAASSSTPPEAIDAWVTTLRTRFNGQPIAICLELNKGPLVSAWRTYDFLVLFPINPLTLARYREAFTPSRATDDPTDAALQLALLRTHRDTLQPLHPQSPTMRALAQLIAHRRRVVGDTVRITNRLTRTLKNYFPYVLHWFQEKDTAIFCDVLSRWPTLKAVQLARRATLATCFRAHHVRYADVIAQRIHAIKSATPLTTDAGVMAPPALLVQALVAQLRVTVQAIAAFDTTIAQRAQSHPDFPLFQALLGAGPVFAPRLLVAFGAQRARYAAAAELQKYAGIAPVTERSGKKAWVHWRLQCPKFLRQTFVAWAAESIRHSFWAQVYYQQQRDKGKAHQAAVRALAFKWIRMLYRCWQERTPYDASVYLQALNNRGASLLQNLGHQS

SEQ ID NO: 503728 - protein, 419 aa, unidentified
MFKIYRKNCCGLDVHKTWIYACIGITDANGLAEYKQARFSSFTRGLRELADWLAKHGCKDVCMESSGKYWIPVCNILEKTCFVTLAHPKYTKPQRGNKTDRKDAKWICDLFMCDMIKPSFIPPPNIRHLRDLVRYRFKLTNCLTGEKNRALNCLTVSNLKLDDVFSDVFGKSASSITNYMLEHPGEHFDVAPFVDRRCKHPMEEIQAAVEGSISQEQAVKLREVLRHIDEIRTHKQNIETEISSLVTPFQMLLELMRTAPGFSADPMTSVMVLSEIGGDMSVFPTAKNLCSWAGCCPRNDQSGGKRKSTRISRAGSYLKPILVQVANAVVKSDKYPECKDRYRRIKARRGHKKAIIAICRMLLTAIWNMLSKLEPYSAKGFLPDHTPNHSKVISKEQGLRLLQSRGYVFSDDTPAFASG

SEQ ID NO: 503729 - protein, 341 aa, unidentified
MSIITVGIDLAKNVFAVHGVDEGGRAALVKPKVSREQLLPLIVQLPPCVIGMEACSGAHHWARQFRQYGHTVKLMAPKFVTPYRMSGKRGKNDAADAAAICEAVTRPNMRFVPVKEEHQQIILCLHRTRQGFVEERTALYNRLRGLIAEFGIVLPQKITCLRREICAHLEDLPGYANQCIGDLLAHADRLDERIGDYDRIIAQAAREDARSKRLMLLRGVGPTTASAMLASIGGGHDFANGRQVAAWIGLTPGQYSSGGKARLGRITKAGDPYLRSLLVMGARAVLASLGDKQDHFSRWARNLQERRGYWRAVVAIAAKNARLAWAVLKYDEDFRLTASTA

SEQ ID NO: 503730 - protein, 343 aa, unidentified
MEEVSIIGIDLAKNVFQLHGASADGAVLFRKKLSRPQFARFMAEHPPCIVAMEACAGAHHWAREMTRHGHQVRLIAPHYVKPFVKRQKNDVADAEAIVEAALRPTMRFVEPKTAEQQARAVVFRTREQLLKQRTETINALRAHLYEFGHVAPVGIGYLPRLAEVVDDPKSDLPELARDICRLALEQIGHVTARINALKATIMTMSKEATMPRRLQTMPGVGLIGALAIETFAPPMDQFRRGRDFAAWLGLVPRQHSSGGKQRLGKTSKMGQRDIRRLLITGAMAVIRWAVRRGAPTGSWLARMLERKPPMVVAVALANKMARGIWAMLTRGEDYRDPMIAGAA

SEQ ID NO: 503731 - protein, 403 aa, unidentified
MNSVGIDISKGRSTIAVMRPFGEVVISPFEVRHTGSELSELARQLKSLDGETRVVMEATGNYHASVAKLLHDAGLYVSVVNAKLVHDYGNNELRRVKTDRKDAVKLANYGLDRWLTLPRYIPEEDTRLLLKNCYRQYRQYSKVQTVLKNNLISLLDTVFPNANRLFSSPIRGDGSEKWVDFVAEFWHCRCVSEKSERAFTSKYLRWCRKHGYNFREAKAHTIYAEASGHIGVMPKSETTKLLVEQAVAQLRATSTALAALKHEMQSLASMLPEYPVVMDRFDVGPTLGPQLIAEIGDVRRFYSKKALVAYAGLDAPPNDSGDVTGRHKSMSKIGASSLRRTLFLVMSVYLQTAPLDEPVYQFMDRKRAEGKPYRVYMMASANKFLRIYYATVKAYLESLEHTA

SEQ ID NO: 503732 - protein, 373 aa, unidentified
MAALTIVAQTRPFVIGVDCHARTHTYAIIEASTQRQIACEQFPTTPAGISRALAWAGRRTDGDMACLWAVEGIGSYGARLARAVTDAGYDVAEAPRMNARGRRAIGKSDPLDAAAIGTAVLALEESQLRAPRRDEGARAGLRILSAARDQLTRDRTMNVNALTALLRAHDLGIDARKPLVPAQIATITRWRERQEQIELSIAREEAVRLARRVLEVTTQLTANQKRMTELIQQSPAAPLLEMVGAGAVTVATVLTAWSHPGRVRSEAAFASLAGVNPLPASSGNTVRHRLNRGGDRRLNRALHTITMTRMVHDPGTRDYVTKRTQEGRSYREIRRSLKRYIARILYRQLNALYATTEPAPSHVAGADGSGGVP

SEQ ID NO: 503733 - protein, 356 aa, unidentified
MQNNFQSPESVILGVDTHLDIHVGAVISQAGKLLGTRIIQTNQIGYQELFDWVKSFGVLEQAGIEGTGTYGAALTRFLIKNGIYVVEVNRLDRSKRRLEGKSDPLDAENAARTVLSGSSKAIPKMQSGACEALRIISVARRSAVKARTQAINQLRSLLVSAPQDVRDKLWKSKPHECVAACINCEASEYSPLRIALYSTFRSLAKRWGALTEELNELDESLDKLTRKYASNLRSQFGVGPQTAATLLAVAGDNPERLKNEAALASLCGVNPLPASSGKTVRHRLNRGGSREANNALWTIALVRMRSDPRTRIYVDRRTGEGLSTKEILRCLKRYIVRELYPLILSDLTYANRPLLT

SEQ ID NO: 503734 - protein, 394 aa, unidentified
MRFVGIDIASEIHVVAILDEACRVIARPTPFTEDAQGYQKLRALLAEPQDVLVAMEATGHYWQNLFAYLASEGFTLALLNPLRTRRFAGEDLERTKTDAIDALGIARFAVQKRPEPTRVTDEATLELRELVRLRDRLCQDIDSKIHQLHRLVDLGFPEFTRHVHTLQSELATAILRLYPTAAAFQDVKPRRLAAVRYGGHRRVGDELAKALIEAARTSVGHHHGPAYQVSMRYLCEDLELLRRQLGELDRDIETTLRNHEIGSLLTSIEGIGPQTAAKLVGELGDPSQFRSAAALASYVGVVPGTRDSGKRKGRPARLSPVGHAALRKALWMPTLVAVRENPWFKAYYERLRANGKPAKVALIATMRKLLAAVYAVARDRRPFETRVVSEGSRA

SEQ ID NO: 503735 - protein, 387 aa, unidentified
MTTDHLATALQTVVRVNDTKLFASLELSKSRWLVTVSAPGSEKLSKHVVIGGDGGALLNLLGRLRASAERRGGMAVQVVVIQEAGLDGFWLHRLLEANGIESHVVDPASIAVDRRHRRAKTDVIDGEMLLRTLMAWARGERRVCSMVRPPSPDEEDRRRLTRERGTLLKERTQHTNRIKGLLAGQGIADYDPLRKDRLARLDALRTGDGRPLPERLKAEIRREIERVDLVVSPMAMVERERDALVGMTSDPAPETAAAVLVRLKGIGPELGSLIWLEALYRGFSNRRQIAAYAGLAPSPWQSGGTDREQGISKSGNRRLRHALVELAWFWLRHQPASALSVWFRARVGQGRGRIRRIAIVALARKLLVALWRYATQGVVPAGATFKA

SEQ ID NO: 503736 - protein, 458 aa, unidentified
MARNRSTDKISRGMALVHPNAAAIDIGATMHMAAVSADRTPEPVRSFGTFTADLHRLVDWFTECGVETVVMESTGVYWIPIFELLDASGFAVFLVNARDAKHVPGRKTDVSDAQWLQRLHSYGLLSASFRPKGRIAELRSYVRQRERLLEYAASHIQHMQKALTEMNLQVHHVVSDITGSTGMRIIRSILAGERDPAVLAAMRDSRCHADAETIEKALGGNYRAEHLFALEQALSLYDTYQEKASICDARIEAVLKELSIDRDRCTTPLPPPGRRMPNTANALDFDVRAALFELLGKDVTRINGLGPYLTLKLIAECGDDLSAWPSAKHFTSWLCLAPRNKISGGKVLSSRTRRSGNKATSLLRLAAISVGRTDTALGAFYRRLSARVGKAKAVTATARKIAVLFYNAVRYGMEYVDPGASAYETRYRERVIDNLHRRAKAFGFALQPLDPTPDNAVS

SEQ ID NO: 503737 - protein, 322 aa, unidentified
MNKYTETFGIDISKDVFDCYGNKQGHLQFKNTEKGFLKFLQTLEVNTLVVMEATGYYHYRLAQFLHKKKQIVSVVNPLSVKRFIQMKLAKVKTDKSDAKAICEYGTINEVPLYNALTEVQSECLQLFRLMDSFLKKRTATKNKLHGEEVLGIPSNWVYRSLKRDRKHLDKELLGIEKQLLSLVKQDQQAQLTLLQSIPGIGMKTALFLIVVTDGFNKFETGSQLCSYVGITPTIRESGSSVRGRSRISKVGNRKLRNLLFLCSFTACKHNKGCREIYERIVNKGKSKKLALIAVSNKLIKQSFAIAKSGLPYDETYVSVLSK

SEQ ID NO: 503738 - protein, 373 aa, unidentified
MDVHTTNYTLCAMEPIIGEDDRVFATIKVTPDYKNILMFIENLKLKLGLNDEYDIQCGYEAGCLGYSLYNQLTAAGIKCVILAPTTMLTPQGVRIKTDMRDAYMIAQCLSYGGYHAVYIPTEDDDSVKEYLRMRNDHKLALKKIKQQINAFCIRHGFCYDGTKWTLSHLKWLKKLEITNGLYRETLDEYMASYEEQEAKIERYDKRIGEIAEQTRYHDKVKKLGCFLGIKTHTALSLIVETGDFERFAKGNQYASYLGLAPGENSSSDNIHRLGITKAGNSHLRQLLIEASGGICKGAVGHKSKELRARQNGNTAEVIAYADKANTRLRSRYYKFIRHGKKRNVAVSCLRRREKRICLVAGTRMQPIHSHSVV

SEQ ID NO: 503739 - protein, 414 aa, unidentified
MTKFSVYIGIDWANDKHDVCVQVANSSTRKFEVIKHSPKSINEWISSLHKQYKGQIAVAIELSKGPIVYALQKFDFVTIHPVNTSMLAQYRKAFSPSGAKDDPTDAELALDLMLRYPNKIKALKMESESVRKLTYLVEQRRKLVDDKRRFSNRLIITLKEYYPHLLDWFSHRGSGIFCDFITRWPNLQKLKRARPDTLKKFFGSYPGRTAAYSVKRIQSISEAEPLTLDNAVIESHQLLAVALANQLLVAVKVIKVFDREISELFNALPDAELYNSLPGTGPCLAPRLLVAIGENRSRFNSASEIQMYAGIAPVTVRSGQKSWIHWRYQCSKFTRQSFIEWATKSIRQSYWAEIYYQQQREKGNTHQAAVRSLAFKWIRIVFRCWKTKEPYNEAKYLKALSDRNSPLLFKEKAC

SEQ ID NO: 503740 - protein, 343 aa, unidentified
MQTIATIGLDIAKSVFQVHGVDAAGQVVVRRQLKRRQVLVFFAKLPPCLIGIEACASSHYWARELQALGHTVRLIPPAYVKPYVKRQKNDAADAEAICEAVTRPNMRFVPIKTIEQQGCLVLHRTRHLLIRQQTATINSIRAYLAEFGIVAPVGRRGVEQLLEVIADSNDARLPEVARVCVAALGVQLRQLKAQILELDRRITAWHRSSEASRRLNEIPGVGPLLATALVASITDPKVFRSARDFSAWIGLVPKQNSSGGKDKLGNISKRGDRYLRSLFTAGALAVIRYAKIHGTKHRPWLVALLARRPTKVAAIALANKLARIAWALMTKGSRYRQPAALRV

SEQ ID NO: 503741 - protein, 425 aa, unidentified
MNKSESKGTVEYAALIGVDWAAEKHDICLWDAATGKSHHQVIEHTPEALAEWLSELQTRYPGQRLALCLEQSRGALIYALMGHEFLDLYPINPVTLARYRAAFAPSWAKDDPDDAKLLTEILRLHRDKLAVWKPDDEQTRTLGFLNEERRKAVDLRTKLVLRLQSALKLYFPQALQWAGTDLASPMACDWLLKWPTLEAAQRARAQTMRSFFYARKCRSAAHIERVIAAIPTAKPLTQDVAVLAVQPLTVQMLAKQLQLLNKSITAYEQQIQILFRQHPDAFLFESLPGAGKTLAPRLLCAFGSDRARYPSAQNMQTYAGVAPVIERSGKSCWTHWRWNCPKFLRQTFHEYAKVSILYSTWARAYYDQQKQRGKRHNAAIRSLAFKWIRIIHRCWQTRTLYDESLYLQTLAQRGSPLCALIAEPA

SEQ ID NO: 503742 - protein, 345 aa, unidentified
MMVIGIDAHKRSHTAVSVDEMGRQGFVKTVGTATQDHLRLLKWAVGLAEERLWAIEDCRHLTRRLERDLIAAGESVVRVSPKLMAHVRDSARSYGKSDPIDALAVARAALREPDLPTARLDGVERELRLLVDHREDLVAERTRIISRLRWHLHELDPGWTAPTKLQRGSAFDKVQAHLSGRNDGTIVRRLALRLVEHLRLLTDEIDELTAEITARVTTIAPSLLTIVGCGALTAAKIVGETAHAGRFRSKDAFARHNGTAPLPVWSSNKQRHRLSRTGNRQLNAALHRIALTQARCYPPARELLERRTNSGNGGMEALRILKRRLSDVAYRAMLADQTDPPTVAA

SEQ ID NO: 503743 - protein, 356 aa, unidentified
MNKISKLDFKDQRIYVGMDIHKKSWSISILTDNFEHKTFTQPPNVEVLVNYLKRNFPGGSYKSVYEAGYCGFWIHDRLQEHGVQCCVVNPADVPTKDKERRSKTDRVDCRKLARSLRSGEIDSIYVPCRPKVEDRSLIRTRHSMVKKQTRCKNQIKSILHFYGIQIPEEMGDSYWSKRFITWIETIRLERSSGNFTLKVHLEELNNMRKIIADLTRGIRSLANCEEYRQNVRILKSVPGISTLTAMTLLTELYEISRFKNLDKLCSYIGLIPDTDSSGETERRTGITKRRNAQLRNILIESAWVAARKDPALVMTFHTLCKKMQKTNAIVRIARKLLKRIRYVLKTQQEYVPAVVQ

SEQ ID NO: 503744 - protein, 405 aa, unidentified
MGMVFVGHDWAEAHHDVHVEDDQGMRLAKGRLPEGVEGVARFHELVAPFVEESSDVVIATETDRGLFIGALVAAGYSVLAVNPMSTSRYRERHSTSGAKSDPGDARVLAELARTDRHNHRPIAGDSDLAEGVKVLARAHQGLVWSRQRQLNQLRSTLREFYPSALAAFDELGSADALAILTIAPTPTLGRRLSQSKIAAALRRAGRQRRVEERAVEIQAVLQAPQLEAPTVIADAMGASARALVAVIVELTTQIANLEAELANRFEQHPDAKIIRSLPGLGMILGARVLGEFGDDPNRYADAKSRKNYAGTSPITKASGKSRVVLARYARNRRLADACYRWAFSALGASPGARAFYDQHRAGGDTHHRALRALANRLVGILHGCLRHGIPYDENTAWGHRHQQAA

SEQ ID NO: 503745 - protein, 475 aa, unidentified
MNLKGTKKTNQVSNVNIFEQQELLKKIEVVRENLTASTWRELETKGKFDKNAKLSFICDDMLILGCDVGSETHYLRAIDTRGRELSKSAFSFSNNADGFNKAKEWAVKIAAEYDKKQIVLGLEPTGHYWFCLATWMISNGLSVVQVNPYAVKQTKELEDNSQLKDDTKDPKLIANLVKDGNFGMPYLPEQLYADLRRLSMFRDQLNEDRIRSINRLHRELKIYFPEYKEALGKTEGTFSLELLKQAPFPDDLAALKEDGIRQIWHNAKLRGRGYSRAGEILEYAKASVGLREGKETGKLVVQWFVQKILELDAELALIETQINQKCLEIPHTDKVLEICGIGENTLSGMMAEMGDISRFDDVKEIQKLSGLGLVASSSGKHKGETKISHRGRKRLRYWLFQAAKSAVVHAEEFKELHVYYTTREQNPLKKMQSLIAIACKLLRIIFTILKKGIKYDPRKMLKDIRRESRQESLAA

SEQ ID NO: 503746 - protein, 355 aa, unidentified
MTDKRQKIIIGIDTHKDFHHVAVISALGESLTDRKFDATPDGYANLIEWITEQGDVLRAGVEGTGSYGAGLTDRLRRAGITVVDVLAPDKQERRLRGKTDQIDAYSAARAVLARRATTVPKTRDGDVEAMRVFRTTRRMVVKQRTETMNQLHSLLVSAPEGLRVKLAGLKAKELAKASSRLRDLPGDDAVTAATKDAARSLARRFIELTVESDRLERRIRTLVTAYAPELMTVYGVGPDVAATLLTVAGENVDRITSEGALAHLAGTAPIPASSGKTNRHRLNRGGNRQGNAAFHRIVLVRMKRHPETRAYVEKTLARGKTKRDTMRLLKRYVAREIFPILIAVQQRHATTQIAA

SEQ ID NO: 503747 - protein, 415 aa, unidentified
MALKIVYKICCGIDVHKTFVVACIASTNDKGITSYESHRFSTYTSGLKTLLQWLLDRNCKDVCMESTGKYWIPVYNILESDCSIVLAHPKYVKAIRGKKTDKKDAKWIADLFKHDLVAGSFMPPADIRQLRDLMRYRFKLTCFKSSEKNRLQNCLTVSNIQLGNVVSDTFGKSAQAILDKLLENPADTSFDLEPLVYKSLKKKLPELRDAIDGYITPEQAGKLKVIKAHYENLESRKAELEELILALAAPYQQELTILQTAPGISSPFTAIGIISEIGTNMEAFPSAKHLCSWAGLTPTNNESAGKKKSVRVSKAGCYIKPLLVQCANAVVKSTKHPEMRNRYLRLKKRRGHKKAIIAIARMLLTALYHMLKSGENYNAELYQKSDLLPVDREITVEQALMIARNQGYKIKSATA

SEQ ID NO: 503748 - protein, 310 aa, unidentified
MEHRRIVGIDVSKDRLDVHVLPSQEAYAVSRDATGLVELCRRLGDTVDLVAVEATGGYETLVAATLSDHGMPVVIVNPAQVRAFAQALGQRAKTDPIDASVIARFAEATRPQIRPLPDGAARLLADLMARRRQIVEMIASERQRLHRTEPPRVRKSIERLLKALERELGTIDHDIDGAVRGSPLWREKEDLLASVPGIGSIIARTLLAELPELGRLDHKKIAALAGLAPYTRQSGLWKGKARIGGGRTVVRTALFIGAQVAKRWNPPLKTFYERLIAAGKTKMVATIAVARKLLVILNAILRDRTPWQNA

SEQ ID NO: 503749 - protein, 324 aa, unidentified
MIDGILGIDVSKNTLDVSISSCGKVRTKSFANTSDGWHHLLDWLLAQKIQRVHACLESTGRYSLGIACALYEAGHIVSIINPAQVRDFVRTKLGRNKTDGVDASRIREYCELFKPLPWAPPSEAHRRLGELQTIRSGIIAGLTEWKNRKNSGIVDAEAQALADATILHFTSQIGAVDKAIALAIENDSDLRSKRDLLLSISGVGDTLAGIVLAELPGPNVLHSSGEVVAYAGLNPRQHQSGTSVDRATRISKIGNAVLRAALYMPALSAMRYNPAIVALVTRLKSRGRLKPKQIVVAAMRKLLVLCFGVLKTGKPFDPAIAMGC

SEQ ID NO: 503750 - protein, 343 aa, unidentified
MTQSNLIAIDLAKNIFQVAQLKGNKLKFNKPMKREPMLELLAKAEGSKVVMEACGSAQHIARKALSLGHDVMLLPPKFVKAFRQGQKTDANDVLAIASASQAYNVKPCKIMTVEEQTLQSLSQARALVDKQKAQLSNQMRGLLLEFGVVINQGDAALTQVVPDILEDAENALPIALKQALAVSYELYKTQCDAKAQLHKQVEAITKQNDSCQRLMALEGVGPITAIELLSFLGNTSQFSDARGAAACAGVTPTQHSSGGKAKIGHIPKRRGNTLRKNLFLGARTIVSRLKHKEATTEKERWIKNLLAKKSVKCVAIALANKTVRTAYALLKNGSTYEPKILAA

SEQ ID NO: 503751 - protein, 346 aa, unidentified
MTIVEERCAITGGVDTHSEVHVAAALDRLGGLLGTREFPATAAGYASLLGWLGAFGDVVLVGVEGTGSYGAGLARYLAAHGVRVVEVDRADRQDRHRNGKSDPLDAVSAARAAQSGRAAGAPKGRDGAVEAIRALMVAKRSARHERTQAINQARSLILTGPDELRARFAGHRAAALAEAIAALRPRPGDAADYSLRVALRELGRRVEFLDAQIGRLDDLIVPLVTARAPGLLSLYGIGPDTAALLLVAAGDHPERLRSEAAWAHLCAVAPIPASSGKTRRHRLNRGGNREANHALWRIVITRMSAHPATRAYVDRRTKEGLSKKDIIRCLKRYVAREVYPYLRPGA

SEQ ID NO: 503752 - protein, 399 aa, unidentified
MLNPVSLQLRVGVDVGSRCHTVAIGLSDGSLLEEFEIPHTAEGFQEFFARIEACGRRYPVPIAVAMEGYNGHVRPLDSLVRARGWRLFNVNNLKLARFKEIFPAAAKSDRIDTRKTLELFQLGDHLPMAGDVLQEVMATPAENDILKRLSRRRRRLVNERTRVLNSMQADLQAVCPGLLEITRDVGNLWFLNFLTCRKGLIKLARVRRASLLKVPGIGTHFANAIQAWQSRAYFAPDASLVGDMIQQDAARILELKQQIKALEEQMAQVAEKSSIAGQLASIPGYGSVCSAELAGEIGTIERFRKEASLALYLGMATLDRSSGKSRGSKPPKHVNARAKAAMMIAVDHHRKLVPQSQRYYEGKRAEGKKHNQAIRALGRHLCRVIFKMLSQERPYRIEP

SEQ ID NO: 503753 - protein, 387 aa, unidentified
MTVLTVNNLPAATHGETVRCLFAIELSKMSWVIAFNTPLSEKISRRTLTGCKWKRLLELIEEVRARVSREMGRAVEVVSCYEAGYDGFWLHRQLEAHGIRNYVIDPASLQVDRRARRVKTDRIDTERLLRSLMAYLRGEPKVWSVVRVPSVAEEDARRLHRERDRLVSERVQHVNRIKGLCALQGNYDYNPLRPHAMARLEQMRTTQGGALPPRLKSEIKRELQRLELVVEMIATLETERDAIVADEASTHVNAKKIQNLHKLKAIGPEFAAVLVGEIFHRDFNNRRQLASYVGFAPSPFQSGSVAHDQGISKAGNRKGRTTGIELAWLWLRYQPDSDLSGWFRARVGTTKGRIRRIAIVALARKLLVALWRYLETGVVPRGAVLKG

SEQ ID NO: 503754 - protein, 345 aa, unidentified
MEHYAGIDVSLESAGLCIVDATGRIIREAKVASEPGVLIDWFGGLGLAVTRIGLEAGPLSQWLYAGMREAGLPVELLETRHVRDAFKAMPVKTDRKDARGIAQLMRLGWFRPVHCKSLPAQEVRALLTARKLLQTKNHDVEMSLRGVLRGFGLKVGPTTPRTFAARIRELVAGHPTLSTVAEALLAARSTLFEQWQQLEKRLRSLAREDRRVRLLMTAPGVGAIVGLTYVSAIDDHSRFRSSKAVGAHFGLTPKKYQSGETDVTGRISKIGDGSVRTALYEAANVILTRPVKGSTLKSWGMRLAARAGMRKAKVALARKLAVVLHRMLADDTEFRADKTAAAEAR

SEQ ID NO: 503755 - protein, 343 aa, unidentified
MKDTIYNHYIAIDWSIENMAIARMTKKANKITVIDVPSDIGEMKVYLKKLKGSKILVVEETTTSQWLYTELKDYVDRMVICDPYRNKLLNDGPKTDKIDASKLVRLLKAELIKEVYHSTDKFLYLRRFVSGYEDLVKAGVRLQNQRYSLLRACGKRGYELAGTKLDSPGDQFAMDCIDRQIEVYKQEKEGYEKEFARLSKDYPEIRHQKSLPGIGPIHAVKIVARVVTPYRFADKGHYLSYTGLIKLEKISGGRSYGRKNSRYCRQLKSVYKTSTWAAIGGNNPINDYYEYLIQEKRYPEHNARHKACRKLAILSLGVFKSAKKYQPYRRGHVKGYQEIKPGL

SEQ ID NO: 503756 - protein, 418 aa, unidentified
MKFIKAEKIKTINTKTLIVALDIGKNIHYAYFRAPNGKDIRPFPFYNTSHSFDNFWEKLSRFKENHMLDEVVIGFESTGPYAEPICHYLRKKSVKLVQINPMHTKRVKELTGNSPGKTDKKDPRVIADVISLGHSLTVVIPERAAAQLRRLTHARERAIERRTAMNNQLQGLVFVIFPEFVSIIKPSTKTGMYLIKNFSDPKSIVSIGIERLYEIIKKISRGKIGADRAEKLYNAAIQSIGITEGVESILLEITHLVSNIENENRHIKNLEKQMVVFLEQIPYSHTILSIKGIKHITAAGLIGEVGDFRKFKTISEVMKLAGLDLYEISSGKHQGCRRISKRGRALLRKLLFFGALNTTRKNGVFYTPYQRHLAKGMPPMKALVAISRKLMMVIFALVRDHCKFDIDYSTQIELKKAA

SEQ ID NO: 503757 - protein, 410 aa, unidentified
MQTLVERGCGLDVHQATVVACLLIVSTKGKVQKQVRTFGTTTRELVSMREWLLSESCTHVAMESTGVYWKPIYVILEGAFEIVVANAQHVEKVPGRKTDVKDAEWIADLLCHGLLRSSFVPPKPIRELRDLTRYRRKLVESRSAERNRLLKLLETANIKLASVASDVFGVSGLLMLHALVEGKATAQEMAQLAKRQMRKKIPVLELALEGKVEEHHRFLLRVQLRRLQAVEEDLSVLEHRIQEKLQPYAAEATLLDEIPGVDETLAAAIIAEMGVDMSVFGGVSQLASWAGICPGNNESGGKRRSSRIPKGNVYLKTALVEAANAAAKAKGTYLRDKFYRLKARRGYKRAAVAVAHKILVAIYHMLSHRVCYNELGDLYLDKLNKHHLTRNLVHRLEHLGYTVTLEQKAA

SEQ ID NO: 503758 - protein, 351 aa, unidentified
MKKINKQIQGEELFAGIDLHKRRWHVTIRTADVEIFSNSIAGKWEDLRRVINRYKDCRIHAVYEAGCFGFSLYDHLTKYGVDCIVTPPSLIPQEHGNRVKTDRLDSRKLARLLAKGLLKSIWVPSAKERFHRQVIRRRRQLVGDRVRTQNRIKSELCFYGIDLPTPRSKWSQVYFTNLQRIKFKNHWMQKSFNQLLEQYEFLCAQIDKQTQLLKQLAQLPLYRDRVKILRSIPGIGILTAMEILLELQDFSRFRRAEQLAAYVGLTPSQYSSADKIRMGRITGAGKNTVRSALVESCWQLIRKDKVMREKYEQIKARAGGKRAIVAVSRKLILCIRRLLLDNRPYVYESVS

SEQ ID NO: 503759 - protein, 315 aa, unidentified
MSDMPCFVGIDVAKAQLDIALRPSGERWAVANDASGVATLVDRVQTLHPTLMVLEATGGLERAVTSALAAAGLPVVVVNPRQARDFARATGQLAKTDALDARALAHFADVIRPTPRPLPDAQTQELRALLGRRQQLIGMRTAEQNRLTGASERLTKDITAHITWLNVAIATLDDDLETMLRASPLWRANDALLQSAKGIGPVSAHTFLLELPELGTLTRQQIAALVGVAPLNCDSGTLRGKRTIWGGRAHVRTVLYMSTLVATRFNPQIKVFYERLLAAGKVKKVALTACMHKFLTILNAMLKHRTPWQPQEVQS

SEQ ID NO: 503760 - protein, 407 aa, unidentified
MEVLYPRCCGLDVHRNMVVACVSIIEAGQRRKEIRTFRSVTKELLAMRQWLLEEGCTHVGMESTGVLWRPVYDRLTGYFVLVLVNAAHMRQVPGHKTDVQDADWLADLLQHGLLTPSFVPDQPQQDLRDLTRLRVHLVQDRTQLINRILKVLQQGGIKLSGVLSNVTGVSGRAILQALCAGERNPEQLALLVHKSVTHKHAQLVEALTGDLRSHHQFLLGELLSLVQGVEQSIKHVEQEIEQRLYPEEERLARLEQITGVSRHTLHLLCAEVGLDLSRFPDAAHLSSWAGMCPGQKESAGKRQSGRTRPANPYVKAALVQAAHGTAHTQTYLGEQYRRLRKRRGAKRAAVAVGHSILVIYYHMMTTGEPYHEKGVEYFRSRDPDLVERQLVKRLKRLGYQVTAPPAA

SEQ ID NO: 503761 - protein, 375 aa, unidentified
MSIVTDQARSDNPIAGGVDTHAEVNVVAAIDPIGRELGHASFATTAKGNCELLDWLKSHGRVTIIGIEGTGAYGASLTRAATSAGSMVVEVDRPDRKSRRFAGKSDPIDAYAAARAALSGRACGTPKSRDGNVEMIRVLRIARSGAVKARIVAKTQLKAVIKTAPSGLRDDLRHLDGTALLNRCARFRPARGQTPPTSPHAKRTPRHGRLLDPTAATKHTLKILAQRVHTLDEEITQLDDDLTMLVAETAPELIATYGVGPDVAGQILVTVGDNPDRLHSSAAFAHLCGVAPIPASSGKTNRHRLNRGGDRQANAALYRVAMVRLRYDTRTQAYRDRLAAEQKTNKEILRCLKRAIAREIYQAIKTDFKIPDPPS

SEQ ID NO: 503762 - protein, 327 aa, unidentified
MFFLGIDVSKSKLNCTLVRGEGDKRKTKVVPNTVAGIQALLGWCAKQGAAPEQLHGVLEPTGPYHEQAGTALHDAGVTVSMINPAQARDFAGALAIRTKNDELDSYVLARYGQALHPPAWQPAPLHARQLRALLARHEALAKDLQRELNRQEKAQFGQSPEPVTGSIDKSVAFLTEELKRLERAINDHIDRHPDLKEDRDLLTSIPAVGPQTGNAILSIMHNRRIESPEALAAYLGLVPVQRQSGTSLQGRPRLSKAGPARVRATLYMAAVVAVRHNPHVQALYARLLAAGKTKMAALGAAMRKLAHLCFGVLKNRTPYRSDYALAA

SEQ ID NO: 503763 - protein, 402 aa, unidentified
MNAVGIDVSKSKSVVAIMRPFGEIVSTPFEIKHTASDINSLVELINSVEGESRIVMEHTGRYYEVLAHQLSEANLFVSTINPKLIKDFDNDSLRKVKSDKADAVKIARYALDKWQNLKQYNVMDELRNQLKTMNRQFGFYMKHKTAMKNNLISILDQTYPGVNTYFDSPARSDGSQKWVDFASTYWHVDCVRKMSLNAFIDHYQNWCKRKKYNFSQSKAEEIYGKAKELVPVLPKDAITKLIIKQAVDQLNSASTTVESLRTLMNETASKLPEYPVVMAMKGVGTSLGPQLMAEIGDVSRFTHKSAITAFAGVDPGVNESGTYEQKSVPTSKRGSADLRKTLFQVMDVLIKTHPQDDPVYQFLDKKRAQGKPYYVYMTAGANKFLRIYYGRVKEYLSSLPES

SEQ ID NO: 503764 - protein, 334 aa, unidentified
MLYAAIDIHKHAFQAAVLDPETGEVVEERFSADRESLARWAEPWRGRVAAVAIEATTGWRWVWRELVADGFEVRLAEPVQTRALLGRRRSAKTDRLDARWLARLLAKEMLPQSWIPPAQIQELRDRTRLRKALAEDRRRWGQRLHAYLLHEGWPCSRSNLLRPPGLRWAAALRLPAHARLQVDSLLAVMAALEAQLETVDAELRRFARADERCQALQSIYGIGPILACHLLAEIGEARRFRGAEQITRLAGLDPVVDESGETRRRGHLAKAGSPHLRWALVEAAVHAHRATAPDLALYRATRQRRDTTVARLTVARKIGKRAFHALRELELATA

SEQ ID NO: 503765 - protein, 346 aa, unidentified
MNEITLIGIDLAKNILRINCVDKKGKRVMNKSLHRDGLIRFLTTLPQCTVAMEACASSHYWGRAAASLGHTVRLIHPHYVTPYRLGDKNDANDAAAICAAAQRPDMRFVRLRSQRQSDIQSLHRVRSGLVRERTATINRVRALLAENGIVIKQGPSAVFALLPGILDDENNGLSAIMRCVLRSQYAHLLHLREQIKELCGALNALIAEDDDCRRLMQVPGIGPLTATILASEIGNGSGFKRGRSFAAYIGLVPKQHSSGGKNILLGISKRGNRYLRTLLVHCARTAIRTIVFGKTPFGGSIERWVLQLIERRGKNKAIVALANKLARIACGLLSKGTSFQNAACVC

SEQ ID NO: 503766 - protein, 443 aa, unidentified
MKTKKFEEKKKVVSGKKVIGVDPGRDRHQIAVLSESGEQLGKSFSIPVSYEGYEDKLMKKLKLSIGEFDLSEVVFAVETSCNLWQTLCAWLSMKGYMVVMVSPLTTRSSRPLMGRDFSKTDPKDAYLVGLNAQRGHYDDYKIYQPHIKSMHHLSIVWSKLTKDRVKNLQRIGAFMQSWFPEYVKVFPTIGVDTSLYLLKNYFLPRHFDEAIILKELSAVRKVSGGNYGKEKLVALVEQSKNSIGMNDSGEEEETLRIILDGWLSEVKSINRQMKKVSAKLIELAKESDNFDILLSIKGVSDLSAARLIAECRDFEGISHYGQIEKFAGLNVRVSDSGRSNGARHINGIGNKRLNHLLNQMVSQVMRYVPEVANKYMRRQLKRPCYRKNLIASIPQFLKLIVALMREKRAYEFKEESLKDMMELKREYEKFSKNRKWHAIKFAA

SEQ ID NO: 503767 - protein, 315 aa, unidentified
MTSTQVFVGVDISKTQLDLALRPEGQFSAPNNEAGYAQVLEHLNAVHPTLVVLEATGGLEIPLTGVLAAAGVPVVVVNPRQVRDFAKATGRLAKTDALDAQTLAHFAEVMRPEPRPLPDEQTQALATILARRRQLVEMLTAEKNRLGTAGKPVRKSLRTHIAWLERELSHTDRGLAHAIRESPVWREKEALLRSTPGVGPVVTTTLLATLPELGTLTGKQIAALVGVAPLNRDSGTWRGKRTVWGGRAQIRAVLYMAALVAARFNPVIRAFYQRLCAAGKAKKLVLTACMRKLLIVLNAMLKHRTPWRAELVQCA

SEQ ID NO: 503768 - protein, 489 aa, unidentified
MQRRLVGIDLGIASAHTVRVLDEGGRQVCRRRCEPSVESLTVIEQAALVGASVGTRLEVVIEPTGPAWLPVAVFFTARGHTVFRVSSAKAADLRRFLSRHAKSNGIDADTLARLPLVDPDGIRPLQLPAAEHAALDRRVRACDRLTQAASEHKVRIKDLVRQLMPLTPLTGDLGKADLAVLARWADPRALLKAGAARLTAVIVKASNNHQGAERAREWIAAARAAIDLYADHPAVAFTDLAAEVATEVRLLAAINAELAVHAAAREDAYRWADPGQLARSLPGLATVGGPVLATVIGDAARFPCGAHFKSYLGLAPRASETGNTDRKGQPMSKAGSRLARAALIRAADHARKQDPQLAKIYHTQMVERGAEHLKALCVVAGRLAERAWTVMRRGMPYVICDTDGTPIDPADAKKIITEQWAVPADVRARRRSTKTTDTKAGKAPQRVLTGHDRSDAQSADKRGDLPHPRSSNQPTYKVKPATTLTADPR

SEQ ID NO: 503769 - protein, 412 aa, unidentified
MTYKVAGIDIHKKVLMVVVTDAAAEEEGEWESRRFGTVASEREHLVAWLQERGVQEIVMESTAQYWKPIWLDLEPHFHPLHLAQAHSNRAPKGRKRDFADAHRLTRRLLAGELILSFVPDAEQRGWRTITRAKVQLVHDRVRLQNQLEALLEETRVKLSSVVSELLGLSGRRILQAMAEGESDPAELAKLGDFRLHCSQEELADALRGQWQPLHRQMLQLFLERLGLLDRQIQQLDRMAAETMQPYEEAVIRLAEVPGLGPDSAQQIIAEVGAQAKSFPSAGEFASWAGLCPGSDESAEHNYSSRSPKGNPFLRRVLTQAAQAAVKTKRSHFQVVFRRWLPRLGYQAAIWAIAHKLGRLVWKILHDGVHYKERGERSHPTVQRRRARRMVQALRNMGYKVEISSLNPQPAQG

SEQ ID NO: 503770 - protein, 374 aa, unidentified
MNVTHYIGFDVHKKVIAYCVKTADGQIVEEGTLPARREALREWAGARTQPWQGAMEATLFSAWIYDTLKPYATALHMAHPAKLKAIGCAKKKSDKLDARTISDLERCNLLPACYVLAPEMRDLRRLLRYRNLVVRESVRMQNKIAGLLMECGAPFDKHKLHGKKYFPQLLRTLQEVPDSVKDLLQMSRGAMEMFESVQKQLIRRLLAQPALQPRVERLASIPGVGPITALTWALETGDPHRFPSIGDAISYCGLTAAFRSSAGKEQRGPISKQRNAWLQTCLIEAAKVAPCWNPQLAALHAKELEYGHKNRATLEVARKLVAYLLAVDKSGQTFQLRLPSRVETTPETTKKRKTAATPAWSKKVTAALRQATAA

SEQ ID NO: 503771 - protein, 360 aa, unidentified
MTTVPAVPAVPGPVPVFVGIDVAKAHLDIALQAGPGVFGVALGAPWQVPHADAGIATLIAAHVPHAPTLVVLEATGGLELPLAAALAVAALPVAIVNPRQVRDFARATGQHAKTDALDATLLARFAATMTPRPRPRPLADAETQHLRAVLTRRQQIVAMLGSERQRRQRIAAALRPRVSAHIAWLEEELTALDRDPGELIRASPIWRAREHLLRSVPGVGPVLALTLLADLPELGQLPAKAIAALVGVAPLAHDSGQHRGRRVIWGGRARVRTVLYMSALVAMRFNPVIAAFADRLRAAGKAPKVVLVACMHKLLTILNAMVRHGEPWRTAGAPSADGTNATAPRGRRRRPQPLALPLDA

SEQ ID NO: 503772 - protein, 418 aa, unidentified
MQMELSQFAAIIGIDWADKKHDICIQVTDTGQRQVYQIAHKADKLDEWARSLYRQYGGPIAVALELSKGPVVSALQKYDFFVIFPIDPTTLAGYRKAFRPSGAKDDPTDAELALDLLLCHSDHFQALTPQSVEMRTLMTLVEQRRRLMNDRVRITNRLRNALKQYYPQALEWFDRIDTQLFCDFIKRWPSLAQARRVRKATLEKFFREHNMNRKALLERRLAAIKSAVPLTTDEAVIVPYRLQVLTLVAQLEVALESIRIYDEEIAGLAPQHPDYGLFNTLPGAGPSLAPRLLVAFGEQRERFASAAELQKYGGIAPVTERSGQKSWIHWRWQCPTFLRQTFVEWAAQTINKSYWAGLYYYQQRAKGCSHQAAVRALAFKWIRILYRCWVTRTPYDEAKYLKALQERGSPLLKIAQAA

SEQ ID NO: 503773 - protein, 380 aa, unidentified
MEKDIRYVGLDVDSERVAVAVADSAVTEVRSLGMIPNAAESVRRLVKKLGPVHRLRFCYEAGPHGYGLYWQLTRLGAHCDVVAPTLIPVKSGDRVKTNRRDAEKLARLYRSGELTAVWVPDAAHEALRDLVRAREAAKKDQLRAKHRLGKFLLRRGLKAAVGLKSWTLKHLAWIKTLHFEHPAQEATFLDYLHEVEHASARIARLEGALDQAIETAPSTMRALIDGLQALRGVSILSAATIVAEVGPLSRFARPKQLMGYSGMVSSENSTGNSVRRGAITKTGNAHLRRVIGEAAWAYQRRPSMYRALEKRQEGLSEEVKQIAWKAQHRLSGKYRRLLAKGKLHQKAVIAVGRELLGFMWAIGIQVEKEQRARASYGRVA

SEQ ID NO: 503774 - protein, 343 aa, unidentified
MSEITVIGLDLAKHVFQVHGADPDGRPVLRRRLRRGQVLEFFASLSPCLIGMEACAGSHYWGRELQALGHEVRLIPPQYVKPYVKTNKNDATDAEAISEALTRPTMRFTAVKSAEQQSVLMLHRTRELLVRQRTMLVNALRGHCGEFGIVAAQGLSRAGDLIKRIEDPADTALPDLARQALQCLTSQIRAIQEQIALIEKKLLAWHSSCEASRRLAEIPGVGLITATAVVASVGNATQFRSARQFAAWLGLVPQQHSSGGKERLGHISKRGDGYIRRLLVHGARAHLSWSRRKKQIRSAWLTGLLARRPTNVVLLAMANKTARIAWAMLSRGERYQEMIAAAA

SEQ ID NO: 503775 - protein, 345 aa, unidentified
MEPMYYIGLDVHKRTISYCVKDGSGVIHAEGTIPAARFDLDRWMKTLPQPWTAAMEATVFTGWIYDHLQPHATALKVAHPLMLRAIAAAKKKNDRIDASKICDCLRCDFLPECHMASMAIRERRRTLRYRNLLVRQMVQMKNKISGLLMEAGVSYNKQRLHKAGYFRELLATNPDINEELRSLLRLCRETVVRLGKTESALVRSLERDSLLMDRVERLMTIPAVGPITALTWTLEVGDAKRFSSIKKAISYCGLCGAEKSSGTTVQRTPLSKQRNKHLQTTLIEAAKMAPRNSPALAMLYDKEKQRGNANRATLAVARKLVAYLMAVDRGQRNFQVAETSNCIAA

SEQ ID NO: 503776 - protein, 340 aa, unidentified
MNIVFLGIDLAKNVFQLCGLNQAGKPVYTKRTGRKELLQTVANIPACLIGIEASTGAFHWQREFEKLGHQVKIISPQYVKPFVRGQKNDGNDAQAIAVALMQPTMQFVPPKSPEQQDIQALHRARQRIVNHRTATVCQIRGLLLDRGIPIGSAVSRARRAIPVILEDAENGLSPRMRRTIAELYDLFNDLERRIHFFDKEIETVFRQSEACQRIARVKGIGPKTATAVVAAIGKGTEFKNGRHFAAWLGLVPRQHSSGDRQVLMNMTKKGDKHLRTLFIHGARAVVRVATNNNDGYMNQWVNQLKERRGFNKTTVAVANKNARIIWSMLRNETEYQAVGS

SEQ ID NO: 503777 - protein, 340 aa, unidentified
MAKRVFRIHAVDATGFVVIARSVNRRTLVKFFDMLPRWVVAMEACSSAHHWGRQLLDLGFAVKLIPPAHVKPYVRRSKNDAADAAAICEAAGRPGQRFVPVRSVENQAALMRHRARELMVGQRTAALNALRGHLSEIGVVAAQGVQNAYALKEMAAEGFDENGEIVVPDCVRLALAPLVRQIDALDEAIEVIDRELEASARTDETAKRLMTIPGVGPVTAMALLATIQDFAAFSSGREFAAFLGLTPREHSTGGKPRLGRITKMGDRYLRKLLVQGACSALGHRKGHNDALRRWASGMLERKTVKYKFKLTAVALANKLARIVYALATKGGHYDDRPVAA

SEQ ID NO: 503778 - protein, 360 aa, unidentified
MRTITIGVDLAKQVFSVCSVDPAGRVRDRRELRREAFSQWLPNVPAGTVVAMEACSGAHHWARRCQAHGLQPRLMAAQFVAPFRKSRTAKNDRNDAEAIATAARQGNMRFVPVKTVDQQVRLSWHRVREGYKAEALATSNRLRGLLAEFGVVVAQNDAALRRTLADLEALSLPGSLTELLRDVDAQWRQLQSRIANADRRIQAHAKADEACTRLRAIIGVGPITADAVVATIGSAQDFKNGRQFAAWLGLVPIQHSSGGRSRLGRISCRGDGYLRTLLIQGARSSLQRAKAVPWERATPEQRWIQGLDRRLPFGKALVAIANKHARQLWAMLARSESYDAEAWLKHPMVQRPARRRDSKN

SEQ ID NO: 503779 - protein, 339 aa, unidentified
MQVTTIGIDLAKHVFQVHGVGADGSIAVRRKLRRSEVINFFAKLPPALVGMEACATSHYWARELGTLGHTVRLIPPAYVKPFVKRQKNDAADAEAICEAVSRPSMRFVPAKSAEQQGVLVLHRTRDLLIRQRTMLANALRAHMAEFGIIEKLGGAGLEILMKQIEADEVSVLPGVAREGLLLLAGQIRDTQSRVTEIEKRILAWHRGSEVSQRLETIPGIGPIIASAIAATVTEPGLFASGRQLSAWLGLVPRQHSSGGKERLRGITKQGDPYIRRLLIIGATAVLRFSRHRAPSDWTSGLLTRRPPLVVAVALANKMARIAWAILTRGEIYRTRAVPA

SEQ ID NO: 503780 - protein, 389 aa, unidentified
MYENGKKVIYVGIDVHDETFTCCFYDPDDKQTKKGLRTVKIFSSAAQVRRCLADFCKDNPFNISEFTFRCAYEACGYGYELARSLHSSGIDCVLLAPSTINEYHNNQRIKTDKRDAFTIAKSYANGEASPVHIPDKHDEEVDNLIRVRDMYKDTAKRYKQQIIAFVKRLGYKYEKHGYYWTQRYMKWLADLPLSTVNRYVLDNLLNSLTQAMDSLADFDGQIAFIAANDTRYTERVQRLKGLFGIDTYTAMAIVVKTGDFIRFARAKAYMAYLGLIPGEASSGGTVHKKALTKTGNPRLRQLLTESAQCYLRKPNLLKSKAFKKRQEGLPEEFITYADRGLMYMVRKGKKMLYNKKNWNVIVSALARTLAGFIWGAMTNHLDRNPRAAA

SEQ ID NO: 503781 - protein, 409 aa, unidentified
MRLFVGLDVSSFDMKVCFLNGEGEKLDSFSVSNDLPGAQVLKERLLQCTTNQEVETLKIGLESTSVYSFHPSMFLHHDEDLKRFGTKVFLLNPKQIANFKKSYSDMNKTDEIDAFVIADYLRFGRNQMSIVKESQYVALQQLTRSRYQLVRMLTKEKQHFLQHLSYKCNTFSQEVDSSIFGNAMMELFLEKFSLEELADMPLEELAEFLQKKSKNRFGDPKCVASTIQKAVRTSYRLDKVVEDSIDILLGTSIEIIRTYQKQIKELEKSIKRIMAGLTQTLESIPGIGPIYAAGIIAEIGQIERFDDETKIAKYAGLYWRTYQSGRFTAENTSLSRNGNHYLRYYLVEAANSVRKHVLEYQEYYTKKYNEVPKHQHKSALVLTARKFVRLVDALLRNHQLFTPERCVKV

SEQ ID NO: 503782 - protein, 345 aa, unidentified
MPEAGVDSLLVYVLTAMIVYRRAVSSGEAAMKAKHADETATVAVIGVDIGKEVFHLVGFGTNGKIAFRKKIRRLAFADTFEQLPPCIVGMEACLSAHFVSRTLRALGHEPRIIPAIYVKPFMKGQKNDYNDAEAIAEAALRPNLRVVQEKSQDQLDLQACHRVRSRLVSRRTATINQIRAFRIEQGIAVRAGSRALRNSLFAILENRKDEISARMAKLILGLYEDWCLLDERIETVTGEIEQLSQVEPKCRRLMSVPGIGPVISTGIVAAIGTGEAFERGRDFGAWLGLVPRQYSTGGRSILGRISKRGSKYLRTLMIQAAKVLLMRPHNWPLRDRFSRGEQLCC

SEQ ID NO: 503783 - protein, 357 aa, unidentified
MGKTISKLETVTTVGLDLAKNVFQVHAVDAQGRLIVNMKVRRAKLVDFFASLPRCLVGLEACASAHHWAREIAELGHEVRLMPPAYVKAYVRRGKNDKVDAAACCEAVMRPNMRFVALRGVENQAELMRHRGRELLAGQRVSLLNALRGHLGEIGIVAPQGSQHAYRLKRLAESGHDESGEVVIPDCVRAALRPLLNQIDAIDAEIALIDAAIKESVKADETAKRLMTVPGVGPITASAVVATVRNVDAFADGREFAASLGLTPRQHSSGGKDRLGRISKMGDRYLRKLLVVGANAALVHAKGHDDALRRWAKDLMARKSGPGGRKLAAVALANKLARILFALIARGGVYESRPAAA

SEQ ID NO: 503784 - protein, 357 aa, unidentified
MYGLKHQKEKRNMDHFAGLDVSVKETSVCIVDETGKIIREVKVASEPDALLPVLTKSAYHFKRIGLEAGPLSQWLFSALVEAGLPAICVETRHMRAALKAQINKTDRNDARGIAQMMRAGLYRPVHVKTLRSQKLRMLLTHRKLLQSKAIAIENDLRATLRNFGLKVGVVGTVKFEARIKQLVENVPDLVVLVEPLLVVRHALREQIGILHRRLLTIVRDDDVCRRLMTVPGVGPVVALTYRATVDVPARFRNSKAVGAVLGLTPSKYQSGEINRTGAISKCGDEMMRAMLYEAAHIMLVRSTKWSWLKAWAMQIARRRGLKKAVVALARRLAVIMHRIWTDGTEFRWTRGQTTAAT

SEQ ID NO: 503785 - protein, 503 aa, unidentified
MTTGKRQAVHALQQPLTTVHRAARIPEQVREQAEACAKLASLPVQHEHAAGIDVGDASHWACVEATPDGSDRVREFPAHTPGLRQLVAWLRHCGVTTIALEATGVYGHMLYLTLLEAGFQVITIPPQFARQIKGRPKTDKRDCQWIQRLHKHGLLPSIFQPDEATHTLRDYVRQRANLVRLSGQHIQRMQKALELMNLKLTKVLGDVTGVTGLKIIRAILAGQRDPHELAKLRDRRCKHTETEIAEALDGRYRPEHLTELRLCLALWAKYQEAIAELDTVIAAQLRSMRRQTELPPLPPKPRVRGRKPHDPRFDVRTALYYLTGVDLTAIEGIDEIHALTLISELGSDLTKWPTVKHFTCWLGLCPNWQKTGGKVKSSRVRRGKNRAALALRLAAWSLMRNPSYLGAYLRRQRSRLGAPKAITATAHKLARIVYHLMRYGLAYVRQTEAAYAVQVRDRLEQQLHRRAKELGYELKKIEPKLETLMVNGEQLTVKDDGEIVAAK

SEQ ID NO: 503786 - protein, 343 aa, unidentified
MEQATTIGLDIAKHVFQLHGADAAGHVLFRKRITRAKLLSFLAAQTRCVVAMEACAGAHYWAREIAKLGHHVRLIAPAYVKPFIKRQKNDAADAEAICEAAQRPSMRFVPVKTEEQQANGIVFRARDLLVRQRTQCVNALRGHLMEYGYVFPKGITHVETLVALVEDLQSSLPDSVRVILKLLVDTFAALEAQIAVLDAEINQRSKSDPTARRLMTIPGVGPIASTAITALVPAAEGFPAGRDFAAWLGLTPLQKSTGGKQKLGAVSKRGERTIRRLLIIGASAVVQQASRRGAPKGSWLAQMLARKPKMLVTVALANKMARIIWALLVQRRHLQNSGRGSVG

SEQ ID NO: 503787 - protein, 310 aa, unidentified
MKKVSTAAVMQSRNFSVQQKLTIGLDLGDRRSWYCVLDEAGKVQVEQPVRTTEKALQEAFGGMPRSRIALETGTHSPWISRLLGELGHEVIVANARKVRLIGESRKKDDRLDARTLARLARIDPELLCPVKHRSAQAQADLSVIRARAGLVRARTGLVNTARGVAKSYGERLRGCNVRNMNPEKAEGLSPELQRALEPLLSAIEELSERIAEYNDRIEVLAKESYPQVAQLKQIKGVGTLIALTFLLTLEDPHRFQKSRDVGCYLGLQPGRRNSGQSQPQMHISKQGDPYLRTLLVQGAQHILGPLRSRL

SEQ ID NO: 503788 - protein, 356 aa, unidentified
MPIQDALTIPKIFIGLDIHKKSWTVSIQTDLFFHRTYSMPSVAEDLFQYVEQRFPNHEVSLVYEAGCCGFTAARYFLNLGWHVLVVNPSDIKTGDKERYQKTDTLDSKNLSNQLKAGVLKGVYIPTEAHEQFTTLARHRTQVTKKLRQSKLHIKSMLLFHGITIPQEFDNSNWSKDFIVWLENIKFSSTCGELALQSKIRMYQFIRSEYLEIANQMRAHCRKTQKKDYNLLKSIPGIGGYLASVILAECGDLRRFNNEGQFSSYIGLVPGIYNSGGSEKCLGITPRSRSQLRSYLVEAAWVAIRKDAEMQNYYRKHQGKNVKSVIIKIAHKMARRILSVIKTETPYQINRNLVLEK

SEQ ID NO: 503789 - protein, 338 aa, unidentified
MALYCGIDLHSRDCWLAILDERQKVVHETKVGNDIQALLQVLEPYREDLEGVAVESTYNWYWLVDGLQDAGYQMHLVNTWAVKQWEGLKYTDDRHDARWLAHLLSLGILPTGWICPKEERSVRDLLRRRAFLVRKRTSFLLAMRGAFECRTGMRTTSSEVKQWTAEEVGSYLDDAIEALGITCLLEPMKAVDDQIRILEKEALARARLRKEFGPLLTVWGIGKVLGLTMMYEVGDISRFKKVGNFASYCRLVKSTRLSAGKRKGSGNARNGNPYLSWAFSESAHFAVRYHPEAKKYFQRKRSKTNGIIAIRAVAHKLARAAYYVMKDQVAFEPEKVFG

SEQ ID NO: 503790 - protein, 315 aa, unidentified
MSASVAPAVGIDVSKDHLDAAVHPGGAARRFANDRVGHTALVRWLAPMGVARVVFEATGPYHRALERRLAAAGLPFAKVNPRQARRFAEAAGRLAKTDRVDAAMLARFGALLEPECRPLRSETLDQLAELAAARRALVRDRTATANRAKTLGLDLLKRQAALRLKHIARQLDALDACADALVAADPSLARRFAILTSIPGIGGATAVALIADMPELGEMDAKQAASLAGLAPVARQSGTWRGKSAIRGGRAHLRQALYMPALVAARFNPDLKARFAAMTAAGKPAKVAITALMRRLVVLANALLRDDRAWTKAPA

SEQ ID NO: 503791 - protein, 320 aa, unidentified
MQSVCGIDVSKDRLDIMVLPEQQCFSVRNDAAGWAELVERLRGFSISAIGLEASGGYERGAMRALLAAGMPARQINPFKLRQFARASGVLAKNDPLDARMIASFVAIMPTQPAQPRAPAIDRLTEILAVRRQISAEKVAAENASRLLEDVMLQRLSRRRIARLEADIDMLDRHLTEIVGTDAALSYRYRLLTSMPGVGLVLACTLIALLPELGRMSRKQVAALVGVAPYAFESGKFKGRRCIWGGRAPVRNVLYMAAMSASNWNPVFKAFHDRLKAAGKLPKVVIVAIMRKMITALNAMVRDDVVWADHLSGRHSVPTAR

SEQ ID NO: 503792 - protein, 324 aa, unidentified
MIDGILGIDVCKNTLDVSISSYTKVRTKSFTNSPDGWRHLLDWLIAQKIQRVHACLESTGRYSLGIACALYEADHVVSIINPAQIRDFVRTKLGRNKTDGVDASHIREYCELFKPSPWAPPSEAHRRLGELQTIRSGIIAGLTEWKNRKNSGIVDAEAQALAAATVSHFTSQLGAVDKAIALTIDNDCDLQSKRDLLLSISGVGETLAGVVLAELPGPDVLRSSAEVVAYAGLNPRRHQSGTCIDRATRISKIGNAVLRAALYMPALSAMRYNSAIVALVTRLKSRGRLKPKQIVVAAMRKLLVLCFGVLKTGRPFDAAIAMRG

SEQ ID NO: 503793 - protein, 350 aa, unidentified
MPCKTVAIAHTIGIDTGKNTLHMIGLDKKGTIVVREKVSRTRIAARLVNVPQCLIGIEAGMASHHVARELLALGHEVKQVPPAYAKPFCQGHKNDFRDAHAIAEAVQRPSTRCVPVKTADQLDLQALHRVRSRLIGNRTAVINQLRGFLLEHGIPVRQGLRFLRQQLPQILAMRTDVLSPRMIRIIEELIGDWEHLDERIERVTDEIETLARADENCRRLMTVPGIGPIIASAMVAAIGNGAAFAKGRDFAAWLGLVPKQMSTGDRTILGRITKRGNRYLRMLFIQGARAILFRPAGWAKHSFGPWLAAAARRLHRNVLATAFANKLARIALTVLVEGRSYAARVEPRAA

SEQ ID NO: 503794 - protein, 348 aa, unidentified
MRFYNHTHAFYAGVDLHARSMFTHVLDSQGATVFAKDLPAQPQAFLDAVAPYRAGLVVGVECMFAWYWLADLCEDEAIAFTLGHALYMKAVHGGKAKNDRIDAAKIAGLLRGGMFPMAYVYPRDKRETRDLFRRRCFFVNQRAQLIAHIVNTNSQYNHPPLTAKLSYAGNRSADFAQRFKHASTQLSIQADLKLIDAFDAQIDAIERHVLKNAKIDDPTTLAFLRTIPGIGKILSLIMLYEIDQIGRFPEVGNFLSYARLVRCEHESAGKKKGSGGKKIGNAHLKWAFSEAACLMLRAMPEAKKWLAKQERKRGKKKALSVLEAKIGRTVYHLWRKQQAFDAKRFFAQ

SEQ ID NO: 503795 - protein, 283 aa, unidentified
MAIAVVGLDLAKHVFQVHAVDETGRAVLRRQLRRAGVEAFFKILPPCIVGIEACASAHYWARRITALGHEVRLIAPAKVKPYVQRGKKNDANDAAAIVEAVMRPHMVFVPIKNEEQQAVLMLHRTRDLLVRQRTMLVNAIRAHLAEFGIVAAQGRRKVKELIAGLDNTEMPELARIALWQIADQIDECDKRIDALERRILAWHKSDESSCNLATIPGIGPITASAMAATVPSPSAFRNGRQLAAWLGLVPRQNSSGGKDRLSGITKTGNTYIRRLLVIGATSV

SEQ ID NO: 503796 - protein, 448 aa, unidentified
MVEKELRSYTWRDLETNGKFAKNDKLSFITDDMLIVGCDIGSETHYIRAIDVRGRELSPGAFEFSNTSEGFENAKAWVLALAAKHDKKQIVQGLEPTCHYWFALAAWMISNGISVVQVNPYAVKQSKEIEDNSQLKDDRKDPKLIANLVKDGNYGMPYLPEKVYADMRRLSMFRDQFTEDRIRNINRLHRELKIYFPEYMDAFGKIDGAFTLEVLKVSAIPTDITALGAEGMKNIWHNAKLRGRGYSRANEIVNYAEKSVGLTDGTDAGREAVKWYAEQILRLDEQLAEIESALHEKCREIPYAENILAINGVGENILAGILAEMGDISRFDDVKEIQKLSGMGLVACSSGKHKGQTKISHRGRKRLRYWLFQAAKSAVSHADEFKQLHEYYTTRTNNPLKKMQSLVVIACKILRVIYTILKIGTTYDPQKLLKDIKHPAASQAPMAA

SEQ ID NO: 503797 - protein, 392 aa, unidentified
MRFVGIDIGADSHMVAVVDEAGGLLVKPTKIPEDADGYRRLLELLGESGNTLVAMEATGHYWKNLFAMLAGHGFVVALLNPLRTARFASEELARTKTDAIDALGIARFAAQKRPAPTRLPDGATEELRELVRLRDRLVQDFGDRLRQLHRLVDLGFPEFVRYVRRLDSALATAILHDYPTAAAFQGTSPRRLAGLRYDGRHKVGDELARALLAAAARSVGRHHGEPYRIQVRYACEDLDLLRRRLRTLEGDIERMLDHHEVGALLTTIDGIGPQTAARLVAELGDPAHFRSAGALAAYVGVIPGLRQSGKRIGLRAGLTPIGHAPLRAKLWMPVLTAVRKNPWLRAYYRRLVARGKLPKVALVAAMHKLLIAVYTVAKHRRPFVPVVAEVRP

SEQ ID NO: 503798 - protein, 397 aa, unidentified
MSAVVGIDVGAYKHAAAVCRSGEREAERSVFRLSADRAGFDELDRWLDGQGPVERVVMESSGHYYWPLASHLHRRGYGVAVVNPLQAKYFAKSRLQRSKSDPADARTLAAMGMSEEPRVKDPLLGAEAKEAARFWGGLVKEQGQVRQKLLRLVEIGFPELTECFEDPLCETALAVLREAPTARAAARKRVSTLADTTRPGGRRRLGENKARRLHELAQQTIAPPELDAQMSFEVGLLIQQFDLLDKQIEIADQRVAAVLDSELARRLQTIPGVGPALAATFIAEIGDIWRFEDFDQLASYAGVHPKEQSSGTKGQNPETSWRMAKTGNAYLRSAAYKMAVVGTQHNPVVRAHYLRKRAQGKSAMNAIRHCMSKALAIVWGVWRSGLDFDPTLGGPRT

SEQ ID NO: 503799 - protein, 310 aa, unidentified
MQDILECCCGLDIHKDSIVACLLKGPLNKQPSSEIRVFSTLLSDLESLKEWLVKENCMHVAMESTGIYWIPVYETLETAFDGHMSLIVANARHMKNVPGKKTDMKDAEWIATLLRAGLLNGSFIPEKDIRELRNLTRYRKSVISDITSQKNRIEKFLQSCGFRLSSFISDIFGASGSAIIKHLYTYGSITIKELDTCLKTQTRNKINEIMQAINGKLDKHQRQFLKMMFEHLESLKAHLSEVESQINLSIQKYDHYIELIDGIPGIDKTAASTILAEIGTDMSKFKTSEHICSWAGLSPGNNESAGKKKE

SEQ ID NO: 503800 - protein, 342 aa, unidentified
MQVTTIGLDIAKNVFQVHGIDAAEKVVVRKQLRRSQVLEFFKALPPCLIGMEACATAHYWARELTKLGHKVRLMPARDVKAYVKRNKNDAADAEAICEAVRRPTMRFVQVKSAEQQSQLMLHRTRDLLMRQRTQVINALRAHLAELGITAAQGNAGLRELLAIIAGAADDRLPAEAHASLIVLAAELQAMRTLIASIEKRIIAHHRSDEASKRLRSIPGIGLVGATAIAATITDPKAFRSGRDMAAWIGLVPRQDSTGGKQKLGPISKQGDRYLRRILVVGAHAVLKLARQKPEKYPWLTQLLARKPFKVVAVALANKMARIAWALLVKGGPYRARALVAAA

SEQ ID NO: 503801 - protein, 358 aa, unidentified
MHLWASKPVEKQGSLSDFPSNPNSRQGRSWRSPFMQGRDKMEALFVGIDVSKDRLDVHLRPAGEVFTVSRDAAGVEALIARLAPLGVTLIGVEATGGLETMVVAGLAAAGLPVVVVNPAQVRSFADALGKRAKTDPIDAAVIAHFVDATRPDIRPLPDEETRLLSDLIARRKQIVEMIGAERQRERRAANTLMKKSIARLLKALDKELASLDRSLDDSVRGSPAWRAKEDLLVTVPGIGKTIARTLIADMPELGTLDRRQIAALAGLAPYTRQSGQWRGKSFIGGGRCAVRAALFVGALVASRHNPVLREFRDRLVAAGKSKIVAIVAVARKLLTILNAMVRDGRAWTAEQAHAKASV

SEQ ID NO: 503802 - protein, 383 aa, unidentified
MRTTRVDYRTEAVVLAASLELSSGSWKVAFHDGRCTRARVVTCSAEGVSERLSELMAEIAKVRRRWSLEESTRILVGYEAGQDGFWLARKLESMGLEVMIMDPASIPVERHARRRKTDRLDAIQLVMLLRRWLLGERGAFSRVRIPSREDEDQRSVRRERSQLLKERNQHRDRIRKLLRTQGCWVKSVDAKLGERLLAGIVCDGDGHPLGPALLRRLQREWQRLEQVTEQLRELEQSIEQSRAFSDRAEEQIKQLTRLRAVGPWSAVPMATELFWRDFNNRREVGACVGLVGQPYDSGDSRKDQGISKRGNRHLRAVLIELAWMWLRYQPDSALSRWFRGRTEGQGKRARRVMIVALARKLVIALWRYLEHGEIPAGAQLKTA

SEQ ID NO: 503803 - protein, 319 aa, unidentified
MKKLYIGLDTHKENIVIGIAFAGNKASEVYGKVSADLDRFIAALRKLLKKYDLKKEDVSICYEAGPTGFVLARRLIKLDFECHVVAPTSIPKNTGRIKTDRRDAKKMARLLRSGDLTFVHIPSPLDEVIRDVSRARTDIVNARKQAKQQLGGFLLRNGYHYTGKCRWSEGHMRYLRELVLTNPAQKLVLEESLQRIDMLVEQEKRISDKMGELAQGWYRKPLLSALMGFRGFQAISATSVISELGDLRRFLHPRQLMAYIGLVPSEDSSGNTRRQGGITKCGNTHVRWMLVEIIHSYRLPPKVSKELSKRQEGLSREVK

SEQ ID NO: 503804 - protein, 407 aa, unidentified
MNNIGKRYIGLDVHKHYLIALGVDAELNVVLPVRRVELSHLESWMKKSLTKQDEMVLEMTTNTWQLYDELIQHVGKVTVVHPPHVALITRSQVMNDKIAASILARLLAKGLLVGIWIPPQEIRDLRGLVAQRRKMTRLATQAKNRLHAVIQRHHLKPPVGNPFAKTNNGWWQALTLGKLEKMNLQSDLETLQFAQQQEARLEQEMTVIAAEDEVIGRLLHLAGFGVVTAVTVWAAIGDIRRFSEPKKLVGYAGLGTRVHDSGMTMRTGKITKAGRRDLRVALVEAAHIAANYHPHWKAELARLQPRLGYNKAIVAIARKLLITVWYVLQGKTDKFAEPKAVAQKMLKFAYEVGKANRPKGQSAAGFAREHLDRLGLARELNSIPWGSKKPIPLPPSTLKEGSDVPNR

SEQ ID NO: 503805 - protein, 337 aa, unidentified
MNYCGIDLASKSSDICIVNEKGKVLRRRAVDTESSDIGKALDGFGQLKVIIEASPLAEMVARIIEAHGHIAVIIDARAAKNLMSAMKKTDRRDAQTLAEIGRCGWYVEVHKKSAEARQMRSILQARQALLKSNKALGASIRGLLRSHGIRLGAVSKGQFAVRVKEVTAQEVPGLLPALTGMLEAWTLTGQQAKQLRQSMIKECKQDEASTYLESVPGIGPLISTAYRATIDDPQRFQREEEIGDYLGLAPRIYQSGEMEYRGRITKQGDTMLRSLLVEGAHVLLTKGKDCALKRWGLSLEKRKGSAKAKVAVARKLAVLLWRLWKDKKMFEAFPQRV

SEQ ID NO: 503806 - protein, 390 aa, unidentified
MIFVGIDIAKLNHFASAISSDGEILMQPFKFTNDDDGFHLLASKLESLSLVSDSIIIGLESTAHYGDNLIRYLVASNFQVCVLNPIKTSSMRKNNIRKTKTDKVDTYIIAKTLMMQDSYRFVTFYDLDLMELKTLGRFRQKTVKQRTRLKIQLTSYVDQVFPELQYFFKSGLHQKSVYALLKEAPTPKAIASMHMTHLAHLLEVSSHGHFTKEMAKELRVLAQKSVGTSDSAISIQITHCIAQIELLDSQLKQIEAEMADIMKFNDSVLMTIPGIGYVNGGMILGEIGDIHRFASPGKLLAFAGLDPSVYQSGNFQAKRTRMSKRGSRVLRYALMNAAHNVVKNNATFKAYYDAKMAEGRTHYNALGHCAGKLVRVIWKMLTDKAEFNLD

SEQ ID NO: 503807 - protein, 347 aa, unidentified
MDTHRDAHVAALLSVTGTMLATGEFPATAAGYRDLLKWARKWGAVRRAGVEGTGSFGASLSRYLLAQGVDVFDVNRMDRADRRRRGKSDPLDAQNAARAVLSGRARARAKAGDGPVQIARMYKLTKASAVKARTQAINQLKAVLITADPALREELAGLGNAELFRTCARFTDVSSLEDVGEESVLQATRITLGLLADRIGRLSEQIRDVEARLARLVECHAPQLLDVVGIGPDTAVTLLITVGDNPQRLDSEAAFAALCGVSPVERSSGCRQYRRLNRGGDRQANAALHRIVFTRLRVDPRTQEYYERRIKEGKTRREIVRCLKRYAAREVFHLVGQLQPGPRSSGL

SEQ ID NO: 503808 - protein, 345 aa, unidentified
MPIVGGLDIHRKQITFDYLDTVTGEVKRGQIAPADRAHLRAWLARFAGCGDVAFAVEGCAGWRYVAEELAAAGIAAHLGEPADTAALRGRKRHAKTDKTDARHLRSLLAEGRLPECWIPPAQVLEYRALLETYHDLRREHTAWVQRIHAVFFHQGAPPLGEGALRTEPGLEALRAAAAAHLSAAGQQQVATALDLLAATEAQLGPLRHQLREAARHLTGAKVLAERLYGVGPVTGLALTCWLAGKDRFSSSRKAVRFTGLDITVHSSDRKGPPGRLSRQGPPVLRWAVYEAGKTHARAAAPDHPYYAAVADRKNTKRAALSEARKIVRQACHILAALGDDALTAA

SEQ ID NO: 503809 - protein, 485 aa, unidentified
MTTVYLGIDVSKGYADFVAMNEAGSELGGWGRFDDTRAGHDQVQARMAAVWARAPETQVVVGVESTGGYERNWLGLCHRLRRAGWALTAYRLNPLVVKRYHERQLHRTVTDRISAAGIAAYLRTGRRRQDQLWVAGELEGALTLYRTVRRLVRLQADLQNQLQALLSRCHPELVACLRGGLRQWVLALLRQYPTAAALAQADPAVVARIPYVTPAAATRLVAAAAASVADQTDPATGRAVMVLVDEIAHLRLQVRRLQTELAEQLRADPGVQIIDSIPGFGIWSAICLRLELGDIHRFPRPAELVAFAGLDPQHHQSGDTTINRGISHRGQAGVRAILYPVVRAAIRCNPAVGALYTRLRARGKTDAQAVVAGMRKLLHLVFACWVQGVAFDPSRWEQVAGKAQEMAQRAAMAPTSAAAVPLATCLAAPVSKREAKRRKAAHSPQGPCGVVPQKRPEFERPPSALIIPIRTPSCQGDHAPDFSSC

SEQ ID NO: 503810 - protein, 352 aa, unidentified
MTVTIVETRLQARAITGGVDTHADVHVAAALDPIGGLLGVAEFPATPAGYAQLLGWLGGFGTVCLVGVEGTGSYGAGLARHIAAAGVRVVEVDRSDRQDRRRAGKSDPLDAVSAARAAQSGRARGAPKGRDGQVEAIRALMVAKRSARSVRTQTINQARALIVTGPDELRARFARHTPADLVAELASLRPRPGSMIRYHTLLALRELGRRAQYLDDQLARLDQLIVPLVTARAPGLLALYGIGPDTAAMLLVAAGDHPERLRSEAAWAHLCATAPLSASSGKVTRYRLNPGGDRQANHALYRIVITRMSSHPPTRAYAGRRTNEGLSKKEIIRCLKRYVAREVYPHLRPPAG

SEQ ID NO: 503811 - protein, 397 aa, unidentified
MYIVGIDIAKRKHEAAVIDGEGTVIIKPFSFTNNCSGYNRLLAMLAKAKLPLDEVSFAMEATGHYWLALFTRLQKEGFRVQVINPVQTNSIRSFYIRQAKTDPRDALLIAEVIRFGHFSESTLHPENIYELRELCRGRHAIVSMQADVKRKVVALLDQVFPEYETAFTNMFSDTSMAILQTCPTPKELSEMPLEELCHLIEVSSHKRFRMAKARELQELAHNSFGFAMAGDVFSMMIRLYAKHLDFLKQQVREMDRKIAEIMDALDTPITTITGIGPTLGAYILSEIGDISRFSSAAKLAAYAGIDPTMRQSGEYNGVRNRMSKRGSPYLRHAIWLAASSAVLHDPALKLYFQKKRDEGKPYMASVGHACRKMVSIIYAVMRDNKAYTPCIPNEISA

SEQ ID NO: 503812 - protein, 441 aa, unidentified
MIRRQVAGIDLGSEQHWVCAPTVDGNDREIASFGGTTSELLRMAEWLQARQVESVAMESTGVYWIAPHEVLEAQGLQVLLVNTRQLAQVPGRDKKSDPTDCEWIQRLHSCGLLRGSFRPEESVCMLRTLVRDKANLVGERGDWVRRMQKSLDQMNVRVHRAVSDLDGVTGMAILRAIVNGERDAQKLAKLRDPRCSKTEQEIAEQLKGHWREDHLFSLQQALKMYEAVDDRIAAYEKEILRKLGTMEQEQKRGQTPPPLNHANKAKMIKQRGQEAKREAFYRMSGVDIIQIDAIGVETVEVILSEYGADLSRFPTEKQFVSHVTLAPRVAQSGGKPLPKKKRNSASTRAATALRMAALSLRNSQTALGAYYRRIARRIGGDVAVFATARKLATLIYRLLRWGQPYVDEGVAAYEARYQQQRLGRLTATAKELGYQLVPAIA

SEQ ID NO: 503813 - protein, 354 aa, unidentified
MKRTTKYVGLDVHQAMTVATVRSEGGRVIARSVVETSDESIRQFFNAMAGSVHVAFEEGTQAQWLYDLLSPRVDRVIVCDRRGEKRSGNKGDQVDADELSEQLRCGGLRAVYHGAGGRVDLKELTRAYRNLVEDSTRVMLRLKALFRARAIRTTGGGVYQPKGRAAWIAQLPEQGARLRAETLYAQLDVLRTQRKKTKAAMVAEAKRDPAFGVLETIPYFGPVRIALLLATIGTPWRFRTKRNLWAYCGLAVVTRSSSEYEMFDGRARRKHRRPLTRGLNRNHNRVLKSVFKGAATTATGKPGPLQDFYHGMLERGMREELARVTLARKLAALTLRLLKTGEVFDPTQLTKPQT

SEQ ID NO: 503814 - protein, 348 aa, unidentified
MVHFVGLDVSVKETSVCVVDDAGKVILEQKVPTEPADIIALLTSLGVSYGRIGIEAGPLSQWLVNALTAVELPVICVETRHMKALLTAQQINKTDRNDARGIAQMMRVGLFKPVHVKTLAAQEQRMLLTSRKLLQRKLLDVESDLRGTLRNFGLKVGVVSGGRYEARVRELVEDFPRLAAIAEPLLNVRRVMRQQFAVLHKMLLDTVRSDPVCRRLMTAPGVGAVVALTYRATVDQPQRFLHSRAVGAHVGLTPKRYQSGETDYDGRVSKSGDALLRTMLYEAAHSLLIHSGKWSWLKAWGVRVAQRRGMRRAIVAVARRLAVVLHRMWVDGSEFRWSKDSAAVPAVA

SEQ ID NO: 503815 - protein, 436 aa, unidentified
MQHTRGMVRHETKRDGRRKRLSNRALIVGLDIGKRRHAAWMIDPQSRPLGRAKVDATPVGIADMLGRAERARASAQLDETVVALEPTSHLWMLIAHDLERRGVDYLVVHPISVWRGREIREYSYAKDDFRDASLIAELAAQLHFTQARLREPLWQTMRSLAYERFGLVELRSRAYQETGAHLEVLFPNYPVFHRLSLASRTVLSSDPDPQRIASMEFDDFVAEVRRNYQGSRLSRATLRRIHQAAQESWGLGARAQGSKLRLQLAMQRQRFVADQIELLDEHLLRLYEQTAYAEIAETMPGMTSITAAMLLALIGDPADFDSGRCLSKLAGMNARENESGEFNGSRSITRRGNPVLRAVGFRTAVSLAKNNPDFSARLAYLMHRRSNPLTRRQAYVALTNKMFRVLHVMWVNREPYDSHITSGRKPPNLLTNNVSG

SEQ ID NO: 503816 - protein, 339 aa, unidentified
MELHCGLDLHSNNTYAGIIDQNGKRVVRTKLKNIPENIVQFLDPYKEDLASIVVESTYNWYWLVDLLMDEKYKVHLANPSAIQKYSGLKHSGDIDDAFWLAEMRRLGILPEGYIYPKAERPIRDLLRKRGHLVKLRTSLIISLQNTISRNCGIKLSANDIKASQEDRVAPFLSDQEELSLAGAVSKDAIDFLGDKIRHIETEVRNRIRLKKPYSLLRTMPGVGNILSLTIMLETGPISRFSKVGDYVSYCRKVPSLWTSNGKKKGKGNQKNGNRYLAWAFSEAAELSRRTDGNARAYYNRKRQKANLMVAHAALAHKLARAAYYIMRDQVPFMPEKLFR

SEQ ID NO: 503817 - protein, 313 aa, unidentified
MNQKEPERFVGIDISKQELVVAVRPSAELQTFSNTEEGLAALVRFLQALSASSIVLEATGGFARAAVNALALAALPVVVVNPRQIRDFARSVGLLAKTDAIDAQIIARFAEAVRPEFRPLKDLETQKLEDLNNRRRQIVEMISAEKNRLGMAPPWSQKDIRAHIAWLEKRLKKVNDDIDDLIKQSPVWRQKEKILTSVLGVGPVVSTTLLCGLPELGSLSARKLSALVGVAPSNRDSGQYRGRRSCWRGRAHVRAALYMAALTASRCNPVIRAFYQRLRNAGKPAKVALVACMRKILVILNAMLKNNTCWQQA

SEQ ID NO: 503818 - protein, 361 aa, unidentified
MIVERTSVGLDVHARSVVAAGLDGATGEVFKQRLVPSGEVVVDWLRGLPGPVATTYEAGPTGFGLYRAITAAGFRCEVAAPSKLTRPAGDRVKTDAKDALLLAQLLQVGQIVPVRVPSVTEEAARDLVRAREDVRGDLMRARHRVSKLLLRHGQVYYGGAAWTSKHTTWLNSIRFGQPGTRAAYDADREAVDFAVARRARLDKAIAAMAADSEFTGVTRRLCCLRGVSTLTGFALAVEVGDWDRFTGAGIGSYLGLVPSEHSSGDSRRQGGITKTGNTHARRLLVEAAWHHKPRYAVGPVLQARWDQATPAARARGHAGNQRLHHQWAKYTARRKKHTIANTAIARELAGWCWSLATLDQP

SEQ ID NO: 503819 - protein, 408 aa, unidentified
MKTLHKRCAGLDVHKAEVVACVRLISKRKVEREVRRFPTTTQGLLALAEWLESAGCTHVAMEATGVYWKPVWHILEGRLALILANAAHVKNVPGRKSDVNDATWLADLLAHGLIRASFVPPPAIQELRDLTRTRKQLTREIVQHVQRIQAVLEEANVKLCSVITDIMGASGRRILKAMIAGETDAAKLAALGHERLGCTRAELVQVLTGCVREHHRFLLGQHLRTIEQLEDSVAAFDARIEAALLPFHDVVERLNEVPGLGATAVETVIAEIGIDMSQFPSAGHLLSWAGFVPALDESAGKRRSTRIKKGAPWLKPVLLQSAWGAARKKNSYLQAQFLRLKARRGAKKAAIAVAASILTIVYHMLRDGTYYQDLGPEYFARRNPAKTAARLANRIRNLGYQVEIRAAA

SEQ ID NO: 503820 - protein, 350 aa, unidentified
MLIIGCDYHPGFQQIACVDTDTGELSEHRLAHREEAEAFYRVLRQRNLSVRVGMESSGHSRWFERLLHELGFELWIGDPAEIRTKRVRKQKTDRQDAQLLLRLMLEERFPRIWVPDAENRDLRQLLWHRHRLVQMRTRVMNQLHVVPLNEGLRRKKALWRPAGRKELESIALAPWASRRRQDLLDLFDQLTPKIQELTRALEEEVEKRPVTRRLMTHPGVGPLTALAFELVIGTPERFHCGKQLASYIGLVPTEESSGDRRRLGHISKQGNVLLRFLLVEAAQVTVRSQPEWRNKFFHLAMRRGRKIAKVAMARRLAVHLYWMWRQGCDYGPWQKLGSHAGEPGNRDGVQ

SEQ ID NO: 503821 - protein, 351 aa, unidentified
MKVTTIGLDLAKDVFQICAADANGKILYNKQLRRHQMAEFFTKLPTCLIGVEACGSAHYWARKLQAMGHEVKLMPPQYVKPYVKTHKNDAVDAAAICEAVTRPTMRFVAVKSEEQQALLALHRVRQSFVKDRTAHSNQIRGELAEFGLIVPVGLSALRKRVPTLLEDPLLPAAFGQLIQRLLDEVLHLDEQIKLLERDIVLWHRSSELSRRLAQIPGIGPLTASALLCSIGDISYFKKARQLPAWLGLVPRQHSSGGRTTLLGITKRGDCYLRTLLIHGARSAILAAQRKEQSPEQPSWLHKLLARVHPNIAAVALANKNARIAWALLAKHQDYKRGYDPSLSALPLAQAA

SEQ ID NO: 503822 - protein, 346 aa, unidentified
MTIVEGTRSITGGVDTHLDMHVAAALDDIGGLLGVESFEASAAGNDKLVCWLGSFGSVVRVGVEGTGSYGAGLARFLRGAGIDVVEVDRPNRQARRRTGKSDPADAVEAARAALSGRAQGAGKTRDGNVEAIRALVVAKRSTRSTKIKTLNQIRHLSFTATDDLRERFRGVSRFYLGATAAALRPRAGSDPVAYATKTALAVLGRRVIALDEEKERLDALLAELVTKTAPQLLALHGVGVDTAAALLVAAGDNPDRLRSEAAWAHLCGVAPIAASSGKVTRWRLNRGGDRQANSALWTIVITRMASDARTRAYVARRLEEGKAKADIIRILKRYVAREVYRHLPRD

SEQ ID NO: 503823 - protein, 449 aa, unidentified
MGMGMDAVQGERGDHGVHVVHERCCGLDVHKRTVVACAIVPASGAGGAVGTTEPHREVRQVRTFSTMTDDLLALADWLATLGVTHVVLESTGSYWKPVWNLLEAHPAGAGFALLLVNAQHVKQVPGRKTDVRDCEWLADLLRHGLLKASFIPDRAQRELRELTRYRTSLVRERATEANRLQGTLEGANIKLASVARDVLGKSGRAMLEALVAGGPAAEDAHALADLAQRRMRHKLPALERALVGRMGSHQRFLLAQQLAHIDFLDAAIDRASAEIRTRLRSHDGAGGAVARLDTLPGVARRTAEIVLSEVGTDLRRFASARHLASWAGLCPGNRESAGKRLSGRTRKGNQWLRAALVEAAHGAAHTRDTYLAAQYRRLAARRGAKRAAVAVAHTLLVIIYHLLTEGTVYTDLGPTYLDQRNRAALERRLVRRLEALGHTVILQPLPIAA

SEQ ID NO: 503824 - protein, 403 aa, unidentified
MTVTRLDPGTVIGGIDTHAETIHVAVIDPWGRELGDREFVTTPAGYRQALAFLASHGEVAVVGIEGTSSYGVGITRTVTAAGLEVAEVIRPERQVRRRQGKSDPLDAYQAAYAALSGRATAAAKSSDIAALRALHNARRSAVKARQAAQVQVRQQLVTAPIPVREKYRSLTLLRLIRALAASRPASHTDPECRGVLTALRALARRHLGLTQEIRQLDATLTELIQLSAPHLLHLHGVGVTTAAQLLITAGGNPDRLRSEASFAALCGTAPVPASSGKTIRHRLSRGGDRAANHALHTIAVVRMGNHPRTRQFVHRQRDRGRSTPEILRILKRAIAREMFTQLSRPHPALGIDDLRPARQAKNLTLKAAATALGVTEMTISRTERGLCLTTDLTNRYRNWLKTA

SEQ ID NO: 503825 - protein, 343 aa, unidentified
MQAVTTIGLDIAKSVFQIHGVDAAGNVMVRRRLKRRYVLSFFQKLPSCLVGIEACASSHHWSRELQALGHTVRLMPPAYVKPYVKRHKNDAADAEAICEAVTRTNMRFVPTKTPEQQSCLMLHRTRHLFIRQQTAVINAIRAHLAEFGIVAPVGRNGVEQLLDVAADASDKRLPEIARACLLALGAQLRTLKVQILNFDRQIMAWHRSNEASKRLDEIPGVGPALATALVASVADPKAFRSGRNFSAWIGLVPKQHSSGGKNKLGSISKQGDRYLRSLFTAGALAVIRYAKIHGTKHRPWLTALLARRPTKVAAIALANKIARMAWAMMVRGDRYKEPVALAA

SEQ ID NO: 503826 - protein, 347 aa, unidentified
MAYFAGLDVSLEETAICIVDDDGNIVREARAASAPETLIAFFGACGMKMERVGLEACSLTAWLQQGLSEEGIPAICIEARQAKAAMGAMPNKTDRNDARGIAQIMRTGWYRAVHVKSPSCRTWRALLTARRMVLNKRRDVENGIRALLREVGLKVGTPSRRDFPARVRELAADDPVLASLAESLLDVVEVMTREVERLTKRVIDEVRVEPTCRRLMTVPGVGPLTALAFRATIDQPNRFRRSRDVGAHLGLTPRRYQSGETDVQGHISRCGDELARTALYEAAHSLLIRSTKWSALRAWGMNVAKHRGMARARVAVARKLAVILHRMWADGSEFRWGKQAPAPSTAA

SEQ ID NO: 503827 - protein, 468 aa, unidentified
MGRPKQTGKRTMKLPKHLQRLNLNAAGIDIGSRSHFVAVPEDADEQPVREFSCFTADLHRLADWLISCGVTTVAMESTGTYWIPVFEILESRGLEVKLVNARHVKNVPGRKTDVLDCQWLQQLHTYGLLEGAFRPPEQICALRAYIRHRMNQVRYSAAHTQHMQKALTQMNLLLHNVVSDITGVTGMRIIKAILAGERNTQVLANMRDNRCKNSVETLAKSLQGNYRPEHLFSLKQAVETFEFYQAQIADCDREIEALLATFDSTAEDKLPPSAGGSKSSKAKRNASAFNLQNELYRVTGVDLTRIDGIDTTTALKVVSEIGLDMNRWRTDKHFASWLGLSPGSKISGGKRLSGKTKPVVNRAAIAFRMAASSLYNSSCALGAYYRRMKARLGAPKAITATAHKLARLVYSMLKNGTEYTDVGQEYYEQRYKSRVIQNLKKRAQQFGLELIEPPHLNSSQKNIINSMA

SEQ ID NO: 503828 - protein, 406 aa, unidentified
MNMNAVGIDVSKRKSTVAILRPGGKAVGKPFDVPHLSADFQSLIKRIRELDGETRIVMECTGRYYEPVARELSQAGFFVSAVNPQIIRNFQGQDNPLRKVKTDKADSVKIARYTLDSWANLKQYSLMDELRSQLKTMNRQFDFYMKHKTAMKNNLIGLTDQTYPGANAYFDSPAREDGSQKWVDFIDTYWHVDCVRKLSLTAFINHYQKWCSRKKYNFSKSKAEEIYGKAKELIPVLPKDSFTKHIIKQAVGQLNVSSQTVEQLRSLMNETASKLPEYPAVMAMKGVGPSLGPQLMAEIGDVTRFTHKGAITAFAGVDPGVNDSGDYSQKSVHASKHGSPALRKTLFQIMDVLIKTKPDDAVYLFMDKKRAQGKPYYVYMTAGANKFLRIYYGRVKEYLAALSTSN

SEQ ID NO: 503829 - protein, 346 aa, unidentified
MRTDDCVYKVVSHRRRFPAEAQKNMNPPSLGIDIAQATFRAALWFDQHRFVQAEFANHPGGFRQLGTWLKRHGVGPLAAGLESTNTYAEALAGWLHAQGHRVYLLKPERTACYARCRGQRNKTDAADAVTIAAFVAQHAGSPWQPPSAAQKTLRSLTRTRHQLVECSKQLRNQLKTADPVAQPHLQAVLLSVTRQLAALARGIAEHLRRQPALAAQVRRLMTIKGIGLVTAAIAIAELPPITADSDPRAICAWAGLTPRRRQSGKTELPARLSRKGNVYLRQALFMPALVAKKHNPLLRAFALRLAAAGKRPGAIVGAIAHKLLRIAVGLLRSNTDFNPHWVFQKN

SEQ ID NO: 503830 - protein, 383 aa, unidentified
MCQTRCSAVRPPSDACRPPPDHRRETASPTIAQLQRPRVTVGVDTHLDVHVAHAKDALGRRLATVSIPTTPAGYRDLLAWARGLGEVDAWGVEGTGCYGAALARFLVVHGQVVLEVNRPDRQARRRRGKSDPVDAEAAARAVQAGEVTAVPKASSGYVEMLRSLRVARATAVKARTQAINALKALVVTAPQNLREQLRGRSATMLVREAAALRPGPLEDPTAAAKLALRTLARRHQALSAEITTLDTELDRLVAKAAPGLVALFGIGPDSAGALLVAAGDNPDRLRSDAAFSMLCGSSPIQASSGKTIRHRLNRGGDRQANAALHRIVVVRLRWHQPTKDYMARRLTEGKSKNEIIRCLKRYVAREVFAVLNQMVQDALTPAA

SEQ ID NO: 503831 - protein, 310 aa, unidentified
MGDLGSALDWAAGRAAAAGWAGVTVSCEPTGRRWRVLGQLAADRSMPFVCVQPMVTSWSRRTEDLTCDKTDEKDAVLIARLTAQLRCYVPEPVDETWGRLRHLGTRREQLITEAGGQVQQMRDLLECAWPAGTAGTSSAPGGWGPPGSGQAVRREVTRRGGRKPCPRVVRGLFTALADPAGVIAHRPGALERVQLLAEDWRYAQDRLAETERRMTAVLDELGLTGLVTSMTGLSAVGAAAILAETGDPRRFAAARAVVKHAGLAPREKLSGAFTGRTRLTGQGRPGLRLAAWRAVWGAQRANPVYAARYQ

SEQ ID NO: 503832 - protein, 402 aa, unidentified
MRIETQPQDHPTAPGSEPGTVLVSFELSQSRWVLTVRAPGSTKLSRFTVPVRDTEKVLSLLTTQRQQVERRTCRPVRIVGIYEAGLDGFWLHRWLETQGVESHVVDAASMLGPQRRRKPKTDRIDGEKLLRSLAAWLGGEAGVCSMVVPPGVAQEDIRRLSRERGELVAERTKLSNRVGGLLANQGIAGFKPLKKAAWQVLRTLRTGDGRELPPHLRTTIERILQRLELLSDQIKAAEAERDALLRAARVNAAPDRVPEAATAASPEMAAAPLLLRLRGIGPEFSTVLPLECLNREFDNRRQVAAFAGIAPTPWASGRTEREQGISKAGNRRLRAILIELAWSWQRHQPDSALTQWFHKRIKGQSGRVKRIAIVALARKLLIALWRYGKHGVVPQGAVLKAA

SEQ ID NO: 503833 - protein, 341 aa, unidentified
MSTIHILGIDLGKHCFHAVAHNYAGKEVLRKKYNRSQLLKFLANLETTAIAFEACGGAHWLARKYADFGHQVQLIPPQYVKPYVKGNKNDFIDAAAIAEAANRPSMRFVAVKSEDAQVIAVIHRIRDGFIKERTACMSRIGAILLEFGLSLPTGHAKMKMLFQWIADQKYQTLPQSLMYELSLIHAHYLYLNEQIKIQDTKLKQLAEQHELAKLLKTVPGIGDLTATLCVADVSAASNFSNGRNMAAWLGLVPRQYSTGGKTKLLGVSKRGNKHLRTLFIHGARAVLSRLETTGKVFGQWLVDLRASKPFNVVVVALANKLAIIAWAVLYHRQAFKTASQS

SEQ ID NO: 503834 - protein, 340 aa, unidentified
MDHIAIDLGGSKSQICVRSADGAVLEERRVPTAELSHYLAKRGPAPTRVIVETCAESFAIADTAKQLGCDVRVVPATLARALGVGARRTKTDERDARCLSEASCRMDLPSVHIPSLASRQRKTQCGMREALVASRTQLINTVRGWMRGQGIRVRSGAVETLPARVRHTVPTPPSYVERQLKMIDELTQSIREADKELEREARADLTCRRLMTVPGVGPVTAIRFVSAIDQVERFGDVHSLQSYLGLTPGEYSSGERRHRTGITKAGCVQTRRVLVQAAWVHKTRRPNEPASIWATKVEKRRGKLIAIVALARKLAGILYALWRDGTTYDPARGALTAMPA

SEQ ID NO: 503835 - protein, 436 aa, unidentified
MAVGFVGGAEQAEVVRRVRGFDPGQVLLVPVDVGKSEAMAMVTDLRGEIVTSPFKFALTISGVAVLRARTVRAVEERSAVMCRVGIETAGHYHRTLVSSLVGDSVEVIELNPAAVKHARAQQLRSRQKTDERDLAAMADLMARGVGRPPLARAEILAAQLAWVGHRRREVDVYRRLRQQIHAQIDLVFPGLSGCFSSLFETQSGRLILSELCCPDRVVRPGPTRLTRFAANRGVRMTRVKANQIVDAAWDSLALPSPERAVLGEILAADVALFERVEADMVRAEAELARLLPDTPAMVLTSLPGVSTIRTSAYGATLGDPHRFKNADAAYAFAGLSPASHDSAGKVRSWLGITKAGSIHLRAAILELGLGLGQFEEGFINYRAQLLARGKPRQVAAVAVAHRAHRLAFAMLRTGQPFNPTQGADRSVMTTRSPATT

SEQ ID NO: 503836 - protein, 342 aa, unidentified
MDRLSPVTRICKVGFTMENELHFIGIDVAKAKLDVDILRPDGRHRCKKFDNTLSGHEALVRWLRGHDVNRAHVCMESTSTYMEDAAAHLSDAGYTVSIINPALSKAFAQSEGLRSKTDKVDARMLAHFCREKRPSAWEAPHPTERALKALVLRHQALTEMQTQEKNRRETAPEVQLASIDILLGCLSAELARIEKQIKDLTDNDPDMKRRRKLLNSIPGIGEKTAAVLLAYTGLRLKFGTARQFAAYAGLTPVQHESGSSVMRASRMSKAGPVQLRKALYMPALSALYHTAWGKAFRKRLEESGKRAKVIIGAMMRKLAQVAYGVLKSGKEFDASQHELLIA

SEQ ID NO: 503837 - protein, 338 aa, unidentified
MELYCGIDLHSTNSYVVVLDPDDRVVFQRRLANDLDVIIPALAPFAARIAGVVVESTYNWYWLVDGLAAAGYRMHLANTWAMKQYDGLKYGDDRTDATWLARCLRLGVLPEGYIYPKAERPVRDLSRRRGRLVRQRTANLLSVQNMFARQTGRTPDANRVKKLEAAELDGLVGDATVALACAANLAVMSVLDQQIAILEKAVLARVRLRPEFRGLLTVPGIGRILALVIMLETGEVGRFAGVGNFASYCRCVEAKRVSNGKRKGGGNRKCGNAHLAWAFVEAANFSVRYDDRAKRFYQRKAAKSGRAVAIKAVAHKLARACFYVMRDQVPFDSERCFG

SEQ ID NO: 503838 - protein, 430 aa, unidentified
MTKRSSTPADAVLVAIDMSKHRQEVLIERPEGGRRRRLTVMATKADYDRLATELSDIGRRVIIGFEATGNYHRTLAHRLLSAGFELRLISSVALARTREALHNGWDKNDSKDAQVILHMLRIGATQRYVDPLAAGINDLQEMSKTHEAISKAKTQTWHRILTHYLPLYFPEIERFAGNSRSDWFLALIERFPTPDSITSIGREAFTEQAWPLIGRKVSKARVVNDIYETACASMALPISADSAAITMFRMVIAQARTLIQQRNEIERIAHDALAANRDYQLLRMIPGIGPINALTILAEAGDLRRFSHHRQFLKFCGLDLATCQSGTFRGRTKLSKYGNARLRRTFWMATQVAIRQPNNSFRDKLSRYVAGHVDDPDRRRKAMTALTAKMARVAHAVIKTGAEYRPFLERADTRWKDPSLPCREGAAATL

SEQ ID NO: 503839 - protein, 384 aa, unidentified
MQASTVDTPTAGHCGTIFATIELSQKTWLVTLHSPDRDRMSRHKLEGGDHAGLLALIESIRARAALKLGSAPKVVSCYEAGYDGFWLHRLLSAAGIANHVFDPSSIAVDQRARRVKTDRIDGEKMLRTLMAYLRGEPRVVRIVRVPTLEQEDARRTSRERERLTKEQTAHTNRIKALLRLLGMTVGNPRRRDWLTWLVKQRDWQGQEVPPQIMAEIKREHARLMLVREQLDALVQAPADLTPAVAQITERSELLLRLKSLGPAFATTLTNEAFYKDFRNRREVGSYFGLTPSPWQSCGIDRDQGISKAGNPRARCAAIELAWLWLRHQPDSKLTQEYRRRTLDASKRIKRVAIVALARKLIVALWRYLTTGLVPDGAVLKTAKV

SEQ ID NO: 503840 - protein, 405 aa, unidentified
MFVGIDWASQTHAVCVLDDAGTKHANFQVGHTADGLDQLIARLGRLGDPATLPVAIERPDGRLVDRLLEAGHPVVAVQPNAIKAWRDAEILSGAKNDPGDAHLLAEYLRLRRHRLRVLAPFSAETRALRAVVRTRGDLVDQRVATANQLGACLEAFWPGAKGIFADLATPIALDFLARYPTPESAANLGERRMAAFLTKHGYCGRRPPAQLLTRLRAAPPGLCGTVEVEARRDAVLALVGVLRALLAAIKDLDRSVVAHLGEHPDAEIFTSLPRSGQINAAQVLAEWGDCRPAYADAEAVACLAGATPVTKQSGKHTAVSFRWACNKRFRQAICTFADNSRHASPWAAKVYADALARGHDHPHAVRVLARAWIRVIWRCWIDQTPYDPAKHGAAHKLTEMATTAA

SEQ ID NO: 503841 - protein, 365 aa, unidentified
MEKISTVKTKGKKILKGQLTIGLDLGDRSSCCCVLDENGEIIREQKIPTTPEGMQQAFGKMARSRIAMETGTHSPWVSRVLTELGHEVIVAHAQKVRLIVKSRRKDDRLDARTLARLARIDPELLSPVQHRSAQAQLHLAEIRARAGLVSARTALVNAARGLVKSYGERLRKCGTQQFGQETTSGLSAGLREALEPLMQEVESLNERIKEYDRRIEKMAKETYPETELLKQVKGVGDLIATAYVLTVEDPHRFRKSRDAGCFVGLQPGRRNSGESEPQMHITKEGDEYLRTLLVQGAHYILGPFGEDSDLRRWGLKLSARGGKNAKKRAVVAVARKLAVLLHRLWVSGEVYEPLRNSQKAMTVAA

SEQ ID NO: 503842 - protein, 405 aa, unidentified
MKVYIGIDWSENKHDVCFLHETGEVLLVKQIPHTIAGFQQLDQARQSLGVGRQEVIIGLETAHNLLVDYLWEQSYEQIYVLPPAAVKSAQKRYRQSGAKDDAWDAHLIANLLRTDQRCYTAWQPDQPLTRQIRAEVRFAQQLGQEVVRDGNRLRSLVLRYYPAALDAFPHLDSLVGLAFLQTYPTLSQAQALSFEQLKVFLREHHHTQVRSWPTIYAGLHSDHPASNPELDAAYAPLAVAQARILETLIRTRQACLARLDKLFRLHPDHAIYDSLPKAGTLLAPALLAKLGDDRARYPTPAVLQAVAGTCPLTKRSGKHSYVLFRKACDRDFRHIVQQWARLTLDVSPWAATYYHTVRPHCQTDNDAVRRLANRWLEILWRVWVDRKPYDEAFHLKQHMLRHQIY

SEQ ID NO: 503843 - protein, 409 aa, unidentified
MRLFVGLDVSSFDMKVCFLNGEGEKLDSFSVSNDLPGAQVLKERLLQCTTNQEVETVIIGLESTSVYSFHPSMFLHHDEDLKRFGTKVFLLNPKQVANFKKSYSDMNKTDEIDAFVIADYLRFGRNQMSIVKESQYVALQQLTRSRYQLVRMLTKEKQHFLQHLSYKCNTFSQEVDSSIFGNAMMELFLEKFSLEELSDMPLEELAEFLQEKSKNRFGEPKCVASTIQKAVRTSYRLDKVVEGSIDILLGTSIEIIRIYQKQIKELEKSIKRIMAGLTQTLESIPGIGPIYAAGIIAEIGQIERFDDETKIAKYAGLYWRTYQSGRFTAENTSLSRNGNHYLRYYLVEAANSVRKHVLEYQEYYAKKYNEVPKHQHKRALVLTARKFVLLVDALLRNHQLFTLERRVKV

SEQ ID NO: 503844 - protein, 352 aa, unidentified
MERYKVCLAIAEAIWVGIDLHKVHWHVTIRTQVAELFSSSIPGSWEALQALLERYPADRVYVVYEAGYFGYWLYDALTQWGATCLVTPPSLVPLQQGNHVKTDRRDSRKLSFYLMKGMLKGIWVPSPERRTHRDVLRRRQKLVADRVRAQSRIKALLQFYGVRVEIPCGLWSQRCVRALSTLQWTNRWQQESFRRLLDEYSFLCQQIKEQTELVHQLAESAPYAEDLKLLRTLGSLGILTGMEFLLELPPMAAFARSEELAAYVGLTPAQYSSGEHIRMGRITAAGRCHLRATLIELAWRVIAKDAAMRTIYERIKHHSGSKRAIVAVARRLVICMRRMLLDRRSYLMRQAA

SEQ ID NO: 503845 - protein, 326 aa, unidentified
MEHELHYIGIDTAKEKLDVDVLRPDGRHRTKKFANPTKGHDELVSWLKGHKIDHAHICIEATGTCMEPVAECPYDAGYIVSVINPALGKAFAQSEGLRNKTDTVDARMLAEFCRQKRPAAWEAPHPLERALRALVVRHQALTDMHTQELNRTETAREVQRPGIDAHLLWLEAELKRLEKQIKDLTDDDPDMKHRRKLLESIPGIGEKTSAVLLAYIGLKNRFAHARQFAAFAGLTPRLHESGSSVRGVSRMSKAGHVSLRRALYMPVMVAASKTEWGRAFRDRLAANGKKGKVIPGAMTRKLARVAYGVLKSGVPFDASRHNPVAA

SEQ ID NO: 503846 - protein, 349 aa, unidentified
MTAPSMFPNLTLGLDLSDTTAHYCVVNAHGQVLHTGRGRLSAAALTRAVAPWPQCRIVLEVGTHSPWVSRLLTQLGHEVLVANPRQLRLIYASHRKTDRVDAETLARLGRLDPALLHPIHHRSAQAQVDLAQLRARDCLVRTRTQLINHVRGAVKAVGGRLPPSSAPAFVAKVSAQLPAELRAALDPLLTLLRTVTAQIRVLEHQLATVARTRYPVTQHLRQVAGVGPLTALCYVLTLEDPTRFRHSRAVGAYLGLCPRHDDSGAHHPQLHITKRGDAMLRRLLVSGAQYILGPFGPDCDLQRWGRTLAARGGGNAKKRAVVAVARKLATLLHRLWVTGTAYQPLRAAA

SEQ ID NO: 503847 - protein, 355 aa, unidentified
MQYIGLDLHSKSFTLTVLDEQGGVLWSVTRATSGEQLVRQVTAVAGSKTIAVEEGTLADWAFRLLSPHAKVLVCDPRTNRWIAGDEKIDDHVAARKLAELLRAGLLQPVHHSESAERQAFKELVAAYHDLTKQLTRYKNKIKARFRGRAIACPGAAVYAAQGRETWVAKLPGEGCRLEIQLLYDTLDHLEGQRQDLLGHINRLSRQFVQVERFQQLPGVGPIRAATFYAVIDTPQRFRTKGKLWSYCGIGIARQTSGQTQGPEHLTRFGNRVLKNVLKGAALTAISLGDNPFAAKYRRQIGKGIAPELARLSVARSIANTLWTLWRRDEEYDPDRADCWDAGVRDKGQSQRQRLP

SEQ ID NO: 503848 - protein, 464 aa, unidentified
MTTLRIIGIDLAVTAAHRAIVLDTASNCFVSNVISFQTNPAELDRVIEAAQKGVPAETRISAVLEATGMAWFTVGTYLQRHGVEVYRVNGRQTADQRRVYNRHAKSDRIDARVLPRLYINAPERICRLFLPEPPVMELQRACREMDRLNSLISASKNRLLATDNFAWLDLREVLKPYEAPARWLRRQWYDPWRVCQAGEAGLKQAWQEDAPEAEPDIDWIPGLIEKARQVVAFYGDPSPIDYQRLQDFMLRELNRLEACEAQKRFLQTKVIHRLYRQLHPQRFLETIPGVGQDSAAVYFAFIGDIQRFSSINSFLGWSGMIPFSSQSGEGQAKGLHITQAGPDLVKRTAFLDATIARLYDPQIAAVYYDQMVNKGKHYLQAICACSTHLLTRIFVVLRENRPLELRDLDGNPLTKRQARTICKERYNVPDEVRIQNNHRVRTQRRELRLEQRTQRADYKQRSKG

SEQ ID NO: 503849 - protein, 390 aa, unidentified
MERPVQKLNDLSRCLTSLQPDGTLTAVIEMGLSSWLVAGIVPGVERQPLKKLAVDENALLKLLHRWRDEAEKAGHRITRITVAFEAGRDGFWLARWLMARDIEAHVIHASSVAVSREHRRAKTDRLDTELLKRAFLGWLRGERDHCKMVAIPTINDEDAKRPNRERESLVGEQSRIINRIKATLARLGIRGFNPKLKKASERLGGLRTPEGEPIAPNTLAELRRDMVRRRLVNDQIRQIEDARLERLKQAPSDGPHAMVRLLARVIGVGIETADMLVQEVLSRNMRDRRAVARYAGLTGSPDESGRKRREKGLARSGNARVRRGMIQLAWRFLIFQKDSALAQWFRARTENARGTRKTMIVALARKLLIALWRLVREGVVPDGVILRPAQ

SEQ ID NO: 503850 - protein, 323 aa, unidentified
MQGKVMPNEAEAAVYVGIDVCKAWLDVYLHPIGQITRVANSQAGLQALVRILACHDVALVTIEATGKLHRLSHGALHAGGFRVAVVNPYRARRFAEVLGQLAKTDAIDARVLALFGAQHHPKAAPPVPEQIAELQEIVMARKAATAEATALANRKASCESRFLAAELTRRIAEVKDHIKRLEGEIRRLIAADPDLTRRFAILTSIPGIGTIVAASLVAGLAEIGTANGKQIAALAGLAPFNRDSGEQRGQRHIRGGRCHVRTALYFAAVTAVRKDPAFSAFARRLKDAGKAAKVILTAVMRKLVVLANTLIAQNRTWSPLPPI

SEQ ID NO: 503851 - protein, 353 aa, unidentified
MIIGCDYHPGFQQIAFLDTDSGEFQEQRLPHREEAEKFYRNLAAQGVKVRVGMEASGHARWFERLSAELNIELWIGDAAKIRAKRVRKKKTDREDARHILKLMLKDDFPRIWVPSWDNRDLRQLLWHRHRMVQMRTRIMNQLQAVALNEGLRCKKRLWRKHGRPQLESIRLAPWASRRRRDLLELLDRLNPTITELTQLIEQEVEKYPIAQRLMTHPGVGALTALAFVLIIGEAERFECGKQIAAYLGLVPEEDSSGESRRLGHISKQGSGLMRFFLVEAAQVTVRSDGEWRNKFFHLAMRRGRKIAKVAMARRLAVRLYWMWRKQWDYEQLKKFGPHAGQPEPGVGVQSNTE

SEQ ID NO: 503852 - protein, 350 aa, unidentified
MQLHTIGIDLGKTLFHLVGLNQRGEVVVRKKCSRKQLLHFTANLQVELIGMEACGGSHFLGRALREQGHEVRLMPAQYVKPYVKTNKSDYIDAEAIAEAVERPKMRFVPIKSDDQLDLQSLHRVRERWVMRRTAVINQIRGLLLERGITLRQGRRHVDEALPGILEDASAKLSGAVRLLLAQLKLELDHLQMRIDEADAVIQKIAGENEACRRLVVIPGIGPVTATAIIAAIGNGAAFKKGRGFSAWLGIVPGEYTTGGKQKLLGISKRGNSYLRRLLVQGARAVLQQSAKQSSGLSAWLAQLTARTHSNVAAVALANKLARMAWAVLAKNEHYRPPMLVGATTAGLACR

SEQ ID NO: 503853 - protein, 341 aa, unidentified
MLGTKTGEFTTKTLSYEGNAVRAFYAPLEGPAVVGIEATGSMQWFLELLEELGIQCRVGHPAKIRAKETRKQKHDRRDAGLIWELLMEDRFPEIWMPSTEQRDLRTLLRDRHQWVKMRARLQHTLQAIALNHALRQGRALWSAAGQSALQALPLPPYTDQRRTALQRLYVQLQKRIQELDQEVEAQAGQRPQARRLLTHPGVGPVTALATEVFLGDPSRFATGNQVASYIGMIPCEHSSGKRQRLGKLTKQGNSLLRYLWTEATLHAVQKDPELKRFYRRKLIQKGMGKARIAAARKLGIRLWIMMRDQIDYKEFCRRGKLRQSGEAQAGMPDFNSGPAQQ

SEQ ID NO: 503854 - protein, 337 aa, unidentified
MVKISFGIDISKDSFHACVKLSEHLNDSKIKGIKNFDNNKKGFDLFLTWAKKRIRENSSVQFVMEATGVYYEDLAYFLYAKGYNVAVVLPNKMNSYAKSLSIKTKTDKQDSSMIASFGIERKVDNWKPMSPLYKELRDLSREFLSSKKEVQRAKNQLHAMKYAHKKSLTVINLKEEQIEFYEVKMKQLKDEIKKVAKQDTAFYAKVKKVETLPGVGFETIIGIVCETNGFELFNSIRQLVSYAGFDIVFNQSGGFNGKTKISKRGNSRIRQILYMPALSAIQHNKPIKNLYDRIIEKNPKIKNKGVVAGMRKLLIYVFVLWTKNEEYDNSHEWSAGK

SEQ ID NO: 503855 - protein, 351 aa, unidentified
MKILSLDLGKNKTVGCEYERESGQHRFQTAFSTRSGWQQMVKEIKPDRVVIEVCSIAGWVCDFLREMGIEVQVANTSDDAWRWRKVRKKNDRLDALKAAQLSAVNQLREVHVPRIEVRQWRALIRFRQHLVRRRTKVKNHIRDLLLREGEILPPRQKCWTQMGMARLEAMARPLSELGLNEMWRGELDIELRQLRAAQQEIEVVEEQLDAIAAADPRVQLLRTIPGVGPRLSEAIVALLDRPERFRKASEVSAYIGMVPKELDSGETQRRGRITRQGSRLVRTLLVEVAWTGLRHNAWVRETYQRIHGGKKSRKKIAIVAVGRRLLVRCWAMLRDGTAWQWPESAAGAGTK

SEQ ID NO: 503856 - protein, 524 aa, unidentified
MPYHVRRIRRDSPKSKPRSIKTLQKPNGVISPRVQKVGGEHFAIVCVDPAKHRSAWMMADYFGNVLIEPQVLQHVGAGFKLAVEQIHQVQQKHDIQDLIVVVERTGNYYLPAKRAFAGAGFETRIVNPFATKQYRMPANPGNKTDETDLFVQHRAAVAGFGLCECELESPYRELQLRARHRRNLVQQAAALACQIREHLHLGMPGYANLFDRLFESPTPLAIAAACDSPAKLVELGALGLSRHLRKKKIPHRSPSIEKVLAWAAQAINDPIKDGPMHHAIWTDLHELYQHFHQQIAALERRLAGDLVQTPYIRLLAIPGINVVSAADLAAEMGPITRYANANSITGRSGLYPSRHQSDQTDNDRGPIIRHANRRLRCVLMRIADNLACHCNYYRAQADLDDRRGIDKRATRVKIAKRFSRLALACVAGDEPMRHPCFQQPDSILDKLRCFHQHHETPVDRLLADLNAAVSQLPYNTRSYEAKIVAGVLQERAQRRRGASAIGDLLPAILARLNVTEENKCGDRS

SEQ ID NO: 503857 - protein, 364 aa, unidentified
MYDSTMTVTVGLDVHARSIRLAVVRADELLEERTLAYDEEAVERVLRRWPVVRCCYEAGPTGFGLQRFLAGRGIDCQVVAPGLVPQRPGDKVKTDSRDARKLARLLAGGLLQPIHVPTPEVEAARDLVRAREDARLDRMRDRQRLSKFCLRHGLRMPTSSWTVVRRKWLGEQHVEFPAQQQTFDTYVHTVDLVDARIERLERAIRETAEQQPWRGLVARLRCLRGIDTLTALALVAEIGDFDRFKTAEEFMAFVGLVPSEHSSGDKRRQGSITKVGNSHVRRLLVESAWHARRRPKVGYELTRRQRGQHAEVIEHAWRCQQRLYQRWQRMAGRGKPHQKIVVACARELAGFVWAIATEQPLRNA

SEQ ID NO: 503858 - protein, 416 aa, unidentified
MLFIGDDWAEDHHDVELEDEGGRRLARARLPEGLEGIARLHALVAEHARAGWSGLSSEEVAGRVVVGIETDRGPWVSALRAAGYQVFAINPLSVARYRERHSTSGAKSDAGDAHVLAEIVRLDRGHHRAIAGDSELADAVKLLSRAHQTAIWERTRHVLRLRSVLREFFPAAVEAFDDLAAADALSLLGRAPDPARAAKLTRAQITAALRAARRHHAEARADAMLTVLRAPGLRQPPVTEGAYAAVVAGQVRIITALNEQIAGLQEVMAGHFGRHPAADIYLSQPGFGVVLAARALGEFGDDNQRFSDARARKNYSGQSPITRASGKKTVVLARYATNRRLGAALHLQAFAALGASPGARAYYDALRGRNIGHHAALRQLANRLVGILHGCLKTGTLYDEDTAWQHHHTDTQTAAA

SEQ ID NO: 503859 - protein, 343 aa, unidentified
MQAIATIGLDIAKSVFQVHGVDAVGQVVIRRQLKRRYVLAFFQKVPPCLVGIEACASSHHWSRELQALGHTVRLMPPAYVKPYVKRQKNDAADAEAICEAVTRANMRFVATKTPEQQSGLMLHRTRHLFIRQQTAVINAIRAHLAEFGIVAPVGRNGVEQLLGIVADPNDKRLPEVARVCIAALGTQLRVLKAQVLNFDRQIMAWHRSNETSKRLDEIPGVGPVLATALVASVADPKAFRSGRDFSAWIGLVPKQYSSGGKDKLGSISKQGDRYLRGLFTAGALAVIRYAKIHGTKHRPWLTALLARRPTKVVAIALANKLARMAWAIMAKGERYKEPVALAA

SEQ ID NO: 503860 - protein, 369 aa, unidentified
MPINLRYVGLDVHAETIAVAVAEADGEVRSLGILPNRLEAVAKLIRKLGPREHLRVCYEAGPCGYVLYWQLTRLGVHCDVVAPTLVPMKPGDRVKTDRRDAEKLARCYRAGDLTAVWVPDAAHEALRDLVRAREAAKQDQLRARHRLGKFLLRQGRRPPEGVKPWTQRHRRWLDALHFELPAQQATLADYLYEVDHAAARVARLESALDEAVAAAPAPMRAVIAALQTLRGIRQVIAATIVSEVGSLARFTHPRELMGYSGTVPSEHSSGDRVHRGAITKTGNAHLRRVLVEAAWAYRFPPKCAKGLRQRQRAIIDIAWKAQQRLCHRYHRLLARGKPTPHVITAIARELVGFIWAIGIAVERGQAMAA

SEQ ID NO: 503861 - protein, 357 aa, unidentified
MKIVGCDLHARQQTIAMVDAESGEFTEKTLDHEGNAVREFYASLKGPVVVGIEATGSMQWFLELLDELGIESRVGDPAKIRAAETRKQKHDRRDAGLILDLLLRDRFPTIWMPSTEQRDLRTLLRDRHQWVQMRSRLQHTLQAIALNHALRKGSGLWSHAGQTVLQALPLPPHTSDRRVALLSLYVQLEKRIRKLDQEVEHQVQQRVQARRLMRHPGVGPVTALATEVFLGDPDRFATGNQVASYIGMIPSEHSSGKRQRLGKMSKQGNSLLRYLWTEAVMHAAQKDPELKRFYRRKLIQKGMGKARIAAARKLGIRLWIMMRDQIDYQEFCRRGKLRQSGEAHAGMPDFNSGPALQ

SEQ ID NO: 503862 - protein, 369 aa, unidentified
MAEYSGAFVAFDVAKAKHAVAIAEAGRRGEVRFLGEVENQPARIERIINKLAARYRRLQVCFEAGPTGYGLYRQIKQLGHECTVVAPALIPRRVGERVKTNRRDAITLARLHRAGELSGVWVPDAIHEAIRDLVRAREAAMDDVRRKRQQLLSFLLRHGRIYAGGGHWTLAHRRWLARQGFGHAAQQIVFQEGVNAIDDATQRLRRLEEQLAAIVPSWSLAPLVQSYQAMRGVSFLVAVTFAAEIGDLRRFDTPRQLMSFLGLVPGERSTGDTVRRKGLTLAGNRRARRALIEAAWTYRYPARVSETLRARLEDLPKTVRDIAWKAQLRLCARYRRLSAAGKRLPVVVAAIAREMAAFLWAIGREIAPV

SEQ ID NO: 503863 - protein, 424 aa, unidentified
MKVTYQTCCGVDVHKSFLVATIVKTTGDIEPSYQKKRFSTFNNSILEFKQWLLDNDCHDVCMESTGKYWVPVFNLLEDDINVVIANPKWVKAVKGNKDDTKDSKWIGDLFRLGLVKGSYIPCKKVRILREYTRYRYKLVSCRSSEKNRYQNALTVCNVALDSVVSDIFGKSSTSIIDYLLEQSGSSINHEEIASKLLRSLKSKEDAVIESVEGYQMTDAQKYRMRLVRAHMDYITAEINDVDKMIENMISSNTDFENAVQFLCTIPGVKRDSAITIISEIGTDMSQFSSSRRLCCWAGLTPGSNESAGKKKSVRFTRAGVYLKPALVQCAHAAVKSDKSPYYKKKYESLVKRRGKKRAIIAIARMILTAIYQMLSTGEQWNPSDLYKIDMPVALVEKQKAKAIKQAKKLLQREGLLPPDEPLAS

SEQ ID NO: 503864 - protein, 386 aa, unidentified
MAHSTNILPRSADYDQTLVLAIELSNKSWVLAAQVPGLSQTKAKRTIDPDKNDLLAAIDGYRTRAAAAGRSVKRVITSYEAGWCGFWLARWLMAHGIEVHVVQPSSVPVDRRMRRGKSDGIDAELLLRTLLAWLRGEPRVCSMVPIPDEADEDARRCVRERSELVSERVGLVNRIGAVLATLGADGYNPLLQSRRRRLTELRTGLGDPIPPNALAKIARLLTRLELVLAQIAELELERDAVARTDAPDQAAKMIQQLVSLRGIGVQSATVLVREAFVRRFANDKALGSYAGLTSTPYSSGSIDREQGIGKAGNRRLRTVMVELAWLWQRYQPGTSQVVWFRQRVGSTGRRVRKVMVVALARKLLIALWRFVIDGVIPEGAITKPSI

SEQ ID NO: 503865 - protein, 399 aa, unidentified
MAAPSLWAGIDAGKLDHHCVLIDASGERLLSRRVRNDEAALTALIDDVIALADGGLVQWAIDLNAGGGALVISLLLARDQHLLYIPGRIVHHASAAYRGDGKTDAKDAAIIADQARMRRDLPEFRHRDEFTVELRTLCARRTDVAADRNRAINRLRAQLLEYFPALERAFDYSHRRGALILLTGYQTPEALRRTGRTRLEKWLRGRNAYNPVAIADRAIAAANAQHVVVTGQRLGSTIVTRIAQQILDIDAELSDLDDMIEERFTQHQQAAVIRSMPGFGPLLGAELIAATNGGLDSFHSADRLAAVAGLAPVPRDSGRISGNLKRPRRYDRRLLRVFYLAANNSIKTCPQSRAYYDRKRAEGKHHRQAILSLARRRVNVLWAMQRDNTAYRSTAKTAA

SEQ ID NO: 503866 - protein, 353 aa, unidentified
MEYGAIDLHKKDSQVRIITASGEVIDQRIRTARDRLTALFWGRPHARILIEASTESEWVAQHLETLGHEVIVADPNYGLMYGHRSRRVKTDRRDVAALAEACRHGIYRCAHRRSPRQRTVQWHLNVRRELLDTRTRLISVVRAITRSQGYRIAGGATDTFLTRLATLDLPVSVSESLMPVRSVMELLNQELADADQRFEALVADDPIVKRLTTCPSVGPITATAFVAALDNVHRFAGRRGAAQVTSYLGLVPREYSSGEQQQRGRVMRSAHPYVRVLLVQAAWRLCRSSDARAAALRTWAQAIARRRGKNIANVALARRLARILYAMWRDGIDYQPDRIRSARLDTAAATPAA

SEQ ID NO: 503867 - protein, 426 aa, unidentified
MKSNTQNAKIAAITEKTLIIGIDVGSETHFARAFDWRGYEFSGKPLEFSNTGEGFETFRAWIDELKEKHGMDKVMPGMEPTGHYWFNLGKFLQDHGMTLVHVNPHHVKKSKELDDNNPSKNDRKDPKVIAGLVKDGRYFRPYIPDGIYAEIRALSGLQILAQSEITRLKNRIARWFSIYFPNYKDVYGNVGAVSGLMVLEAAPLPADIVKLGIDGVNRIWREAKLRGVGLKRAKTLVTAAEHSIGSRDAQEAARIELRILLADYKMQTAREAELMALIEEKIRKVPYVDKLLEIRGVGLKTVTGFVAEVGNIDRFDDPGQLQKLAGYAIVKNESGKHKGESHISYRGRKRLRYVLYEAAVSVVSHSAEFRSIYQYYTTREKNPLKKMQSMIAVACKLVRVFYLILKTGATYDAGKLMDDIRRPVAA

SEQ ID NO: 503868 - protein, 370 aa, unidentified
MEQYTEAFVGIDTAKNKHALAIADPGRDGEIRYLGEIDSAPAAVQRMIRKLAGRYEKLYFCYEAGPTGYGLYRQVRALGHDCIVVAPSLVPKRPGERVKTNRRDAVTLARLLRAGDLTPVWVPDAVHEAVRDLVRARTAASEDLRRKRQQLLSFLLRHGRIYSGRKHWTKMHLHWLAQQKFDHPAQQIVFQDAVDAIEDAATRLRRLDQQVAEIVPSWSMAPVVEAYQAMRGVSFGVAVTFVTEIGDLRRFDNPRQLMAFLGLVPSERSTGERVRRAGLTLAGNKRARRVLVEGAWSYRYPARVSQTLQARLEGLPKTVRAIAWKAQIRLCARYRRLTAAGKKRPLVIAAIAREMAAFLWAIAQHVAPAA

SEQ ID NO: 503869 - protein, 340 aa, unidentified
MKLYGAIDLHSTNNVTVVIDEQDRVVYQKRLPNDLALILRELSVYQTELRGIVVESTYNWYWLVDGLMEQGHKVRLANTAAIQQYEGLKYTDDHSDARWLAHLLRLEVLPEGYIYPRADRPVRDLLRKRSQLVRQRTTNLLSIQNLVTRNTGESLSANQIKGLDTQQVDELLPNRDLALAVKANLSVMCSADEQTEILERTVTQRAKLSPQFSFLKTVPGIGQILALTIMLETGDIRRFFSVGNFASYCRCVGSQKISNGKRKGKGNTKNGNKYLAWAFVEAAHFAIQFNSKIKSFYQRKKAKTKVVVAIKAVAHKLCRACYYILRDRVAFDVTKAFGQN

SEQ ID NO: 503870 - protein, 312 aa, unidentified
MAMLSFCGIDVSKDRLDVVVLPEGWFFSVSNDTTGWAELVVRLRPLAVSAIGLEPSGGYERGIIRALLAAGLSVRRINPSKLRQFARARGVLAKNDRLDARLIAEYVAIMPTRVVQRDAAVERLAEIVTMRRQLCDEHVAAENQAAHLEDAMLRRLSKRRQMRLEADIRLLDKRLAEMVAANVALAQRYELLTSMPGVGPVLAVTLIALLPELGKMSRKQIAALVGLAPYDFDSGKLKGHRSIYGGRMPVRNVLYMAALSASRYSPALKTFHKRLAAADKKSKVIIVAVMRKMITTLNAMLRDSAAWQPRSA

SEQ ID NO: 503871 - protein, 343 aa, unidentified
MQTVTTIGLDIAKSVFQVHGVDANGQVVIRRQLKRRYILAFFQKVPPCLVGIEACASSHHWSRELQALGHTVRLMPPAYVKPYVKRHKNDATDAEAICEAVSRPNMRFVATKTPGQQSCLTLHRTRHLFIRQQTSVINAIRAHLAEFGIVAPVGRHGVEQLLQVVADKSDKRLPEVARTCVAALGAQLQTLKAKILEFDRLIMAWHRSSETSRRLDDIPGVGPALATALVASIADPNAFRSGRDFSAWIGVVPRQNSSGGKDRLGSISKRGDRYLRGLFVAGALAVIRYAKIYGTKHRPWLTALLARRPTKVAAIALANKIARMAWAMMAKGERYKEPVALAV

SEQ ID NO: 503872 - protein, 441 aa, unidentified
MKNYFLGCDVSKGYADFVILDTNKKIIENNFQLDDTFFGHNKLYEVLTDFFKQNPNSKILSAVESTGGYENNWFNTFSKLGEILNLSVVRLNPLGVSHSQKAKMNRAITDEISAYNIAEYLINHQNKINPNTKSYYSSLRKQWVFVKLLVKQRVQLLNQLESIVYTANTEVLSYCKHSTPNWLLFVLKQYPTAKRLGRANVSSLVKIPFVSRDKAEALISKAKLSISSSDDKITENIIKGIVEQILQLTKIIAYHEKQMSDSCNLPEVKLLDSFTGIATYSAVGLLLEIGAVERFASSKKLASFFGLHPTLKSSGDGRAQVRMSKKGRREPRLILFNVARTSITYNPLIKEIYEKYVKKGMPKMAALGVVMHKILRIVFGMLKNKQTFNPAIDRNNQENCKPKKEVIKISKARRYQSYDLQAPVSRRQSNKRKEEKKSQVL

SEQ ID NO: 503873 - protein, 367 aa, unidentified
MNSITYIGLDVHTSNYTICAFTIEKDKTFAETTIKPDINELEKYLKRLSEIQGGDSRFICGYEAGCLGYSLYNQLTAKGYECIILAPTTMPKTVNEVKTDRRDARKIAKCLAYGTYSKVFVPSNEDNAVKEYVRMRDDAKTMLKQTKQQIIALCTRHNKNYDGKTNWTQKHIDWLKHLDFGIDVLNETLTEYIITLEQLINKIERFDKRIEEIAQQDKYKENAKKIQCFRGIKAHTALSFLVEIGDFKRFPTAQQFSSFLGLVPGEHSSGDTQHRMSITKAGNSHLRRLLIEAANSYSRGVAGAKSKAVKQRQEGNAPEVIAYADKANERLRRKYIKIALKSNSNVAKAAVARELTCFIWGMMNDKL

SEQ ID NO: 503874 - protein, 347 aa, unidentified
MSRIWEGVDRGKGHHHGLALDTDDQTLLSRRVANDEPELMKLISYVLDLADGREVTWAMDKTGGEPALLLALLVSHGQEVLYTPGRLANRASDGYRGKGKTDARDAYVIADQARMRRDLRPIRSGDEAAVVWKLLTGRLADLVEDRTRVANRNVRNARSLAEAAVEAAERQYTAVPGEKSIAKLVHTLAEEVTALNNQIAEMDKLIEDRFREHELADIVLSVPGIGIVLGAEFLAAVGGGLDEFDSPNALAAFAGVAPRPRDSGKVSGNLHRPLVYHRSLQRVFYTSALVSVRYDPNSRKFYDRKRAEGKKHVQAVLALARRRDNVIWALIRDRRFYQVTPPVTAAA

SEQ ID NO: 503875 - protein, 364 aa, unidentified
MVRLYYVGMDVHKETIDVLIFRDPGRQPYLERRIPNREQTVRKLFGKLLSHGSVIACYEAGCIGFELQRLLEDMGITSIVTVPGKVPRRTTDRVKTDRRDARRLAEQLRAGTLEAIHIPSREDEAVRDYLRAREDVRGEQVKAKQRLQKYLLRHGYVYESVRYWTLRHDRWLRGLEFDKPLLKETFDQYYYRIQELREQLRCMDKRIEEIALSEEYACRVKKLRCLKGIDYMTALSIVCEVGDFKRFGHAESFMSFLGLVPQERSSGEKRRQGGITKSGNTHIRKLLIESSWHYRYKSLPSKRLTERRRGQPSEIIAYADRAMRRLQGKYFHLLLKGKRPQVAVTAVARELAGFVWGLMVGQTV

SEQ ID NO: 503876 - protein, 408 aa, unidentified
MRIIGLDIHRAFAEAVAWKDGKLSRAGRVIMRREPLEEFAKQLSKSDIVVVEATGNAASVAAVIGPHVSRVVIANPKQVRLIAHAKIKTDKIDAGVLAQLYASGFLPEVWIADETTQALRRQVTRRNQIVRQRSRLKNIIQSILHAHLIPSCPHQDLCGPKGRAWLSEQILPGDERLAVERHLREFDRLTDDLKVIERDLAQSALADERAKRLITIPGIDMVVALALIAAIGDIERFARPEQLVGYLGLNPSVRRSGPGPAYHGRITKQGRGHARGMLVEGGWAAARSPGPLRSFFLRVQSRRGQHVAAVATARKLAILIWHLLTKNESYLWARPALHARKLRDLELRAGHKPARGQKGTTFAYNLKSQRDQERRWVEQAEAAYARFVAGWNVRGPKARTGAADEGRQ

SEQ ID NO: 503877 - protein, 314 aa, unidentified
MSTAMYVGLDVAKAHIDGAVRPSGDVHRVPHDDAGLTTLVTEVRALAPTLVVLEATGGDETDVASVLALAGIPVAIVNPRQVRDFAKALGRLAKTDAIDARVLTLFAERVRPAARPLPDAAQQALVALVARRRQLVDMLTAERNRLPLAHGAVRRDLREHIHWLERRLRDSDRDLAAMMRDSPLWRAQDNLLRSVPGIGPVTAAVLIAELPALGRLSRREVAALVGVAPLNRDSGTRRGPRTTWGGRATVRAPLYMATLVATRCNPVLRAFYRRLRTAGKPPRVALVAAMRKLLTILNAIVNTQRPWQPVALDL

SEQ ID NO: 503878 - protein, 393 aa, unidentified
MFNPLKVRLMRSVCGLDVHKDSVYLCILSEDGELIEKVFGVLTFQLHQMRDLLLAHHVEKVSMESTSVYWIPIWRILAPHFHLQLVNPYFIKQLPGHKSDVADAQWIAECTMKNLISSSFVPPEDIQQLRQYDRRIFDLDEEIVRKLSKLDAVMQRCNIRLSNYVSNVDCKSYKDVVRKISEGVTDPEILIEEIHGRIIKHHGRETILASLTGVVSQAEIDVLRQLREELDLAEEHKQECLERMLDICKEKYPDELRRLQTIPGVKERTATSLIAEIGTDMSKFETANHLTAWSGLRPRNDESNRKFKSRRITHGNVYLRKNIIQCAWGASRTKNCFFSRFSYHQTQVRKKNKMKVIVAVARKLLVAAWHVIHDKTDYVDFQKQDRQSPASNG

SEQ ID NO: 503879 - protein, 427 aa, unidentified
MVCLRLPPEPGKKYRTSRTWEVTAAVPEIEALAAELKAAGAERVSMESTSDYWRVWFVVLEAAGLAVQLVNSSQARNLPGRPKTDKEDAAWIARLTEMGLLRASFVPPPEIRALRAYTRQLVHLTQDRTRYWQRLEKLLEDALCKLSSVVSGLAGVKSCLAMLEAMIAGERDPQVLAGYALGPMKAKHGALVKAFTGMRFGPQHAFAAASDLRMIKMLDAEIEALEAQVREHIAQIPAAWGVDADGTTGPGAGTGPGAAVLPAIDRLTEIPGVSDTIAAGLIAELGLDMARFPTAGHLVSWAGLAPVADQSGPRTGRGKKGKGNSYARRCAGQAGNGAARTDSFLGERHRRVRSRPGPGAWNRANIAVGRSILIIVWHLLNDPSARYRDLGPDHYARHTDASRKARGHKRQLEALGYDVILTPREAS

SEQ ID NO: 503880 - protein, 353 aa, unidentified
MKCDKYIGCDLHQATTVVTVLDAEGKVAMETIIATEAAAMIRFLKSLSGPLHITFEETTQARWMYDVVRGYVSEAIVCDPRRNKLLAEGSKADKPDARKLAELLRAGLLRPVYHGHEATRQLKELVRGYETLSADTQRIMVRIKSIYRAHGIRTSGTAVYQQKQREQWLPLLSEPGTRQRVSWLYEELDHLRPLRKQAKMAMVTEGRKHQAFRLLRTIPQLGPIRCAMLVATVDTPYRFRTKRQLWAYSGLAIVTYMSSGYEIKAGRVVRSRKPVATRGLNRNCNRRLKDLFIGAAVAGSRSEPYRSYVEGLQQKGIRAEMARLTLARKIAAVALRVWKKGETFDPKKLNSTT

SEQ ID NO: 503881 - protein, 264 aa, unidentified
MDKLYAGIDIHKENLAGCIMDKDGNIKREHIFPSSKKAIEKFLCNIPNSDTTIAIEACGMWRGTHKILTELGYQVKLANPKKTHDIAGSKKMDKIDAKTLADLLRTHYLPEIWIPDEQTLQFRDLTRHKSNLTRLKTQIQGKIRGYLLRKGEKYNKLSKEETLSTLAKEDPDIKNLVHVYNCIKEEEREVMRRIKRISQNMKQTTLMMSMPGIAEFSSLMILAEIGDIKRFPSSKELVSYAGLCSGIYQTGTTERTVHNTAVNK

SEQ ID NO: 503882 - protein, 343 aa, unidentified
MQAITTIGFDIAKSVFQVHGVDAAGQVIVRRQLKRRQVIAFFQKLPPCLVGIEACASSHYWSRELHALGHRVRLMPPAYVKPYVKRQKNDMADAEAICEAVTRANMRFVPTKTPEQQSGLVLHRTRHLFIRQQTSVINAIRAHLAEFGVIAPVGRKGVEELLCVVADANDKRVPEVVRACVAALGSQLLSLKKQILDFDRMIMAWHRSNQTSKRLNCIPGVGPLLATALVASVADPKTFRSGRNFSAWIGLVPKQHSSGGRDRLGSISKQGDRYLRSLFVAGALAVIRYAKIHGTKHRPWLTALLARRPTKLAAIALANKLARMAWAMMATGARYNYPASLRV

SEQ ID NO: 503883 - protein, 353 aa, unidentified
MRTYYVGMDVHRATIAIVALNGAGKVVEQLVVETSATRVRNYLKQLRGRVYVTFEEGTQAQWLYDVVQPLVTEVIVCNPRHNKLLKAGNKSDRIDAQKLAALLRNGALQAVDHRDHGVRALKELVRNYDCLVSDTTRVMNRLKAMFRGRAIACGGHEVYRQDRREVWLSKLTERGAKERAGSLYRQLAALRALRQEAKLAMVREARRAAAYSWLMSVPRLGAVSVAQLLAVVGTPHRFRTKRQFWSYVGLAVVTSSTADMEVVEGVLRRSRRPVATRGLNRNHNHLLKRVFKNAATSACQSEPFKQHYERRLQQGMEPALARLTVARQLAAITLSLWKRGEKFQAERMKRPAV

SEQ ID NO: 503884 - protein, 367 aa, unidentified
MKKVSTAETMPRRNFSRQRLTIGLDLGDRNSWYCVVDEAGQIELEQRVRTSAKAIQEVFSAMPGSRIALEIGTHSPWISRLLSELGHEVIVANARKVRLIGESRQKDDRLDARTLARLARIDPELLYPVKHRSAQAQADLAVIRARAGLVRARTGLVNRARGLAKSYGEHLRGCNVRNMNPEKAEGLSPELQRALEPLLSAIEELSQRICQYNEGIEALAQASYAQVALLKQIKGVGTLIALTFLLTLEDPHRFRKSRDVGCYVGLQPGRRNSGQSEPQMHISKEGDPYLRTLLVQGAQHILGPFGVDCDLRRWGLKLAERGGRNGKKRAIVATARKLATLLHHLWVSGEVYEPLHNSSRMTVAAAA

SEQ ID NO: 503885 - protein, 342 aa, unidentified
MKATTIGIDLAKHLFQLHGVDQHGKTVLKRQLKRDQMLSFFTNLPPSLIGMEACGSAHYWANKLQGMGHTVKLMAPQFVKPYVKTNKNDAADAEAICEAVTRPNMRFVPIKNGEQLAVLALHRARQGFVKARTAQANQIRGLLAEHGIIVPKGIAHISLRLPELLEDAENNLPGTFRQLIERLGEHLKELAKQVNELEEQIWCWHKENSASQKLAKMPGIGPLTASALVASIGDAKQFENGRQLAAWLGLVPKQHSSGGKQTLLGISKRGDIYLRTLLIHGARSVLRVAERKTEYAGSWLAGVMERRNHNVTVVALANKNARIIWALLAHEREYDADHAVAA

SEQ ID NO: 503886 - protein, 325 aa, unidentified
MTASHFADNSFIGIDVGGSSLDVAWHRGDSAHYANRPDAIAALVNRLMKQPVRRIVIEPTGGYEKALVKALREAQLPLEIVHTTRFKAYRELLGVKAKSDTSDARLLAAYAAAPDDVRGRKADYVELPEDAIREALSELASRRDQLKHMIHAETCRLGTTRLAELRQAITTHLEALKAEDKSIHKRMLELVRQRLDLKRDQKLLATIKGIGPKSTLALLACVPELGRIDNKAAAALIGVAPFVHKSGTMVAPARIHGGRAAVRRILYMAAVAASRHNPVLRPFYDRLIAKGKPAKLALIAVLRRLVVFANAVLKSGQPWKGATAA

SEQ ID NO: 503887 - protein, 456 aa, unidentified
MSKRRGKAKRVQKASNQEPENLPVLNRDAAAIDIGSEQHCVAVPPGRDTESVRSFGAFTIDLHAMAHWLKQCGIKSVVMESTGVYWIAPFQVLEQYGLEVLLIDARLAKNLPGRKSDVLDCQWHQQLHTFGLLRGCFLPVAEIMPLRSYLRLRDELVKASTQAVQHIQKALFEMNVQLANVISDITGETGLAIIEAILAGERDGKKLAELKHRRIVASKETMAKSLEGHWRPELLFALQTALDRYKFYQQQLAQCDGQISQALAQLPTRQLQAQSEPEKKTEPSAREQKLTPLEAELKRIAGVDLTSIDGIGQQIAQIILSELGPDLQKSFQSEKHFSSYLGLCPGTKISGGKVLKRRSRKVKHRVATALRLAARSLHSSDSALGANFRRLKARLGAPKAITAMANKLAKLVYRLLVYGKDYFDRGAQMYEQKFRLQQIRRLQKQAKMLNLKLIPA

SEQ ID NO: 503888 - protein, 390 aa, unidentified
MEVRMENTPSATTNNDPAHCFVAIELSKSSWVLGFQTPLAKQTSRYQVKACDAKALLELIERVRSRMARELGRPVEVMSCYEADYDGFWLHRVLEAHGIHNHVLDPASLQVNRRARRPKTDRIDADRMVRALIRHLRGEPEACSVIRVPSPEQEDARRLHRERDRLIAERVAHVNRVKGLCASQGIYDYEPLRSDRLKRFEKLRSGDGRALAPRLKAEIVREIKRLEVVLEMISTVEAERDAVLTEKKSTHLNADKIKMLAKLKAIGAEFSTVLVGEVFYREFANRRQLGSYVGLASSPFRSGSLDRDQGISKAGNPKARTTMIELAWIWLRYQPESALSRWFRERVGNLKGRPRRIAIVAMARKLLVALWRYLQTGVVPTGAELKAQSN

SEQ ID NO: 503889 - protein, 482 aa, unidentified
MKSKPEEKTKKAANHSTPHHWDEMNRKQRREMMRKIQSADLRLEVVHPNAGGIDIGNESHYVAVPPDRDSQPVQRFGCTTAELKAMADWLKQCGICTVAMQSTGVYWIAVFDILESAGLEVYLVNSRDTKNLPGRKSDVQESQWLMKLHTYGLLRNSFRPSQQIRTMRTYWRQRNDLVQSAGRHIQRMQEALTQMNIQLANVLSDISGVTGQAIITAILAGERNPRKLAELRDPRVQASQDEIARYLEGNWQEDLLFVLKQEQEGYEFCQKQMAACDEQLKQYLQQREDCSQGASLPEETRKGRLSMKKGNRPQFDLRADLFRMTGTDLTQIDSIDVMTAMTILSEAGWDMSKWATEDHFVSWLRLCPDNRISGEKIIGKRRLPTNNRITIALKMAASSLRKSKTYLGAQFRRLRTKLGAPIAIKAMAAKLARLVYRMLRYGMKYVDQGTEFYEAQHRKLQIKQLKWKAAKLGFRVVDAPAA

SEQ ID NO: 503890 - protein, 340 aa, unidentified
MTITTVGIDLAKNVFAVHCVDQNGKTVLVKSRVTRAALPGLIAGLPPCVIGMEACSGAHYWARLFRQYGHEPRLMAAKFVSPYRMAGKSGKNDAADAQAICEAVRRPHMRFVPVKDKSQQAMQCLHRTRQGFIEEKTATYNRLRGLISEFGVIAPQSTDALRHIVFEQKNSLPLQVQQCVDDLLEHVARIEDNIAEYDRILSRMAKTDHRSQRLMELKGVGPTTACALVASIGNAHDFKNGRQLAAWLGLTPSQYSSGGKSKLGRITKAGDSYLRTLLVQGARSVLIGAEKRTDLFSRWVCSLVERRGYWRAVVAIAAKNARLCWASLHYGDDFRLYSAS

SEQ ID NO: 503891 - protein, 341 aa, unidentified
MGIVGGLDVHRRQITFDVMDTDSGEVTRGKIAPADRQALRSWLGRLDGHADMAFALEGGTGWRFVAEELHRVGARAHLAEPADTAKERGRKQRAKTDRNDARLLRELLAMGRLPESWIPPDHVLEVRARVRLYKALADERRAWLQRIRATLFHHGVPALACHLLDADGQAHLERADLSPSGRESVEVALGQIERLDTELARLRGDLVGFGHHQIGCRALQGHYGIGALLSVAIWEELGDCRRFGSSSDAVRHAGLDVTVWASDSKRAHGHLARQGPAILRWALYEAALSAAKRSSPDHDYFLSVRERLGPERATLSVGRKLTRRCFHTLRNLGDDALAPAA

SEQ ID NO: 503892 - protein, 391 aa, unidentified
MEAAVITAVGIDVSKSKSTVAVRRPGGEIVLRPFEVHHTNSDLKKLASTLKKLGGDIRIVMEHTSTYWRPIALTLKEAGFFVSVVNAMLIHDFSDNTIRKPKTDRADALKIANYALTFWDTLPPFNNEEETRLLLKMQSRANERITATATALRNGLIALADQTFPGVNIAFDPNTKNANGHEKWVDFFLRYWHKDCVCQYSMEAFTESYRGWCKRKNYKFRTDTAHKIYLLAQEGVATLPKCESTKMLITQACKSLNAVCEAKQSTQLEMQRLAAMLPEYEVVMQMEGAGPITGPALMAEIGDVRRFKNKKALVAFAGIDAPPFQSGAFESKSRHVSKRGSPHLRRTIFIVSNIILTRSNPENAVYCFMDKKRSEGKHYYVYTVAGSAKFL

SEQ ID NO: 503893 - protein, 438 aa, unidentified
MSNKIIFNLDELFISLGIDVGADFSWMSIALPNQQLVGKPFKILHNSMNSLLTTVSKIKEAEELYSLESRIFLESTGIYHYPLFCYLRDKGFNCSVINPIITKNSTNINIRKVHNDRFDSKKAAMVGLKPDLKVSLMPSDLALNCRNLCREYYDLMDDRSAYINKLQSELRMAFPQYLGIFSKVTTNTSLTLLENYTSPQAFLNTDRQEIIDSIRSTARFGLTYAQNKYNAIIQAAHDANEFGYIIDSNIRRIRLYIRLIRKYDGEIASLLQDLHDLVEQNEDTDFVKQVHLIETIKGAGFLSAVSLMGEIGDFSAFSKPKQLFAYFGLDPAVKQSGKFVGTKVQMSKRGSSIARRVIHVLALQSISIAQNGVAKNPVLHAYYLKKCESKPKLVAMGAVAHKVCNIIFAVLRDCKPFEMIKPEEHIRQYITARCYMAS

SEQ ID NO: 503894 - protein, 403 aa, unidentified
MRTRKPARPKKMNLPKHLQHINPHAAGIDVGSRSHFVAVPEGSCEQPVREFTSFTDDLHRMADWLLACGVTTVVMESTGIYWIPVFEILESRGLEVRLVNARHVKNVPGRKSDVLDCQWLQRLHSYGLLEGAFRPAEQVCTLRAYVRQRMNLVRYASAHIQHMQKALSQMNLQLANVVSDITGVTGMRIIKAVLAGERDALVLARLRHPRCKNDESTIARSLRGNFRSEHLFSLKQAVDLYEFYQHQIGECDRQILDQLASFDAADGPANGPPANLEQALLRMSGVDLTRIDGIDTNSALKIISEIGTDMSRWKTAKHFASWLGLCPGTKVSGGKVLSAKSKPVANRAAAALRMAAFTLLKSKSALGAYFRRQRSRLGAPKAITATAHKLARLVYSMLKHGTA

SEQ ID NO: 503895 - protein, 355 aa, unidentified
MTSTKYIGMDVHKESISIAVRNSAGKVVMECVIETKASMILQFIDGLRGDLQVTFEEGTSAVWLYDLLKPHVTKLVVCDPRKNKSMREGNQSDKIDARRLAELLRLDHLTPVYHGEHGLRTLKELVRSYLTVTKDLARVMSRVKAIYRSWAIPCTGKQVYAPRHRAEWLGKINEPGVHRRAEFYYQQLDALRGLRREVRRDLLAESKKQKAWKRLCEIPSIGPIRAAVLLGILQTPHRFRTKRPLWNYGGLAIEMHSSADHRSVDGQLQRSRKNVLVRGLNRNCNHDLKNLFKGAAVLAASKPGPFQEFFAALLATGMRPEMARLTLARKIATIVLMVWKKGVCFDAQHLKPQTA

SEQ ID NO: 503896 - protein, 408 aa, unidentified
MLFVGDDWAEDHHDVELMDAAGRRLAKARLSEGVAGIARLHALIGAQLGDDVEDAAGQVKIGIETDRGPWVQALVAAGYTVFAVNPLQAARYRERLAVSGAKSDAADAHMLADMVRTDSHQLRPVAGDSVEVEAVKVVTRMHKTLIWERTRAGQRLRHALREYFPAALEAFEDLDAVDTLELLAKAPDPGSAARLSTAQISAALKRARRRDIAVKAATIQAVLHAQHLGQPALITAAYAVSVRALVAVLGTLGEQVKILQGQVEAHFGQHPAAEIVLSQPGLGAVLGARVLAELGDDHDRYVSAKARKNYAGTSPITRASGKKKTVAARFVHNDRLIDALMTQAFTSLRNSPGARAYYHRQRARGASYNAALRQLANRLVGILHGCLKTGTPYNEATAWSHHLSKAPA

SEQ ID NO: 503897 - protein, 352 aa, unidentified
MAQTRNPAIVVVGIDIGKNSFHIVGHDERGAIVLRQKWSRGQIASRFAAMPPCLVGMEACVGAHHLSRKLKTLGHDARLMPAKYVRPYSKGQKNDFRDAEAIAEAVQRPTMKFVATKTSDQLDLQALHRVRERLVSQRTGIINQIRAFLLERGIPVRQGQRVLRAELPVILATPPDVLSHRMVQVIECLAGDWRRLDERIEYLSLEIETLARQDAGCGRLMSVPGIGPIISSAMVAAIGAGDAFSKGRDFAAWLGLVPRQISTGDRTILGKISKRGNRYLRVLFVQAAWVVLIKPKSWQRHGLKPWIEAAKKRLHHNVLAIALANKLARIAWSVLAHGRNFEATKIREVAAQ

SEQ ID NO: 503898 - protein, 402 aa, unidentified
MNQPVLSIDVAKGKSVAVAFLSYHNCLYKPFTFYHSQEGLQQVLAVLKELKSVSGQEPKVVLEATGNYSKPLASFFSSQGYLVVLLNPLLTHQLKQKAVRKVKTDPIDAIRIAHVFYLQDPQPHVQLNENVQQLRVIGRQYQHWTALYGQTQIHFRAVLDLLFPGYDQAFQKVCNRTSLELLSRFPTPAELLSADPEEVLNLLLRNRRGRAWNETKRQQLLEIARQSLPDLHGIEAQKEVLKHYIHLLQTYQDCIDELLQAMQSLAESIETYALLRTIPGVGLLTAAMLIAEIGDIKRFPSVKQLTAFAGLDSAVHESGTFKSKKNRISKRGSSYLRTALYQATVAGISKKVHGPRNSILFQFYQQKRDEGKPAKVAIVATSHKLLRIIFGMWNSGSAFQAH

SEQ ID NO: 503899 - protein, 512 aa, unidentified
MRVYNYKPHPAAQATFITITMESNMAKHKKSPDTKPPKKKEMAYLKQINPYVAGIDIGSRSHFVAAPVSTATNDDLEICVREFSSFTPDLGALADWLKECQITSVAMESTGIYWIPLYELLESRGFEVNLVDARHVKNVTGRKSDVKDCQWIQQLHACGLLSPAFRPDDKILPLRSYTRQRDTLVENAAECTLRMQKALMQMNLHLSNVLSDITGLTGMQIIRAIVNGERDPKKLAQFRDRRCKNPVDVIEKSLAGNYREEHLFSLRQNLESYDFYQQQILTCDQKIEQALIELNPNPVKLKNTAFDKDQDPKSGQQRTSKSRQGNALYFDPLEHLQSILGVDVTTIPGIERNLAVKILSEIGTDMKKWKTEKHFTSWLGLSPENKVSGGKRMSSRTKPSANRAALFFRLAAFSQFRSQTAIGGFLRRMKAKLGAPKAITATARKIAAIFYSMLTKGTDYVEAGLDYYEKQYKERVIKGLKKRAADFGFTLTSLIEPATCEKGESAHACAFS

SEQ ID NO: 503900 - protein, 468 aa, unidentified
MIRKHNASQNNQGLPSGLPVIRPRVAGIDIGSSEHWVAGPARADGEPNVAVFATTTDQLNAMADWLVEQGVESVAMESTHVYWIPVYELLQSRGVEVVLVDARQAHKVPGRKTDCRDCQWLQLLHSCGLLRGSFRPSESISRLRAIKRQLANLVEERSRCIQWMQKSLDQMNVQVHRAVSDLTGSTGMAILRAIVAGQRDPVELAQHRDRRCRKSSSEIATYLTGTWREEHLFNLASALRLYDTLGQEIATYEARLLQEMQALQPPERCDQPVPPHPNKTKQKALRARGEQSVRTVLWRFAGVDLTRIDGISAGAAQVILTEVGPDLSAFPSEDDFVSWLRLCPRTPISGGKPLKKKRNGMGAQRIAAVLRMAATALQRSRTALGAAFRRIARRKDYRVAIFATARELAKLVYRMLRFGKDYVDTGEKPYQQRFERQRLASLARTATAMGFVLVPQTPKPAKTEVSGG

SEQ ID NO: 503901 - protein, 310 aa, unidentified
MGVCIGVDVAKAHLDWAIGPKGKVERIPNSLAGVRRLVKKLHQLEFDLVALEATGQYERLLYEKLGDAGIPVVRLNPVRVRRFGQGMGVLAKNDAIDARMLALFGEKAEPEIREQKTDRERLLGDLAARRRQLIGIITAEKNRLEHATPCVIAELRGLIRILENRVVKLDSKIDRVIAQDRKQKADFDRLQSVPGIGPKIARTLLIDVPELGKLDRRRISSLVGLAPYARDSGKRSGSRSIHGGRAAPRTALYLAALVGSRFNPELKAMYERLRAAGKPPKLAFIAVARKLLTIVNAIVRDQTEWKSMTA

SEQ ID NO: 503902 - protein, 443 aa, unidentified
MIELHLGGCKQNNQTRRFIMNLTQNDRLKQVTFDTLIVGVDVGSKTHFCRAFDWRGFELSHSVFKFSNTGMGFLTFLRWTEELMNKTEMKKVIVGCEPTGCYWLTFQKFLQDHDIQLVTVNPFTVNRSMELDDNSPEKSDLKDPKTIAHLVKDGRYSTSYLPSGVYAEIREASVCRDQIMKQHIRLSNQIQGWLQKFFPEYLECYADWDSTSGLMLLKEAPLPEDILKIGAGGINQIWRDAKVRAAGIKRAQILIEAAQNSVGLEAGEAARLEIWVLVNDYILKAEQLKRLDEYLEEKVREVPNVEKLLAIKGVGMSTVIGFIAEVGDIGRFTDPKQIQKLAGLEIVKKSSGKKKGQPRISKRGRRKLRRTMYESARALMNWNPAFQDVFLYYRNRTRNPLGGMQAKIAVACKAIRVFYVVLQTGCDFDEEKFRKDIIRPEAS

SEQ ID NO: 503903 - protein, 374 aa, unidentified
MSANGITFVGMDAHKKAINVAMLLPGQNKPVEWQLANEPAAIRRLAKKLQREAPGEVRCCYEAGPCGYVLQRQLEAGGVICEVVAPSLIPVKPGERIKTDRRDALKLARSLRSDDLTAVHPPTSADEAVRDLCRCREDARKDLLRARHRLDTFLLRRACLYTLTRRRWGQPYRAWLGSLKFEHAADQVTFEDYVRTIEQAEERVRRLDERLAAVAEQDPYREPVGWLRCFRGIDTLTAIAVVAELHDFRRFQTARALMAYLGLVPSEHSSGDRQRRGSITRAGNIHVRRLLIEAAWHYRHRPHVGVGIRQRRTGQPEAIIAIADRAQERLCHRFRTLTARGKIPNKAVVAVARELVGFVWAALYPATQGQPTQS

SEQ ID NO: 503904 - protein, 353 aa, unidentified
MRTSQKTPETITTIGIDLGKNTFHLVGLDKRGAIVLQLKVSRGQLGRRLSNMPRCLIGMEACSGSHHIGRQLAALGQDVRLIPAQYVKPFLKGHKNDYRDAEAIAEAVQRPTMHFVAIKTPEQMDLLALHRVRSRLVGQRTGVINQIRGFLIERGITVRQGVVPLRRALPDILSANTDALSPRMVSLIADLAQDWRRLDARIENVSTEIETLAEQDDSCQRLMTVPGVGPIISSAVVAAIGNGAGFKQGRDFGAWLGLVPKQESTGDRTILGKISKRGNKYLRTLFVQAAHVVLVRRPSAAMRGLWPWIEQASKRLHRNMLAIALANKLARIAWAVLARGRAYQPRVVAANAA

SEQ ID NO: 503905 - protein, 326 aa, unidentified
MQGKDVSEQEPKGKSSVGIDVCEAWLDVHVLPCRQAFRLPNTAEGHRVLKRRLKGHDVGLIVIEATGKWHRQLHRSLDASGHQVRVVNPLRARLFAESVGLLAKTDKLDAHMLAAFAVTLGSDARPPAPELIEEIKELVQARASAVCDQTSLANQLKSAQTAFLRRHLKGRSARIAKTIQALEAQVLKRLKADDALARRYEILCSIPSVGPVVAMTLLAWLPELGACNDRQLASLTGLAPWPDDSGERQGARRIKGGRQTVRNALYLAALSAVRFNSDMKVFFDRLIANGKAKKLALIAVARKLVALANTLVIADRTWAPKAPNHA

SEQ ID NO: 503906 - protein, 400 aa, unidentified
MKKPCIAIDVSKGESHVEAYLGLNKLFIKAKKIKHDVEGFNYILDLVKQIEGKVSEKPAVLFEATGVYHRTLEFFVTEHKLEYFVINPLHSAKFRKRELRSVKTDKRDCSNLARMYYNGLLKESYKEEEIYNELRQLNRYYETQVSHLVKCKVNFNEKLDIVFPGYKDLFTNLYSDIPLLIIKKYNHPKNIVGKEVNSIARYLESKIPHRNNYCMNLAEKLINFSKQCCPKCDKKNVDVDILLGLINELEYYQNLCEKTLNRIINLAKNLPYFNILHSIPGIGENLAARLIAEIGDITRFENTKQLTAYAGIDPIIYQSGQMSGEHLKMSKKGNKRLRRLLYLAITCMLRNKSDNNSIRDFYKKKMQQTSGMKSMVASFACANKFLRIIYSMCINGTLYQ

SEQ ID NO: 503907 - protein, 392 aa, unidentified
MIFVGIDVAKNKHDCFITNTDGESLFRSFTITNNLDGFHDLYRKIASVTENITKVKVGLEATGHYSYNLLGYLLDKGFPTYVINPLHTNLYRKSLSLRQTKTDKVDARTIASMLMSDVNLKSYSDTSYHNEELKSLTRYRFDKVKERSALKISISRLVCILFPELENLVPTLHMTSIYSLLYEFPGASFVASAHLTRLANLLSKASKGHYNKDTAVLFRQTARNSIGSVMPAKSLELKHTIKLIQELTSEIDEIEAAIKQIMDEEIKSPILTIPGISYRMGAMIIAEIGDFNRFDSADKILAYAGMSPSTYQSGQLDHCHSRMEKRGSRYLRYALYNATKYVCLWDKSFGAYLEKKRSEGKHYNVALSHAAKKLVRTIFAMEKSGAPYKSSV

SEQ ID NO: 503908 - protein, 354 aa, unidentified
MNIMGCDLHTRYQVVAWMEEETGEIRTRRLEHASGAARTFYRDWPRGTVVGVEATFPALWFERLLAECGHELWVGDAARIRASVVRQQKTDTRDAEHLLDLLRTDRFPRIWVPSLEERDLRQLLVHRSKLVRTRTTVKNQLHALAISQGVCRKGALWSRRGRAELESLALLPWAARRRKELLEWLQQLDGSVEELDQAVEEAAAGRAEVERLRTHPGVGPVVALAMVLTLGPVERFGNSRKVVSYLGLNPREHSSGGRQRLGAISKQGNSMMRWLLVEAAQTAARFDPELRRTYQRLKFRRVSGVAKVAVARRLAVRLYWMLRARVNYASVSRRIRMSGSPSSAVAPSGSGSKV

SEQ ID NO: 503909 - protein, 400 aa, unidentified
MISIGIDISKDKSTVCMLRPYGEVVEAPYNIEHTEQALNALIERIKSFDEDVKVVLEATGGYHQVVVTKLLSAGIFTVVVNPYIMKKYCTAALRKAKTDKIDSTRIANYGIDHWFSMAAYCPPDEIYAELKLLGRQYDQYVRLKISCKIQLANLLDCVMPGIKTILQGTVPAYSTKDKLCDFVEKYWHYDNIKKMSEKRFIEDYAKWAKKKGYRCSESQAIAIYQLSKNNIPTLKSSTPSTKMLVLQAVKSVRDAELTLSLIISQMQEIASTLPEYSVVREMKGVGDVLSVRLIAEIGDVRRFNNGSALVAFAGIDAPPYESGKFVGTKRNISKRGSSTLRKIGYEIMHSLKVAKPTEDSAVYDFIIKKETEGKPKRVAKIAGLNKFLRIYYARVMEIYC

SEQ ID NO: 503910 - protein, 350 aa, unidentified
MVVIGVDAHKRTHTLAVVDEVGRELANRTFPATLDGHRVALGWARTWPERMFALEDCRHLTRRLEADLIRAGERVVRVPARLMATSRRTGRELGKSDPIDAVAVARATLREPGLPVASLDGETRRLRLLVDHREDMVGERTRMQSRLRWHVHELFPGLEIAPKSLGRLHVIAALDRRLRPVEGTVAAIARELLGRIRDLTVRINELEREITQLVRPLAPSLLAMPGCGPLSAAKILGEVAGPARFRSRAAFARWNGTAPIPVWSGNDTRHRLNRGGNRQVNAALHRIALTQWRGVGPGRAYVQHRLGAGSTKTEALRLLRRRLSDEVFRRLLSDETLTRSTAVGEEVVAA

SEQ ID NO: 503911 - protein, 394 aa, unidentified
MKKVCGLDVHKDTIFLCILAENGQSFVKEFGGNTPDIIAMRDLLKANQVREVAMESTGIYWIPIWRIFQGHFELKLVNPYFIKQVPGRKTDVKDSEWIATCLQKRLIRGSYIPGKNIQELRQYERRYVHLVGQITRIEQAIDRQLHRCNIRITNYTSKIGSVSVMNVVRALINDEATPEELIKHVHGRITNKHKENIKAALTGYISDSDRMIFRQNYEELELFTRQQQECVKEMERICDTLYKQEVELLCTVPGIQKLSAMTIIAEVGVDLKSFATAASLVGWAGLRPRNEESNKKVKSRKITKGDKYVRRILVQCAWAMTRSKKSWLSKKFNDLAKRISKKKALIAIARKLLVIIWNILSKHESYKDYKPILSRDQKKRRIAWLEKQILELQA

SEQ ID NO: 503912 - protein, 341 aa, unidentified
MNVNKNVVGVDIAKRVFQVHEVDMATGEIVSVQLKREKFLEYFVNRSACLIGMEACGGAQHWARQLTTLGHTVKLLPARMVRPFVGGNKNDMADARAIWTAVQQPGIKAVAVKTEAQQAVLAMHRMRQQLVKFRTAQINALRGLLTEYGEVMPQGRSGLTKQLPDIFARLVDRLPSVLIDTLREQFARIGQLDEQVAEIERRLLVWHRQDDACRRIAEIPGVGLLTATAAVATMGDPRAFKSGREFAAWLGLVPRQTGTGGRVKLLGISKRGDTYLRTLLIHGARSVLTNSKAPPEWATNLIKRRPVNVAVVAMANKTARTLWALLAHARTYQSGYQSQPV

SEQ ID NO: 503913 - protein, 343 aa, unidentified
MQDVTTVGLDIAKQVFQAHGADASGETLFNTKIKRENVLEFFSKLKPCLIGMESCATSYYWARQLLEFGHDVRLIHTSYVKPFVKRGKTDANDAEAINVALTQKTMRFVPVKTLNQQAAITIFRTRSLFVSQRTQLVNALRGHLAEAGLIAAKGIQNYSKLVNLMETAADTVLPTVMKQALTDICDQIHRLNDLVTKLDKEIERRVRHDENACRLLTIPGVGPKTAMCVIATIPDIHRFPSGRHFSSWLGLTPRTHSSGGRSVLRRITKMGNSELRTMLYLGGTVIMMRDSKTPIGRWAARLRARRPYKVAAIAVANRLARIIWALLTNGGVYDLTHGREASA

SEQ ID NO: 503914 - protein, 454 aa, unidentified
MHNNDNRPSIEGPRQSGRTLVGIDAAITARHHVAVRSDGGETTKRFSVEPTLAGLRTLTDRVVGYDNIDAVVEPTSMTWLALTIAVEKAGGTMHMVGARHSARLRGAIVGKSKSDVIDADVLTRAGQVFDLAPLALPEPAQLALRRSVIRRAAAVIDANRSWRRLMSLARWAFPDVWIAFAGSLATATAVLGRWPDIRSLAGARRATLTAVIAAHTRGVADTPARAEAIRTAAAGWAAFWDGHLDLDALAVDVTEHLTDLSDDQARVARFTAHATRWWEHLYGDDELLLSVPGMGPVTAPTVRAFLGDGSSFSTAKKAASYAGITPSTWSSGTMTQPRRAITKEGPAPLRLALFHAAGAARRIDPQLAAFYHRLMTTHGHCHTQATIAVARKLAERTWVTITTGRPYQLRDVDGHPVTARGAKELIDTHYRVDAATRAKARAHTDTVRKSKMAR

SEQ ID NO: 503915 - protein, 346 aa, unidentified
MMHAGLDLSRRRLEVQLVNEQGEPVERLAAVPTVDGLRDLAARVARHQESVRAVIESMTGARFIHDQLELLGWDVAIADAVKAKGLAPLTCKTDRIDAWVLAQLSRLNLVPEIWLPDPAIRADRERARWRLHLVRHRTALKNRIHQTLISFGHACPVSDLFGARGRELLRGLALPEPWQGAVIASLQLIDHLDRQIDACEAELHSLGEEQPYVSLLRTVPGIGWVLAYTIAGEIGDITRFASPAKLVSYTGLCPSVRQSGDRDYRGPLTKQGPKYLRWALIEAAQHAAMTSRYRERYQTIKRRLGRQRGTNVATVAVARELAKAIWYMLIRNQPFAPRGANVSVAA

SEQ ID NO: 503916 - protein, 398 aa, unidentified
MLYLLVLMLQVVDYMTMSAPTTRVDLVDVKPNQGSGRKEPNMLIIGCDYHPSMQQIAFVDTETGERGERRLMHRDGEAERFYRELKQRRVEVRVGMEATGYARWFERLLAELSFELWIGDPARIRARRVRKQKTDRQDAQLLLRLLLEEDGFPRIWVPSPENRDLRQLLWHRHRLVQMRTRIMNQLQAVAMNEGLRRKRALWSEAGRKQLESFLLAPWATRRRKDLLELMDRLNPTIRELTGAVEKEAENKPEVQLLMSHPGVGPLTALAFVLIIGTPQRFHCGKQMGSYLGLIPCEDSSADRQRLGHISKQGSSLLRFLLVEAAQVAARVDAEWRRRFLHLAMRRGRKIAKVAMARRVAVGLYWMWRKEWDYQQVVKFGSQGRKLSSHNVVTTGSTR

SEQ ID NO: 503917 - protein, 339 aa, unidentified
MQVTTIGLDLAKNVFQVHGIDDHGEVAFNRALRRAQVLAFFERLEPCLVGIEACGTSHHWARELIKLGHSVKLIPPAYVKPYVKRGKSDAVDAAAICEAVTRPTMRFVEVKTPEQQAILSVHRTRDLIVRQRTQTVNMLRAQLAEFGIVLPQGIYHALQFAKDCINDEPLNLPKDAQEVVFDLCDELLFLHAKILRHSRHMTRIAKSEKRVTLLRTIPGVGPITASAIVATVGSGKQFNNGREFAAWLGLTPLNRSSGGKERLGHISKMGDQYIRRLLVLGMTSRIRSIRLEPEKFDPWFADILLRKPSRVAAVAMANKTARMIWAVLTRNEPYKVRTV

SEQ ID NO: 503918 - protein, 332 aa, unidentified
MIGLDERGAIVLREKISRARIAARFVNLPPCLVGIEAGMASHYVARELVALGHEVKQVPPAYSKPFRQGHKNDFRDAHAVAEAVERPSTRCVPIKTDGQLDLQALHRVRSRLIGNRTAVINQIRGFLLEHGIPVRQGYRFLRQQLPRILATRTDVLSPRMIRIVGDLMADWKYLDERIEGVTDEIEALAHADEGCQQLITVPGIGPIISSAMVAAIGNGAAFCKGRDFAAWLGLVPKQMSTGDRTILGRITKRGNRYLRMLFIQGARAVLLRPASWAKHSFGSWLTAATRRLHRNVLTVALANKLARIAWTVLAQGRRYEARVEPRVEPAAA

SEQ ID NO: 503919 - protein, 318 aa, unidentified
MNTKTNQNINVGVDTGKYQLDIYIRPLDIYFTVKNDEKGIKEAIKNIKKHKPERIVIEATGRLEMPFIIACAIAGLPFTIANPVHIKRFAGALGQRAKTDKLDAQLIAHYSEAIKPKLSQLKPETMQAMSDLVSRRNQLLTMQTMEKNRLQIMPKELAMTIKPVLTLFKNMILKIEAKISKLIESCPEYRVKNEILQSMTGIGKIAAASIISNLPELGYINSKQASALIGVAPMNRESGRFQGHRKIQGGRPQVRTVLYMAMMSAMQSNPVFKATYQRLLAAGKPKKVAIIACIRKMIVILNSMLRDGVMWEPPKVIN

SEQ ID NO: 503920 - protein, 353 aa, unidentified
MSTIYIGVDFHARQQTVCSLKTDEGVVNSHNLKHQNKDEVRAFYQQFNGRVIVGIEASGYSPWFEQLLEELGHEVWLGDATEIRRRARWRQKNDRRDAELILDLLVHDEFPRLHRPSPQSREILRMLRYRQKLIKIRTMGKNSLQALALQSGLAKRSHLFTKAGQQELRQAQMSPAMQWQREQWFQLLEPLNERLLETMLWLKQQSQDDARIKLLRTHPGIGLLTSLCVVHTLWPVSRFRNQRKVAAYAGLEPMERSSAERKHFLGVSKAGSRVLRYLLVEAAHTAVKKDDDLKRFYQRLATRRGRPKAKTAAARKLLIRSFIMLRDEIDYAEFRRRAVAARLARQSSRPPCL

SEQ ID NO: 503921 - protein, 482 aa, unidentified
MKAKPPEKIQETTNRSTRGHWNEMNRKQRREMMRKIQSEDISLEVVHPDAAGIDIGNESHYVAVAPSRDKQPVRCFGCTTGELKAMADWLKQCGIRTVAMQSTGVYWIAVYDILEQAGLEVYLVNARETKNLPGRKSDVQESQWLMKLHTYGLLRNSFRPSQEIRTMRTYWRQRNDLVQSAGRHVQRMQKALTQMNIQLANVLSDVSGVTGQAIIKAILGGQRDPHKLAEFRNPRVRASEEEIARSLEGHWEEDLLFVLQQEQDGYEFCQKQMAECDRQLNNYLEQREDRSQGAPLPEEKRKGRRKKKSGNKPQFDLRTGLFRMSGTDLTRIDSIDVMTATTILSEAGWDMSKWETEDHFVSWLRLCPDNRISGNRVIGKGRLPTNNRVTIALKMAASALRLSDTYLGAQFRRFRTRLGAPVAIKAMAAKLARLVYRMLRYGMQYVDKGAATYQAQHRQLQIKQLKWKAATLGYQLIGVPAA

SEQ ID NO: 503922 - protein, 341 aa, unidentified
METQRHIGIDLHRNQFTCCVRLENGRNYLTDWKLEELPRFIKKLRASDEIAVEVTGNTRLFRDAVAPHVARVVAVDPNQFKVISHSVKKTDPNDARNLALYLEKDLLPEVRMKDKTQAQLASLTQTRDTLVKLRTSLKNKINNILSAHGINLEREALSSEKKLNEVLAMRFDPMVKIELEVLVEEIRSLNQRIARLDKTIADEGSKLEGHKNLTSIKGIGPLSGSILLSVIGDINDFADEGKLAAYFGIVPRIANSNETERSGRITKRGSKLGRTTLVQCGLIAQRYSPYLKRYYEKIKARRGTGKAIIALARKLLGIIYRTLKNNWVFEDFPNFVLAEAA

SEQ ID NO: 503923 - protein, 341 aa, unidentified
MKNKSFIGIDISKNVIDASIFCEGTPIKDFPHAVFNNSRKGFGEMCTWLKKNHVVLSNCLFGMEFTGSYSMELEKFLNARNYQFCMLSTHVVKHYPMGPKDKSDKIDSAKIADFLYRYDGTECVKPYKMPDKTMQRLKALTNERKFLVEQRTCFMNRRQLCITKEDAQLYDGYIKKFSRDIENIELEEQKLLATDDSLLSTYKNLLTIPGIGFVNAINVIVITRNFTAFETARQYASYVGVAPHFRTSGTSVKWRPRPSARCDGQAKADLSMAATVVVQYDAELQSFYNRKLGGKQDSDTKRKALNAVKFKLVLRMFAIGKQNRKWEPLDSKSSNEKLAIS

SEQ ID NO: 503924 - protein, 373 aa, unidentified
MSKVSKFVGLDVHKATIAVAVARGDGAAESLGTIPNDPDAVVKLVRRLGAEDGLWCYEAGPCGYELQRLLSELGVNCIVVAPSLIPTKPGDRVKTDRRDALKLTRLLRSGDLTAVWVPDAAQEAFRDLTRARQAAQEDLTRVKHRLTKLLLRLGVRAPATAWSKAYRRWLDALTLPQPVQQVVLDETRLAVAQAEQRVERLTAAITESASQVAQAAPIGAWQSLRGIRLTTAAMVAAEIGDVTRFRSPRQLMAYAGIVPSEHSSGGSQRRGRITKTGNAHLRFAVVEAAWHYRHGPRLSKALKARQQGQPAEVLAIAERAQHRLNSRYRHLVARKTKQQAVVAVARELLGFIWAIAWAVHPDQRLRPAQRQAA

SEQ ID NO: 503925 - protein, 354 aa, unidentified
MKRTTKYVALDVHQATTVASVREESGRVIARTILPTEAPALVEFFRGMRGTVHVAFEEGTQAQWLHELLGPVVHRVVVCDRHGETRRGNKGDQVDADQLAERLRRVGLRAVYHGIPHRGTLKELTRTYQNLVEDATRVMLRLKALFRARAIPARGTRVYQPRERGQWLAQLADRGVQFRAGALYAELDVLQELRPKAKAAMLAEAQRDPAWPVLRTIPFLGPVRVALLLATMQTPWRFRTKRHLWAYAGLAVVTHSSADHEMQHGRPVRRRRAPLTRGLNPHHNRVLKDVFKGAATVATARPGPLQDFYRGMLARGMREELARVTLTRKLAALTLRLWKKGARYDPAQLTQQAH

SEQ ID NO: 503926 - protein, 339 aa, unidentified
MIYFGFDHHKRWTQAVAMDEQGRVLREGRVLNDSASLKRFLRGLTKPWKGVVEAGPTWGWVYDTLSQAGVEMVLAHPRNVRAIAEAKIKTDKIDARMLANLLRVDLIPEVYVPCEEVRAQKMLWRERIWLVRMFVRVKNRIHRLLAHYHIPVPEFSDLFGAAGRRFLEGVELPEPGNRILKTELKLLESYRSQIQQVQRWAIEATQNHPYRGYLESLPGFGKVFAPVVALEIDDPGRFANPGKLASYCGLVPSLYSSGGKSWQGGIGREGNHWLKWAFVEAAWVAIRTSPYFRLLYQRLRQRKTAQVAIVACARRMSEIAYHLMKERRYYQERPLSYVS

SEQ ID NO: 503927 - protein, 369 aa, unidentified
MDYKIGCDAHKHYSQFAVLDQDGRLLAQHRVEHQPGAIQAFLENLPEGSPVALESVGNWYWIADEIEAAGCVPLLTHAAKAKLMMGNVNKTDKLDAKGLAKLLHLDSLPTVWLPPGEIRDERELHRTRMALSKLRTALKNRIHATLAKYGITTSEHSDIFVGAGRAWLETALSRLPPETGRCVAQELEALDALQHQIAQLEKRIRERVALTPSIQLLKSLPGIGDILAIVIEREIGSIDRFGTAGQLASYAGVVPTVHASGGKTHFGHMRKPSNQYLKWAFIEAANVVVRHRHHPAWRTKYVSRVYDQVCRRKGHAVAVGAVARHLAEASFWVLKRQQPYRPPAVRQVSPKQVQGRAQHVPTEVRELIA

SEQ ID NO: 503928 - protein, 421 aa, unidentified
MDAMPLINARCCGLDVHKQTVVACVRCVEACGEVAQEVRTFATTTRGLLELGDWLAGQRVTAVAMESTGVYWKPVWNLLEGRATVDGEVISLMLVNARHVKNVPGRKTDVKDSQWIAQLLGAGLLSPSFVPERPQRELRDLTRQRVQLIQDKTRVANRLQKVLEDANIKLSSVASDVLGASGRDMLRALIEGSMTPAQMADLARMRLRAKIPQLTESLSGHVTDHHRFMLKTLLEQLEYLERQIESFDQRIETVMGPLEREAVRKLDAIPGFDCRAAQNVLAEIGTEMSRFPSAGHLASWAGMCPGNNESAGKRRSGRMSEGDKWLKRTLTQTAWAASHSRSSYFAAQYHRLSKRRGPKRAVLAVGHSQLRVVYEMLKQGTTYEDLGGDYFEKRDAERLKQQLIARLEGLGCRVTIETDAA

SEQ ID NO: 503929 - protein, 351 aa, unidentified
MWIIGCDFDPRYQQVAAMNQETGEIVERRLSHETKEAEQFYESLPPGARIGMEASCPAQWFERLLDRCGHRLQVGDPATIRASVVRKQKTDARDARQLLELLLTDRFPSIWIPTPAERDSRQLLVHRHKLVGWRTQVRNQLSALARSQGVFPGTRFWTQAGRPKLESLSLDRWAAQRRQGLLRLLDDLDAQIVDLTRQIEQQARARNDAVELMRQDGVGPIVSLAFVLTLGTAQRFPRGKQVASYLGLNPSEHSSGGTQRFGHISKQGNRMMRWLLVEAAWMAVRKDPELQRVYQRLAFRRGRKIAAVAVARKLAVKLYWRLREFEQNNAPQSPAPMQGSSGRGLMHSSTL

SEQ ID NO: 503930 - protein, 337 aa, unidentified
MESKFFLGCDISQETFNYCLRDRSGILVEGVVANNLKSIKTWLNQLKKDSKWKISEILFCIEHTGVYGSILLRELSQRSLVVCMENALNIKLSLGLQRGKNDKIDAQRIAEYAMRFTDRLNRWQPKREVLVKLQLLIRMRERLVKAKADISRFNKDAMRFLTKQESELILKGTKKPIDALSAQIKKNDQDIVRLIEQDENLNRLAELITSVDGVGMVTCSAVLVKTNEFKDIKNSKKLACTAGIAPFDHSSGKSVRGKPRVSHNAHKDLKKLLHLGAVSVISRKGVLQDYYLRKVGEGKNKMLVLNAVRNKLVSRIYAVVRDGVTYQKNYQYRLEKS

SEQ ID NO: 503931 - protein, 337 aa, unidentified
MKYSGIDLHSNNSLVTVTDETDRVVAEKRLPNELSTILAFLSPWRGELAGVVVESTYNWYWLVDGLQAAGYQVHLAHCTAIKKYDGLKHSGDEADARHLAHLLRLGILPTGTILPPAQRAVRDLARKRMQLVRSRTTHILAVENITARELGARISSNQVKRLTAEVIDQMPIAADVALAIKANLAVVTAVSAQIELLEKRLQESVKAGSDYGLVSSIPGIGRVLATTILLETGPIDRFASPGNFASYARCVDSQHTSNGKKKGEGNTKNGNKYLAWAFIEAAHFAMRYCAEAKRFYERKKAKTNNVVAIKALAHKLARACFHMLKERKPFDVTRCFA

SEQ ID NO: 503932 - protein, 421 aa, unidentified
MIEFKELKHFAGFDWAKDHHCVVVVNAQGAIVSEFEFKHSAEGWKDFSERVARLAGFGVAIETSSGPAVDQLLQRDFAVFPVNPAASESYRQRKAPSGTKTDHHDAWALADALRVDGQRWKALSPADPLSLELRLSCKDEVALIEQRTQMVNQLQQALLEYYPAALEAFDDWTLSFCWDFVIEFPTPEKLAKAKAHRWRKFLHTHHLWRPGSVDKRMEIFGRATGLQGSCAVVQAKSKLAVSLCKVLRTLEQQLKDYRNQIEELFKNHPDRDLFGSLPGAGEVLAPRLLAAIGTDLKRYGNELSVLQAFAGTAPISYQSGQIHKARMRWACDKFMRYTVHLWAECFWKYSPWGKVYYRKKRQEGKSHACALRCLAQRLLKILFRMILDHKPYDADLHARNQEKHGSWVLSLLNNPAPKVCE

SEQ ID NO: 503933 - protein, 393 aa, unidentified
MYIVGIDIGKNHHEASIVSPEGKQIGHSLRFATTHKGADSLMSFIFKNIGNSPCVFGMEATGHYWYPIYSFLKAKGYTIYVINPIQSDSLRKMYIRQTKNDSIDSFLIAEVIRFGQFTTTSMADENILSMRQLCRYRDSVISSRTEIKLRISTIMEQIFPEYEKQFSSLWLSTSMGILEKYLTPENIENAPIDELFEIIKDKSHNKLTIQKAISIKEAAADTFGIKIAQDAFSFQLKQLIDRMNFLDKQIEALDIEIMKYYEQFDCYLHTIPGIGIIGAATILAEIGDISRFKNSSALVAFAGIDPTVRQSGEFNSTHNHMMSKRGSPYLRHAIFLAATTCSFHNSPLNAYYKKKRDQGKHHLTATGAVARKLTTVIYAVLQDGKPYEPKKFC

SEQ ID NO: 503934 - protein, 343 aa, unidentified
MQTITTIGLDIAKSVFQVHGVDAAGQVIIRRQLKRRAVVAFFQKLPPCLIGIEACASSHYWSRELQALGHTVRLMPPAYVKPYVKRQKNDMADAEAICEAVTRVNMRFVPTKTPEQQSCLMLHRTRHLFIRQQTAVINAIRAHLAEFGIVAPVGRKGVTELLHVVADPSDKRLSEVARACLAALGTQLLRLKEQIVEFDRMIMVWHRSEETSKRLRYIPGVGPMLATALVASVPDPRVFRSGRNFSAWIGLVPKQHSSGGKDRLGSISKQGDRYLRSLFVIGALAVVRYAKIHGSKHRPWLAALLARRPTKVAAIALANKIARMAWAMMAKGERYKQPVALAA

SEQ ID NO: 503935 - protein, 316 aa, unidentified
MLQRRFIGIDVCKARLDVAFRPGGDALTVSNDARGIARLLKIVKSAEPECIVLEATGGFELRLLEELSANSAPVVLVNPRQVRQFARASGRLAKTDTIDAAVLAHFAEVMQPSERLLPDAKTRELRALLSRRRQLVEMITAKTNRRTHALELVRQGIAVTIRCLRRQVAILDRKLAAFIQQTPVWQRKAELLRTTPGVGPITSATLIAQLPELGTLNRKQIAALVGVAPFNRDSGIMRGQRRIWGGRSQVRTVLYMCTVAALGRNPVIHAFYQRLRAAGKPGHLAVVACMHKLIIILNAMLNQGTSWSPPLLANQV

SEQ ID NO: 503936 - protein, 462 aa, unidentified
MQQPVEVEADEHEQIVERVAAVDVAKASGMVCTRVPHQSVPGKRTTKVWQVSSTTRAVVELADHLRCERIQRVVLESTSDYWRPFYYLLEAAGLTVWLVNAAQAKNVPGRPKTDKIDAVWLAKLAERSMVAPSLVPAEPMRHVRDLARARFDLVADRTRVKQRIEKLLEDALIKISSVLTDIHGVSGRAMIEALIAGQRSPAVLAELAKGRARSRRTALREALDGRFTDHHARLARMLLDQLDDLSARIDTVTAMLDAAIAALPDGPVGNPPGSAEPTPAAESTPAAGPDRTVASPLGYARAVERLCAIPGGGPDSVRAVIGEIGLDMSVFGTHQRLCSWAKVSPRTVQSGRKTGRARTGKGNPYLKSALAQMATGAAKTDTFLGERYRRLIKRMPKAKALVALQRSILVIIFHLLADPTTEFTDLGSDFYTRRIDRGRRTSHLLRQLHALGYQVQLTEAAA

SEQ ID NO: 503937 - protein, 341 aa, unidentified
MEHVGIDLGGRLSQICARSASGDIVDERKIPTTSIQAYLLERPASRVVLETCSEAFAVANQVLELGHEVRVVPSTLAPTLGVGARKTKSDVRDARVLSEVSCRIDLPSVHIPSEKSRSRKTMCGMREQLVACRTATANCVRGWLRTRCLRLPSGGVSTFAARVREMAQAKKLQLPTFVERMLETLDHLCTQIAAADRELTEEAKSDETCRRLMTVPGVGPVSSVRFVAALDTCTRFENAHKVASYLGLTPGENSSSERVRRTGITKAGATAVRRVLVNAAWVARRYAQGDPMVLWCHELEKRRGKFIAVTALARKLASIMFAIWRDGSTYTPLKITHAEVR

SEQ ID NO: 503938 - protein, 355 aa, unidentified
MSAEGFAFGLGKSITDFSEVTTVGLDLAKHIFQVHGVDASGRVVVAESIRRSKLLEFFASLPPCLVGLEACGSAHHWARELIKLGHDARMMPPAYVKPYVRRQKNDAADAAAICEAVTRPSMRFVGVRSLENQAAFMSHKTREMLISQRTQLINGLRGHLAEVGVIAAQRPRYARELADRIEAGDEAIPLAVCEALAPLVVQLRNLDEAIMRLDRAIAKMAQKDETTRRLMSIPGVGPITASAIAASVQDASSFSGPREFAAFLGLTPKQNSSAASSGSGVFRRWAIDICANCSSWGRMPCCFIVNPIQMRCAHGRRSSSRRNLFNLVAVALANKMARIAFAILRGKTSYREIPA

SEQ ID NO: 503939 - protein, 441 aa, unidentified
MVLERLQPQSPCKVVDQLDTARRFMWNEVTSARSPVVPSSIKFSHEGVIVMICVGIDVAKDKHDCFIISSEGEVLQDVFTIPNTMTGFNDLFQRICSASDASGKIKVGLEATGHYSYNLLGFLLDKGLPTFVINPLHTNLYRKSLSLRKTKTDKVDARTIASMLMSDVNLKSYTNTAYHNEDLKSLTRYRFTKVKERAQLKQSISRLVTILFPELEKLVPTLHMVSVYALLRELSGAHQVAASNLTHLKTLLSNASKGRYGREKAIEIRDAARCSIGSRMPAKSLELRHTIRLIEELDAEIAEIETEIKSIMDELQSPILTIPGISYRMGAMILAEIGDFSRFDSPDKILAYAGLSPSIYQSGQLMSSYSRMEKRGSRYLRYALFNAAKFVCHWDETFATYLAKKRSEGKHYNVAVSHAAKKLMRLIFALEKSRKPYNLNA

SEQ ID NO: 503940 - protein, 424 aa, unidentified
MAGPSTGFTCENGKAAQVTATDVVWVGIDAGKTSHHAAAVDAGGKRLWSVKVANGQQPIEELIGRAAQSAGDGEVRWAVDLVSPAAALLLAILLAGGQKVVYVPGRVVHGMAQVFRGEGKTDAKDARIIADTARMRSDLTELTATDELVVELTRLTSYRADVMADWVRGINRLRDLLTSIFPALEASFDYSTRSALILVAGYCTPAGIRQAGAGAVAAYLREHGAWAKGIDAMAATAARAAQQQTVALPGEATTALLIGKLARQLLDLDREIKDTDKLLTSRFRDHPQAAIIESLPGMGPILGAQFLVATDGRALEAFASPGRLASYAGLVPVPRDSGRVAGNHHRPRRYHRPLRNVFYMMALSSLRTEGPSKAFYQRTRDENKIHTQALLALARRLVDVLWALLRDNRVYSPIPPSQVTAIAA

SEQ ID NO: 503941 - protein, 392 aa, unidentified
MYIVGIDIGKNHHEASIVSPEGKQIGRSLRFATTHKGADSLMSFIFKNIGNSPCVFGMEATGHYWYPIYSFLKAKGYTIYVINPIQSDSLRKMYIRQTKNDSIDSFLIAEVIRFGQFGTTSMADENILAMRQLCRYRDSVISSRTEIKLRIGTIMEQIFPEYEKQFSSLWVSTSMGILEKYLTPENIENAPIDELFEIIKDKSHNRLTKAKAISIKEAAADTFGIKIAQDAFSFQLKQLIDRMNFLDKQIEALDIEIMKYYEQFDCYLHTISGIGMIATATILAEIGDIHRFKSSSALVAFAGIDPTVRQSGEFNSTHNHMSKRGSPYLRHAIFLAATTCSFHNSPLNAYYKKKRDQGKHHLTATGAVARKLTTVIYAVLRDSKPYEPKKFC

SEQ ID NO: 503942 - protein, 367 aa, unidentified
MMGWMAPLRHLSAKLLSDRISSEWEPSMGEVTTIGLDLAKHVFQVHGVDAEGATVLRKQLRRAQVLAFFSRLPPCLVGLEACATAHYWARELRALGHEVRLMPAQYVKAYVKRNKHDAADAEAICEAVQRPTMRFVPVKTADQQAAVLLHRGRERLVRQRTGLVNALRGHLAEFGVIAPQGLRNVGKLIAIVRDERDARLPDLARQVLQVLAAQIEQLEAAVAAIEKQLMAWHKSNPISQRLASVPGIGPIIATAIAATVVEPSGFRSGREFAAWLGLVPRQNSTGGKHRLGGISKRGNQYLRRLLINGASANLLRSKATNADPWVIGLRQRRPSLVVAVALANKTARIAWAVMHRHENYQRVAAAA

SEQ ID NO: 503943 - protein, 368 aa, unidentified
MDSELFIGLDTSKLKISVAVADGGRNGEVKFYGDISSDPGSVASMVEKLAKRASRLHFCYEAGPTGYELYRQIIELGHTCEVVAPSLIPKRSGDRVKTNRRDAVSLARLHRAGELTGVWVPDETHEAIRDLVRAREAANDALKKSRQQLQAFLLRRGHIYSGRSPWTQIHRRWLAALSFTHPAHHIVLAEYIQAIEDAEVRVERLTKQVAATVASWSMASVVEAYQAMRGVSLLTAVTFVVEIGDVRRFETAPQLMAYLGLVPSESSTGERVKRKGITKAGSTRARRVLIEGAWTYRYPARISRAIQVRLEGLPRPVREIAWKAQIRLCARYRQLIGAGKLKAVAIIAIAREMAAFLWAIGQEVAPAA

SEQ ID NO: 503944 - protein, 454 aa, unidentified
MRVMYERCCGLDIHKAGIAACALISERGKTKEETRRFGTMTADLQELAEWLDQKEIRQVAMESTGIYWKPIWNILEPAGFELLLANAQEVKVVPGRKTDQKDCQWIADLHKHGLLRNSFVPPRMIRDLRDLTRTRAILTQEHTSVCNRIQKVLEDANIKLGSVASDVFGASGRSILRALMKDETDAETLAELSKGRLRKKIPQLRRALEGQVTGHHRSMITGHWQRMQFLERQIADLEAEIAQRMKPTREETACAQQTLPEGAPEPLSPREEAIQLWMEIPGVGWTAACSMVAELGTNMDQFPSAAHLASWAGLCPGNNESAGKRLSGKTRKGNVWLRRTMCEVAWGASHTKDTYFAAQFRRIASRRGKKRALIALAHSILITAYHMLKYRRGYQELGGEFLDQINRDQVRKRLVQRLTKLGFEVTLKSKAENAGDNDASTEIDRVLMAATATH

SEQ ID NO: 503945 - protein, 358 aa, unidentified
MDRQSKWAGIDTSTRTFAISVVDSCGSVVVSTELPADVALAKGFLAPYSDTLKLVALETGRTSTHLARSLLEAGYPAKVYDALRVYRFLRVRSNKTDSHDARGIAEVGRIGGESIRPVYLKPLGIALVREKLVIRERLIRFRKENENALMNILNAYGVRAADRITSFQALQRNVLAMLNRIEEDYESPIRAQILPLLDLSQMLRRQEGRLEREIDTYANRTEVCRRMMAVPGGGPITAVSFVTAIGDPKRFSNTEDVGPYLGLSPRIWRTGRYSRQSRISKWGNSLTRKHLHIAARTALNSKTDTSLRKWALQLAGRANRKKATVALARKLAVVLLAMWKSGSTFDPNGTQASRQKLV

SEQ ID NO: 503946 - protein, 389 aa, unidentified
MKIYVGIDIAKLNHFAAAISSDGEIIIEPFKFTNDADGFQLLVSKLESFDKNSLIIGLESTAHYGDNLVRYLVTELYQVCVLNPIKTCQMRKNNVRKTKTDKVDTYVIAKTLMMQDNLRFVSFFDLDMMDLKALGRFRQKTIKQRTRLKIQLTTYVDQVFPEIQYFFKSGLHQHAVYALLKEAPSPKEIASMHMTHLANLLKVNSHGHFTKEQAKELRVLAQKSVGANDSAISIQITQTIQQIELLDSQLEKIEAEMTDIMKFNDSVIMTIPGIGYINGGMILGEIGDIHRFSNPNKLLAFAGLDPSVYQSGNFQAKTTRMSKRGSRVLRYALVNAAWNVVRNNATFKAYYDAKRAEGRSHYNALGPCAGKLVRVIWKMLPGEVEFNLE

SEQ ID NO: 503947 - protein, 351 aa, unidentified
MERYIGLDAHASSCTLAVVGPSGKRLGSHVVETNARALIEVLRGMPRNRHVCLEEGTLSEWLHEVLEPHVEELVVAGVRKSRGPKSDKRDAFALAEQLRIGALETRVYKGRGKFRRLGCLARGYGLVVVDVARAKNRVKSVLRSRGVGYGAGLSIYAKRDRERWLEALPEPTRPLAELLYSEHDALAALKARAQKALLKEARKHQEWRLLKTCPGLGPIRTAELLPVVVTPYRFRNRSGFWAYCGLGIVMRSSSDWVRAPSGEWVKTAVQRTRGLNQNFNHTLKRIFKGAATTVIGRAEDDPVYRHYERLLDEGTKPNLAKLTLARQIAAIALALWRSGEAYDPKRLEATE

SEQ ID NO: 503948 - protein, 365 aa, unidentified
MEPKKYRRCCGIDVHKKSVTVCILAPEGKRDVGIRKRNFRTFTRDLKQLRTWLKNCKVTEIAMESTGQYWRPLWNLLEGQFEKLLLVNPQHIKGLAGRKTDPKDAQWIAGLLETGRLNGSWVPPRDIRELRDLTRQRVHLMEDLNRVKNRIGQLCETGNIKLSSVTTDLLGVSGRRMLPAIVEGKHDPGWMADYAKSRLRSKKKELELALDGSFTPRQRWLLDKELHHLEWLERQIEQMEQEIERQVAVYEEPMRRVMTIPGIDQKTAWMIVAELGVEMSVFGDAKHLASWAGLCPGNRESGGKRMKRQGSQVEPLCEAWDVSGGVGRDAHQEYLSVGLLPAYADPQGTAKSFDRAGASHDHDRL

SEQ ID NO: 503949 - protein, 364 aa, unidentified
MHDSTTTVAVGLDVHARSIRLAAVRADELLEERTLPYDEEALERILGRWPGAPCCYEAGPTGFGLQRHLVERGIDCLVVAPGLVPRRPGDRVKTDSRDARKLARLLAGGLLEAIYVPSGELEAARDLVRAREDARLDRMRDRHRLSKFCLRHGRMLPSSSWTVVRRKWFSEQRFEFVAQQITFDAYLHTVDLVDARIEQLERAIRETADQEPWRELVARLRCLRGIDTLTALALVTEIGDFGRFRSAAEFMAFVGLVPSEHSSGEQRRQGSITKVGNSHVRRLLVEAAWHARRQPKVGYKLARRQRGQDAAVIERAWRCQQRLYARWQRMAGRGKPHQKIVVACARELAGFVWAIATEQPLRNT

SEQ ID NO: 503950 - protein, 425 aa, unidentified
MSERDYNRQVVKRESIGRETLVIGVDVGNAWNAVGFMNKEGNVLGSCAKLHNSREGFEQFIKMTEGCKAKHSMNSVLIGMEPTGHYWRKLAYFAKDKGYEVRFVRTTAVKHHREIDESSSAKSDKRDALTIANITREGKYIDTVIEDGVVRQLRTLSKVRERLLRYSVGAKNALHAALDDYFPELHEIFWSMNSRSLWAILNLCPFPEDMVSMKCSVLKELIAHSSRKKAGAAQKAKALQQTAKKSIGVKRIGSADRYRVKICLEEVKRTVLMLKDIDRQMKSVLKEIPASEYLLSIPGVGALSAAIFLGELGDPAYFQNARQIVKYAGYDPQESDSGYRISRKFISKKGRWLLRKCLFFMSMRVVVLTNYFQEYYQRKLQTKNRFGQLPRKKEILCAVAIKLIKVIFALLRDKRRFQDTGNIAA

SEQ ID NO: 503951 - protein, 319 aa, unidentified
MAQTIAYLAGIDISKDRLEVAVRKRDIAFAVANSPDGWDELGERLRELGVGRAAMEATASYGRNVMRHLQQIGLTVLLLQPKQVKAFATMALRRAKTDRLDARLIADCAVALEHRAREPVEARFDVLAEHLTYIEQIEADAVRQKTRLEHVSERRIRSAIERSVAALTRLATAERMRLEATLRRHADLARRLDLVMSIPAIGPRTALTLIVRMPELGRLSREAVASLAGVAPFLHTSGRWKGETHIGGGRAQVRTALFMAAMAGAYRHNPSLMALRARLLAKGKPPLGAIIACARKLLIYANAVLARQTPWQAMPPADA

SEQ ID NO: 503952 - protein, 338 aa, unidentified
MSKFSGIELHSNNSVVVVSDETDQIVYERRHADDLAEILAVLEPYRAELVGVVVESTYNWYWLVDGLMEAGYAVHLANTTAIKKYEGLKYRGDEADAAYLATLLRLGLLPEGYIYPRETRGARDLCRKRMQLVQYRTAQILSIENILATQSGARMKSAQVQRLTDKQIEALGFAPDVTLALQANAALMRTLQRRIAVLEERLQVRVQLSADFALLKSVPGIGQVLATTIMLETGTVARFAKVGNFSSYCRCVQSVRLSNGKKKGKGNAKNGNHYLAWAFVEAAHFALRGCPPAKSFYDRKKRQRNAVVTTKALAHKLARASYHILREHKPFEVARCFA

SEQ ID NO: 503953 - protein, 412 aa, unidentified
MDVYCGIDWAEDHHDVALAGGDGQLLARRRISDDAAGLAALLDLLAEHGDSPEAPVPVAIETPRGLLVACLRATGRQVYPVNPMAVARYRDRHSVSGRKSDHGDSVVLAHVLRTDMDMHRPLPAGSELALAIAVLARAQQDAVWDRTTAHNKLRSCLREYYPAFLAAYATAKGGIMRPDARAVLAAAPTPADAATLTLTQLRGLLKKAGRSRGIDTEAARLREAFRAPQMRQLPLVEAAMGRQALALLGQLDAACAAAADLEQAVTESFNLHPDAGIITSFPGLGALTGARVLAETGDDRSRFADAKGLKAYAGAAPVTRASGKTRSVTHRKIKNNRLAAAGYTWAFSALTASPGARARYDRRKDAGDRHAAAQRNLSGRLLGCLHHCLLTCQHYDEATAFPAATKKISQAA

SEQ ID NO: 503954 - protein, 377 aa, unidentified
MQTSNVSTPINGNNGRIFVALELSQRSWLVTIYSPDRDRMSRHKLEGGDHVGLLGLIERVRERARRVLGSAPAVVSCYEAGYDGFWLHRLLTAAGITNHVLDPASIAVDQRARRTKTDRIDGEQLLRTLMAHCRGEPRVVRIVRVPSAEQEDARRETRERERLTKEQGGHVNRIKSLLRLLGMAVGNPRRRDWLAWLARQRDWQGQPVPPHLLAEIKREHARLMLVREQLAELEQQPATSTEMARRREMLFRLKALGPAFSGTLTNEVFYKDFRNRREVGGYFGLGGSPWQSGGTDREQGISKAGNRRGRHAAIELAWLWVKHQPDSALTQWFRERIANASKRFKRVAIVALARKLMVALWRYLTTGLVPQGALLKA

SEQ ID NO: 503955 - protein, 355 aa, unidentified
MIIIGADYHPGFQQIAFVDTDTGEFQERRLQHPEEAEKFYRDLGAQGMRVRVGMEASGHARWFERLMSELHFELWIGDAAEIRTKRVRKQKTDRQDAQLLLRLMLEDRFRQIWVPSWENRDLRQLLWHRHRMVQARTRIMNQLQAVALNEGLRYKKRLWREAGRKQLESFPLAPWASRRRHDLLELLDRLNPTIAELSQAIEQAVEKCPEAQRLMTHPGVGPLTALAFVLIIGRPERFRCGKQIACYLGVVPLEESSGDRRRLGHITKQGNSMLRFLLVEAAQVTVRSDPEWRSKFFHLAMRRGRKIAKVAMARRLAVRLYWMWRKGWNYEQWIKFGSHAGQPGHRQGVQLTPSN

SEQ ID NO: 503956 - protein, 391 aa, unidentified
MFYIGIDIAKKNHEASIIDSSGKSLSKSISFPNSTKGIEKFNNFIAEFGVTTNNCIIGMEATGHYWISLFSYIVDLGFTCYVINPIQSDAFRKMYVRQTKNDSVDSFIIAQIMRFGEFSISNFSDENTFALRNLTRYRFALVDECSDWKRKLVAILDQVFPEYSSLFSNIYGVASKELLSKYPLPEDMLSIPAEELGDLLCKCSKGRLGMNKAEEIQSCARETFGIKFAKRSFSFQIKQIISQISFLEEQLKEIEIEISCLLEDICPIITTITGIGSVLGASIVSEIGNITRFERANQLVAYAGLDTRVKQSGDFSATNTKLSKRGSPYLRRSIWLAATVAAFKDPALSIYYQGLRARGKAHGTAIGAVARKLTNIIFAVLRDQKPYTPNI

SEQ ID NO: 503957 - protein, 331 aa, unidentified
MNKQNFNFFIGIDISKKFFDVAIIENDRTTSYVFENTKKGTNAFIRLLKNQKIPLDNTLICMEHTGVYGKLIITKLVEKQASFCVEMPIQITKSIGLQRGKNDKVDAKRIAFYASKNYPELELYKPIAEVLEKMKILLKIRKKLVNTRADINKYPNELERFSPEIGKLARKNLKRINKNLEDEIKRIEAEIKKLILSDDKLNKTVGLVTSVTGIGQITALHLTVFTNFFTRYDNPKQLACYSGVVPFEYTSGSSIQRKSRIHPMANRTLKKHLHMSALAAINHDPDIRAYFLRKVEEGKNKMLIVNNVRNKLVHRVCAVIKRQQPYVKNIA

SEQ ID NO: 503958 - protein, 413 aa, unidentified
MDNSLFRFVGIDLHKHFVVVAAVNAQQEVVLPPTRRIDLDDFPAWAQTHLRPTDAVVLEATGNAWWCYDVVAPLVGRVIVANPLQVKWIANAAVKTDRQDAVRLAKLLAANLIPPVWVPPPPVRELRGLLAHRQALVRQRTAIKNRLHSVLHRHHIHPPEGDSFAAHNRDWWLSLDLSPTERLRVRQDIATLGHLETQLDDLEAELARLSTQEPWKEQVPFLIQLPGFALLSAMTVLAAIGDISRFPTPRHLVSYAGLDPRVHESGESSRGGSISREGRRDLRRVMIEVAWAAVRSHPYWKQEFARLCRRKPEGVAIVAIARRLLVAVWHVLSERVADRHADPVAVAGKLMRWSWQLTPDQRGGLATRQFVRYGLLRLRLGNELTGLPWGGTFRRLASVEEVVALFPDLAGPG

SEQ ID NO: 503959 - protein, 350 aa, unidentified
MVSTTTTKEVVMNVMIGIDPHKASHTAVAIDGGEDQLSSVKVRATHRQVDQLIDWAEPFEKRTWAIESAGGMGYLLAQQLVARGEDVLDVPATLASRIRVLATDRSNKNDPNDAHSIAIAALRAPRLRSVEPANHVEVLRLLAKRNRDLGSQRQRVVCRLHSLLSELAPGGIAKELYVSDAEALMATLNPETPAQQMRFDLVLELLDDVRRLDAQTKESHRRIKAAVKASGTSLTELYGVGPIHAATLIGYSGDVTRFANRDAYASYNGTAPIEWSSGGRVVHRVSRRGNRKLNHAIHMAGVTQLRNPGTPGRIYFERKVSEGKTKKEALRSLKRHISNAVYRQLVLDAR

SEQ ID NO: 503960 - protein, 367 aa, unidentified
MKKVSTAAVKQSRNISQQKLTIGLDLGDRNSWYCVMDETGQIQLEQRVRTTAQGLREVFGAMPRSRVALEIGTHSPWISRLLREVGHEVVVANARKVRLIGESRKKDDRLDAQTLARLARIDPELLYPVKHRSEQAQADLMMIRARAGLVRVRTGLVNTARGLSKSYGERLRGCNVRNMNPEKAEGLSPELQAALEPLLAAIESVSERIVEYNERIENLTQQSYPQVALLKQIKGVGTLIALTFLLTLEDPHRFRNSRDVGCYLGLQPGRRNSGQSEPQLHISKEGDPYLRTLLVQAAQHILGPFGIDCDLRRWGLKLAERGGRNGKKRAIVATARKLAVLLHHLWVSGEVYEPLHNRRRTTVATAA

SEQ ID NO: 503961 - protein, 368 aa, unidentified
MFYVGIDIAKNTHWASIMSSDGEIIKEPFSFSNDNNGFQKFISILESLDKTKILIGLESTAHYGENIISYLFNLDYNIGLINPIQTANLRKSNIRKTKNDKVDTFIIIKALTLGNYSLITSRDINNLKLKGLCRSRRNLVTMRSKAKIQLVSYLDQIFPELAQFFKGNPHLNVSYQLLKEYSSPKQISSLHLTKLTNILHDNSRGRYGKQDAIRLRELAKNSVGIDNPSLSLQIKHAILQIELYTEQITEVEILYKSILDEINSPILSIPGMSYNQAAVIVGCIGDLNRFEHSCQLLAYAGLDPSVVQSGNFQARSTRMSKRGSGMLRYSLVYSAHNVVKNNKTFRDYYDLKRSQGKSHYCALRTCCS

SEQ ID NO: 503962 - protein, 394 aa, unidentified
MFYLGIDVGKFSHSLCLIDETGRHHIWQVNNDKSGFELLGKKLEALNLVFTSSNLLVGMEATGHYFLNLYDFFLSLGLPAGSIALLNPLQVKSFRNTNLRGGKSDNIDAEQIAVLLQFGNFDRCNVSTDHIMNLRELTRLKSDLTSNLGNLKRKMIGVIDRVFPEFARIFQNKFGLTVVALLTDYQTPEEFAALSLEELTTLIKGLSKRGVNQDKIKRLYDAARNSIGISFGKESFKIELSILLEQLKKLGEQIDFLEDKIAELVNGLNSPIFTIPGIGKTTGAAILAEIGDISHFDSAVKLIAFAGLDPKLKSSGTYQGRTPISKRGSKYLRNALWYSAMVLCRTDEKFHKQYQDRRKLDKSHRYAVTAAANKLTKIVYHVLKNNCIYDPKLA

SEQ ID NO: 503963 - protein, 355 aa, unidentified
MESTKYVGLDVHKEATTIAVMNSAGKLIMESIIETKAITIRQFIQGLHGDLHVTFEEGTWAAWLYDLLKPYVTKVVVCDPRKNTLLKVGNKSDRIDPKKLAELLRNGSLSEVYHGENGVRTLKELARSYLTISKDLGRVMNRVKALYRSWAIPCAGTQVYALCHRSEWLSKITEAGVRRRAEHYYQQLDALQTLRREVRKDLLLEGRKHNATKLLRQVPCIGPIRAAQLVALMQTPHRFRTKRQLWTYSGLGLETRDSAQYRYVEGQLQRSKKPQQLRGLNSNHNHDLKNIFKGAATTASVSAGPFHDFYQALLTKGMRPTMARLTLARKIAAITLIVWKKGARFDPQHLKQQAA

SEQ ID NO: 503964 - protein, 342 aa, unidentified
MQITTIGLDIAKNVFQVHGIDAAEKVVVRKQLRRRQVLEFFKAMPPCVIGMEACATAHYWARELTKLGHRVRLMPAKDVKAYVKRNKNDAADAEAICEAVRRPTMRFVQIKSTEQQGRLMLHRTRDLLMRQRTQVINAMRAHLAELGIVAAQGREGIKELLKIIASEEDARLPVDAHTSLVVLAAELQAMQTLIGSIEKRIMAQHRANEVSQRLESIPGIGVIGATAIVATVPDPKVFRSGRDFAAWIGLVPREDSTGGKQRLGPISKQGDRYLRRILVVGACAVLRYARQQPEKYPWLTQLLARKPFKVVAVALANKMARIAWALLAKGDTYRAPALAAAA

SEQ ID NO: 503965 - protein, 345 aa, unidentified
MARKATDQVTTIGIDIGKNTFHVIGLDGDGNIALRCKLSRSQVVARFANMPPCLIGMEACVGAHHLSRQLQALGHDARLMPAQYVKPYLQGQKNDFHDAEAIAEAVQRPRMRFVPTKSVEQLDLQAMHRVRARLVRHRTSVINQIRALLLERGIAVRQGARFLQAALPEILGQHSELLSPRMLMVIADLSSDLHHLNDRIEAITKEIETLAKADDACQRLMTVPGIGPVIASAMVSAVGNGAAFSKGRDFAAFIGLVPRQMSTGGKTILGRISKRGNTYLRTLFIRGARVILLRPEHWPKHRFGAWLEAASKRMHRNVLAVALANKLARIAWSVLTGERSYQAQA

SEQ ID NO: 503966 - protein, 345 aa, unidentified
MEEISRIFVDTSKQLFQLHGVNAAEQVVVRRKLRRAQFLAFFAGMKPAVVGLEACAASHHWARELAGLGHEVRLIAPQHIKPYVKRNKNDARDAEAGCEAMSRPTMRFVPVKTVEQQAGLMLLKHRERLVAERTATSNAIRGHAAEFGWVVPTGLDKIPSLVAQAVEAPEVPETICKVFRQLDARFAQLQAEIAELDREIAAWRRKSEVSLRLAALPGIGELGSMMLPLKTPDPRGFKSGRDFAAWIGLTARDHSTAGKLRLGVITKAGDEALRSVLVAGAMSAIRQVLLGRGRQWPWLVELLKRKARKLAAVALANKLARIAWKMMVSGASYDPAKLGLSPMTA

SEQ ID NO: 503967 - protein, 355 aa, unidentified
MDHIGIDVHKRESQICILAEGGELIEQRIRTEAERFAAVLGTRPRARILIEASTDSEWVARCLEGLGHEVIVADPNFAPMYATRTRKVKTDRRDARALADANLLGAYRPAHRLSDAQRHVRGRLGVREALVRTRTRYISLIRALLRQHGYRVPSGSAEAFIDRVDSLPLPGQVRSLIAPLLAVMLPLNRQLAYSDEVIEHLAAQDPRVQRLRTVPSIGPVTAAAVVATIDDAQRFRHAHQVEAYLGLVPSEFSSGDSQRRGPITKAGPGRARWLLIQAAVSILRRHPPEAEALWTWALRIAARRGKHVAVVALARRLAGILYALLRDGSVYQPRRAVGVPGPAVEPRNRRAARTR

SEQ ID NO: 503968 - protein, 368 aa, unidentified
MFYSIGIDISKDDFKACILEYNPVEQTERVRSSRKFNNTQAELPKFVSWVTKWESKQPAPVRITMEATGVYYERVALHLFDNHPEWALSVVLPSQARRFNESEGFKNKTDRIDARGLALMGARKKLQLWRGIKPYWSELRQLTRTRGALVEQRTQLKNQLHALNYSAYAIKDTRKIVQQTIAALDKQITKLEKLITRHLDSDPEIEEKVDKLKSIPSIGLITISTVLAETLGFEYFTTRSQLISYAGYDIVVKESGKHKGKRKMSKQGNARIRAAMYMPVGNILSHRKQPYYSYYDRLVSRHGIKMKANVALQKKLLCLMYHLWKKNEAFDAALALRPAGLSASAVSPKGDTGVDTTIPELEMAFFED

SEQ ID NO: 503969 - protein, 437 aa, unidentified
MVVEPGGQRCFELGKPLTCLLARGITGLQPYGVQGVGPGWLASPLAASGLANQERAYPAGTRRGVAQQRRDRSESQVAHRGPFHRRSEERFQLVITIGIDPHKSSLTAVAVGPDGQAHPPIRLVVDKSTPAALLSWAAPWPERQWAVEGATGLGRGIAQQLVAAGEFVLDVPAKLAARARLLGSSSARKTDVADAISVAAVALHNRRLNRVQVEDHTTIMRLLTERREDLVAEHTRWINRLHVLLRDLHPGGAEVRLDTTDASALLAKIRPVTAADQQRKLIARDVVRDLKRHEASIKELEKQLRAAVAASGTTLTQIQGIGFLTAAKILALTGDIRRFPNQEHYASYAGTAPIDVSSGEQETHRLSRRGNRQLNAAIHVAAVTQARDPGPGRDHYRRKIAEHKTAKEARRSLKRRISNAVYRRVLADRQRLQLQAA

SEQ ID NO: 503970 - protein, 338 aa, unidentified
MKYCGLDLGRKSSHFCIVDKERRVILEGKVRNRSKALEARFGKLEKMKIVVEASNKSFWIADQLKAMGHEAVVVDPGRTKAIGAARIKHDRLDARILAQLCQAGLLAEVDQPGQQVRISRMVFTARDSLVRARTRLVNTVRSMADSEGVEIPHCSTRRFVEAVCVVVEEMPAGMDELLDPLCLAIEELNKQIEICDQQIRQEAAQDELLGLLQTCPGVGPIVAAGFAQAIRDPKRFPNGRSVGAYLGLVPSLYASGKTNMKGRITKCGNRHVRWLLTIAANAMLLSKEDSALRRWAMTLKQRVGPKKAKVALARKLSMVLWAMWRDNRPYEARLAAAA

SEQ ID NO: 503971 - protein, 338 aa, unidentified
MTIVMGFDQHREQITWDALDTSTGELRRGRIRPAERASFRHFLRRFEGERIEAALEATTGWRFMVEELSGVGAEVQLAEPAETKVLRGPKRRAKTDRADAKHLRELLQQGRVPESWIPPEQILELRSLVRLRRALVEQRTAWQQRIHAQLFHHGHPARRDLLARERRAWLVGLELPHAARTQVEVALRLIDQINVQLEPLDRELRQIANSWPGTKALQAHYGIGPLTAVAFLAELGDAGRFSSSRKAVRYAGLDITVSESDSKRAPGRLSRQGPATLRWAAYEAAQAARHPRSPDRDYYLQASDRLGGNRACLALARKLVQRAYHTLRELGEEALQPA

SEQ ID NO: 503972 - protein, 418 aa, unidentified
MTTVLSADWFIGVDWATDAHAVCVVDATGRVCDRRTVAHSAAALETLIEALVARAAGEPARVAVAIEVPRGALVEVLVERGFAVYAINPKQLDRFRDRFTAAGAKDDRRDAWVLADSLRTDPQAYRAIRLDDPRVIQLREWARLDEDLAAEVTRLTNQLRDVIYRGMPGLLALSPAADDPWLWTLLREAPTPSAQQRLSERRLARLLREHRIRRLTAAQVRAVLQQPPVFTAPGVIDAVAAHLALLLPRVELAARQRREAAQQLQRWLDTLDGPAAGDQREHSDVAIVRSMPGIGTRVAARMLAEASQPLVDRAYHVLRAHMGLAPITKQSGRRRIVVMRYACNRRLRDAAYHWGRTAIQLDAPTRAYYTQLRTRGHGHARALRSVTDRLLRILMTLLERRQLFDPAHAQPVAAPTGA

SEQ ID NO: 503973 - protein, 373 aa, unidentified
MRKVIMIGCDLHDKTMLLKIAEGREQPETRSVSNTATGRVAMIRDLKKRALAAGSARIVFAYEASGQGFGLYDELTDAGIQCHVLAPTKIARSQRQTSQKTDEKDAQQLLELLRAHVLAGNELPTVWIPDATTRDDRELVRMRLDVAEKITRVKTQIQSLLKRNTIRRNQDSGKGWTRSFRNWLQQTLCGSQASPLGSRSQATLLSLLRQLDFLEEEVKRLDVEVFALVEEERYAAAFEELTALCGVGLLTAVVFLTELGDLSRCTNRRQLAAYLGLAPRSFESGDASDRKGHITRQGSSRVRKMLCQATWSRVRWDSQEREAYRRIVARNPKKKKIAVVASMRRLAVRMWHRGLEFQGKPSRSKLLAARAAG

SEQ ID NO: 503974 - protein, 329 aa, unidentified
MSALVCGLDVHKESTYATILDASGKIVNQKRMSNSLVPSYLSSFKIDKIGMESNNQIVPLYRLLTKKGYDVSISHPKKTRYIAEAKIKSDRVDSKAIAELVRPDALPQAYMPDPETAMLREKIRRRAFLVRTRVRLRVKIRSILTYEGIKPPSDYGLFTLKGVEWLRSLALEPIESYLRIIKPLDDEIRQVSKELKETARIDEDVKLLTTVPGVGYYTALLVKSKIGPINRFIDGDKLCSYAGLVPSTYASGGTIRHGSITKEGSRWLRWVMVEAAMTHIHKYDTSITRAYHRIAERRGKQVATVAAARRLLMCCWSVLKNKHPYYDQA

SEQ ID NO: 503975 - protein, 443 aa, unidentified
MSKKRFSHLRGERGQAFADLIRGIPSEQILCVSLDISKYFHVVMLHNGLGEIVKPAFEIDFYQSGFDRLCEVIEQAKAETQAQVVLVGMEPTSHYFENLARHLLQQSQPVTLINSFAVKQNRDQQLMRREKTDPIDCAAIGDLLRRGEGTVYQPATGIYLQLQQLDRVRLGKVKIETMLKNQIIAHLDRIFPGLVILGKPAQERYTPLFAVDFWQCQTLQHLIRVCPNPHQLAQMTPAALVQAFRAQHYRLGSQTAAKIIARAQQALLPDPDLVAIRMELLQHDLDLLETVQAHIAELNKRLTSLVIQTPFRVWTQLKGLSPVQVASLAAAIGDPAHYTHAGQVFRRSGLVSGRNDSGNRQRKGKGNPVLKAGDVYLRRALMNALNTLLLHQPVLRRYYQQLCHSKPTGVARVATARKATAILWATLRDQYPISLISCKGANM

SEQ ID NO: 503976 - protein, 317 aa, unidentified
MKEKMEWIGIDVAKESSDICVYPSGERWETAMTSAALRKLSRKLAARQPTGIIVEATGGWERPLVAALKQEGLSVRVVNPRRVRDFARAAGILAKTDRIDASILARFGERMQPEERPTPTPSEQARRAVSDRRQQLIDMLTQEKNRLPLAPPLLQRDLRRHIDWLEKEIKELDETVRQMMKDDPEWQAKDACLRQVKGVGPRLSLGLLGAVPELGTLNRKKIAALVGVAPFNSDSGMRRGERHVFGGRRNVRRLLYMGALTAARSNSVIRAFYQDLRSRGKKFKIAIVACMRKLLIYLNSLMRQHLTSTTPQLVVTA

SEQ ID NO: 503977 - protein, 356 aa, unidentified
MQSKAISFKGQKVFVGIDVHKKTWSVTTLLEVGMPKTHSQKASAKELFDFLNRHYPEGEYHAVYEAGFSGFSTYYALKEYGIECSVVNAADVPTTQYESVMKSDPIDSDKMARALRAGMIKGIYIRERDNLDDRGLVRLRKSIQQDLTRYKNRVKHVLHANGVEIPEQFDRSCNWSKAFINWLREDVVLLSSTRASLDMLLDQVETVRQNLLNITKKVRSLRNKKEYADMYDALTSIPGIGPICAITLLTEIYDVKRFKNERQFASYLGLVPTCHCSGEKASFGEMTFRGNKHLGPLLIEASWVAIQWDDALSVAFTNYRRKGLMPQESIIRVARKLSNIIFSMLKTGNHYAPANA

SEQ ID NO: 503978 - protein, 363 aa, unidentified
MKTILALDLGKFKTVSCLLTEDHASIPVFKTIMTNPKTFEQFLLDVKPSLLVLEACGLSGWVVDLARKLGVEVLVAHPGGEAWQWGKVKRKTDKDDALKLAQMARNNEIDSVHVPSPEHRQFQQLVRYRKKLQSQAIATQNAIRSNLMTQGEECAAGKIAWSKSYIENDLGKLRKSFEECTASEYWRGTLDVQLTHLVATLKLMRGIEKQLAFISKPDPRIEIVQSIPGVGVVGSQVIVAHIDDAKRFKSARKVSSYAGLAPKKWQSGKMDRQNRISRRGPRLLRSVLTEVAWCAIRFNPHFKALYDRVRGGSKSRKKQAIIAVARKILVTAWAMLRDGKNWSPPQAKLMVQADPKLASASTA

SEQ ID NO: 503979 - protein, 315 aa, unidentified
MAMPVATTQSIVGVDVAKDELVIYHVESDRLETISNTKSAIKKWLKTVAKPVAIAIEATNIYHQEFAELAHADGCRIYMVGGYELSHYRKGVNVRAKTDALDARLLARYLTNEGDHLRPWTPPSPLYCRLISLFRRRAALVQARVSLKQSWENEPLLKTAFKNQISAMQRLETLLEKTILTQIEEAGLGAQLKRCMKVEGIGTLSGARLLASFQRGDFRNADAFIAFLGMDLRIADSGKKKGRRCLTKRGDPEARRLLHNAAMAASRTSVWKGFYEAMRGRGLSTTQALVALARKLARVVFALLKNQSEYSPKGV

SEQ ID NO: 503980 - protein, 321 aa, unidentified
MNRVLVGVDVCRDFLDAHARPSGLPKRFDNTPAGIEQLVAWLRSLAPERIIFESTGPYQKAAVGALLAADLPAVVVNARQVRDFAKGTGQLAKTDAIDASVLAHFGEVVATVVRPLPSQEILEFRELCDRRGQLVRMLASEKNHRHAAQGASPKVIKNIDKHIAFLQRQIDDLEERMDRIVADSETFKAKDEILQSIVGIGRQVSRVLLVHLPELGKGTRRSIAALVGLAPFADDSGASSRIRHIRGGRAKVRMALYQAAVAAVRYCPTMKSFYASLKARGKATRVALIAVARKLLVLANALLRTGIPYQRPTNSVCLKNV

SEQ ID NO: 503981 - protein, 341 aa, unidentified
MTIVMGLDQHRAQITAEWIDTDTGEISRTRVAPADRVGVRRFLERFTGRQLEVALEATTGWRFVVEELRAVGARAHLAEPAETSALRGPKKHAKSDRADAKHLRELLMTGRLPECWIAPDHILDLRAQVRLRHSLVDERGEWQQRIRAVLYHHGFPRRSDLDLLTAAGRDWLTALALPATAREQITIALRMIGALDSEIPALDKQLRAYARRQVGCRALITAHYGIGELTSVAILAELGDCRRFSSSRYAVRYGGLDITVHASDRRRAPGHLSRQGPPVLRWALYEAAQAATRPSSPDHAYYRQAAQRLGHNRACLAIARNLLKRSYHTLKDLGDQALAPA

SEQ ID NO: 503982 - protein, 333 aa, unidentified
MLPPNCGTATPYILRNTVGLDISKLTFDATAIVGNAEYSAKFDNDSKGLNQFSDRLKSLGCQNLHICMEATGNYYEEVADYFAQYYSVYVVNPLKISKYAESRFKRTKTGKQDAKLIAQYCRSAQESELVKRQKPTDEQYRLSRMIAAYAQIKSECAAMKNRHHAAKDEEAAKAYAQIIKAMNEQLEVLKEKIKEQTEKPNCKEGVKRLETIPAIGRMTAAVLFHHLTSSKFETSNKFAAFAGLSPQQKESGTSVRGKGKLTKFGNRKLRAVLFMPGMVAYRIRAFPGFIKRLEEKKKPKKVIIAALMRKLAVIAYHVHKKGGDYDPSRYKSA

SEQ ID NO: 503983 - protein, 444 aa, unidentified
MSRKQRKHIRGKRGEKFLQIVRGIDRARSLCVSLDISKYFHLVMMHNAYGEIVTPSFEIDIFRSGFEHLCQVIDETAARIGAEVVLIGMEPTGHYFENIARHLHARYEHVYLINSLAVKENRAQKMMHYQKTDEGDAAAIGDLLCRGEGTPYRPNKGIYLEMQHIDRVRVAKLKMRSALKNQIIGHLDRIFPGLIITNKEAQKRHRPLFTTDFWSGKMAQDLVRVCPDPRQLSQMSLQELIDTFHAQGCRMGPHWATKIVAFAQQTLHPDPEIIAVRSQLLQRDLVLLEQIEGCIAKLEDRLLALLVQTPGYIWSRLKGISPIQAASLMAAMGDPSHYDYAAQVFCRSGLVSGRNDSGTRQKKGKGKHVTKMGDVYLRRALINLVETLSLHQPTLGDYRRRLKSVKSHPGVARVATVRKAMGILFAIQRDQRIDGLLLKGDDPM

SEQ ID NO: 503984 - protein, 343 aa, unidentified
MSGAYEGRQIVGMDLHRRRSVLVRMTETGERLETMRISNDPEYLREVMTRAGEAPEVVLEAAYGWYWAADTLAELGATVHLAHPLGVKMFSMRRVKNDERDAADLADLLRMGRLPEAWIAPPATRELRGWVRHRAKLVGLRSGLRCQIHAVLAAAGVQVPMSDLFGVSGRELLATAALAVESRSRVESLLRVIGALDFEIDTYAKLVAGRLRTDPGYQAIQQIPGVGPILAAVFVAEIGDITRFHRPEQLASWAGLTPKHHESDTTVHRGRITKQGSRLVRWAAVEAVQRVPGHTRLGQRRDRVGERRGRNIGVVAAARDLVTLVFYGLRDHHLRCLPTNAAA

SEQ ID NO: 503985 - protein, 422 aa, unidentified
MSYCPVAGIDVSKRFSDMCILSPDNKIFAQEKIYHDETSINRANALLQKAERLFFRKPVIVMESTSHYHLILFQFFSEHGYDVIVVNPLQSNSMKDFSIRKRKTDRVDAFKLAMMYRTKTLRPSQIPQTATRALRQLCRHRAELLNDVSSYKNRLTALLDQTFPGYDKVFSDVGGVTSCAVLVRFPTPTILLVEEESELVEVIAAASKSGYSFAKKKAGLLISAAQKAQTLGIHSCADETLIVCTIQMLRTLSESVLQIETAIDNLLAQIKEMRNNVSLLQSIPGIGSHSAALLLGEIGDISLFKKPKQLAAYFGLDPTERQSGSFRGTKNKLSKRGSSYARAALHMGIVNSICKRGKDSAANPVLLSYYEKKCKNKPAKVAQAASMHKLVFIIFAVLRDQKPFELKTPEQHAVEQGFVKAA

SEQ ID NO: 503986 - protein, 316 aa, unidentified
MDGQAVHVGVDVSKERLDVAVRPSGEFFSEANDKRAVNRLVKRLAALDCMRVVVEATGGYETVVVAALCAAGVPVVVVNPRWVRDFAKSIGWLEKTDHIDAKLLALYAERAELKVQQLPDEATRQLRELCARRMDLLEMIDAERNRLEHATSAVRRTIASHIDYLRKRLKRIERDIDGAVRSSELWRHQDKLMDSVPGVGPTLRASALAWLPELGQLNRGEAAKLVGIAPLPDDSGKTRGYRRIAGGRGPLRKVLFMATMGAMLHNPHLRAYYDRLRARGKQHKVALVATMRKLLLILNAIIKTDTPWSESCLTNL

SEQ ID NO: 503987 - protein, 442 aa, unidentified
MAKIPRSERKRIERANALKNKILIGIDPGRTNHTGIIYSPDRLPLTNAMSIKNNRNGVEKLEKIITNIMTKFPDNQVIFAIEASGEYWKPLWHYFTQRSFETIYVPPLFVKRTRDLDDYTPRSNDPKDAARITNLAYEGRYFTKPNQPEVFNNLQQTVKTWEQVTKEATRTHLRIRSLLDKFFPEYVTVFSNVTGAASLKVLARWPFPGDLLEVDKPELIQLINQSSGARLGETAATQLINLAETSIGITIGIDGGHSKLTSLIDQINFYKQQLTPLRRELRKLIGQIDYAWRIMTLPGIGLISTARFLGHLGDLNNFDQVNKIIDFAGLDLISSESGQFKSRRQISHRGQSGLRCILYEMNCHFVRFPNTARRKFLKCRINNKLYRQAIVAAIPHLVRTIFAVVKGDQVYQPPQANDPLLNEINFLETVLKEPRKQFKKAA

SEQ ID NO: 503988 - protein, 515 aa, unidentified
MAAASPRRRRSGAAGVTRMYLRWGVAGGILGLTPHRGRHLGQERPGGPTRPMREICSQLVLLLGRPVDSRLGYEPESVFATSARKSTPQPQVQQGECSMKDDSNASPIRYIALDIHKYYSVVAGVNRDGEEILPPCRVEHMNLEEWLGKHLLASDRVVIESTTNAWHVYDLLEPLVAEVLVANPIKVKQIACARVKTDNKDTLILARLLAANLVPTVWVPPQPVRELRQFVSHRRRLANMHTQVVNRMHSVAHRHHLNHPKGKDFQPKNTAWQQDASLSQLEKLQLELDMATRAHLEKQIEQMTRELGRMSHKEPWASDMLYLMQIPGCGVVTGMTIMAAIGDITRFENPKALASYSGLTPGLEQSGVKLRGKGITKEGRRELRWALVEVAWRAVRADPHWKRLFEELKKRMHPNQAIVTIAHHLLVVMWHVLTKREPYRHYSPERIAYKYLTWSWALDEEQRGGMTRPQFARYYLMRLGIGDELKRVALNPEFPYRLASVEEVLAIRPELLRSE

SEQ ID NO: 503989 - protein, 412 aa, unidentified
MRAVALDVHRDFCEVAIVEDGRPRSAGRIQTRPEALELFARSLDPRDWVTLEVTGNAWAIAAILEPHVARVIVVSPTDTGIRQARAKTDRLDARTLAKLLWAGELDGVWTPDERVRAMRRRLARRAQLVRARSRVKNEIHAVLMRCLKDRPPASDLFGIKGRRWLADQQLALCERETVDAGVRQVDFLDTEIAHVERLIAADALGWPEVKRLMTVPGVNVIVAATFMAAVGDIRRFGDRRKLTAYLGLDPRVRQSGAGPANHGHISKQGSNSARHALVEACWSTVRQPGPIAAFYQRVRSRRGHSIAIVASARKLACLFWCLLTRGEDYAYAQPSLTQKKMRRLELAAGAPRWQGGRHVWSTNEAMRQAERALAAQAELAYKRNVADWQATRPAAAGASATQGHASQEPSKG

SEQ ID NO: 503990 - protein, 482 aa, unidentified
MKKKNIYVNQSQELLSLFEEAGNGAKIMCVPIDYAKKDHVVMFCNGYGHILRKPFSIKNSPEGVEYLTEQVIRSCSHRRIEPKHVFFGGEDVGSYAENFANTLRSGGWIVAGVNAHDAKEQRANIQASTDRLDLMGIASMLLNRRANCSPAQSGIYRNLRTLVRHRRNLISMSTEEKNRIHTVVDRLFPGFLDEKNSGILPFSKSSLHLMENRFSPLQIRRRKRHKLIEVLHRYGTAKPENTAAKLQEYAVRVLNTPDEYIITLQLSLVQHVKHFRCLQDSINQLENEIAVWLAQTQGAFLTTVRGIGIVLAAGVSAEIGNPYEQKPLNNLVSYSGIIPRVKQTGGSEGKTRTGKVAKRCNRILKDYVVQSALHMGLHGPEDLMADYKRRDAAGQHADFGIGRRYLRMAMCLMRTSQIYMPQRLRNTEVKPEERAGYYLMTWPSLREKWNKAGALEAAFEKDRPLGQWRKMVQELYEIKLKL

SEQ ID NO: 503991 - protein, 454 aa, unidentified
MANSTGLTRGDRRRNQEIAALREVVGRDRAVLAVDLGEDKQVATLMDHDNVVLARKVALVKAHNLGSLLVWAGQHAAKHGFLGVTVACEPTGHRWKALMGLADGAGMGFVCVQSLAVHRAREGDDYTRDKTDHRDAVLIGKLVTRLDCYLPERADTQWARLRHLGARRGRLVSEATACGQQVADLLSCAWPAALECAAKPLESTTWLACLGVITDRCNGNPAKIRKMGRDKFVATVRGELPRWEAKKVSHRVLGRVWDALNDSRGVPAQRRGALERVHLVMADWRSARARLRDVEGRMLEVLDQLGLRELVCSIVGLSGVGAAVILAETGDLARFASARSVVKHAGLNPTENTSATMRGQTRVSHRGRPQLRTAAWRAVWGALPHNLVLGAKFVHLTKRETDRLAAGQARAACAAALLRWLYAVVTKRQPWDQRVASGMVPAARSAGVGLPAAA

SEQ ID NO: 503992 - protein, 354 aa, unidentified
MSGEKYIGLDVHQATISVAVMDSQGKVVMESILETKASTILEFLAGLRGTLLLTFEEGTWAAWLYDLLKPHVAKLVVCNPRKNALLKQGNKSDKIDARQLADRLRLNDLKSVYHGETGVRMLRELARSYLTVVKDLSRVMNRLKALYRSWAIPCAGRDVYYTRHRSQWLEKIPEAGTRRRAEQLYQQLDMLQHLRQQARRELLAESRQHTITAKLRQIPSLGPIRSALAVALIQTPHRFRSKRQLWTYSGLGLETRDSGEYHFVKGQVQRKKPVWIRGLNKDYNHDLKGLFKAAAMRASIQPGPFQEFYQRSLAKGIKPTMVRLTLARKIAAITLTVWKKGENFDVEKLKSQTA

SEQ ID NO: 503993 - protein, 327 aa, unidentified
MKESLIAGVDVSKSTLDIFIKPIGLSLKIANTPSGFKEWIRELNKVVDAGFDLLVIMEHTGQYSCRFESFLRSRSIGYCKIPALQIKRSQGMVRGKNDKIDAERIADYGWMRRDILVADQPLLENITELRSLLSLRVKLVRDRSGYICRLKEMKSSGTCTASDYLGRTQQQIIDVFTRKILQVEDKIKLLIRSNASIQKTAELLRSIKGVGWIVAAYMIGCTANFKRFGNARKFNCYAGLAPFKHESGSSIKGRARLSHLANKEAKTLLNLAASCSIRCDREMKTYYQKRVAEGKRKMSCLNIIRSKLVARMFAVVKRQTPYQPIAA

SEQ ID NO: 503994 - protein, 342 aa, unidentified
MEYYAGIDVSLECSSVCVVDGSGKIVREAVVASAPEALIDWFGSLGLGLARIGLEAGPLSQWLYTAMKRAGLAVELLETRHVRDAFKAMPVKSDRNDARGIAQLMRLGWFRPVHCKSIGAQEVRAVLTARKLIQTKLLDVENSLRGTLRGFGLKVGKTTARSFAGRIQELVKGNPNLETIAEALLAVRAVLLREFNGFEKRVRAMARSDARTRLLMSTPAVGPIVALTYAAAIDDPARFKSSRQAGPHFGLTPKRYQSGETDYSGRISKIGDAAVREALYQAAHVMLTKPVKGCSQLKSWAMRIAKRAGRSKAKVALARKLAVILHRMLANGTPFNAAAAAA

SEQ ID NO: 503995 - protein, 350 aa, unidentified
MKYTMIGVDLAKNVFQLHGASLTGEVRFRRKLSRGQFLRFMGSQPACIVVMEACGSAHHWAREMAALGHEVKLIAPQYVRPFVKRQKNDAADAEAIVIAARQPEMRFVEPKTPDQQARAILFRARERIVHQRTELVNALRAMLYEYGHVVPVGIGHIKRLEAALNDVANNLPDLVREEGLDLLAQIGEMTAKIDSKTQKLASLAKQTDVARRLQTMPGIGPMTAVAVEAFAPAMESFKSGRDFAAWLGLVPRQFSSGGKERLGKVSKAGQADIRRLLIIGAMARVNWASRKEASADPWMMRMLGRKPRMLVAIALANKMARMIWAMLMRQEDYRNPTLMKAAITNVGKEV

SEQ ID NO: 503996 - protein, 342 aa, unidentified
MEHTTIAVDLAKSVFQIAVSHRVGQVSSEHRLRRSQMMPFFAQQPAATVLLEACGSAHHWGRQLQQLGHTPRLLPAHDVHRYVRRNKTDRADAKALLEAARNDDIHAVPVKSLEQQAIASLHVCRATWMSTRTARLNALRGLCREFGLCIPVGATRVIPAVRAQLTADSSLPILLHAPLETLCAEVLQLEVAIHATERQLAALAEQMPDVIRLQTIPGIGLLTASALVARIGDAARFPDGRHFASALGLTAKETSSGLQRRLGAISKRGDVYLRQLLINGARAVLCHAKRHRDPLRVWALQTQERRGHNVAAVALANKLARIVWAVWTQRSEYRGVTRSPAT

SEQ ID NO: 503997 - protein, 340 aa, unidentified
MQLYAGIDLHASNNYLAVVDENGKRIFKQKLPNESEVILLKLGRFQEEVAGVVVESTFNWYWIVDLLHEAGYRVHLANPAAIQKYSGLKHSDDSHDAFWLAEMLRLGILPEGYIYPKEERPIRDLLRKRGHLVRLRTSLILSVQNIIVRNLSVRLNANDIKNFRTTTFSSILEPNEDLATACIVSKESIDFLTQKIRAVEAIVEQRVKLKDQYRHLLTIPGIGKILALTIMLETGPVARFPRVGDYVSYCRKVNSKWTSNDKAKGKGNKKNGNKYLAWAFSEAAEMARRYNPQCRSWYNRKMQKTNFMVAHQALAHKLARAAYCIMKEGVSFMPEKLFAA

SEQ ID NO: 503998 - protein, 380 aa, unidentified
MASMHDSVRFKTTVYAAIELSKKSWVVAIARPDRDRPSIHRIAGGNLADLIGRLRKAAGEKQRIVVCYEAGYDGFWLARSLAKIGIDCRVLDPASIQVNRRARRVKTDRIDSLALLRALIAIDRGERHVCAVVRVPTVEEEDARRSHRERQRLVRERTGHINRIKGLLFAQGIRGIEPKRRRTRIDFGKLTTAEGRPLAERLRRELEREYQRLELVQSQLRIVEKERDTADAQDPAVERKRELLCALQGVGGASAAILAREVFARPFASRRQLGSYLGLTPSAYDSGSTTRCQGISKAGNSWARRVLIEVAWLWRKYQPGSPLSHWYARQTADQSPRIRRIMLIALARKLAISLWRYVETGLVPDGAVMAKTTPHMAAAT

SEQ ID NO: 503999 - protein, 440 aa, unidentified
MQPSAVTAKGYKVRKRSVVFAKLAVRSRHTRGSFVRFGERFCEFYTYCLNRTLSGSIRSLLYIERAPQDDNLELFDELKLNRKESPMKTYYVGMDVHRASIWIVVLNGAGKLVLQSVIETGAERVRGFLKQLRGKVYVTFEEGTQATWLHDIVRSLVTEVVVCDPRHNKLLQSGNKNDRVDAQKLAELLRNGALKAVYHGDHGMRTLKELVRNYDCLVSDSTRVMLRLKAIYRGRAISCAGHDIYRSDRRAQWLEKLREPGARQRASFLYAQLAALKPLRHEAKLVMVKEARRQVAYPWLMSVPQLGSVSVAQLMAVIGTPHRFRTKRQFWPYVGLAVVTRSSADHEIVNGVLRRSRRPLATRGLNRNHNHLLKKVFKSAATSACHSGPFKAGYDARVAQGMDPSLARLTIARQLAAITLAVWKRGERFNMQMMKQQLAA

SEQ ID NO: 504000 - protein, 368 aa, unidentified
MIVHIMTYERNTLMNSEKYIGLDVHQATISAAVMDPTGKLVMESILETKAATILEFLAGLRGTLSVTFEEGTWAAWLYDLLKPHVAELVVCNPRKNALLKHGNKSDKIDARKLADLLRLNDLEPVYHGETGVRMLRELARSYLTIVKDLSRVMNRLKALYRSWAIPCAGRDVYYTRHRSEWLGKIPEAGTRRRAEQLYQQLDMLQHLRQQARRELLAESRKHTITAKLRQIPSLGPIRSALAVALIQTPHRFRTKRQLWTYSGLGLETRDSGEYHYVQGQVRRRKKQVSIRGLNKDHNHDLKGLFKAAATRASVHPGPFQDFYQRSLAKGIKPTMVRLTLARKIAAITLTLWKKGENFNAEKLKSQAA

SEQ ID NO: 504001 - protein, 336 aa, unidentified
MSYIGIDLHTTQLTFCYLKTAEEYEFKKYRLEEIEQFLADLTQTDQVAVEATGNTRWLVNLVKEKVGRVVIVNPREFEVIKQSVKKTDKQDALSLARFLAVDMLPEVRARSERAETVQRINETRSKLVRLKTALLNKIHALAVSTGRKLKKESLSSERGLEKVLSFEWTASERVELEIIIEQIRSLKVGIGKLDKVLEEQSKQLSGFENIITVTGIGARSAGVLLSVIGEVEDFADENKLASYFGIVPKVANSNEKVSHGHITKRGSKTGRTTLVQCTLVAIRHNSYLKKYYEQVKARRGHGKAKIAAARKYLGIIYNTLKNKWVFEDFNNFVLAE

SEQ ID NO: 504002 - protein, 342 aa, unidentified
MEISTLGIDLSKTTFHVIGLNARGEIVLRKKFSRKQLLVFTANRQQILIGTEACGGAHYLARALREQGHDVRLMPAQYVKPYVKKNKNDYLDAEAIAEAVQRPTMRFVPIKTDEQLDLQALHRVRDRWVARRTAVMNQMRGFLLERGITMRKGPSHLAAQLQIIFGEGNCSFSGRTQGLLLELKHEWDELERRIEEASAELQRIAKQDDACSRLMEIPGIGPLVSTALVASVGNAITFRKGRDLAAWLGLVPRQHSTGGRPKLLGISKQGNEYLRRMLLHGARSVMMQVERNPSVLGVWIADLSKRKHHNVTAVALANKMARIAWAILTRGSHYSAPELTAA

SEQ ID NO: 504003 - protein, 353 aa, unidentified
MVYSPNEYDIFIGIDVDQKSFSFTVKNHDSMNNSYKIPASPENLYQYIRNRYNNKRVICAYEVGVTGYHLHDYLTSQNIRCLMVPPPSVPKASNDRTKNNRLDSERISQHLKNGDMNPIRVPDYDCRELRQLLRSREEYVDLRKVSKQRIKSLLLFAHLHTLLKDTTQYWSYSHIKRLKSLPCSPATRQRLDLLLKDLDYARSQTVVILKELKTLSERNTGLRRNIHYLRSIPGIGFITAITILASIGDPQQLRNPRELSAFAGLVPSEYSTGERISRGRITHLGSSVLRSLLVEAAWANIGKDARLRQFYDRIRAKHHPQVGARKAIVAVARKLTLIIYRVLKEQREYIANI

SEQ ID NO: 504004 - protein, 410 aa, unidentified
MDLLRREVPSSALVVAVDPGKAFNRVWLTTGERGLIGDPVSLPVLRDGVDELERLIVASGVTGAPVIGLEATGALHRAWATELERRWPGSLRLFAPSETTAARAQLGSRRFKTDDRDCAALVWLVRQGAGRPAEPRVVEALRGTVAHRRQLVDARRVLQQRLHDQLNALCPGLSAPAGHGRALELASPTGQAVLACAAAFAGRAPSKRSLLARAPGRTTDATARFWAGRWKRLLDPPPDAELRAARLGRDLGRWQALRDDIALADAQLSALLAQSAGQILTTLPGVAAVRAAAFSAYTLPIERWPTAEHLYSATGLAPASYQSSTVTRRGPISRQGLPEHRDALMAIAWGLSQNSDAFRARDTELRARGFRPIQARVALARNACRLCWRLLHSQQPYDDRRYARARRRGR

SEQ ID NO: 504005 - protein, 406 aa, unidentified
MSIYIGIDWSQEKHDVAFMNAAGAIIARLTIPHQPDGFRKLETTRQQLSVTAADCLIGLETAHNLLLDFLWDHSYQHIYVIPPWVVKSSRGRYGHSGARDDTLDAQLLADLLRTDRARLQPWRPDSQLTRQIRARVGFISFLTHSANRTHNRLRAALLRYYPQALELFSGLMVPTTLAFIVTYNTPQALTALSYETFASFAQQQGYRNRQGLFACYARLQHTPLQASPATVAAYQDEARLLAQQLRELILAKRQVQRDLNTLFAQHPDQAIFSSLPGVGAFLAPALLAKLGDDRERFPSAASLQALAGTCPVTVASGKHKRVIFRHACDHEFRQIAQQWARCSLRKSVWAVAYWQQVRPRCASDHDAYRRLANRWLAVLWKLWHSRELYNEAYHLQQRRLRSQPFA

SEQ ID NO: 504006 - protein, 407 aa, unidentified
MLFVGDDWAQDHHDVFLMSDSGTRLASRRLPEGLAGIAQIHDLVAKHVEDPGDVVIGIEKDRGLWVTALATAGYQVYAINPMAVARYRDRHSVSGAKSDAADAKLLADLVRTDRHNHRLLAGDSERADSIKVLARTHQNLIWMRARQISTLRASLLEYYPAALQAFPNLGDRDRDKDALAVLGRAPTPEEGARLSLSKIAAALKVGGRQYALDKRAREIQPLLRSQHLRAPATVTAAYGAATRATVAIVVELTHQIAAVETELAEHFRKHPDADIYLSLPGIGVILGARVLGEFGDDPNRFTDPKCRKNYAGTSPVTVASGQKRAVLARHVRNDRLYDSLDRWAFATLKCSPGSRAFYDHHRAAGDTHHQALRALANRLVGILHGCLRHHTTYNEDAAWAHRISTAA

SEQ ID NO: 504007 - protein, 388 aa, unidentified
MQAAVDRPEALSAIRTDLGAIFISLELSRSSWLVTSLSPGSGEKMSKYAVRGSDVAGLLERFAQLKEKARARTGRVFSFVVIQEAGLDGFWIDRVLQKEGVESHVVDPASIATSRRRRRAKTDRIDGETLVRVLLAYKRGEPRVCAMVKAPTPEEEDNRRLCRERKVLTAERVLHVNRIKGLLFCQGISGYEPLRRDRRERLEELQTGDGRPLPQHLKAQVDRELDRLELLLKQIKTVEGERDALLAAAQTAMPAPAAMLLDIKGIGSEFAAVLWSEGLFRHFDNRRQVAAYAGLAPTPWQSGAVDREQGVSKAGNPRLRTTLIQLAWLWLRNQPQSALTIWFHERVRRNAGRLRKTTIVALARKLLVALWKYVTTGVVIEGATMKAA

SEQ ID NO: 504008 - protein, 353 aa, unidentified
MTTALLAHHWCVGIDLHKDTMTICRYCRCCGEIAFRKIACKNREQVVEFFRALPRPHTVAIEAVGFYRWLWELLEPIVEKLVLADATQARALAGRRLKTDREDAQNIAELLADGRLPLAYAPPLEVQILRDWTRQRNRLSRAHARTLHGVKSLMNINNRPGPARLSAARLTGYVKAYGDKLPERHVRMLWQHQRQLGLIEEEMAMCEREIARLLESSRFAAIAALLRTAPGVGPIVSATVLAEVGDFARFPDGKAIGRYAGMTPRVFASGGKERHGHISKTGPRNMRWVLQQAAWVAIRCDSRIKKRWLKIARGSGKKAAAVAIARQLLVTLWQMARRNAVYRPRIEQPQEAA

SEQ ID NO: 504009 - protein, 393 aa, unidentified
MLIVGIDIAKRSHEACLINESGTMLGKTFSFPNSHAGVDLLLKQIRKHNPDSQPVVFGMEATGHYWLALYSRLVQEGFMVHVINPIQSDSLRNFYIRQTKTDQVDSFLVAEVIRFGRFSQTILAEPDLIALRQLCRYRFSLVDQISDVKRKVICLLDQVFPEYESLFSDLFGTSSRQMLAGFSSPEEFLAVDTERLASLLRQASHGRFGLSQARRIQDAARLSFGVKLGSDALIFELRQLVAQIDFLESQLTELGEQISHLYDQFDCTLHTIPGIGKILAAVILSEIGDIHRFAAPEKLVAFTGMDPSLKQSGEFTGTQSHMSKRGSSYLRRAIWLAAFPASQYNPVLTAFYQKKRSEGKAHGTALGAVSRKLIYTVFALLKSGQSYDPNLAR

SEQ ID NO: 504010 - protein, 383 aa, unidentified
MRIVCGLDVHKDSVFVCILNEKGEKFESKYGVLTPELEELHQLLLTHEVKEVTMESTSIYWHPIWRILGDIECLKLVNPYFIKQLPGRKSDVRDAAWIAECTMKDLIRGSFVPDATVQRMRQYNRRIFDLNKEKVYKLTKLDALLHRCNIRISNYVSSIDSKSYKEVVRLLSEGIVDAERLMEAIHGRTVNRVGKDVIKAALTGVVNEVDIDLIRQYREELQIDDKHLKECQNKLTEICRNEFPKEFENLQTIPGVKERSATSILSELGADMKMFLTASALVSWCGLKPRNEESARKIKSRRITHGNKYIRKTMIECAWGASQTQNCFYSNFSYIQTKVRRKNAMKVKVAIARKMLVAIWHVLGENVPYYDYKKPKAIADGNS

SEQ ID NO: 504011 - protein, 332 aa, unidentified
MYLGIDVHKQYAQVAVMDESGEIVEEVRVQNANLDDLAQRYTGAEAAIEATSNYYHIHDTLSEYLDVTVAHPGKLTLIANTDKKTDRVDAKELARMVRLGSVPESYVPTDEIRQARALVRGRQKLVETRTEYANKIHGLLSDHGITREIKPLSVSGRESLRDLSLPTPWDTMLTSYLEMIETLTEEIDRFESAIEERAGSLPETQLLMTIPGVSYYSALMIYAEIGEIDRFDRDKEVVSYAGLNPTIRESGDSRIEGGISKRGSRQLRWILVQCARTAVHTCKDEYLSRFYDRLAGRKGSQKAIVATARKLLVSIYHMLDREEVYDPPGVSS

SEQ ID NO: 504012 - protein, 387 aa, unidentified
MTQVDDLSRSLAAFDQNTSLVVVVEMSEASWLVAGLVPGLDRQPLKKLEPDPSALLRLLERWQAEAMKAGQTIGRVTLAYEAGRDGFWLARWLQARGVEVYVIHSTSVAVSREHRRAKTDRLDTAMLMRVFLGWLRGERGHCGMVAIPTLEAEDAKRPSHERESLVGEQTRIANRMKSALARLGIRGFKPKLRRAPQRLAALRTPEDLPIPPNTLDEIRRDMARLAVVRDQIEEIEQARLERLEQAPDEGQNAMVRLLARIVGVGVETADMLVREVLSRNLRDRRAVARYAGLTGSPDESGSKRREKGLAKSGNAPVRRGLIQLAWRFLMFQKESALAQWYRARTEGAKGARKTTMIVALARKLLIELWRMVTTGAMPEGVVLRPAT

SEQ ID NO: 504013 - protein, 419 aa, unidentified
MNMLNTTSFTAFIGIDWADQKHDICIQSADGDKREFDVIAHQVERIDEWADAMRQRFGSPIAVAVELSKGPIVYALQKHDCFVIFPINPSTLAKDREAFQPSRAKDDPTDAELAVDLILCHPERFKPLQPQSVEIRMLLSLVEQRRSLVGDKIRITNRLRAALKQYYPQMLEWFDHIDTPLFCDFLTRWPTLLQVKRARKSTLRKFFQEHNMRFDSLLERRWKAIKIATPLTLDEAVIVPHRLQALVYIEQLRLMLHAIKQFDIEIERVVKQHEDYALFTSLPGAGPSLAPRLLVAFGEQRERYKNAAELQKYSGVAPVTERSGKKHWVHWRWQCPTFMRQTFVEWAMQTINKSYWAGEFYRQQRAKGKTYQAAVRALAFKWIRILYRCWQTRTAYDEVVYLKALERRGSPLLTEAKMT

SEQ ID NO: 504014 - protein, 344 aa, unidentified
MDEITRIFIDTSKSVFQLHGVNAAEVVVLKRQLPRSRMVEFFAKLPKTVIGLEACGSSHYWARVLSDLGHEVKLIAPQHVKPYVKRGKNDANDAAGGCEAMSRPTMSFVPVKTAEQQAALMLAGVRDAIVRERTRLTNMIRGHAAEFGVVAAKGLCKIELLLAQIAADQTLPSLARELFEQLGVAYAELQARFQAVDAKLMAWHRANALSVALAEIPGVGPIGASLLVMKAPDPKLFSSGRQFAAWLGLTPRDHSTAGKVRLGVITKAGDEGLRSVLVVGATSVIKMAKTGKGAGASPWLMALLERKKPKLAAVALANKIARVAWVMMTTGEAYDSRRATPATA

SEQ ID NO: 504015 - protein, 389 aa, unidentified
MYFCGIDIAKKKHDAVIVDGEGNVLGKPISITNTAAGFEELLTRLESLDQNVLIGLEATGHYWLALYERLSEAGFKIVVLNPLQIAAYRRSGIRKVKNDRKDAWWIADYLRIANLRPTDRQLPILLKLRELTRFRYALMGQVGDLKRKVLSILDRVFPEYETLFSDVFIKSSRALLKEAVTAEEIASFDLSELTTILKTNSQGRFGQEKASRIQDLARQSVGVGFLTDAVYLEMRCLLEQLDLLLSQIETLENAIDEMMDQIPQFITSIPGVGKVTGSAILAEIGDINRFESSEKLVAFAGIDPTVYETGQFIAKRTRMSKRGSPHLRYALWQAASMAIQYDPELKAYYQAKRAEGKHHGTALGAVCNKLISRIYIILKEQRPYIVRET

SEQ ID NO: 504016 - protein, 449 aa, unidentified
MREPQEIQDQEYEQVAERVAAVDVAKASGMVCTRVPHPCRPGKRVTKVWQVDATTNAIIELGEHLAGLGVEKVTVESTSDYWRGFFYLLEAAGLEVQLVNARDVKNVPGRPKTDRLDAVWLAKLTERGMLRPSFVPPAQIRQLRDYTRLRVDLTHERTRYWQRLEKLLEDALIKVSSVASTLDTASTRDMLEALIAGERDPGVLAGLARGKMKAKHAALAQALTGRFDAHHAELARLLLDQIDALSGQIGTLTTRIQQLLQAIPAAQGVDADGTTGPGAGSGTDAAVLPAAARLDEIAGIGPGAAQVILAEVGLDMGVFPTPGQLVSWAKLCPRTIQSGAKHHAGKTGKGNPYLRGVLGEAAAAAAKTDTFLGERYRRLVKRRGKLKALVAVARSILVIVWHLLADPAARYHDLGAGYWADRIDKAKKARNHIRQLEALGFTVSLAPAA

SEQ ID NO: 504017 - protein, 401 aa, unidentified
MPELWAGMDAGKAEHHCVVIDAEGQRRLSRRVANDETALMEVITDVLALSEGEPVTWAIDLNAGGAALMIALLTGNGQQVLYIPGRTVHHASGSYRGDGKSDAKDAFIIADQARMRRDLQPLHHGDAIAVDLRILTSRRLDLAADRTRAINRMRAQLLGYFPALERAFDYSTSKASLVLLTGYQTPAALRRAGRNRLAVWLKNRKVRNYRLVAATAVEVAEAQHTAVPGEKLAAAVVARLAREVMALDEEIAETDALVEGRFRDHPHAEVILSMPGIGSVLGAEFIAHTGGDMRVFGTADRLAGVAGLAPVPKDSGRISGNMHRPRRYCRRLMRVFYMSAQVAARCCPVSKAFYERKRAEKKTHKQAVIALARRRLNVLWALLRDGRLFEGSPPLRAANLG

SEQ ID NO: 504018 - protein, 413 aa, unidentified
MATTSSPTRFVALDIHRKYLVVGAVDPHQQVVLPPRRFGFEAFSVWATTHLTSSDAVVLEATSNAWLLYDQLEPLVGSVTVAHPLAVKLIAAARVKTDSRDTIKLAHLLAANLVPAVWVPPVPVRELRALVSHRKRLVNQRTQVRNRLHAVLHRHNLTLPPGKPFAAHQQEWWLSLALSASEKLRVQQDLSLLHSLEELVGAVEAELGRLSTCEPWVKQVPFLVQLPGLGVLSVMSILAAIGDITRFPSAKKLVGYAGLGASVHDSGETHQGGHITKEGRRDLRGVMVEAAWVAVEHHPHWKAQFERLSRRIGKQKAIVAIARKLLVAVWHVLTEQQADCHADAQAIARKLMNWIAHAGVTPGQHRDRLLLLYQQLDQLGISEELEEINYYGTTYRLSVRQQLLREAQKRKRS

SEQ ID NO: 504019 - protein, 425 aa, unidentified
MGIAKPIDPKSNPKEGENVNQLFIGIDVGSRDNAVYIMLPDGSKHSSFSVQNNLGGAQALSKRVVSALVEKNLTAVVIGMEATSVYGENLLCFLREDGALGQFDRKLHVLNPKQVKKFKDSYSDLPKNDSVDAYVVADNLRFGRITAPVYIDDYRYKALQNLTRARFYAVQNLTREKQRFMNYLFMKCSGLAQEKVFSNNFGAAALAVFEEFETPDDIAEMDIEQLASFIAEKGKNRSPRPDEVAKAVQAAARGSYRLPKTVNDSVNQVLSISISSMRAMQTQIKALNKEIERQFENIPNTLTSIPGIGPVFSAGIIAEIGDINRFDGQAAVAKYAGLAWTQHQSGMFEAQHTRLIKSGNRFLKYYLCEAANSLVRCDTEFRRYYDLKFKEVNKYQHKRALALTARKLVRLLFRLLKDNRLYRPA

SEQ ID NO: 504020 - protein, 338 aa, unidentified
MSSIKVIGIDLGKSTFHLIGHDQAGREQLRKKLNRTKLIEFLSNHKPIVIAMESCGGSHWLARKCKEFGHQTKLIPPQYVKPYVKTNKNDFIDADAIAEASTRPSMRFVSVKSEETQVLAVIQRIRSGYIKERTACMNRTGSILLEFGLSFPRGHSHMKKLFDWLSQQPNKIPKLLLQELIEAHEYYVLLNERVKQQEKKLLNIVDQDERAQLLKTIPGIGDLVASQCISTISNVQDFKNGRHMAAWIGLVPHQYSTGGKTKLLGISKRGDKALRTLLIHGARAILSRLDWAEKYFGNWIVELRARKPFNVAVVALANKIARIAWSVLMYKRPFEVIK

SEQ ID NO: 504021 - protein, 328 aa, unidentified
MTSRDMEKMTEIFIGVDISKDHLDAHRLPDGATAQFPNDDKGIKALIRWIGPQAPERVVFEPTGAYHRRFETLMAKQGLALSKVNPRQARRFAEATGKLAKTDRADAAMLARLGQVLRPIETKAPDETLRYLRDLVVARDALVKDRTAATNRQKEQVHPLLKRHTEARLKQIAAQLKDIEAEILAITRKDPELYRRLDILASIPGLGIITAFALLIGMPDLGRLGPKQAAALAGLAPIARQSGQWGGKARIEGGRTNLRQALYMPALIACRFKPDLKAKYQQLRQAGKPAKVAITAVMRKLIILANPLCGFRTDRARHSKMMPPTIPI

SEQ ID NO: 504022 - protein, 346 aa, unidentified
MEHYVGLDVSLKLTSICIVDRTGKVEREGVVTSDPEAIATFIKLHASHVVRIGLETGATSTWLWTELNKIGLPVICIDARHAKAVLKMQINKSDRNDAAGIARIMQCGWYKEVCVKDLDSHATKALLVSRALLVKIKRDIENQIRGLLKNLGLVIGRAKMNVFTVRAAQLAEDRSELFAAVDPLLKARAAVEQQIADLDRKVLRLAHNNAQVRRFMTAPGVGPVTALCFLATIDDPARFKRSRSVGAYAGLTTRRYASGEIDWTGRISKCGDKMLRSYLYEAANVLLTRLAKWSALKAWGIRLAKRSGLRKAKVAVARKLAVILHRMWIDGTEFKWSSRDAADQPA

SEQ ID NO: 504023 - protein, 343 aa, unidentified
MQIRSVGIDLGKTTFHLVALGTSGKVLVKKKFSQKQLLAFTANMQTSLIGLEACSGAHFLGRALRQQGHDVRLIAAQFVKPFVKSNKNDYVDAEAIAEAVERKNMRFVPIKTDDQLDLQAIHRVRDRLVSRRTAVINQIRAFLLERGMVFAQKPAKLKAAMADVLENAENALTPMMRNLIGMLWDEWKAVEEQIDELTDSLEQIAANDAGCCRIRKIPGIGPVVATAIVAAIGNGAAFRKGRDFAAWLGLVPRQYSTGGKARLLGISKRGNTYLRKILIHGARAAAMRIKRDRYSIGAWMNALEARAPRNVLVVAMANKLARIAWAVLSSGEDYRPVASLAAA

SEQ ID NO: 504024 - protein, 438 aa, unidentified
MSNKVIFNLDDLFISVGIDVGADFSWMSIALPNQQFVGKPYKILHNSIDSLTTAVSKIKEAEELYSLESRIFLESTGIYHYPLFCYLRDKGFNCSVINPIITKNSTNINIRKVHNDRFDSKKAALVGLKPDLKVSLMPSDLALNCRNLCREYYDLMDNRSAYVNKLQGELRMAFPQYLGIFSKVTVNTSLTLLETYTSPSAFLEADKQEIIDIIKSTARFGLTYAQNKYNAIIQAATDANQFGYIIDSNIKRIRLYISFIRKYDEELNSILESLHELVDAHEDADFVKQIHLIETFKGAGFLSAVSIMGEIGDFSAFSKPKQLFAYFGLDPAVKQSGKFEGTKVQMSKRGSAIARRVIHTLTLQSISISRNGEAKNPVLREYYIKKCDSKPKLVAMGAVSHKVCNMIFAILRDNKPFKIIAPQEHIKQYNAAKCDIAA

SEQ ID NO: 504025 - protein, 350 aa, unidentified
MPRKFDTAVVTIGIDPGKNTLHLVGLDARGEIVLREKVARTKIVSRLANVPPCLIGIEAGMGTHYVTREVLALDHDVRQVPPVYAKPFRQTHKNDFRDAHAVAEAVQRPTTRCVPPKTDEQLDLQALHRVRYRLVGQRTAIINQIRCFLLEHGITVRQRLHWLRHALPDILAQRIDVLSPGMVRILEDLAQDWRRLDDRIEAVTDEIDALSKNTEPCRHLMTIPGIGPIISSAVVAAIGNGTAFACGRDFAAWLGLVPKQISTGDRTILGRITKRGNRYLRMLFLQAARVVLLRPKNWMKHGFGPWLAAAAQRLHHNVLATALANKLARIAWSVLVQQREYEAHLSVAAI

SEQ ID NO: 504026 - protein, 412 aa, unidentified
MDTLHRRCCGLDVHKDSVQACVRLIDDNGVWTSRVRSFSTMTASLLQLADWLAELEVTQVAMEATGVYWKPIWNLLEDRFELILANARHIKNVPGRKTDVADCQWIAQLLQHGLLRSSFVPDRPIREARDLTRHRTQLVGEKTRVANRIQKVLEDTNIKLASVATDILGKSGRMMLKAMIEGVDDPKALAKMALGKLRKKEGQLQLALQGRMSEHHRFPLRLLMDQLDGLEALIERIETRLDQMMKPLSETMQRLDEIPGIDVRAAQSIVSEIGTDMSRFASADHLCSWAGMCPGNHESAGKRRRGTTRPGNRWLRMTLTQCAWAASHCKNRYLSSQYRRLASRRGKKKALIAVGHSILAILYSMLKEGSHYRDLGGDWFDRQNSHRLKQHLVKRLEGLGYQVTLEARSPAP

SEQ ID NO: 504027 - protein, 347 aa, unidentified
MNFYNNMHPYYCGIDLHARILYVCILDQDGNTCVHKEIPADPIKLQKLLNPYIGNIVVGVECMHCWYWVSDFCNELGVDFILGHALYMKAIHGGKAKNDRIDSFKIANLIRGGNFPLAYVYPKDMRATRDLLRRRTKIVQHGADLKAHVVNTTSQYNLPPNKLNLKNVSAREQLKSTFPDVSVQKNINLDMVILDCYAEQLSKVEWFIEQQAKQHKPVHLHVLKSIAGVGRILSLTIIYEIGNIDRFESVQDFASYARLVKCKAESAGKSYGTQGNKIGNAHLKWAFSEAAVLYLRGNDKAKKYLLTLQKRMSKAKALSALAHKLGRCVYFMLKNETVFDEMKFLKR

SEQ ID NO: 504028 - protein, 349 aa, unidentified
MEQVSRIGMDTSKHIFQLHGVDAAERPVLRRKLRRRDMIAFFERLSPTRVAIEACGASHHWARLLRGFGHEVQLIAPQLVKPYVKRGKNDAADAEALCEAMSRPTMRFVPVKTAEQQAALMLVGLRDRLVRNRTQLANAIRSYAAEFGLTGATGLAHVPALLRRIQADETLPPLARELFALHAAEYEQVQAKIAAVEGKLMAWHRADERSRRLAQIPGVGPIGATLLTMKTPAPEAFRSGRQFAAWIGLTPKDHSTAGKVRLGGITRAGDEALRSVLVVGATALIRRVREGRCRSGTAFVAWILDLLQRKPPKLVAVALANKLARIAWKLMVTGEACAATRSPVTAAGA

SEQ ID NO: 504029 - protein, 418 aa, unidentified
MLVAGIDVGAEVHYVAVVDQSEAVVTKPTAFGETAAGYEKLFVLLAQAGARGGEDLPLATASAPAQSTLVVMEATGHYWQNLFAALVAQGFEVALVNPLRTHRFAGEELSRTKTDRVDCLQIARFGAQKRPAPSQLPKPAVEELRELMRLRERLMQELVARLNQLHRLVDLGFPEFTRYLKDLNTELATAILQQYPTAQAFRGVSRKRLAKLSYDGRHQVGAELAQQLIDAAAISVGSQHSPSHQLGVRYACEDLATLRKRLKRLDGEVAGTLQQHQVGQLLTTIGGIGDTTAAMIIAELGDPARFASAAALAAYVGVCPAHKHSGKHQPKSSSLSSIGNRRLRRALWMPTLGAATQSNPWLMSFYRRLVQRGKPHKVALCAAMRKLLAAIYSVAKHRRPFTSDLKPQSPLRVKCENA

SEQ ID NO: 504030 - protein, 410 aa, unidentified
MDVVYGRCCGIDIHKRIAVACVIVSEKKGRTRKEIRTFGTMTDDLLALADWLASEGVTHVAMESTGVYWKAPFNLLEGQFEVLLANAQHIKTVPGRKTDVKDAEWIADLLRHGLLRASFVPNRPQRELRELTRYRTSLVRERAAEANRLQKTLEGANIKLGDVATNVLGLSARQMLDALVAGTAEPATLAQLARGRMRAKIPQLERALSGRFAAHQRFIVGQQLAHIDYLDEVIERLSAQVAERLAPFDTMIERLDAIPGIARRTAEILLAEIGSDMSRFPTAAHLASWAGMCPGHHESAGKQYDGKTRKGSPWLRQALIEAAAAAGKTKDTYLAAQYHRLVPRRGRNKAAVAVGHSILVIVWHLLQHDCPFVDLGSTYFDERDRAATERRLVRRLEQLGYSVRLDRPAA

SEQ ID NO: 504031 - protein, 352 aa, unidentified
MRFYKRQHRFYCGIDLHARSMYLCIRDHDDVVLLHQNLPAQADDFLRAIAPYRDGLVVGCECMFAWYWVADLCAEHDIPFVLGHALYLKAIHGGKTKNDKLDADKLSALLRGGNFPIAYVYPKGLRETRDLLRRRLFLVRQRAHFVAHIQNTNSQYNLPVFGKKLVFARNRDELDVAERFKDPSVRLSIETDLQMIDKLDEQIYAVELHLERHAKVDDPNTLARLRSIPGVGKILALIFLYEIHDIRRFPDVGQFLSYARLVRCAHESAGKKKGSGGKGAKKIGNAHLRWAFAEAVCLWLRQSDRAKAWMKRHEKKRGKAKALAILGAKLARAMYHMLRKKEVFDEAKVLGG

SEQ ID NO: 504032 - protein, 351 aa, unidentified
MTQQTMTETIATIGIDLGKNTFHLIGMDARGKILLRRKIARGQLQSCLANVSVCLIGMEACAGAHHVGRQLAALGHDVRLLPAQYVKPFLKGHKNDYRDAEAIAEAVQRPTMRPVPLKSAEQLDLQALHRVRRRRIGQRTAVINQIRAFLLECGLPVRQGLAGLREALPTLLSQRTDVLSPRMIHLIEDLSEDWRHLDERIETLTRDITALAREDAGCRRLMDIPGVGVITASAMVAAVGTGAAFAKGRDFAAWLGLVPKQISTGNRTILGGLSKRGNRYLRTLFVGGAQAILQHPHNWPRYRFGHWLMTAAPRLHRNVLAAALANKLARIAWSVLYRERGYDAGIATQVP

SEQ ID NO: 504033 - protein, 372 aa, unidentified
MHIASITIDLGKTTFHLVALGERNKVLVRKKFSRSQLFAHTAKLPSSLIGLEACAGAHFVGAALREQGHQVRLIPAQFVKPYRKSNKNDFIDGEAIAEAVTKQNMRFAQLKTQEQLDWQAMHRERDRLVQRRTALINEIRGFLLERGITFAAQPIHLRKNLPAVIEDAEQNLSPRLRWLLDRMWQEWKQIEIDVSAITEEIERISNDDPRCRQLRQIPGFGPLISTATVAAIGNGAAFRRGRDFAAWVGVVPRQHSTGGKQRLYGISKRGNVYLRRMLIHGARSVLFRVKYDTGGFGQWVHRLAQRAPLQQGRSSDRQQTGAHCMGRIVQRPRLPTSAAAATGGSMMAVEKALRLESTKRFPLFHRHGGGYY

SEQ ID NO: 504034 - protein, 353 aa, unidentified
MEQFIGCDAHKKFSVFVAVNEKGHAGEALRVAHDRQLYREFLARLPAHSAIAVEASGSYSWLVDEMERSGHCPKLCNPHEAKRRMGLTKKTDNLDARGLAILLRNGTLPEVWIPPSELRDQRELLRLRIFLVRLRTRVKNRIHATLSRFNVQVPGADLFGVAARRELGVRLPELPVHSREAIEQGLATLDFLETQIESAEDRLEAIMQVSVEADLLKTLPCVGPILSMVLMLEIGKVDRFPTAAHLASYAGLVPRVHSSGGHTRMGQVCGNVNRNLKWAFVETGNLIVLNQRRIAGTHVVRLYQRIKRTRNHQKAVVAVARHLAEAAWWVLTKQEVYREPQGPRQQALSSTHG

SEQ ID NO: 504035 - protein, 412 aa, unidentified
MQIVYERCAGLDVHKKSVMACLITSTPNGERRKERQTFSTMTPDLLRLREWLREQQCSHVAMESTGVFWKPIFNILEGHLEVLVVNAHHIKTVPGRKTDIKDAEWIADLLQHGLLRPSFIAPAWQRIVRELTRSRASLSQERTRVIARLQKGLEDANIKLASVASDLMGQSAQDMLHALLEGELTPEEMAAFARGKMRPKREQLVQALTGHFQEHHRFLLAEHLKHLSELQDAIDRLSIEIAERLHPYEALLTRLETIPGVKRRLAEIILAEIGPDMSRFPSAAHLASWAGMCPGNHESGGKRLSGKTRKGSQWLRTALVEAAHAASHCKECYLSAHYHHLAFRRGKKRAAVALGHTLLIIIYHVIADAKEYQELGADYLDQLERQGKEKRLVHQLEKLGFEVALTPLEKQA

SEQ ID NO: 504036 - protein, 344 aa, unidentified
MSNLDTCGIEISAQQLVVRLRRQGDLEPLRTFTNTPEGREMVLRYLRHAGRVVRVCMESSGLYGLDLALALSAAPGIEVMVANPRAVRHFAMALMKRSKSDPLDAGVLEEFAARMPFRVWKRPSARALGLHALARRLHELVEIQTAEKSRRHAAGLSETTPAVVRRDLARSLRAQERAIERLTRQARKLIAQDPELTERFELLDSVPGIGETSAVQLLGELAVLAPDLDARQWVAYAGLDPREHTSGTSVHKKPRISKSGNAHLRHALFMPALVAVQHDPYLGGFYQHLLAKGKFKMQALVAVMRKLLHAFHAMFKNHQPYDGSKLFRIPSIPAQEVPRAAVAC

SEQ ID NO: 504037 - protein, 404 aa, unidentified
MYPRCAGLDVHLRTVVACIRIAEGRTLRQEVRTFATTTSGLLALSDWLSAEGVTHVVMESTGVYWQPVWHVLEGTFELTLANARHVRNVPGRKTDVNDSMWLADLLAHGLVQGSFVPPAPIQEARDLTRTRTQLTREIAKHTQRIQKTLEKANIKLETVLTHVLGVTGRAIIRAIIEGQTDPDALLALRRGKIKATVDEMREALRGRPTESHRLLLRIHLHQIEEIEKSIDLIEHRLEEVLRPFRREFELLLTIPGVSTTIASIILAEIGADMSRFPSSAHLVSWAGLCPGNDESAGKKRSTRLRKGDTWLKTALVQGAWAATRKKNSTLRAQYYRLKPRRGGKKAAVALAASMLTSAFHMLTRAVPYAEAAPITDPRRQKETAKRLVFRLKHLGFDVQIRPAA

SEQ ID NO: 504038 - protein, 429 aa, unidentified
MNYTQNEKIEQVTDSTMVVGVDIGSQIHYARAFDNRGRELTKRIFSFHNDLEGFNSFNLWAETLKTENKKTAVLIGCEPTGHYWFAFAKYVNDHQKRLVMVNPFSVKKIKELDDNSPKKTDSKDPKTIAKLVVDGRYSIPYMPEGIYAEIRDLVYSRDRIMKQHNISANRIQRWLAIYFPEYLGLYTRFDAISGLAVLEKAPLPKDVIALGVNGIRKIWHDKKMRGRGVTEDRAKTLVEAAHNSVGLDGGIGTKSELYMLLEEHRLWTSQLEAVNKVLEEMILKVPHVEKLLAIKGVGSITIAGFIAEVGDIRRFDSPKQIQKCAGLELVENSSGKHKGRTRISKRGRRKLRKILYQVMVPLLARNKEFRGIYDYYVTRVKNPLKRRQAMVAVSCKLIRVFYAVLTKGVEYDRFKMMSDIHRKSDIIAA

SEQ ID NO: 504039 - protein, 386 aa, unidentified
MDQATASTASANTLHCALELSKKSWLLAIQFPDREQPSLYPITGGDTEGLMAKLTAARDRWAKTSGALPMITLCYEVGYDAFWLARFLKTRGIECLVIDPGSLQVSRRGRRVKTDRVDVKTLLRTLIAWCRGERHVWSLVRIPSIDEEDLRRSHRERSRLVRERTAHINRIKGLLFAQGIRGINVKSRYQTLAVDKLVTGDDHRLPPRLAGEIAREIRRLAMVQEQIAEIERERDAAPTTCEATERKRDLLSQLKSVGPTISAFLSREVYYRQFANQRQVGSFLGLTPSPYDSGEEEHCQGISRAGSGHARAIMIEAAWLWIKHQPKSALTRWFVERTAGQSKRVRKIMIVAVARKLAIALWRYVELGLVPQGAIINPPMTRKARS

SEQ ID NO: 504040 - protein, 347 aa, unidentified
MLIIGCDFHPGFQQVAIFDNLTGEIEEKRLQHRAEAEQFYRSLVGPGVRVGMEACGHYPWFERLLGELGMELWLGDAAGVRSSVVRKQKTDRRDAAQLLKLLLEDRFPRIWVPSLEERDVRQLLLHRHKQVQGRTRTKNQLQAMALSHGVQKKWKLWTEAGRAELEQLPLLPYAAERRKRLLEALEELEAEIVELNRRVDEEVRKRPEAVRLMTHPGVGPVTALAVVLTLGPAERFASGKQVGSYIGLIPSEDSSGGKQRLGRISKQGSSFLRFLLVEAGQTAARYDPQLKRFYRRLAVRKNRGVAKVAVARKLATRMYLMLREGWTYAQLSQAVMQVSPSHSVAGQ

SEQ ID NO: 504041 - protein, 368 aa, unidentified
MNTVKFIGMDVHKKTITIAIIDQGRKKQPRIYGSIANDLDALDKFCRKMVSTSTRLHFVYEAGPCGYCIYRHLTEKGFDCMVAAPSMIPKKSGDRIKNDRRDAAMLARLHRAGELTAVYVPEAQDEAMRDLTRAREDAVTAVRKAKQRLNAFLLRNGLTFAGRTKWSKAFFGWLSDIAMPYPAQQVALQEYIDTVHENLKRVDRLTDQIRQLVPAWRLAPMVTALQAARGVSLIVAVTVVAELGDLRRFDKPSQLMAYLGLVPSEHSSGQSIKRGAITKTGNSHVRKALVEAAWAYRMQARVSRLLLKRQQGVPDRVCQIAWKAQLRLCARFRRLTARGKTKQKVVTAIARELSAFLWAMAKQLQPVV

SEQ ID NO: 504042 - protein, 430 aa, unidentified
MKSNTQNAKIEAITEKTLVLGIDVGSEMHYARAFDYRGIEYSKKPFKFSNTEAGFATFKEWILDLKERHEKDKVVPGMEPTGHYWFNLGKFLQDNEMKPVLVNPHHVKKSKELDDNNPTKNDRKDPKVIAGLVREGRYMIPYLPEGVYADLRTASNIRFQLQAELTRIQNRISRWFNIYFPEYKTVYGKPDAKSGMLILKAAPLPEDILTLGIDGVNQIWRDAKLRAVGKARAKTLIEAAEHSVGSKEGAVSARMEIRMLLEDYESRNTRLQEVMVLIEELVRKIPMAEKLLEIKGVGIRTVSGFLAEVGDISRFNNPKELQKLAGLALVENSSGKHKGETTISRRGRKRLRYLLFEVAMSLVSKNQEFRELHNYYTTRRLNPLKKVQSLMAIAAKLIRVFYAMLTKGVDYDPKKMVSDIKRPAVYLQAA

SEQ ID NO: 504043 - protein, 447 aa, unidentified
MATRKRATTEAAISLTHPNAAGIDIGSASHFCAVPADRDDEPVREFKSFTADLHRLADWLDACGVDTVAMESTGVYWIALYELLESRGFTVLLVNARHVKNVSGRKSDVLDCQWLQQLMSYGLLHGAFRPQEQVCVLRSLTRQRAMLLRSQGRCVQHMQKALTQMNIQLANVISDVVGETGQRILRAILAGERDGMSLGRLKNSRIHASEDEIAKSLQGNWRGEHLFALKQALDAFDFCGRQLAECDVQIEAQLQTLQSCQGEPPKGKKRSRARNAPRFDLRTQLYQMCGVDLTRIDGIDVTTALVVVSEVGADMGRFASDKHFASWLGLCPGTKITGGKVMSSKTKRCANRAAQALRLAAAALRSSKSALGAYYRRMCARMDRPKAVTAAAHKLARLIYAMLTKGEEYTDRGQDYFEERYRQRVLHNLAQRAKAMGMQLVPSESPA

SEQ ID NO: 504044 - protein, 338 aa, unidentified
MNIVFLGIDLAKNVFQLCGLNQAGKPVYTKRTGRKELLQTLANIPACLIGIEASTGAFYWQREFEKLGHKVKVISPQYVKPFVRGQKNDGNDAQAIAVALMQPTMQFVPPKSPEQQDIQALHRARQRIVNHRTATVCQIRGLLLDRGIPIGSAVSRARRAIPLILEDAENGLSSRMRRTIAELYDLFNDPGRRIHFFDKEIETVFRQSEACQRIAKVKGIGPKTATAVVAAIGKGTEFKNGGHFAAWLGLVPRQHSSGDRQVLMNMTKKGDKHLRTLFIHGARAVVRVATNNNDGHMNQWVNQLKERRGLNKTTVAVANKNARIIWSMLRNDTEYQVV

SEQ ID NO: 504045 - protein, 402 aa, unidentified
MYVGWDWASQRHDVTVIDDTGQLVDRWRLAHTEAGIHQAMTRLAGHGRPDDLAVAIEATSGIVVDRLLAAGHPVVPIHPNSFNAARPRWGASKAKSDPGDSFKLADYLRTDGHRLRRLQPTDAATRHLQAISRLRTDHLEAKTTATNQLSALLEAHWPGAKAIFARLDSDIALDFLERYPTPQAAQRLGEARLAAFLRRHGYSGRRTPAQLLHRLRAAPVAVDQLDPEVLADCIRIQVRLLRSLLGSLADLGRALAAALGEHPKATVLQPLPRIGQINLAQVLAEVGPILDRTGDLSAAAAEVGATPVTKQSGNSAVVQFRWAANTRARNALGIFADNSRHASRWAAHLYRQARRRGKRHPQAIRILMRAWLRVIWVCWHTGRPYDINHHRAEQRLAQEPAA

SEQ ID NO: 504046 - protein, 352 aa, unidentified
MDASHRTFRMKGQLKEEVTLFELLAIDLGKASFHLHSISPDGTILSRKVSRSKLAETVGAIAPKTVAMEACASAHHWRRQFKDDGREVLLINPRFVKPFVRGSKNDAVDAAAIYEAATRPTMRFVPVKSTAQQDLQSLHRIRERLIVQRTSLINHARGLLAEYGVVLPQGPWRFAAQAPLAVQNAALSDLGRELFLELLDQLTDVNGRVAKLARKISEICREREDCRRLSELPGVGPIIATALVASVEDGSHFKSGRELAAWIGLVPRQYTTGGKPRLGGIGRRANHYLRRQMIHGARAVISRLASHDDRRSQWLKELVARRGFNKAIVALANKTARIAWALLTRQERYSAQ

SEQ ID NO: 504047 - protein, 407 aa, unidentified
MNENGKRYIGLDVHKHYLIALGVDANLEVVMPARRVELSHLENWMKKNLTRQDEVVLEMTTNTWQLYDELVEYAGLVMVVHPPHVALITRSQVMNDKIAASILARLLAKGLLVGIWVPPQEVRELRGLVAQRRKMTRLATQAKNRLHAVIQRHHLKPPAGNPFAKTNNGWWQALPLGKLEKMNLQSDLETLQFGEQQEARIQKEMTGIAAEDEEIGRLLHISGFGVITAVTVYAAIGDIGRFVEPKKLVGYAGLGARVHDSGMTTRTGKITKAGRRDLRVALVEAAHVVANSHPHWKAELARLQPRLGYNKAIVAIARKLLVTVWHVLARKVADRFAEPKKVSQKMLRFAYAVGKENRAGKSAAQFARARLDILNLGEELTSIPWGAKKPIPLPPSKLKERSAVPNK

SEQ ID NO: 504048 - protein, 308 aa, unidentified
MGVFVGIDVAKATLAVALRPGGERFEVTNDAAGHRALVQRLQGLSVTRIVLEATGGYERAVLATLAERWPTVRVPPHRARAFANAMGRLAKTDPIDAALLAHLAEVVDIPPTVAASPSQQLLQALVQRRGQLVQQRDDERRRLQQAAQAWVAASVRRQLRHLASEIARLEKAIAQAMAETDACIAQQLASVPGIGPVTCATLIAFLPELGQLGRREIAALVGVAPYNLDSGQKQGKRRIRGGRAQVRRVLYMATWSAIRTQADLKARYRALRERGKCAKVALVACMRVLLVRLNAMVRDSVPWQMPAG

SEQ ID NO: 504049 - protein, 429 aa, unidentified
MNSTRNKKIEQVKETTMIVGIDIGSEKHYFRAFNWRGIELTRKPVAFSNSMEGFNSFYNTIVELIQKSELEEALVGIEPTGHYWFDLGQFMGEKNIKFVMVNPHHVHKSKELDDNSPSKNDRKDPRVIAGLVRDGRYFYSYMPTGVYAELRNASNRRFVLVEEQTRAKNRLQKWIAVYFPEYKGIYTRIDAKGGLLVLKQAPTPEEIVRLGVEGIIKIWKDAKLRGNGHKKAMLILHAAMKSIGLKAGLTEARMEIQDLIEDYELQTKRLERVNDLIKELCQQIRYADKLLEIKGIGITTVAGFIAEVGDITRFDSAKELQKLAGLELVADSSGKHNGKTKISKRGRKRLRYLLFEAAISVVGKNEEFKEIHRYYTTREKNPLKKMQSLIAVACKLIRVFHVILTKGISYDASKMLKDIQHPGEPLKAA

SEQ ID NO: 504050 - protein, 416 aa, unidentified
MELELVVERCAGIDVHQAQLRVCVRLPGEGRRSRVEEFATFGTTTPDLLELSEWLAQRGVAQVAMEGTGVYWKPVYYVLEADFDLWLVNAQHVKNVPGRKTDTSDAAWLCRLLEHGLLRKSFVPPREIREIRDLTRYRKALIRERASEVNRLHKVLEDAGVKLATVASDIMGVSGRKMLAALVAGTTDPTVLAEMAKTRLRARLPELRKALNARFREHHGFLVAQVLAHVDYLDEAIAQVDERITAALEPSQAAMTVLLSIPGIQRRTAEVVIAEIGTDMTRFPTSRHLASWAGLCPGNNESAGKRKHGRTTKGSPWLRTALVEAALGATRKNGYLQAKYRRVRSRRGHQRAVIAVAHAQLEIIHTLLSRGELYTDLGADFYERQQAEQITKRAIRQLERLGHHVILKEAATAETT

SEQ ID NO: 504051 - protein, 350 aa, unidentified
MKKVAYLAIDVHAGHCVLGHMDFDGTFLGNRRFPTSERHIIQALKAVKAKEKYLALEESNLAYWAAQVARPYVTEVISSDPRENALIFRSANKRDKVDTQKLCRLLRLGELNRVYHPENDDRAIFKAAVQHYIDLRDQQVVLKNKIKAMYRHWGVIEVAGQAVYGTARDDYLQRVKHLHIRNQLHRLYCLMDETESMQKKALKTMKQLGRKYPEIKEFQKIPGIGEILSHIFDAFIQTPHRFAHKRKLWRYCRLGVTDRSSDGKPLGYKRLDKSGVSELKAVSYRAWLCALGGDNEVRRFYSRSLRQTSDHVHARLNTQRKILAVMYGMWKRGDAYKPQLFLDSPKMSVV

SEQ ID NO: 504052 - protein, 482 aa, unidentified
MRKRNIYRNQSQEILSLFESAGDRNKVMCIPMDYAKKDHVVMFCHGNGDILRKPFSVKNSLEGKNYLLNQVKKSCQHRGIASQHVFFGGEDCGSYADNFIAALRSDSWVVAGVNACDAKKHRDNKQASTDILDLLGICKMLLEYKGNCSPAQTGIYWNLRMLVQQRRKLVQMMTGVKRRIHFLVDQIFPGFLNEKKSGIFPFSRGSLALMSNRFSVHQICRRNRSTLSRFLARNLVHHADLCAEHLQKYTCQVLQPPAKYIATLQLSLQQQVKLFVCLQENIHQLEKEIAEHLAQTPGAFLTSIRGIGIVLAAGVCAEIGDPDKQKSLNQLVSYAGIVPRIKQTGGVQGKTKVRKVAKRCNRILKDYVVRSGYHIGINGPEELKLDHKRRGAQGQHAGFGMSRRYLRMAMCLMRTSQTYLPKSLRDTRTPKKERAHFYLLTWSTFREKWKRKDALEFAFDKDRPLGQWRNVVQTLYGIELGL

SEQ ID NO: 504053 - protein, 344 aa, unidentified
MNEVTTIGLDLAKNVFQIHGVDASGESVIRRQLRRRYVLSFLKKQPPCLVGIEACATSHHWAREIGALGHTVRLMPPRYVKPYVKRNKNDAADAEAICEAVTRPTMRFVAVKSVEQQSVLMVHRTRELLVRQRTMLVNAMRAHMAEFGIVARVGLPQVKVLLAVIADPDDARLPPLARICLEGLAEQFMSLHEEIYAAEMRIHAWHRSNEVSQRLETIPGIGPITATALAATITDPSVFKSGRELAAWIGLVPRQNSTGGKERMGRISKQGDQYLRWLLVAGAMTIIRHAKRRGTTNLPWVADLIARKPTKVAAVALANKTARVAWAVLRNGGTYQKPKVVPAV

SEQ ID NO: 504054 - protein, 345 aa, unidentified
MYRTRVGVDLAKKVIQVCIFKSKKVQSNIEMTPDEFLSWLVNSKPASIIFEACSSSNYWKQKALKAGHDARLISAKLVSVVRQNQKTDKNDALAIVQATFLPDVTYIGGKTVEQQQLQSIKRLRELAVKQQDASQKQLLALLFELNIKISSRKGGIISAIEGVLEDATNGLSVECRKAIYLSKEHLKGLFESVRQYDVCMENSVAAHPECKRLMKLEGVGTMNAINLYIALGCAEIGSFSKGKDAAACIGLTPIQHSSGGLVKLGSIGKLTKNSRLRSQLICGATAAVQHAVKRKAKTKKDLWIQGLVERRGKKCAAVALANKTVRTAYAMLTKGTEYKAELLTA

SEQ ID NO: 504055 - protein, 411 aa, unidentified
MLEVQVERGAGIDVAKKFVVVCVITAPAGQKPVEEVQRFGTNVKELERLRAWLVEKGCTHALMESTGSYWKPVFNILEGSVKILLANPEHVKVLRGKKTDPNDSRWLAGLLRHGLVQPSFIPPRDIRELRDLTRRRRILVGDGTAERNRVQKILEDANVKIGDVLSDVFGLSGQAMLEGLLANQENAQQIAERAHWSLQAKIPQLIEALEGHRMTDHHRFLIRQSLDHMRHIETQVVELDKEIQRRLEPYQKQMKLACSVPGIGVNSAASILAETGMDMSPEGPFPDCHHMVSWSTVCPGNNESGGKRKSGRMRKGNRWLRATITQTAWAGVRKKESTFQSRFHRTKSRRGAQRAIMAVARAQLIAIYWALRNGVPYEEQNRITENERRKKQIDYHLRQLEKLSYHLEEVI

SEQ ID NO: 504056 - protein, 401 aa, unidentified
MTTMRDNAIRVKRFRELKATLRTDRHRLLVGLDIAQAEHVVHFRHAHTRVVIPELTVPNTTRGFAQLWARIQQAQRAMGCREIVCGLEPTGTYHEAIARFLEGQGADVVLVSSAVAYWNRRTQDGTWDKHDRKDAANCADLLEQGKVLFYSQPDGPLAELRRLVKCLRRARAELAACKARWRTTLRPALGPMGEPLPNRLRAELPAVLQAWESAAPGRPAQPKGRLPLGLATACADLGAQVTAVQARIAALETACMPVAERVPAYTLLRTIPGVGPTVGAILLAEIGDIAWFTQFSQLRKLAGLDIVRVQSGQFAGQARISKCGRGLLRWALYQAALGAARTVAGRARLAALKAKRHGDRYAGFKATVELAAKVLRVVWGVWRSGTPYDPLRAGGLRRQPR

SEQ ID NO: 504057 - protein, 343 aa, unidentified
MSHNAVVVIGIDIGKNAFHVVGLDQRGAIVLRQKWSRGQIEARLANVPPCLIGMEACVGAHHLSRKLKAFGHDARLMPAKYVRPYSKGQKNDFRDAEAIAEAVQRPTMKFVATKTANQLDLQALHRVRERLVSQRTGFINQIRAFLLERGVPIRQGLRFLRAELPRILAAPPDVLSARMVQVISDLAEDWRRLDQRIDHISNEIADLARQDSGCERLMSVPGIGPIISSAVVAAIGTGDAFTKGRDFAAWLGLVPKQISTGDRTILGKISKRGNRYLRILFVQAAWVVLIKPQSWVRHGLKSWLEAAKKRLHRNVLAIALANKLARIAWSVLANGRIFEARAA

SEQ ID NO: 504058 - protein, 340 aa, unidentified
MTITTIGLDLAKSVFQAHGIDENGAAVLVKKLHRKQMLPFFSKLPPCLIGVEACGTAHYWARTLTAMGHEVRLIPPSYVKPYVKRGKSDALDAEAICEAVQRPTMRFVPTKTVEQQGILLAHRARSLLVRQRTMAANALRAHLAEFGLIANPGLGHLATLADQALADRDALPPYARTALETLIRQIMALTGEVATLDQQIAAWHVESEVSRRLATIPGLGIITATAIAASVTDPDQFRSGRQFAAWLGLTPRQHSTGGKTRLGGISKQGDRYLRRLLVIGATAVMRHTKDKMTPMANWLRKLMEKKPFRVVSVALANKLARIAWVVLTRKEAYRPYAPVG

SEQ ID NO: 504059 - protein, 454 aa, unidentified
MGKPRVVPDEDHEVVYERVAAVDVAKASGVVCLRAPDPARPGRFTSRIWDHVPATRAAIEAVGRELLAHRVQMVTLESTSDYWRIWYYVLEDIGLAVQLVSAWQAKNLKGRPKTDRLDAMWLARLTQAGMLRPSFVPPAAIRRVRDFTRARQDLVAERTRCLQRVEKLLEDAMIKVTSVARDGMKAKSVVAMVAALAEGERDPRALADLARGPLRGKRDALAAALDGMFDSHHGVIARALLDQVAFLDQQITVMEDQATAALAEVPQSWGVDPDGQAGPRCGITPGSPVLAAARRLAEIPGISVWLAIVIIAEIGLNMALFPTPAHLVSWMGLCRSAAQSGTRAGKGKPKKGNSYARAAAGQAAIGAARTATFLGERYRRIARRRGKAIAQAAVARSIMVIVWHLLNDPAARYHDLGPDWHASRINRDKKIRNHIQGLKALGVTVAITENEQAA

SEQ ID NO: 504060 - protein, 340 aa, unidentified
MCEYIGLDVSLKETAVSIRRGGKRVWRGKCLSDPAAIAALIRKHAPAAERVVFETGPLSVWFYHALSAQGLPAICIDARHAKAALDMAANKTDANDADGLAHLAEVGFFREVRVKGFDSMLSRTLIAARTKLVRATLDIAGQIRGLMKTFGLIVPRGIGAKFEANVRALLADHAELARIILSLLEAWRSLRIQATELGRQLLAEARKSQPCQLLMSIPGVGAITATAYLTAVEDPANFSRSRSVGAWLGLTTRRYQSGEVDYDGHISRRGDTHVRSLLYEAAVVILTRSHADSDLRSWGMKLREKVGFKRAAVAVARKLAVIMHAMLRSGELFTRTAAAA

SEQ ID NO: 504061 - protein, 524 aa, unidentified
MAVKSSSKTRRKPQPHTLHKPRGVIHPRVQAVGPEHFALVCVDCAKARSKMMVADFYGRVLVEPTTVAHNRSDFDTALKSVRDAMARHRIQDAIVVVERTGRYHGPAQRAFREARFEVRIVHPYTTKQYRLPADPGNKTDDTDLSAIHRAAVNGFGLLEHEPDPIYVQLQLLARHRRNLVQKRVALQQRMLEHLQSFMPGYSACVGDVFGSPVVLWVARNLGSAAAIIQAGLTGLHQQVRQAGIKVYRSTLEKIVAWARSAPPAEEPVSLHHRFFLELDADQLRKAHSIQAIESELAGLLAQTPYVLLLSVVGINVVSAAEFAGEMGPIERYPAARAITGRAGLFPARYQSDQVDRRDGALVQHANHDLRYAILMIADNLIKCNDHFKVLAAGWRLKGKDARGIRVQAAGRFSRIAYQMVAGRLTFQHPCARQRDSILDKLIRFSLEHPTAPDQLLRTLEAAVTQLPRTAYGEEAVPLAEELARVEKSRGTGPHPLVAILPAVLAKLEVNLVRSPKSGEADPTG

SEQ ID NO: 504062 - protein, 393 aa, unidentified
MVYVGIDVAKDKHDCFITNSDGEVLYDVFTIQNDMDGFEDLLFKIKTASKDLSKVKVGLEATGHYSCNILGFLKSKGLYTIVINPLHTNAYRKSLSLRKTKTDKADARTIASMIMSDVSLKPYSDTVYHNEDLKSLSRYRFDKVSDRSKLKQSVSRLVNILFPELEKLVSTLHAKAVYALLSEFPGAHQVASANLKHLTALLSTASKGHFGREKANEIREAARRSISSYLPAKSLELRHTIKLIHELNAEIAEIETEIKKIMDSIDSPTLSVPGISYALGSVIVSEVGDFSRFDNPDKLLAFAGCSPSTYQSGQIYSTHAKMEKRGSKYLRWALLNAAKYVCKWEPTFAVYLSKKLAEGKHYNVAVSHAAKKLVRLLYHLETTGEKYIPQTLS

SEQ ID NO: 504063 - protein, 391 aa, unidentified
MPMYFVGIDISKYKHDCCIISAADQQIISKFTITNDKDGFEQLLTSLNSLSNPEDIKIGFESTAHYALNLELFLENAHHSFMEVNPVLIKEYKKSTTLRRTKTDSVDCESIARWLITVEYKPHSKGFYHAYSLKSLTRLRDRLIRQRSFYLVKITNVLDHTFPEFKPFFNERLSKTALYLLENYGSAEKMARMNSASYDKLRCISRGKFSIQQFLRLKELAANTVGVNNSIFDLELNTLLTLYKSLSDEINTLETEIIKLIEEVHPHYMSIPGIGPISAAVIYAEYGDISNFSNPGQMLAFAGIEPGINDSGTESHGGRMVKHGSSQLRYVLLNACLPLIRFDLTFATYYEKKRAEGKKHRVAITHVAKKLIRVIYALERQDVDFNAQKLR

SEQ ID NO: 504064 - protein, 347 aa, unidentified
MAEVTIIGVDLAKRIFQAHGAAADGSVIFRKKLSRNKFLSFLAAQPRCIVAMEACATSHNWGREIEQLGHSVRLIPPIYVKPFVKRQKNDAADAEAIAEAASRPTMRFVTIKTEAQQARAMLFRTRDLLVRQRTQTSNALRGHLAEHGVVAPQGAVQVKRLADALNEDTSQLPAMVRDLGHLYLEQIETLTAKIGDLDKRLRTAAAQAETPRRLQTMPGVGPITAVAMETFAPPMEEFRRGRDFAAWLGLVPRQHSTGGKARLGKTSKMGQRDIRRLLIIGAMAVVKAAVRRGVASDTQGENAWLSRMLAKKPRMLVAIALANKMARGLWAMMTKEQNYQDPAVTAT

SEQ ID NO: 504065 - protein, 416 aa, unidentified
MKKHNNSGKKSEPTSKRTKSRGPVQRDTKEVLAELVGKLKEKLDPTKVAATSAGEKHQRGELRPNLDRLTVGVDLGDQWSHYCILGLEGETLAEGQLRTTQEDLATFFQGLNGARVVVEVGTHSAWVQEVISGCGHEVLVANPRLMDGSKRRKRKNDRIDANKLARLGRVDPESLYPIQHRSREVRQDLVMLRARDALVAARTEIINTTRGLVKSMGTRRPKCSSQSFAQKGEEAVAVEMREALLPLVRLAATLSADIKEYDKKIETLGQEKYGHTALLRQVKGVGPITALAYVLTLENPQRFAKSRDVGPYLGLVPKQEDSGESQPQLGISKAGDTMVRKLLVGSAQYILGPFGPDTNLRRYGLRLCERGGKNAKKRAAVAVARKLAVLLHRLWVSGEVYEPLHNAMSAPIAAAA

SEQ ID NO: 504066 - protein, 414 aa, unidentified
MKVFCGIDWAEDHHDVALVDADGALVAKRRIDDSADGFAELLAMLADAGDTATDPIPVAIETPRGLLVAGLRQTGRRVYSINPMAVARYRERHSVSRKKSDHVDAMTLANILRTDAHAHRPLPADSEQVQAIAVLSRATQDAIWRRSRATQELRAVLREYYPGFLAAFAKGSATNLASAEARAVLALAPTPAAAAKITKTRIAAALRRAGRQRSIDALAAQLLIELRKPQLRQPQVVEEAFGRQALALLATLNAECASADQLTESTTAAFQQHPDYAIITSFPGLADLSGARVLGEIGDDRARFTDARSLKAYAGSAPVTRASGRSISITRRTVKNDRLNATGFVWAFASIGRAGAPRDHYHRRRARGDRHAAALRHLFNRFLGQLHHCLQTGQTYDPAKAFDPAPRTPTATAA

SEQ ID NO: 504067 - protein, 337 aa, unidentified
MKFCGIDLHSNNSVVVVTDETDRVLVSRRCPNGFTPILSLLEPHRDELVGVVVESTYNWYWLVDGLMAAGMDVKLANPVAMKRYDGLKHSDDKDDAVFLAHLLRLGILPTGYIHPPQERALRDLARKRIQLVRTRTQHILAVENIAARQFGHGFSCNEIKAFSAASVDRLGLPTDVALAMNANVAVIQTLEAQIAGLEARLLQQAKLRPEYLLLKTMPGVGEVLATVIMLETGDIGRFAEVGHFASYARCVKSARYSNGKKKGEGNAKNGNAYLIWAFIEAANFARRFSDDAKRFFEKKKAKTNGVVATKALAHKLARATYHILKEKQPFDAKRCFA

SEQ ID NO: 504068 - protein, 408 aa, unidentified
MIYCGIDWAEHHHDVALVDDTGQLVAKLRIDDTAAGYGTLLDLLAEHGDTEQNPIAVAIETSRGLLVAALRTGKRQVFAINPMAVARYRDRHGASRKKSDPGDALVLANILRTDKAVHRPLPQDSDLAQAIAVLARAQQDAIWNRQQLSNQLRSLLREYYPAVLEAFANWQNGLCRPEARAVLAVAPTSSRAASLSRAQLRSALKRAGRTRGIEVEADRMREIFRGEYAHQPPLVEDALGKQMLALLRQLEAACMAADDLAEAVEEAFPQHPDAAVILSFPGLGVQLGARVLAEIGDDRDRFADARGLKAYAGSAPITRASGKKHHVGRRRVKNDRLNHAGHLWAFASLKASPGANAHYRRRRERGDWHAQAQQHLFNRMIGRLFHCLQRGELFDEQTAFPSLLAEAA

SEQ ID NO: 504069 - protein, 375 aa, unidentified
MCERAVLTNRPSLDLIPFVLKGLEPVGERGTDPVSSLNPNSCTGFEPEPSKEGSWMMAQNELVVVGIDVAKDKVDACIRSLSQRQTFPSTAEGRRDLIAWLRKHKVGKAVMEASGGYERDWAKALRGADLEVRIVDPKRVRSFARSAGRLAKNDAIDAEMIAWFAETFGEAPVQAYDADREKLVQIVNARQALLDVRTELQNRNEHSVPDVVQKMQARLLKKIALEVAKLEAAIAAMIKATAHFTELAEIIESVPGLGEGTSAGLIAAMPELGQVSNKAAAALLGVAPYDDDSGKRRGERQIKGGRRKVRNLFYMACLGAATQHNPVLKAFYRRLIAKGKEKKVALVACMRKLIVILNIMIARGEKWDASRYAVG

SEQ ID NO: 504070 - protein, 343 aa, unidentified
MPHYVGLDVSQKTTSICIVNEQGRRLWRGVCATHPDPITTQVLRHAGAPAKVGIETGSMTPWLVHGLRAAGLDVECLDARRVKAALQMRLNKTDENDAEGLAQVMRTGWYRPVHVKSLDAHRARALLGARAQLVGMTTRLSNMIRGVLKTFGLLPGAGRGLRFDRKVEALLDGAPELEQIVRPLLATWRQLREQIAVFDKAVRQQVRADSVCRLLMTVPGIGALSSLAYVTTVEAPSRFARSRAVSAHLGLTPRRYQSGEIDRSGHISRCGDGLARTLMYEAAVVILHRVKRPLHLKAWAEVIEQRSGAGKARVALARKLAVILHSVWRSGQPFRWPSQPMTA

SEQ ID NO: 504071 - protein, 367 aa, unidentified
MKKVSTAATMQSRNISQQKLTMGLDLGDRNSWYCLVDEAGQIQREQRVHTSAKALQEVFGGMPRSRIALEIGTHSPWISRLLSELGHEVIVANARKVRMIGESRKKDDRLDAQTLARLARIDPELLYPVKHRSAQAQADLMMIRARAGLVRARTGLVNTARGLAKSYGERLRGCNVRNMNPEKAEGLSPELQAALEPLLNAIESLSERIVEYNERIENLAQQSYPQVALLKQIKGVGTLIALTFLLTLEDPHRFRKSRDVGCYLGLQPGRRNSGQSEPQLHISKEGDPYLRTLLVQGAQHILGPFGVDCDLRRWGLKLAERGGRSGKKRAIVATARKLAVLLHHLWVNGEAYQPLHNSRRTTVVAAA

SEQ ID NO: 504072 - protein, 426 aa, unidentified
MGKGKYRAVFIKDVDASGLKKALSDQRCVVGIDVAKADFFASVMDASRQVRVTVKWTHPADSREFVEFVSMLSEDATVELAMEPTGVYGDALRERLLRRGHALYRVSPKRAHDAAEVYDGVPSLHDAKSAAIIARLHQDGASEPWPVLSDHERGLTAALRVLELHDKQMQRNIGQLEACVSRHWPELTTIMSLTRATLVELLATYGGPAAVVRDPDGARELMRRVGRHMLASETIEAVVASAHSSFGMGQTDEETRMVRAIAAECRRHQLASNKARRRVERLSVSDGASLNIGKVVGKTTAAVLTASVGTATKYETASAYEKSFGLNLKEKSSGRRKGALHITKRGPGVARRYLYLAVLRLLQTDEVIQAWYAKKAKRDGGCKQKAIIAIMRKLVRALWHVARGNAFDSTKLYDVSRLELEEVPTM

SEQ ID NO: 504073 - protein, 388 aa, unidentified
MMSGRNTAALSVTDAERRRLFGPVDFAMTAPAVTAVVEQVCAVLPGVAVKVGIEAAGHYHRPLLAAGVWPAGWEVLELSPARVAEQRRVQGRRRVKTDVIDLEAITELVLAGHGVPVTVRAATLTELTGWAMHRSRRVQTRTATKNQLLAQLDRCFPGLTLALPDVLGTQVGRLVAVEFADTHRLAALGVTRFVRFAANRGVRVRHSAAERLVAAARNALPTPEAVVARQVLADDLVLLADLDAQIAAAEAQIARLLPDTPFAPLTTVPGWGVVRASNYGAAVGDPQRWPRARQLYRASGLSPAQYESAGKRRDGTISREGSVALRRALIDLGLGLWHADPAARRYGQQLRARGKKGGVIGCAMAHRANKIAYALVRDQTGYDPSRWA

SEQ ID NO: 504074 - protein, 348 aa, unidentified
MNYFIGLDAHSATSTFAVVDSNGQCILRETVSTSEQSLGRVLDKIHGERHLTFEESTISQWLYLQLVDKVDELLICNPTYVAQKSGAKTDFRDALHLAQELRTNHLKPVYHDNSHWIQLRVSVSGYLDIVEEIVRFKNRLKAVFRSEAIGTDENSFYKNYERVKELKNPSAKFVAENLFNQVDFLEKEKLKYQDQFEKNKKLYRPVRNLMTIPGISIIRANIICAIVCQPSRFENKHRFWGYCMLVRHIQKSGGRIYGNKRFHGRKELRNVFIGAAENAMRTDSQLRDHYDALKAKGVDHKEAKLSLARRIASVALCLLKNNDKYNDNYDEYLKERKELRKKFYNQPA

SEQ ID NO: 504075 - protein, 339 aa, unidentified
MELYAGLDLHSRNTYIGIMDKAFNRVFKKRVPNHLEHILQTLDPFRDQIKGFVVESTFNWYWLVDGLMDAGYSSAHLANPSAIKQYEGLKHSDDQHDAFFLAQLLILGILPQGYIYPKKDRPVRDLARKRMFLVRHKTAHILSLQSLLQRHCAMNVRANDMRHLTVKELELWLEEEHLVLSAQANLDSINFFKQNIQRLEKAIRKKLKLKKAFHYLKTVPGIGDILALTIMLEVGDINRFPKVGNFTSYCRCVPSRRLSDGKSKGHGNRKNGNRYLSWAFTEAAQLGRRHNERFRAYYNRKVAQANTSLATKALGNKLARICYFIIKDQVPFRKELFVQ

SEQ ID NO: 504076 - protein, 455 aa, unidentified
MAKMEMDIINLHCAGIDIGSKSHYVAVGQGLDDVKQFGVYADDLVEICLHLRKHQITSVAMESTGSYWQNLYVELVRHGFDVTLCNGKFTKNIKGKKTDVKDARWIQKLHSIGLLTGSFLPDDTTETLRTYCRQRTNWIQLSAEATHKMQKYLKLLNFRLDVVVKDICGITGMAIIKDICNGNLNPKILAEHRHFNCKKSYDEIAKALKGNNRQDYLFGLKQEYDSYLFFQQKIADCDNQINNCLNQTINTDPFKKKLFTDNKIHKRINKNALKGIDLNQAAYQYFGGVDLMKIEGLSHATVLTIMSEVGPDGFAKFKTAKQFASWLRLAPNNKISGGKMLSNRIQKGSNRLKIALRNAANSIGNLKDSHLANFFKRVLYRKGRTAAVSATARKLAVIIWNMIAKKMEYNPPVIYLLLDQKRKMKIVERFKKAVTKLNLKPSDLGFTDTSLSVPS

SEQ ID NO: 504077 - protein, 321 aa, unidentified
MAYFRDVVGIDVSKENLDLYVLSGQQRRTVANTAAGYGDLVSWLKSLGVRMAVMEASGGYERDVAKALRQAGFDVRIVDPKRVRHFAKAAGRLAKNDRIDAEMIAEFGAVFAAAQRCEIPLDAKREHLAGLVAARQALVDHQTSLQNQISACPKGPARQALAAALKPIPASIKQLDRLIAEAIAAHPQFAALAARLDTVPGVGPVTIAALIAWLPELGRLDRRALAALVGVAPFDDDSGKRTGQRYIKGGRGKLRNIVYMAVMGAATKHNPVLKAYYDSLLNRGKLKKVALIACLRKLLTILNTMVAKQQDWNPASMAIAA

SEQ ID NO: 504078 - protein, 364 aa, unidentified
MDPALGLGWDVEVSTTEQETSMNIVRIGLDLAKYVFHLHGVDERGKVVLRKTLRRPGVAPFFANLPRCVVGMEASNGAHYWAKTLSEFGHDVRLISPQFVTPYVKSSKNDRNDAEAICEAVGRPNMRFVSVKSAEQLAIQAVHRIRSRLVASRVRLVNQIRGLLGEHGVVVAQAIGNLRRALPRIIDDEANGLNSIVRALIGELREELSDLDGRITIYDRKIINLYRMSEACQRLGEVEGIGPITATALVAAAGDGKCFKNGRQFAAWIGLVPKQRSSGGRSRLLGISKRGDRYLRTLLIHGARAALGRTRGKQDPRSLWLLKMRERRHANVVAVALANKNARIAWGLLASGMNYDQHLTVSSA

SEQ ID NO: 504079 - protein, 384 aa, unidentified
MQKDNILFIGLDTHKEFTQVAYCLDHRTSEINDLGRIQSTKASFVKLARQLQSKSPHATLHFVYEAGPCGYWIYRLLTSLGHCCFLVAPSLIPKKPGERVKTDKRDAQKLARLLKNNDLDPIFVPEPEDESLRDLSRARESAMQDLNDAKRQLKSFLLRNNIQYKGTANWSLKHLRWLTEMVLPHPCQQIVLQEMIHSISERTNRLKRLDNELTHQVKMWRYYPVVKAVQAMRGIRLLVATGVIAELGDLSRFDTPRKLMSYVGLTPSEHSSGGKRRLGAITKCGNGRVRRLLIEGAHSYRHTARISKDLEVRQEGLPKEIVDQAWKAQLRLCRRYQRLIKRGKNYNLVVTAIAREMIAFIWSISREVVLPKVDPKTRLSRVPA

SEQ ID NO: 504080 - protein, 338 aa, unidentified
MELYAAIDLHSNNSMLVVLDQDDHVILERRLKNDLERIRLALAPYRESIRGIAVESTYNWYWLVDGLIDEGYSLHLVNTAAVKQYEGLKYSADQHDARWLAHLLRLGILPEGYIYPKQERALRDLARKRSQLVRARTTQILSIQNLLARNLGTQVSGNEIKTWSTEEIKALPLLPEQRLAINANLAVMQCLDAQIKIVERAILAQARLRPAFKWLLTVSGIGKILALTIALETGDIGRFESVGDFASYSRCVNSVRLSNGKKKGVGNAKNGNKYLAWAMIEAANFAVRYDPAVKRFYQRKKAQVHGVVAIKAVAHKLARACYHVMREGKPFEVTRAFA

SEQ ID NO: 504081 - protein, 310 aa, unidentified
MDAIFVGIDVSKDRLDVHVLPSGEAFAVARNGEGLAALNERLGLVGAAVIAVEATGGFETVVAASLASAGLPVVVVNPAQVRSFAQALGKRAKTDPLDAAVIARFVEATKPEIRPLPDDQTQALADLVARRRQIVQMIVAERQRQRRATARRLLRSIGRLLAALEKELNELDLALDDAIRGSPAWRQNEDLLKSVPGVGPIIARTLLAELPELGTLDRRQIAALAGLAPWTRQSGKWKGKSFIGGGRSSVRAVLFVGALAAGRSNPTLKAFRQRLIEAGKPKIVATVAVARKLLTILNAIIRDQKPWQPA

SEQ ID NO: 504082 - protein, 305 aa, unidentified
MTLHQNILGVDIARDWIDVFDLSNGTSRRVVTSDLSSFAHGLSNVLVVFEATGSYERPLSEALEAHGIAYKRVNPRQAREFARATGHLAKTDKVDARVLAHMGRALELEADIPPDPARRRLSALVARRDDLVRMMTAESHRLSLARDAYVREDIEHLLDVLAARRNAIETEIDAAIRASQALKTAQICLRTAPGVGPVTAATLLAYLPELGQIDRRAIASLTGLAPHACDSGHRRGRRHVWGGRAGVRRVLYIAAMVATQHNPLFKAMRKRLQDAGKPTKVALIAVARKLLTILNAMIRDNRNFA

SEQ ID NO: 504083 - protein, 340 aa, unidentified
MYHYAGIDVSLESSAVCVVDGAGNIVREAKVASEPEALIAWFRLLGLKVERIGLEAGPLSQWLYAALREAGFAVELLETRHVRDAFKAMPVKTDRNDARGIAQLMRLGWFRPVHCKSIEAQETRAVLTARKLLQSKLRDLENSLRGVLRGFGLKVGKTTERTFAARINELVTGHPGLELVARALLEAHAVLLREFKGLDKHTQKLARLHPQAKLLMTTPAVGPIVALTYAAAIDDPKRFRSSKAAGAHFGLTPRKYQSGQTDYTGRISKIGDASVREALYQGAHVMLTKPVKNCSALKSWAMRIARRAGMRKAKVALARKLAVILHRMLADNKPFNPAAI

SEQ ID NO: 504084 - protein, 311 aa, unidentified
MFVGMDVHRNRTQVCVLDRKGNEVRNRNVANDRQALRKELAGLRRGTPVAFEAAYGTGWIAELLGDLGFEAHLAHPAGCRAIADAKLKNDRVDARTLANLLRTGYLAEAWLAPKEVREQRLLLRERARLVRIRTSAKNRIRAQIADEGVAAPGHGLWTKQGAVFLESLDLSPMHRWVVTDCQVLIEVLESRISLLEAEIRRQAKPDKRVDALMAIPGIGLLSAMTQVSEIGDITRFATARKLCAWAGIIPSMRKSDRTLHHGHITRAGPAAVRHVLAEAAQTAIRKEPYHSDFLATKRRRGSGIALIRVAR

SEQ ID NO: 504085 - protein, 403 aa, unidentified
MNSVGIDISKGRSTIAVMRPFGEVVISPFEVRHTDSELSKLARRLKSLNGETRVVMEATGNYHAPVAKLLHDAGLYVSVVNAKLVHGYGNNDLRRVKTDRKDAVKLANYGLDRWLTLPRYIPEEDTRLLLKNCYRQYRQYSKVQTILKNNLISLLDTVFPNVNRLFSSPARADGSEKWVDFVAEFWHCRCVSEKSEKVFTNKYQRWCRKHGYNFSEEKAHTIYVEASGHIGVMPKSETTKLLVEQAVAQLRATSAALAALKHEMQSLASMLPEYPVVMDMFGVGPTLGPQLIAEIGDVRRFYSKKALVAYAGLDAPPNDSGDVTGRHKSMSKVGASSLRRTLFLVMGVYLQKSPLDEPVYLFMDRKRAEGKPYRVYMMASANKFLRIYYATVKACLESLEHTA

SEQ ID NO: 504086 - protein, 427 aa, unidentified
MAYRVAAVDVHKKMLAVVVADVACEGEYQFERRQFGTTPDQLHLLAQWLDQQEVEEVVMESTAQYWKPVWGVLERYWKPARQKRDGATKMSGTLHLCQAKSNRGPRGRKNDFADGERMIKRLVAQELVLSFVPDPEQRLWRTVTRRKHQLTRDKVRLRNQLESLLEQAHIKLSSFVSDLLGLSARRMLTALAEGETDPAVLAALADCRLRATPEQLRDALGACTQLNGIYRRLLKMALEELKLMEEQMEQLDREASNLLQEYQDAVQRVAEVPGFGADSAVQMIAEVGPSAAAFESEKALASWVGVCPGSEQSAGESKSTRSPKGNRTMRRLLNQAAQSAVKVKGSIFDITFRKLLPRLGYKQAIWAIAHRLCRLLWLILRKGARYEERGPAVSAKSRRTRTARMIKELQKLGYRVEGAPLAAGTLA

SEQ ID NO: 504087 - protein, 347 aa, unidentified
MRFYTRQHKFYCGIDLHARTMYLCILDQEGEIKLQRNIPTDPKVFLRTISRYREDICIAVECIFTWYWLADLCERENITFVLGHALYMKAIHGGKAKNDKIDAHKIAALLRGGMMPIAYVYPPEMRSTRDLLRRRMHLANKRAELLTHVQNTLHQYNLPEIGKNLGKKGNREGVADRFPDAGVQKSIELDLSLIDHYDQLLHRVEHEISLIAKKHDADSYFRLRSVPGIGRILSLVILYEIHDISRFERVQDFVSYCRLVKPARESGGKRLGSSGKKIGNVHLKWAFSEAAVLFLRRNPEAIKYREKLKKKHGNAKSMTILAHKLARAAYYILKRKEVFHIDTFFAR

SEQ ID NO: 504088 - protein, 363 aa, unidentified
MRHIFVGIDLGDKNSVARIATDRDSSQRFGFVNTRSGRERLFKEVKRRSQEAGGAKIVMAYEASSCGFVLRDHAQANQIDCHVLAPTKMEKSVEQKKQKNDDRDAEDVLGRLRGHYLAGNRLPTIWVPEITLRDDRELVRTRLAVADKQTQIKAQIQMLLKRYGLEKPADIGSSGTVTYRKWLHALSESTWLGGGTRHSLASLLRQLTALEAELKRLDTLLAELAKQDRHEPIIQALTKEKGVGLLTALVYRTEIGHAGRFRRGRHVGKFVGLTPTSHESGQQSDRKGHISRQGPPRLRRVLCQASWVHLRHDAHSRQFYDRLVSRNPKKKKIAVVAIMRRLAVRLWHRMREAELNLAESDSR

SEQ ID NO: 504089 - protein, 392 aa, unidentified
MVVSVGIDVSKDKHDCFIVSAEGKVLADVFTVPNNMDGFHCLLQRIRDCTAPQDKIKVGLEATGHYSCNLLGFLLDNGLTTCVLNPLRTNLYRKSLSLRKTKTDRVDARTIATMLLSDVGLKPYTSTAYHNEELKSLTRYRFDKVKERAKLKSSVSRLVCILFPELEKLVPSLHLASVYALLEEFPGAKQVASAHLTRLKALLETASKGRYKRDMALEIRDAARNSIGSRMPAKSLELQHTIRLIRELDNEIAEIEGQIQAIMDELHSPITTIPGLGFRMAAMILAEVGDFTRFDSPDKLLAYAGMSPSTYQSGQLKNCYPHMEKRGSRYLRYALYNATKYVCHWDPAFADYLAKKRAEGKHYNVALSHAAKKLVRLVFAMERSQKPYFPTS

SEQ ID NO: 504090 - protein, 343 aa, unidentified
MEYYVGLDVSLKQTSICVVDQAGMVVREGVVDSDPEAISVYVTSKAPDAVRIGLETGPTSTWLWTELKRLGLPVICIDARHAKAVLKMQINKSDRNDAIGIARIMQTGWFKEVHVKDIDSHSVRALLASRALLVKIKRDLENHVRGLLKNLGLVIGRAKFNVFAVRAEELIEGRPELIAAIRPLLEARSAVEQQVSELDRKVMKLARHDIQVRRFMTVPGVGPITALAFKATIDDPTRFARSRSVGAYVGLTSRRHASGEVDWTGRISKCGDGMLRSYLFEAAGVLLTRVPKWSAVKAWGVRLAKRNGLRKAKVAVARKLAVILHRMWINGTEFNWSTKEIAA

SEQ ID NO: 504091 - protein, 382 aa, unidentified
MHYAQAAPVIEITTKAPVLFMAMELSAKKWKLCFGDGGTRHREVTVATDSYRTLREAVAQAKDRLGLPADAAVFSCYEAGRDGFWVHRYLTSEGICNVVVDSSSIEVPRRSRRRKTDRLDAKKLLRMLIRYHQGDRTIWSVVRVPSEEAEDRRRVHRDLERLKKERTAHTNRIRSLLATEGLRIKLDRHFLARLNASRRWNDSPLGSRLKAELVREYQRRTLVHDQIRQLEKQQLAELKDGSTPEARKVLRLMGLRGIGITTAWTLVHEFFGWRLFANGKEVGSAAGLTGTHYNSGGSERDQGISKAGNRRVRRLMVEVAWRWLQFQPQSGLSRWFQVRFGGGGKRMRRKGIVALARRLLVALWRYLEQGLVAEEVIVKETI

SEQ ID NO: 504092 - protein, 391 aa, unidentified
MSMYFVGIDISKYKHDCCIISAADQQIVSKFTVKNDKDGFEHLLTTLNSLSNPEDIKIGFESTAHYALNLELFLENAHHSFMEVNPVLIKEYKKSTTLRRTKTDSVDCESIARWLMTVEYKPHSKGFYHSYSLKSLTRLRDRLIRQRSFYLVKITNVLDHTFPEFKPFFNERLSKTAIYLLENYGSAEKMAHMNSASYDKLRCASRGKFSIQQFLHLKELAANTVGVNNSIFDIELNSLLTLYNSLCKEIKTLEAEITKLIEEVHPHYMSIPGIGPISAAVIYAEYGDISNFSNPGQMLAFAGIEPGINDSGTESHGGRMVKHGSSQLRYVLLNACLPLIRLDITFATYYAKKRAEGKKHRVAITHVAKKLIRVIYALERQDVDFNVQKLR

SEQ ID NO: 504093 - protein, 403 aa, unidentified
MQVTRIGMDIAKQIFDLHRVDRRGKVTLRKTLRRERVLEFFAQLKPCEVGMEACAGAHYWHREISRLGHTVRLLSAHKVKPYVDGNKNNRHDAAAICEAMSRPSMRFVQPKTTAQQDLQTLHRARALLVRDLTALSNQVRGLLHEYGIVMRKGAAALRRVVPELLTGDDERITAVLKAVVAEQFERFKYLTLRIDRYDRQIGELCKQDQRCQRLLKVPGIGPLSATALVAAIGNGHEFKNGRHFSAYLGLVAGHSNTGDKTVMLPITKRGNRYLRTLLIHGGRSAVYAARRRSDPRSIWLNRLREISCYNVAAVALANKNARVAWAMLRYGEDYRASRAHRQSADLAAARSARPANRALAFAPHRARPAGQRREHFSAPPSVQTKGGRKMLRQNQKKQGRIEH

SEQ ID NO: 504094 - protein, 284 aa, unidentified
MEIHTLGIDLGKTIFHFVGLNTSGETVVRKKLSRKQLLLFTATSQVRLIGMEACGGAHFLGRALRQQGHDVRLMPAQYVKPYVKTNKNDYIDAEAIAEAVGRPKMRFVPIKSDDQLDMQSLHRVRERWVGRRTSVVNQIRGLLLERGITVRKGRRHAEAALPGILEDPESNLSGPLRMLLVQLQRELRQLQSQIEEVDAVILKAAHEHEACQRLMAIPAIGPVIATAIVSAIGNGAEFKKGRGFGAWLGLVPAQYSTEASRSCWASASVGTTICGVFSCMAPAP

SEQ ID NO: 504095 - protein, 336 aa, unidentified
MGQYVGIDLHRRSTTIVRMAEDGEVLGTERFVSQPFELAQAMAAAGPEPEVVLESTYGWYWAADVLQELGAHVHLAHALGNNWGNRRVKNDVRDAQDLAAMLALGRLAEGWIAPPEVRELRELVRYRYSLIRHRTSAKAQIHGVMAKNGILPVVGELWGPTGQAQLDRLELPEAYAMRLDSLRNLLDVYEAAIAELDAHIHAELKADSGYQAVMTLPGVGKVIAAIFVAEIGDVSRFDSAKKLCSWAGLTPKHRESDEVVHRGAITKQGSPLVRWAAIEAVGNYRAKGNEKLRADYKRIAEHAGKYKARVAVARKLLTLVFYAMRDGEVRCLEAAA

SEQ ID NO: 504096 - protein, 411 aa, unidentified
MQRRENFLYVGMDLHKESHTAVLVNCWNEKLDVVVIENKPSEFNKLAKRVNKKANELGLSPIYGLENAYGHGRSLAVWLIEKGYVVKDINPALAYDQRKSAPMMQKNDEFDAYAVATVLINQLNSLPDAKPEDNHWTLSQLVNRRDILVKDGIRLKNGLHEQVSIAYPSYHKFFCEIDTKTALYFWKTYPSPVHLQNKTASDLHAEFKDIAAQTLISKAELILECICNDGNTLRDYQESRDFITQSLARCLEQQKEEIALVEAEIKRMLQFFDYKLTTIPGVNIATASKLIAEIGDIRRFPNADKLARFAGVAPIKFSSAGKGKEQSSKQGNRQLHGLFYFLAVTMVSVPKSGKPNQPIFYAYYQRKISEGKTKSQALVCIMRRLVNIIYGMMKNKTEYRPFIVENEAAEG

SEQ ID NO: 504097 - protein, 373 aa, unidentified
MFHFTTLFIGMDVHKESFSLCYYDMMANQFKHSTKVGPNVSYIVNYVNELRRLYGQDAEVLCGYEAGCLGFTLYHQLQAHGIPCIVMAPTTVMKEGSKRVKTDKKDAAQLAKALAFRSYRPVHIPTVEDEQVKEYIRMRTDHKVALKKIKQQILAFCLRHDFRYTEGSSNWTQKHVRWLHSLNLDGLYAEILTEYLLTYEKLVDQIERYDARIEQLGQSDSYQEKVSWLSCFIGIKTLTALSIVTEIGDFNRFATAQHFASYLGLTPSENSSGDKERRGAITKAGNSHVRRLLIEAAQPLAKGTIGYKSKELKRRQSGNRVEVIAYADKANERLRRRYRTLVLGKNKKQNVAKTAIARELSGFIWGMMTGRIA

SEQ ID NO: 504098 - protein, 337 aa, unidentified
MKYSGIDLHSNNSVVTVTDETDRIVAEKRLPNDLSKIVGFLMPWRDELKAVVVESTYNWYWLVDGLQEAGFAVKLANTAAIRKYDGLKHSGDEADARQLAHLLRLGILPTGTILPPEQRALRDLARKRMQLVRSRTSHILAVENIVARQQGAKIGGRQIKQLTADAVDQMGLSADVALAIKSNLAVIITLNAQIDVIEKRLQEKVQEREEFILLSSVPGIGRILATIILLEIGTVDRFAEVGNFASYARCVDSRHMSNNKKKGEGNTKNGNKYLAWAFIEAANFAQRFNAEAKRFYERKKAKTNTTVATKALAHKLARACYHILKEQKPFDVTRCFV

SEQ ID NO: 504099 - protein, 385 aa, unidentified
MQKLNDLSQSRIILKQDNTLIAVIEMSLSSWLVAGIVPGVERQPLKKLAVDESALLKLLHRWREEAEKKGRRIERIAVAFETGRDGFWLARWLRARGTEAHVIHASSVAVSREHRRAKTDRLDTELLKRVFLGWLRGERDHCKMVAIPTIKDEDSKRPNRERESLVGEQTRIVNRMKAALIRLGIRGFNPKLKKAAERLEDLRTPEGEPIPPNTLAELRRDMERRHLIRDQIRQIEDARLQRIERAPSDRPHAMVRLLARVIGIGIETADMLVQEVLSRTMRDRRAVARYAGLTGAPDESGAKRREKGLARSGNHRVRRGMIQLAWRFLMFQKDSALAQWFRARTENTRGTRKTMIVALARKLLIALWRLVTTGEVPAGVVMRAA

SEQ ID NO: 504100 - protein, 356 aa, unidentified
MTKIKTLSFEGETIYCGVDIHKKNWKVNIRNSHMELEHFSQNADPDCLASHVQKRYPGANIKVAYEAGFSGFWPCRKLQAAGIDCIVINAADVPTSDKQKKQKNDTVDARKIAKQLSINNLEAVHVPTLTEQNDRSLVRVREQLVADQTRCKNRIRHLLHFNGLKVANGIDKEKYWTLAFIKALEELDCSDRSLRITLNLLLAELKDLRKKVLEATTAVRKLAATDLYKKDIELLRSICGIGPTNAMVIRTELGNIKRFKCFDHLCSYVGFVPSTDDSGDTKATRGITHRCNNRLRTALIESSWMLISKDPAMLMKYSAYCKRMDKNKAIIRIGKHLLSRIKYVLTKREKYEACIV

SEQ ID NO: 504101 - protein, 418 aa, unidentified
MKSTKTKKVKKINDKTVIATLDIGKNVQHGYFRAPNGNDVEPFAFYNSKKSFNTFWQKLCQFKDKEGLEQIVIGFESTGPYAEPLFHFLRKKPVKLVQVNPVHTKRVKELTGNSPNKTDKKDPRVIADVICLGHALTLVVPEGPAAQLRRLTQARQRAIENRTSMKNQLQHLIFVIFPEFLALLKISTKTARYFIKHYMTPEKIFALGLESIGQIFKKVSRGKLGQDRAKQLYEAAKNSIGISEGQQSIVLEIEHLVGRIDAEDQFVDSLEKQMCVYLQQIPYSQNILSIKGLGQVTAAGLIGEVADFNKFDTISEIMKLAGLDLYEISSGNRRGQRRISKRGRPLMRKLLFFAAINAVKSKGIMHEKYQQMLDRGMLKMKALIAISRKLLGLIFAIVRDNTKYVDNYSDNYHYKLAA

SEQ ID NO: 504102 - protein, 347 aa, unidentified
MKEQNNRSEFTIGLDLGERRHRFCALNGKGEVVEEATVGNERASLARLTARYRGVLAVMEAGAHSPWVSRHLEGLGWEVIVSNPRKVRAIYQQERKSDQRDALMLARIGRMDRALLYPVRHGSEEAQQDLLRIKLRDSLVRARVALINSVRFSLKSLGYAVSHPSSERFHKVAMESLPEVVREMIAPSVQALAELTARIAVLEREISHLARTKYPQTLWLQQVPGVGAITALYFVLKIEDPKRFKKVRDVGAYTGLCPRRDQSGENDPQLRISKRGDGYLRRLLVSAAQYILGPFGPQSALREYGLMLAADGTTRAKKRAVVAVARKLCVLLLSLWKNQTPYQPYPA

SEQ ID NO: 504103 - protein, 393 aa, unidentified
MICVGIDVAKDKHACFILSSEGEVLADVFTIPNNAEGFDTLLQTIRRCARPEDKIKVGLEATGHYSYNILGFLLNEGLDTYVINPLHTNLYRKSLSLRKTKTDRVDARTIAAMLMSDVDLKSYTDTAYHNEELKSLTRYRFDKVRERAKLKQSVSRLVTILFPELEKLVSTLHMASVYALLSEFPGAKQVSEAHLTHLKAVLYDASKGRYGSDMATTLRDAARCSVGSVMPAKSLELRHTIRLIHELDAEIEDIEAAIQSMMDEIQSPITTIPGMGVRMGAMILAEIGDFSRFDSPDKILAYAGMSPSTYQSGQLSLSGAYSHMEKRGSRYLRYALYNATKYVCLWNPTFAAYLAKKRAEGKHYNVALSHATKKLVRLIYALEKSKRPYSTAA

SEQ ID NO: 504104 - protein, 313 aa, unidentified
MTTSGAWIGVDICKKHLDVAAMTGAPARLRNDADGRIALARRLKAENVRGVVVEATGGLERALVKALDAEGVPASIVNPARVRKFAEGTGQLAKTDKIDAVILARFGDYMKPAPTVLADAQRQKLRDLIAYRSQITQEITARSAQVKQYASSDIVERATAAIETLRTERKALEREIEVQIKSKDDTQSLYKRLLTVPGVGLIVAATLIAELPELGRLSRRQIAALAGLAPFPNESGDRKGYRSIRGGRDDVRQVLFNCALVAVRHNPVAKPFYEGLRARGKPHKVAIVATMRKLLTILNAMLKTNKDWTCKER

SEQ ID NO: 504105 - protein, 412 aa, unidentified
MRLFAGDDWAEDHHDVEVMDQAGKVLARRRLPEGAAGMAQLHALIGQFVPDDDMGGAEVVIGIETDRGPWVAALIAAGYTVFPVNPLQASRYRERHGVSGAKSDAGDAHMLADMVRTDSHQLRAASGDSPAAAGIKVLARTHKTLIWERTRATQRLRHQLREYFPAALEAFEDLDAPDTLELLGKAADPAKAARLTRAQVSAALKRARRRNIKDKTDAILAALRGEHLGQPEALTAAYAATARALLAVIATLNEQVKILQGQVEENFGRHPDAEIYRSQPGMGAILGARVLGEFGDDPHRYADGKARRNYAATSPITRASGKKKVVAARFVHNDRLVDALNAQAFASLNASPGARAFYDALRARGIEHNDALRRLANRLVGILHGCLKTRTLYDEATAWGHRQNLPQSPIAA

SEQ ID NO: 504106 - protein, 407 aa, unidentified
MLWGGGVDIASIVRCEPMELPMQTLNDLSRSLIALEPASTLIAVIEMSLSSWLVAGIVPGIERQPLKKLAVDESALLRLLHRWREEAEKAGCRIERIVVAFEAGRDGFWLARWLKARSIEAHVIHAASVAVSREHRRAKTDRLDAELLKRAFLGWLRGERNHCKVVAIPTLKDEDAKRPSRERESLVGEQSRIVNRMKAALIRLGIRGFNPKLKRAAGRLDSLRTPEGEPIPPNTLAELRRDMERRRLISNQIRQIEEARLKHFEQAPNDGPHAMVRLLARVIGVGIETADMLVHEVLSRNMHDRRAIARYAGLTGSPDESGRKRREKGLARSGNGRVRRGMVQLAWRFLTYQKESALAQWYRARTENARGARKPMIVALARKLLIALWRFVWQGVVPDGIVLRPAQ

SEQ ID NO: 504107 - protein, 449 aa, unidentified
MAKTKKRKHRKLERSLPVMRPNAGGIDIGATEIFVAVPADRDIETVRSFPSFTQDLHALADWLQQCRVDTVAMESTGVYWIPLFQILEGRGIEVHLVNAQHVHHVPGRKSDVLDCQWLQYLHSVGLLRASFRPEQAVCEIRSLMRHRESMVQMACVHVQHMQKSLDQMNLQIHHVISDITGVTGLAIVDGIVAGNTNPEELAKLRDYRIKASVETVTKSLVGDYRPEHIFTLKQSLNAYRYYQQLITDCDREVQQRIESFETKDGGPGSTGDAGDGNSTTGTFDLRAHFERIFGVDLTAIPGFDVLRVQTIFSELGADLSDFPTPASFASWLNLCPKDGTSAGRKIRGPKVKTKNRVTQVFRMAGQSLHHNKSFLGDFYRGQRARFGAIKAVKNAGHKLSRIVYHVITTRQPYDETVFAKLEARHQQRRFRKLQNVAKQMGYSLVATPA

SEQ ID NO: 504108 - protein, 351 aa, unidentified
MERYIGLDVHMQSTTIAVVGTSGKRIKTTVVDTSGPVLVQAMKAIAGAKHVCLEEGTQSEWLFELLSPHVEEVVVFMAEKSPGTKSDEADAWAMAERFRLGALKTRVFKATGQFTALRSAVMGYGLILSDVVRLKNRLRALYRSRGLHGGGQEIFRLKARAEWEARLPSALAPVVKQLGRQLDTLEELRAEAEQRLLDEGARHSEVRRLATAPAIGPIRAAQIVATIVTPHRFRTKRQLWSYCGLGIVTSSSADYVRGPDGKLVKMRTALTRGLNHNRNPLLKLVFKGAAHQICTLMPAHPLHQHFQRIVAAGTKPNLAKLTIARRLSATVLAMWKHKEDYDAARSVTTAR

SEQ ID NO: 504109 - protein, 341 aa, unidentified
MKSFIRIGIDLAKNFFQVHAIEREGAPAVARKLSRGKVLGFFAQAAPCRVGMEACGSSHYWAREIQALGHEVVLIPPAYTKPYVKRGKNDANDAAAICEAMSRPDMRFVPIKSADQQAVLMLHKTRELLVKQRTMTVNALRGHLSEFGLIAPKGIHRVKELLALALADETLPEAAKQASAMLASHSGGLDEKIDDLEKTIARASGNNQTSQLLDEIPAFGPLIASAIAALTPDPRVFRSGSDFSASLGITPSQHSSGGKDKLGAITKKGNRYLRKMLVVGCTSVLRVAHKHKGALAEWIVAMRARKPERVVAVALANKLARIAWAMMSTGEGFRTELYTKA

SEQ ID NO: 504110 - protein, 359 aa, unidentified
MKLYMAIDLHSTNNYVAAVSEDGQAIMNKRLRNDPRVILETLAPYKERLSGVVVESTYNWYWLVDLLMAEGYRVHLANPTAIRKYSGLKYADDRHDARWLAELLRLGILPEGYIYPKEQRPLRDLLRKRQQLVRLRTSMMLSLQNLITRNHGIKLGGSVLKRTGNPLEGYLACSDDLKLAGTVSKQTIDYLTGQISTVESHILRQLKELDAYRNLTTIPGVGKILAMTIVMETGPIDRFAKVGRYASYCRKVQSLWLSNEKAKGKGNEKSGNKYLAWAFSEAAEIARRYDPACQAFYERKSRQSNRMVAHNALAHKLARAAYHVLRDNVAFEATKLFSEKPGRNGKPESVAGNPSRLIG

SEQ ID NO: 504111 - protein, 360 aa, unidentified
MDKYIGFDIDSKKVSACVVQKGAKEMYSTIGCDILSMRKFLKQQKADGSKVHLTFEISGQAGYLYDSLVDCVDSITISNPSKMTWIYRTAKKNDRLDSRKQAILLSIGEIPAVHMPSAQVRQWRNSILHRRNLVNKVTEVKNKIRAVLKSQGFTRPIHRGSLWNRKNKGWLKSLYEAKVSSTGLWCMNLWNLIEQMELLEGQVKQVTMYLDSYLSGQAGGGLLMSIPGVGPRTAEAVLAYTDDVSRFGNAKEYCSYFGLTPRLDESGMRRRLGHISKLGPSVVRWVLCESSWKVVRKSKAMRAFYERVMSNGQAGRKKIAIVAVCRKLLAIMRAMQLTGEMFNEELVSRECGNELSRKVS

SEQ ID NO: 504112 - protein, 443 aa, unidentified
MSDLAVLDPRAAFVDVGSEKMHVSIAGGSPAVFGTVTSQLHALRDYLAEHQVRSVAMEATGVYWLPLYGVLEAAGMEVVMVDGRQTRNLPGRKTDMKDCQWGATLHAHGLLRAGFVPPANIRRLQDYLRLRGDHIAAAAGHVQHMQKALERMNIKLHEVISSLTGASGLAVIRAILAGERDPQVLLGLCDIRIRNVKAERVVESLRGDWAEEHLFALAQAVQSWDHYQGLIAACDRQIAVVLRQMPDAKAPPSAASTKTGKPRTRPGVNAPDIADLREILARICDAKDLTTLPAHSEYSVLQLIGEVGTDLTKWRTEKHFTSWLGLAPGTAQSGKRKASVKRRRNRAGQIFCVMARALARSKHVALGGFYRRMAARRGGLVANKALARKLATLFWRVMVKGLDFVETGVAQYEAKVLETKHRILHRLARQLGQKIVPNPVAVV

SEQ ID NO: 504113 - protein, 346 aa, unidentified
MRQIARIGLDIAKRWFQIHAVDGNDREVLNRKLARDKLLGFLASLPPCDVALEACSSSHHWGREIGKLGHRVRLISPNYVKPYVKRGKSDAHDARAICEAASRPDMRFVPVKTEDQQAALMQHTSRQLLIAQRTAVANSLRGQLAEFGVIEKKGIENVGELVRMLDDKDAALVNVPPVAIMVMKVLADQLQAVDEHLAMIDAQIEAWRQDSAAAQALKTIPGIGALISAALAAHVADPSVFRSGRDFAAWMGLVPRQNSSGGKERLGRITKQGNPYLRRLLVLGATASLRWLQKRTDPLADWTRNLLLRRPARLVTVALANKMARIAWAIMMTGELFRSEARTATA

SEQ ID NO: 504114 - protein, 345 aa, unidentified
MDTMYYIGLDVHKKTISFCVKDASGQVHQEGKIGATRRELDRWIETLPQPRIIAMEATIFTGWIYNHLRPHAQQVKVAHPLMLRAIAAAKKKNDRIHASKIADCLRCDFLPECHMASPEMRDRRRTLRYRQLLVRQMVQMKNRVSGLLMETGVSYNKQRLHRVGYFRELLSSHEEVHESIRPLLKLSRETIVRLQKTEYRLVSSLERDPWLADRIRRLRTVPGVGPITALTWALEVGDVSRFRSIRQAISYCGLCGAEKSSADKVMRTPLSKQRNKHIQHVLVEAAKLAPRQDHDLALVYETEKQRGNTNRATLAVARKMVAYLLAVDRGKRDFVPAGDHRSAAA

SEQ ID NO: 504115 - protein, 324 aa, unidentified
MTSPILGIDIAKLKFNVCLIQRSGKLRHKVFSNTVAGFEQLKGWLSRQGVERVHACMEATGTYGESLALYLHEAGHTVSVVNPAAIKAFAGSCLSRTKTDRVDAELIGRFCQAQAPSAWKPLPTEVRELQALVRRLESLLEMRVMEENRLSSGVLVGAVRRSVEEHLLYLNGQIKRCEESIRKHTNSHPTLKRQSQLLDSIPGIAETTAALLLSEITDITQYRSARQVAAYAGLVPRERQSGSSVRGRTRLSKIGNARLRRALYFPAITALRCSPFFQAWAEGLLKRGKSKMSVICAVMRKLVHVAYGVLKTGKEFDPQWAKTA

SEQ ID NO: 504116 - protein, 423 aa, unidentified
MFKILKFNCCGLDVHKTWIYACIGITDANFRTEYYEARFSSFPKDLRRLAAWLQEHKCEEVCMESAGKYWIPVFNVLEETCKVTLAHPKYTKPQKGNKTDRKDARWICDLFMCGMIKPSFIPPPAIRHLRDLIRYRIKLTNMLTSEKNRAQNCLTVSNLKLDDVFADVFGKSARSITEYILSHPGEKFDVAPFVDRRCKTPIDQIQAAVDGAISPEQAVKLRECLNHIDELNAHRDRIESEILQLVESFSAQLALIRTVPGLDKDPMTAILILSEIGSDMSAFPTAKNLVSWAGCCPRNDKSAKHVKSTRIAQAGCYLKPLLVQVANALLHSNKHPEFTERYRRIKSHRGHKKAMIAICKMLLTAIWNILSTGEVYNPSGYLIQTPRPTNETKVLTQKQALELLRLRGFVIKDDPVEPDPLPA

SEQ ID NO: 504117 - protein, 364 aa, unidentified
MFHQRTSVGLDVHARSVVACALDGTTGELHRARLAPAHEAVAAWIQGLPGPVAATYEAGPTGFGLARFLRAREIACKVAAPSKLQRPAGDRVKTDARDALHLARLLHLGEIVEVTIPTVEQEAARDLVRAREDCRGDLMSARHRCSKLLLRQGIIYSGTAWTGAHDAWLRTQRFDQRALQLTFDAAYETVVLTVARRDRLDTAIAEMAANSEFTAVVDRLCCLRGVATLTAFALAVEIGDWHRLGGRTIGAYLGLVPTESSSGAKRVQGGLTKTGNGHARRLLVEAAWHHRIPYRGPGADLRRRWERAPAAAAARGHAANQRLHHRWAGFIARKKKPSVANAAIARELAGWCWSLATLQATTPG

SEQ ID NO: 504118 - protein, 349 aa, unidentified
MEQNEVILGVDTHLDTHAGAVISGAGRLLGTLSVTTDTAGYLDLLTWANSFGQLRRAGVEGTGTYGAGLARVLRDHEIEVLEVNRPDRAMRRSRGKSDPTDAENAARAVLAGRATAIPKEQSGAAEAMRAVSVARRSAVKAKTQAINQLRALLVSAPQEIRERLLKVKTAECVEGCARLRSLGKTPVLQTLTTTLRLLAKRWLMLAEELNALDTMLDSLTSQHARRVRERFGVGQQTAAVLVSVAGDNPERLKSESALAALCGTSPLQASSGKTVRHRLNRGGDRSANNALWTIAMVRMRSDPRTRAYVDRRTKEGMSNKEIHRCLKRYIVRELYPLILADLADSTAAA

SEQ ID NO: 504119 - protein, 390 aa, unidentified
MIDIVIGLDVHKHSVYATVLNDNGELVIQRNTENNISVLDSFLNDYKEHDIVIESSTSGKYLSKALMKLNYKIHLINPDKISAIDGFKKTDREDSYKLAYLYRINALKEIYIPSEEIENIRTLVRYRHSLGEEITVKKNQIHAILASYGIIIKAADPFGKKGLREISNNYNKLNSSDRIVLRSLLSDISGIKSREKEIETELSNIAVNNNNIKLLMTIPGINYYSACGIYSEIGDISRFKNKERFASYTGLIPKEYSSGEKVVKGHITKHGPSILRFFLTEISHIIIKYTKKFRTKYLSIVRRLGKKRSIIAIARILAETIFTMLKNNTGYIDYERNKTDLKNIDYSYYDKLESLAIRKRRAMEYTLLKGNNDIKGDSANLKYNGGIKDC

SEQ ID NO: 504120 - protein, 345 aa, unidentified
MKITTVGIDLAKNLFQVHGVDERGKAVLRKQLRRAQVAVFFGNMPPCLIGMEACASAHHWARTLQRFGHTVRLIAAQFVKPYVKTNKNDIADAEAICETVGRPNMRFVPIKSIEQQAILSVHRVRQGFVKARTAQANQIRGLLGEFGLVIPQGIYNVAKRVPELLEDASNELPLPFRHLIDRLTEHLKELDRQVKEFEQEIIAWHRSSELSRKLEKIPGIGPLAASALVASIADAHSFDNGRQVSAWLGLVPRQSSSGGKATLLGMSKRGDAYLRTLLIHGARSAILAAKNKTDNTNGWLVNLLNRRHPNIAAVALANKNVRTVWALLAHGGEFKANYVPARMTA

SEQ ID NO: 504121 - protein, 430 aa, unidentified
MEVIYPKACGVDVHKSFIVAVICDSTSVKPQYLRKRFSTFNNSLIEFRNWLLANDCQNVCMESTGKYYVPVYNALEGHISNVVVANPKWVRCIKGEKDDNKDAKWIADLFKLGIVRSSFIPNKDIRILRELTRYLYKLTNMRTSEKNRFTNALTVGNCKLDMVFSDIFGKTSSAIINTILSQNEYNDEDILKNIDKHCKSSNEVILNSICGISWEASQKQRMNVIQEHIDYLDKSIKTIREIIDSIVAPYESAINLLCSIPGIDRKSAITIISEIGTDMSQFSSHYRLASWAGLAPGCNESAGKKKSVKISRAGVYLKPALVEVAHCAVKDKSNDYYAKKFNLISKRRGKKRAYIAIARKILVAIYHMLSTGELFNPSDASKVETTDKDKIKFTKNNFIQSTKQLLSLGLTIDELQEFITSKISESTPVI

SEQ ID NO: 504122 - protein, 339 aa, unidentified
MTYTLYVGIDIAAQSAAVAWQVPDRGEWQALEIKQQQSDYARLMQQLRRQATPAETLVVMEATGVYWLALADALHRQGFQVGVINPLQARRFAQLHLQHAKTDAIDARLLAAYAQHMQPTPWTPPPAIYYHLQQRLAYRQDLVKIRTQERNHLHALRHHPHADAAIIQRQRQHLAYLTGQIKALEAELKTLLAGDHPWREAARRLQTIKGFGPIVTAWLLVATQCFAFCDTPEQAAAYAGLVPYPRHSGSSLRATRSTGRTGHAQLRTMLYMAALSAARHTPPVKALYDRLLARGKPNKVARVAAARKLVHIAWAVVVKERDFDPYYNTPSHQAVPIPT

SEQ ID NO: 504123 - protein, 432 aa, unidentified
MSERKSLELRVSVDVGSRRHSVAIGLPDGQVLEEFEIAHRPEGFQEFFSRIEKHQKAQGCGVAVAMEGYNGYARPLDTLVRQRGYRLYNINNLKLARFKEIFPGAAKKDRIDARKGLELFQLRDHLPLAKGVLQEVTGTPKENEILKRLTRRRRRLVNERVRVVNNLQSDLQAVCPGLLEITTEASNQWFLNFLLSADSLPQLARLRKSTLLKIPAVGRKYASLIEQWQKRAHFSDEIEWVNEMVREDALRCLELDEKIRTLEAKIEEIAKSSKIAKILLSIPGFGPVCTSELAGEIGTVERFSKEGSLALYLGMSTLDNSSGDYHGSKQPKHVNTRAKAAMMIALDRHRKYVPESQRYYEKKRTEGKKHNQTIRSLGRHLCRIIFRMLRDQRNYEIRPQQGNTKTKVRSRSCVKTKIRRPKISATHLKQKV

SEQ ID NO: 504124 - protein, 351 aa, unidentified
MQDIKYAGIDLHQSTCVISIEDQQGKTVSESVVKTEAGTLRTFFRGFHGTIHVAFEVGTQSCWLYEILKPFVTSVTVCDIRKLKKRGNKSDRIDARQLGRWLRLGELKPVYQGNRNIRKLRDLAHAYLSTVSDSTRVMNRVKAVYRSWSIPCGGRDVYYKRNRDGWLSKFPIDESRLRTNLYYTQLDLLKEQRRDSKKIFLKEARRYPAERILRTIPGFGPLRSALAISVIGTPHRFRTERQLWSYSGLSVVVHSTSDHDFINGRIIRRHHKHSTRGLTRDFNRILKAVYKGAATEAIRRDPFDQLYKMKVAKGIRPEMALLLIARRIAAISLILWKRGEKFDVAKLLTSQ

SEQ ID NO: 504125 - protein, 333 aa, unidentified
MTDTTTHAPLPVPPAPVYVGIDVAQDKLDLARTDADAVPAFANDPAGVAAVVDLLSSIRPAVIVVEATGGLERPLLDALLEAGLPAALVHPGRVRYFAKGLGILAKTDRIDARVLAQFARLAAPRLTQKRSANQAELAALVVCRRQLTLARAEQANRRRATASRAALRSIDAVLATLDKQVESLDKQIRELLDADDDFKHLDGLLRSVPGVGPVLSATLAAELRELGQTDRRQVGALVGVAPFNCDSGKLKGRRAIRGGRTAVRCVLYMATLAATRCNPVIRAFADRLKRAGKLNKVVIVACMRKLLALLNAMLRDNLTWNQLDVVKKLAPTG

SEQ ID NO: 504126 - protein, 342 aa, unidentified
MKQYVGLDVSQRETAVCVVNETGQVIFEGKAKSNPGALTDLLNKHAPHAERIGFETGAMASWLWHELRRVELPVVCIDARHAHAALSVRMNKSDQNDARGLAELVRVGWYREVKVKSEQSQKIRAILVARSRLVSMRRDIENQVRSLIKECGLLFPRAIGQQFRSQVSELLGVDHLLLSVISPLLSIHENVCQQRGKFDNEVRRLAKLDETTRRLMTVPGVGVVTALTFRHTIDDPSRFRSASTVGAYLGLTPRRSQSGETDTNGKISRWGDRLLRTYLFEAATVLLYRTKKWSSLKAWGMKLAKRIGMKKAKVAIARKIAVILHCIWVDGTSFDWGQPKPI

SEQ ID NO: 504127 - protein, 386 aa, unidentified
MAQLNDLSRSLVILEQDATLIAVIEMGQSSWLVAGIVPGVERSPLKKLAVDESALLKLLNRWREEAEKAGHRVERIAIAFEAGRDGFWLARWLRARDIEAHVIHASSVAVSREHRRAKTDRLDTELLKRAFLGWLRGERDHCKMVAIPTLAQEDAKRPNRERESLVGEQSRIVNRMKAALARLGIRGFNPKLKKAVERLDGLRTPEGEPIPPNTLAELKHDMERRRLVRSQIRDIEGTRLERLVQGHGEGPHVMVRLLARVIGVGVETADMLVQEVLSRNLRDRRAVARYGGLTGSPDESGKKRREKGLARSGNARVRRGMIQLAWRFLMFQKDSALAHWFYARTKNAPQTRKTMIVALARKLLIALWRLVREGAIPEGIVLRPAL

SEQ ID NO: 504128 - protein, 349 aa, unidentified
MGEVITIGLDIAKNLFQIHGVDADGTVVIRRRVGRARVLEFFADLPPCRVGMEACATAHQWARELEKLGHDTRLMPPTYVKAYVKRGKNDAADAAAICEAVTRPSMRFVPIKNVEQQSVLMLHRTRDLLIRQRTQLINALRAHLAELGLVAAKGREGLHQLVTVVTECGDERLLSNARFACQAIVTQLHAVQIEISGLDKRITQIHRTNADSKRLDTISGFGVILSTAVVATMTDPKVFRTGRDFAAWIGLVPRQNSTGGKERLGSISKQGDRYLRRLLVVGATSVINCARARPYKYPWVIELLGRRPTKVVAVALANKMARIAWAVLAKGEPYRAPTRSSNAVVPAAA

SEQ ID NO: 504129 - protein, 348 aa, unidentified
MSKSSQYVGLDVSLKETSICIIDDAGKIVWRGRVDSTPEAIATAVKQHAPNAVRIGLESGQLSSWLFHELKEAGFPVICVDARHAKAALSLKVNKTDANDAFGLAQIMRVGWYREVTVKGLDCQAVRALLVARAQIVSQITTLKNCVRGILKTFGRVLPKGLRSQFPGRVRAAIDGHPVLGAIIEPTLRVLEAMRAQLLVYDRAVIQRARSDDTARQLMSAPGVGTVVALAYMTGVEDPARFKRSSSVAAYFGMTPRRYQSGEVDHAGRISKCGDGMVRGLLFEAAKVLLSRSARPSALKTWGEALGKRVGAKKATMAVARKLAVILHRMWTTGKTFQWNAEAASPAA

SEQ ID NO: 504130 - protein, 328 aa, unidentified
MDEASLGIDVSKGTLEAGLRRPDEQGAQIARFDNTRAGFKRLSSWLKQQGVDRVHACLEASGLYGDEVALYLYEAGHTVSVVNPAGIKAYAASQLQRNKTDRLDAALIADFCRTQSPPAWTPPDPAGQELRALARHLTDLKDMRQQAGNRLKAGVASPTVRQVLAAHIAFLDQQIADLEQHIQDHIRQHPDLQQQDLLTSIPGLGQLSAALILAEIRDIRAFEHAGQGVAFAGLNPRQRRSGTSVRGQTSLSKTGSAALRRALYFPALSAKRCNPVIAPWCAHLAARGKTKMQVIGAAMRKLLILIYGVLKSGQPFDPYYRARLLAAP

SEQ ID NO: 504131 - protein, 464 aa, unidentified
MAKKQNKHPKKIVRLDALKQINYNAAGIDVGDNEMYVAVPEDRDEQCVRVFGTFTGDLVSIAQWLTQCSITTVAMESTGVYWIPLFEILIEHGFEVLLVDARKIKNVSGRKTDIEDCQWIQQLHTYGLLNGSFIPDQNIRALRDMIRHRGNLLRCRASHIQHMQKILQLMNLKLTNVLSDITGTTGMQIIRAIVDGKTDPHFLSQFRDTHCRTPQIEIEKSLQGNYRSEYIFQLKQMLNLFDHYTSLIAELDHETEAMYKQLPSLINPQEHPLKPLKRSSKRTMKNSPQYDLRTQLYRITGVDLTQVDGLNSSTVQDIITDIGTDMSKWPTSKHFCSWLKLSPENKKTGRRLDSLSGKVFYSSTKKTKNRANKALRMAAFALANAQWALGAFYRRVRAKHGGPAAITATAHKLAGIIYKMLTDKVDFIELGPDYYDEKFKSRIIHNLMYKAKSLGYQLLPLPTQ

SEQ ID NO: 504132 - protein, 320 aa, unidentified
MMTQNDLVVVGVDVAKDKVDACIRTVTERRTFATTAPGRRSLIAWLRKHQVGKAVMEASGGYERVWAKALRQADIEVRIVDPKRVRSFAESAGRLAKNDKIDAEMIAWFAETFSEAPSQVEDPAHEEIKALVKGRKSLIDLRARLEMQKEHETPPLVQKAHARLLKKLAGEIATIETVIGAKIRATPAFAVRAEIIQSVPGFAEATALTLLAGLPELGQVSNEVAAALVGVAPYDDDSGKRHGQRCIKGGRRWVRNALYMPCVGAATLNNPVFKAFYQRLIARGKAPKAALVACMRKLIVILNTMIARGEKWDSTRYQIA

SEQ ID NO: 504133 - protein, 407 aa, unidentified
MRRDKHIYVGIDLHKFQHTAVILDCWFEKLGEVTFENKPSAFPSLLEYVNGFLTEDITPVFGLEDVGGYGRDLALYLKEKGHIVKFVNSSLSNAERNSYAMTQKHDSWDAQCVANVLIRQFPYLPDVIPSDMYWMIAQLVGRRNALVKSQIALKNQLHLQLSFHYPSYKKFFSKVDGQTALAFWERYPSPRHLKGETVESLRTFLLTTSHKSCSTRKAKQILSLIQADGEIKREYQATSDFIIQSMVRDIRFKKQEIKKVDKELKALIKPLGMQLETMPGINTVTASALIAEIGDIHRFTNSDKLARYAGIAPVRMGSGGKETIQKSKQGNRKLYTIFYNLAVQQIHICKGSKTPRNPVFYEYYQKKLAEGKTKQQALICIMRRLVNIIYGMMKHKTAYIMPERKVS

SEQ ID NO: 504134 - protein, 414 aa, unidentified
MRIIYDNVAGLDVHKKTVVAAIRIKQADGTWLQEHKTYGTMTVDLLALSDWLLTRGITHVAMESTGEYWKPVFNILEDNFEVVLVNAQHLSRVPGRKTDQSDAEWICELMQYGLLKASFIPPKGQRELRELVRYRTSFVRERATLVNRVQKVLEGANIKLASVATDVMGLSGRAMLTAMIEGNLNAEQMAELAKGRLRDKRDELAKALEGRIQAHHRFVLTELLCQIDSLEESIARFDREISEVSRPFEEVVVLLDTIPGVARQTAEIIVGEIGIDMTRFPSADHLAAWAGVAPGNNESAGKRHSGKTRKGNQHLMTALIQAANAASRTKDSYLRAQYQRLAGRRGRKRAIVAVAHSILVIAYHLISRKEPYRELGGDYFDKRRPEATANRLIMRLQRLGFQVSVRVSPALAVS

SEQ ID NO: 504135 - protein, 348 aa, unidentified
MQFYTNLHPFYCGIDLHARMLYVCILDERGEILVHKKIKDSPEQLLKLLAPYIGNIVVGAECMHCWYWLSDFCEHHNINFILGHALYMKAIHGGKTKNDKIDAYKIAKLMRGGNFPLAYVYPKEKRAIRDLLRRRTHAMRHSAELKAFIKNALSQYNLPVPDKSDLSYTTGRDAMRGYFPNPQVQRSIDMNLRLIEVYDHEVSSIECHVEKLTKHDNGRDYYLLRSLPGVGRVLALTILYEIGSIQRFDSVQKFASYSRLVKCKAESAGKSYGTQGNKIGNAHLKWAFSEAAVLFLKGNPPAQAYLAKLQKRMSKAKALSALAHKLGRCMYFMLKNQTVFDSERFLGG

SEQ ID NO: 504136 - protein, 413 aa, unidentified
MDVLHPRCCGLDVHKSSISACILLREAGRVQKHQRRFGAMTQDLRELAEWLRQFGVTQVAMESSGVYWKPVWNILERQFTIVLANAQHIKNVPGRKTDQKDAEWIAQLLQYGLLRPSYIPCEIIRDLRDLTRMRASLSQEASRISSRIQKVLEDANIKLASVATNVLGKSGRAMLEDIISGEDDPEHLASLALGHLRVKIPQLRLALEGKIRSHHRFLLRRLLDQMQFVEHEIALLEDRLEDIGQQRPELSQAVARWDTIPGIDRVAAWALLAEVGDNMAQFPTAEQLASWAALCPGNHESAGKRLRGATRQGSPWLRRMACQCAWAAARTKNTYLSSQFRRLAARRGKKRAIIAVAHTLIVIGYHLQKNQSNYDDLGGNYFDRIPSDGLKRYLVKRLQQLGHKVTLEPIEAA

SEQ ID NO: 504137 - protein, 348 aa, unidentified
MASAWSVTLGVDTHKDLHVAVALDQVGRRLGVATFGTDDAHHPGLWAWASDFGPIIQAGVEGTGSFGYRLAQFLTGSGVQVFEVNRPNRVTRRRRGKSDPVDAEAAARAVLAGDATATPKNRSGPAGQLRALLVARRSAIKARTQTEQQLRSLILELDDDQRAGVDRRRIVELTSACAALAGTDGTRLALRALARRWQHLDQEIRDNDQDVTTITRRVVPALLARPGIGPVCAAQLLVTAGDNPDRLHSQAAFAALCGVSPVEHSSGKTQRHRLNRGGDRAANSALWVIANNRLMHDPQTRAYAARRTATGASRKEILRLLKRYIARQVFAEIRYALSPPDALPDSSA

SEQ ID NO: 504138 - protein, 330 aa, unidentified
MTTPSKNITPKENNETTFVGIDVAKNELAVHILPSNQQLIVPNSKEGIKELVKLFKKNNPEQVVLEATGGLERQLLTNLVANGITAIAVNPRQARDLAKGLGELAKTDAVDARILARFAQLQCLPTRPVPTKETQEMNDLVARKEQLIQMRTMEANRLHVARQKPIKKSIEKIIETFDKQIADIDARIEQMIETNPDWSEKDKILQSVPGVGAKTSQVLISALPELGTLNRQEIAALVGVAPFCKDSGKKSGERHIKGGRANVRSALYMATFSAIQWNKTFKAFFDRLMAAGKKYKVALIAAMRKLITVLNVMVKTKSYWKEQKPTGENQ

SEQ ID NO: 504139 - protein, 476 aa, unidentified
MSYENGNIYRNGNQALKEALEQYRPSQILYVPLEIGKYNHKAKIVNFLGDVLIKPVEFANSKNGLKFILEKIKNAQKIASARKIFCGCESCGHYHLNIVYHLKQFGLPIEPINPRDVRKENPNKDAKNDLIDLNAIARTMIYNKGTRQVIPEGVYYKIQRASRTRINLVQRRTSSCNIITGLVDRIFPGLWDKDDSVFSQRFGKASLLLLEHYPHPKKITLLGEKRLSRFLRKNNTKLGEETAKKIVQKAMDCLSKPEEELEMDILALRCHIKVLYQYEEIIQTLEKEIALLLLQTPGTYLLSIPGIGVEYASQFTAEVGEIQRFAYANQIISFAGVCSRVFESSEYKAKGLPMTKRGSKFLRTTLNQISLSLNSHCKPFHIYYERKHEEKKDRPGIARIATGNRAVKLFFALMKNEELYRPRDLVDQKKYYAQLWEKILKKLGKIDLNLLPKENCLVKIKKEIEDKYELKLSLEI

SEQ ID NO: 504140 - protein, 393 aa, unidentified
MSSRVVIGMDPHKRSATIEAMDEDEAVLGKGRYGTDPEGFVAMLAAAARWPDRVWAVEGCEGIGKHLVLRLLERGEAVVDVPAKLSARMRVYATGQGRKTDETDAHSIALVGVRMTGLREVVNDETLEVLRLLVDRRRRIGEDHTRMVCQLHQLLLELLPGGAKKDLSAAQARRLLATVRPKDVAGKTRKRVAMELVVDLERVYARKKAANKELIELVKQTGTGLLDLHGIGPSGATRLLVEVGDVTRFPTKGHFASWTGTAPIDTSSGDNVRHRLSRGGNRQINKALHMMAVVQLRNATEGRAYYDRKVAAGKTANEAMRCLKRRLSDIAYRTMLDDLVATKAAGARTGPGGHRGNVSDSSAAGSHPHTDSSDKSLPGPAKTKPKTPLRRAS

SEQ ID NO: 504141 - protein, 424 aa, unidentified
MENTVARKRRQVPEGYLVVGVDPHKKRHAAVAITQDFTTQAKFKFDNTREGLEMMLDRARVEMLKSGCRGVMFAIETGGHYWRNIAYYLDERGIPFRFINQYTLKRRREGKDLNHRKNDYRDSEVAAQLLCTGEFVESVIPQGVYAELRTSHNAYQRLVKERTRITNLVKGLLDALFPEFTQVFKDPGRLTALSVLSTCLIPRVIAGMTEDEFVTTIEARHKGRRLMRKKLRALHYSAGTSIGIDAGARSVASEISFLVEKLELIRRHIRTIETTLVRLVNETEEGKYLLSIRGLNYIAVAGLLAELGCFKLYRSAKQMIKMAGSNPTESESAGKKRSKTPMSKQGRPLLRYCAWTSVIPMLRFNPDFRAWAKQRRERPVHANPLSGREVVGAALNRLLRLGFALVKNQTYYQDVKPALIPVAV

SEQ ID NO: 504142 - protein, 339 aa, unidentified
MGSTCIHEVSNRMTTHEKTILGIDISKNDFDVALLRANKFKNKKFNNKPKGFAELVKWLQGLQVEFSEVHACMEATGVYGDLLATFLHDQGSYVSVVNGARVKGFAQSELSRTKTDKKDACMIARFCDALNPDQWVPPAREIRELKALAKHLEALQDMLRQEENRVAVSDSILVPEIQGHISDLKVRIAQTKQAIDDQIDNFPGLRQQRELLESIPGVGPATSATLLSVFSNIDAFSSAKKMAAFCGLTPRQRQPGSSINGKARLSKMGHSQLRKSLFFPAIVAMQYNPIIVNMKVRLLKAGKCKMLIVGAAMRKLVHTIYGVLKSRTPFDENLSAATA

SEQ ID NO: 504143 - protein, 402 aa, unidentified
MRVIGLDVHRSFAVAAFLEDGQLRSGGRVELTRDAVVAFGEQLRPDDEAVVEATGNTATIVRLLRPFVRRMVIANPLQVRAIAHAKVKTDKIDAGTLAKLHASGFLPEVWMPDEATEALRRLVAQRAQVVSQMTRAKNRIHGVLRANLIPPHRGELFSAAGRLWLEAQPLSQDEKLAIRRHLADLDHRAADLAALDRALAGRALEDDRVRRLMTIAGVHVTVALGLLAAIGDIARFASPGKLVSYLGLNPSVRQSGNGPAFHGRISGQGRAHARGMLVEAAWAAARAPGPLRAFFLRIQARRGKQVAAVATARKLAVLTWHLLARGEDYAWTRPALLEAKLRKVELAAGQPAVKGRQKGRAYAYNSKAVRERERAWLEQTERAYARLVANWRSRPPASKAHG

SEQ ID NO: 504144 - protein, 374 aa, unidentified
MSSDGITWVGLDAHKKSIHVAMLVPGREEPVSWQEAHEESAVRRLARRLNREGPGEVRACYEAGPLGYTLQRELEAQGVICEVVAPSLIPIKPGERIKTDWRDARKLAEMLRSGMLTAVQPPNEADESLRDLCRGRDSVRQDLARSRHRMSKFLLRRGYRYHDTQRHWGVRHMKWLRPLRFEHAAAQAIFDHYLRTIDHLDERQRQVDAQLGLFGSQEPYCQPVAWLRCFRGIDTVTAVSLVAELHDFRRFRSARSLRAYLGLVPSERSSGEQRRQGSITRAGNHHVRRLLVEAAWHHRHRPVLSQPLRKRREGQPAHVIAIADRAQERLHGRFIRMTRRGIHYNKTVVAMARELVGYLWATLYPRETEAPPSA

SEQ ID NO: 504145 - protein, 368 aa, unidentified
MSKTITSFVGLDVHKDSTAIAEAEAGRETPRFVGTVGPDLGQLLKALKSLGKPETMLVAYEAGPCGYGLARQLRSRGYGCEVVAAGKIARRPGERIKTDRRDALTLARLARSGDLVKVMVPDERDEAMRDLSRAREDAVRARLKARQQLKALLLRHGHRYSGKSSWTLAHERYLARVSFAHPAQDIVFAEYRQAVREGHERVERLTEALRTQTEHWRLKPLVAALSSLRGIDFVAAVTFAAEIGDFGRFAHPTELMGFLGLVPSEYSTGDTRRQGDITKTGNSHARRVLVEAAWNYRFPARLSRILQTRQEGQPKAVRDIAWRAQLRLAHRYRRLSSRKLHPNKICVAIARELAGFLWDIAQQVQVPT

SEQ ID NO: 504146 - protein, 336 aa, unidentified
MSHYCGIDLHSNNHVVVVIDEEDKRVLEKRLSNDLSLTLKALSPYRKSLQGIAVESTFNWYWLVDGLQEQGYDLQLVNTAAVKQYDGLKYSGDHQDAFHLAHLMRIGILPTGYIYPKEQRAIRDLLRRRLSLVRAASTQLVSAQSQIWRSTGIRIKSGELRKPVFVPPPVDDYTRQAVHAVLAVYQTIQCEIDGLEESAYQAVKLTDDFAILQTITGIGKILGLTIMLETGDIHRFASAGNFASYCRCVDSKRTSNGKNKGVGNAKAGNKYLSWAFSEAAHFAVRFEPLAQRFYERKKAKTNGIIAIRAVARKLARATWMMLKHQVPYDARRMFPG

SEQ ID NO: 504147 - protein, 447 aa, unidentified
MAQRNRAFSRGGLQVTHPDAAGVDVGGATHYAAVRADATEEAVRQFGCFTAELNAMADWFEQCGVKIVAMESTGVYWIPLYEVLERRGFEVLLVNARHVKNVSGRKSDVLDCQWIQQLLTFGLLRGAFRPAERMCALRAFSRQRARLLRDQGRCVQHMQKAMTLMNIQLANVISDVAGATGQRIVRAIVAGERDPHQLAAYRDVRIHASEAEIAASLLGNWRDEHLFALRQALAAFDFCVSQLVECDGEVERAMALLHKHAGAPAAGKRRSRARNAPKFDVREHLFKVCGVDLTRIDGIDVSTAMTVISEIGCDMSRFATVKHFTSWLGLCPGTKISGGKVLGAATKRSVNRATQALKLAAAALRSSKSALGAYYRRMCARMDKGKAVTAAAHKLARLIYLLLTKGEEYTDRGQLYYEERYRERVVRSLNKKAFELGMQLVPCPNPA

SEQ ID NO: 504148 - protein, 343 aa, unidentified
MLTITTIGLDIAKSVFQVHGVDAGGQVIVRRQLKRRYVLTFFQKLSPCLVGIEACGSAHHWSRELQALGHTVRLMPPAYVKPYVKRQKNDATDAEAICEAVTRVNMRFVPTKTAEQQSGLVLHRARHLFVRQQTSVINAIRAHLAEFGIVAPVGRHGVEELLDVVTDPNDKRVPDIARACLSALGDQLQSIKKHVLEFDRLIRAWHRSNEMSMRLEAAPGVGPVLATALVAAVADPKSFRSGRNFSAWIGMVPKQHSSGGKNRLGNISKQGDRYLRGLFVAGALSVIRYAKVHGTKHRPWLTALLTRRPTKVAAIALANKIARMVWAMMATGERYKEPVALAR

SEQ ID NO: 504149 - protein, 341 aa, unidentified
MKNLFIGVDFSKEKVDVAIIFADGLTETAARVFNEFKTTVSGYKQLVKWVEQNSYGIDPSLWLFCGENTGGYSNGLCKFLYGRGYDMWLENAKSIKDASGLRRLKSDRADASMIAEYAMRNHDKAVMYKPLNESLEQLRELFLFRQTLVRYRCSFQVRREEKRLTMDKSPVKTMISQIGRHMVTTLEKEIEKVNKRIADLIKSDDELTEVFTIVTSVPGIGTQNAVCLMVYTDNFRRFNYDSRKIACYYGLAPFGKDSGTSVHSDPHVHYMANRQIKAMLTQAALAAVNFNPIMARYYMRLVERGKKKQVALNNVKNKLIHLVTAMVRNRQLFSPEYKISA

SEQ ID NO: 504150 - protein, 402 aa, unidentified
MIYAGIDIAKSSHVIGAVDERGKDAAKPMRFANSAGGFGKCAAYLEGLGAPAEEMLVGMEATGHYWLPLFSFLHARGYDVVVINPIRTDAMRRFKGSSRVKTDLVDCILIADTLRLGEFRPSKLGDESMVELRQLTRLHQGLKESVADLKRQVIVALDQVFPEYDSIFSDTFGESSKAFLRKCPTPEECRGVRVDALGNTLSRASRGKLGREKAEEIKGIAKESCGIDRGTRALSFQIKLLVEQIDFIEGQIEEVEARIEEGIETTEPLILTIPGIGHILGAQIASEIGDIHRFRNASAVVSYAGINPSVSQSGKFSSSENHITKQGSPYLRRALYLAATAQLRLSTPFRDYYDKKRADGKSHREALIAVARKLVHVIYAVLSKQEPYRPDAVNANPVSRSE

SEQ ID NO: 504151 - protein, 428 aa, unidentified
MNNQECIKHERFCQFRREIRGSKEHLIVGIDIAKDKHYAFFGTSTGKTLFKRLIFDNNLEGYKKLLVRVDAIKVQHCLSKVVFGLEPTGNYHKPLGAYLDRCDFMVVLVSGVAVKRNRELLDGRWDKHDTKCAANIADLISQGKCLFYDSPSKEIIDLRNLLSLRKRLKKEEHSLRMRIRNNLLAKYFPELDKFYGQCESENLAIVRWCLDPKIIADMEFDQFFKMVTKRERGIAQKKRLRAIWDSAPDSVGCIPGESSEFEAGILVEKLRQVRQVIEKTENLIKNVSKQCPWYSLLLTIPGVGPYIASVILAAIGNPYRFKNRKQVLKLAGYDLSANRSGKTSKAAVPVISKKGNSNLRYALYQAALVASVRNIHFLTYYTNILRGREREKGIKTKMRVRLAAKMLVIAWTMMKKKESFNPDCLSGK

SEQ ID NO: 504152 - protein, 316 aa, unidentified
MDGANLTWIGIDVAKATLDLHFLPSGQAHSLANSPAGHRQLRKLLPAPDACRIVLEATGGYERQLVADLLDAGFHVAVVNPKRVRDFARALGLAAKTDRLDARVLALFAEKVQPAPAQKTPEKQAEIQQLVARRRQLIDLRTQESNRWDVTPSKAARKSIQAVLNTLERQVRDIEKAIEDLVESDDEWRQKTELVQSVPGLGGVTATTLLADVPELGQLNRQQISSLVGLAPFNRDSGQHQGKRTIGGGRKSVRSVLYMAALAARRCNPVIKAFADRLAQHGKPFKVVLTACMRKLLVIVNSLVKSGQPWNPKLAS

SEQ ID NO: 504153 - protein, 360 aa, unidentified
MTIAEESAARRVVGGVDTHKDLHVAAVVDDQDRVLATHCFATTRQGYRQMLAWMRSFGEVQRVGVESTGSYGAGLLRFLQQAGVTVLEVTTPDRQDRRRRGKNDDFDAQNAAHAAFAGIRTVTPKSRDGMIEALRVLSACRKTAVTARRIALQMIQNTIVCAPESLREMLRRMTRMQLVRTLAAWRPDLTAYRDVEAAYRISLKSLARRYLELHDEIADLDAMIAAIVDELAPNLVARNSIGHRGAAQLLLTAGDNPERLRSEAGFAALCGVSPVPASSGKTARHRLNRGGDRAANSALHIIAIGRLRTDARTQAYVAKRIGEGHSKLEAIRCLKRYIAREVFTLIKQRQREINQTRIAA

SEQ ID NO: 504154 - protein, 342 aa, unidentified
MNSTKTVVGVDTAKQVFQVHWVDAETGEVFSKQLKRARFLEHFANMAPCLVGMEACGGSQHWARRLLEMGHEVKLIPGKAVKAFVSGNKNDVADARAIWLAVQQPGVRAVAVKSEAQQAVLALHRMRQQLVKFRTMQSNGLRGLLMEYGEVMAVGRVALNGGMQDALARLAERLPAVLIDTLREQWDMLGKLDEQIAQIEQRLLAWMKQDRASKTIAQIPGVGLLTATAAVATMGDAKAFKSGREFAAWLGLVPAQTGTGGRVRLLGMSKRGDAYLRTLLIHGARAVLTHTKEPGQWLQDIGKRRPPNVVTVALANKIARTIWALLAHDRSYDKGYVSVRPT

SEQ ID NO: 504155 - protein, 343 aa, unidentified
MNEVITIGVDLAKSVFQIHGVDAEGAVVFRRRLRRGQVLPFFKKQPPCLVGMEACATSHHWAREIEALGHKVRLMPPRYVKPYVKRNKNDMADAEAICEAVTRPTMRFVAIKTPDQQSVLMLHRTRHLFVRQRTMLINALRAHLAEFGIVAGVGRNGLERLLKVIENGEDDRVLPAARDCLLALRDQLELVKHQILDADRRILAWHRSSEVSQRLDDIPGVGPLIATALVASVPDPHVFKSGRDLAAWIGLVPKQSSTGGKERLGHISKAGNRYLRMLLVVGALSVIRRAKQMGYTRRPWLTKLLQRRSTKIAAIALANKIARTAWAMMAHGTFYKEPTSQAV

SEQ ID NO: 504156 - protein, 395 aa, unidentified
MNSVFVGVDVSKDFFSAAGLDGEGKELFLGSYEMNTSGFSEFIAVLSSHGERVDRVMVAMESTGCYHINLYSFLMGKGIQAMVVNPLLIANFAKLSLRKTKTDKKDARTIVKFLMDHHGEISQLSISQDLQDLRDLSRERESLSHLMSAIKVEIKRVLRTTFPELESIGDIYTGVMLRFLQEYPSARLVRAAKPKAIAKVLKQPYVGNKLTFSAEDILRAAKSSIAVVSPAKEIILQGKIATLFHLQERIDEVTKLLSDLCKATRVEDLKILRSIKGVGPKTAAPFLAEMGKVDNFLSHKKLIAFAGMDPSVHQSGKFMGMSKLSKRGNRHLRRAIYLMTASVVSKNAFFKAYFLRRKGEGLPPQKALFATAHKLIRVIFAMLSQRTYFKAKEAI

SEQ ID NO: 504157 - protein, 314 aa, unidentified
MSSETVVGIDVSKRWLEVQVHGAATSQKVANAPQGFCALIELMQVAQPQLIAFEATGGYEREAAKALDAAGFTVVVVNPTRVRRFAQSMGILAKTDKIDAKVIAYFAEVSKATLHPNCPRTPQEEHLAACLERREQLLVTLSAEKNRLATCAQCVRDDIKAHIAWLEAAIDRLDAEIDAGIAQHAEWQERAKIIASVPGIGRVTASTIVAELPELGRINRRVAAALVGVAPFNKDSGPKRGRRRITGGRARVRRVLYMAALSASKCNPVIRTFYQSLLARGKEKKVALVACMRKLLVMVNAMVRDGQVWRNAPA

SEQ ID NO: 504158 - protein, 354 aa, unidentified
MSNKSTPTVATMGIDIGKNSFHVVGLDQRGAIVLRQKWSRSQVETRLANMPPCLIGMEACVGAHHLSRKLQSQGHDARLMPGKYVRPYSKGQKNDFRDGEAIAEAVQRPTMKFVATKTVEQLDLQALHRVRARLVSQRTGIINQIRAFLLERGIAVRQGLRFLRTELPNILATRGDVLSPRMVGVIADLAGDWHRLDERIEGVSAEIEALADQDPACERLMTVPGIGPIISSATVAAIGNGAAFSKGRDFGAWLGLVPRQMSTGDRTILGRISKQGSRYLRALFVQAAWVVLIKPNTWERHGLKSWIESAKKRMHHNVLAIALANKLARIAWAVLNKENNFECTRTNALASRPA

SEQ ID NO: 504159 - protein, 338 aa, unidentified
MGIVYVGIDLAKNVFAVHGVDEHGKPTLVRPAVPRAKLHELIAALAPCTVAMEACSGGHHWARLFAAPGHTVKLIAPKFVAPYRMSGARGKNDAADAAAICEAAQRPNMRFVPVKSIDQQARLMVHRTRQGFVEARTACINRLRGLLGELGVVLPLKAATVRREAGARLEDLPGWANTVVGDLLSELHRLDERIAQYDQHILAIAREDERAKQLMRLSGVGPTTATAVLAMIGNGHEFKCGRQFAAWLGLTPGQYSSGGKTRLGRITKAGDAYLRTMLILGARAVLAAAKNKTDSISRWAIALEQRRGYWKAVVAIAAKNARMSWAMLARGEDFKLPA

SEQ ID NO: 504160 - protein, 370 aa, unidentified
MGKSVLYVGLDVHKMSIDVAIAAAGPGAEVRFYGQIGGDLGSLDRVIRKLRATGAQLQFAYEAGPCGYQVYRHLTAQGWPCLVAAPSLIPRRPGDRIKCDRRDALSLARLFRAGELTSVKVPDADDEAMRDLTRAREDAVSVERRAKQRTGALLLRHGRRYPGKTTWGRGHWRWLLQQVMEHPAQQIVLQEYLDAVREAGARVVRLTGQIQELLPQWRRAPFVAAYQALRGVSLIVAATMVAELGDLGRFNNPKELMAYLGLVPSEHSSGASVRRGRITKTGNGHARRVLVEAAWAYRLRARVTRPLLQRQEGLPEKIRQISWQAQLRLCARYRRFLARGKHKNTIVTAIARELAAYIWTIGQAVEPLTA

SEQ ID NO: 504161 - protein, 412 aa, unidentified
MQDILTCAMGLDIHRDVIVACLAKGELGTDPEIEIRSFSTLIPEMRKLRDWVLEAECRYVAMESTGIYWQPIYEMLEPCFDGQISILVVNARHMKNVPGRKTDMRDAQWIATLLRAGLLKGSFIPDKTFRELRHLTRYRKSIVRDITAQKNRIDKFLQSSGFRFTAFLSDAFGASGRNIIRHLMEYGNISREALDRCLKTQTRKRIDEILIALNGSLSEHQRGFLRMIFGHLEALEQHRHTVEDAITKEITKHEEALSLLCSIPGIDVTAAAAIIAEIGTDMSAFPDSQHICSWAGLSPGNNESAGKRKSAHINKGNPYLKSMLCEVGWVISGKRSLYLSGWYWRIKQRKGAKRATIALARKLLALIYTMLKKGSPYNEDCFEIRRKQSERKRASRMVNELQKLGYFVVAPG

SEQ ID NO: 504162 - protein, 391 aa, unidentified
MVCVGIDVAKDKHDCCILDSDGTVRADCFTIPNNMDGFKQLLQTIRDCTKKSDKIKVGLEATGHYSYNILGFLLDNGLPTYVINPLHTNLYRKSLSLRKTKTDRVDARTIATMLLSDVDLKSYTDIAYHNEDLKSLTRYRFDKVQERAKLKQSVSRLATILFPELEQLVSSIHGTSIYALLSEYPGAKQISEVHLTKLTNLLTTASKGRYGKEKAIQIREAARASIGSVMPAKSLELKHTIKLIQELASEINEIEDSIQKIIDELNPPILSIPGMGVNSAAVILAEIGDFSNFSSPDKILAYAGCSPSTYQSGKLTNCYAHMEKRGSRYLRHALYNATKYVCYWNPVFAEYLAKKRAEGKHYNVALSHAMKKLVRLIYALQKSGKAYLAAA

SEQ ID NO: 504163 - protein, 319 aa, unidentified
MAQNDLVVVGIDVAKDKVDVCIRSLSLRRAFANTAEGRRELASWLRRQKVGKAVMEASGGYEREWAKALRDARIEVRIVDPKRVRSFARSAGRLAKNDTIDAEMIAWFAETFDEARAQTYDVTREQLQQMVNARQALKDMQSKLTSQDEHAVPAAVQRIHARISKTIAVELVKIEAAITALIQATPRFAELAEIIESVPGLARTTSAALIAAMPELGQVNNKIVASLLGVAPYDDDSGRRRGERHIKGGRRRTRNVFYMACLGAATQHNPVLKAFYDRLVAKGKLKKVALTACMRKLISILNIMIERRQKWDAKRYALS

SEQ ID NO: 504164 - protein, 285 aa, unidentified
MQTITTVGLDIAKSVFQVHCVDANGKVVLRRQLKRRYVLTFFQKLPPCLVGIEACASSHHWSRQLQALGHTVRLMPPAYVKPYVKRQKNDAADAEAICEAVTRPNMRFVPAKTPQQQSCLTLHRTRHLFIRQQTAIINSIRACLAEFGIVAPVGRRGVEQLLEVVANVEDTRLPEVARACVAALGTQLMALKAQILAFDRRIMAWHRSNETSKRLDEIPGVGPALATALVASVADPKAFRSGRDFSAWIGLVPKQNSSGGKDKLGSISKQGDRYLRSCSRPARLP

SEQ ID NO: 504165 - protein, 346 aa, unidentified
MKYYVGLDVSLKEISVCVIDGDGKIKARGTTSADPMAVKGWFKNRSLEPETIVHESGQLSIWLQRGFLELGLPAVCIDARRAHKSLSARLNKSDASDAEGLAQLARTGWFTPVFVRSVEADRLRALVGARERMIRLRKDLEGHIRGVLKTFGIRMTGVTQGKLRQKFRDQLAAAGETDPVLRLMADAFIEIHAMLCKAAADLGKALKTMAETHPVAKRLMTIPGVGPIVSLSFIALIEDPNRFTKSTDVGAYLGLTPKRYQSGEIDWSGRISKRGDKAMRSLLVESASTLIRNVKRFSALKSWAIRLAGRKGFRKAAIATARKIAVLMLTLWKTETDFQWTKEAKS

SEQ ID NO: 504166 - protein, 400 aa, unidentified
MKGPIVSIDVSNGNSHFQCFTQRGTKMGKVHRISHTVEGFNFLKSKIEELEKKTNEEVIAVYEATGVYTKPLERFLEKNEIKQYSISPLQSAKQRKTEIHNKKTDKKDPESIAEVYYIKELRENEKEADLYHELRTANRVYEDCLVHLRKYKVTFQSHLSIVFPGYMKLFQDGYSQISLQLLEMYPHPDRLKNKQPEKVAKKLNKHTDHSFEVCLKTAEKVIEFANKTYPGCDKADAWVAVLVDDIHHLQDTMEEAEAKVDKIIELAKATPYYSIILSIDGIGPNLASRIIAEFGDISKFKTRGAMVAYVGNDPNRAESGDIEGYHLSISKKGNKRLRCILYLAVTCSIRSRKENPINAFYQKKRQQSTPLKSKAAKVACITKLIRTIHGMCKTGTVFTS

SEQ ID NO: 504167 - protein, 429 aa, unidentified
MQNESIPDARGPVFCGVDTHADSHWLYVLDWRGRKVLSRQFPADAAGYEALAGAIAAAGEPACIAMEGTSSYGAGLTRHLASLGMPVREALSPARMQRRRPGQGKCDEADAERAARAAMSGSRLGTPKSQDGWVDGVRCMLAARSGAVKARTSAINTARSLLTTAPEGLRSRFRGMGGPRLMEELPSVRAEGALGAALGALADLWAAARDAALDMELAIEASLEENCPALLAMYGCGPVSSAKLAVAAGDNPGRLRSEASFAAICGACPIPASSGKTVRHRLNRGGDRQANSALHEIARQRVMRDPETAEYAERARARGKSDREVMRCLKRYVAREAYRALMRPHEIRRPADASELVAARRAAKVSQVRAASILGTSEKYISMLERGQRELKPIRRAYEAWVEAGLPLDWDRQAFEAERKMDSKKHLAK

SEQ ID NO: 504168 - protein, 345 aa, unidentified
MPIVGGLDIHRKQITFDYLDTVTGEVKRGQVAPADREHLRAWLGRFTGRSDVAFAMEGCAGWRYVAEELAAAGVAAHLGEPADTAALRGRKRHAKTDKTDARHLRAVLAEGRLPECWIPPAHILEYRALLETYHDLRRAHTAWVQRIHAVFFHQGAPPLGEGALRTEPGLAGLRAAAAAHLSPAGQLQVATALDMLAATEARMGPLRKQLTQTARHLTGAKVLAARLYGVGPLTALALTCWLAGADRFSSSRKAVRFTGLDITVHSSDRKGPPGRLSRQGPPVLRWAVYEAGLTHARTAAPDHAYYAAVADRKNTKRAALSEARKIVRQACHILTELGDDALTIA

SEQ ID NO: 504169 - protein, 392 aa, unidentified
MRLQTSVTQIGLDVHRKFSLAAARDASGRIVWRQRLEHADRDELRKRLSSWPQATPVILEGTFGWGWMSDELLAAQVDPHLASSRKVAAWRSARGMAKSNKIDADLLSELWDEKPMTQGGVLKRWWEVWLVPQEVRDQRELLRHRMSLVKIQTEVKNQIHAILHRHGILHEFADLFGSGGRRWLSLLAEDEGQLRHAGRRVLKDKLILLDTLRRLIARATSLFRMGIKANPMAQRLKSLPGVSVVLSYTIAAEIGRIERFHDARHLVSYSLLAPRADDSGDEREGKPIGRRIGHAGRRTLQWAWIEAARGAVIKDVRFRAVWDRRTDKGEKDRNRGYIAAANTMCRIAYAMLEKETDYREESPSRPGSKLSQTDLSRPGTGQPEAAMAACVE

SEQ ID NO: 504170 - protein, 368 aa, unidentified
MDGEYYTTIGMDVSDRTTKVCVMAKERGARRIIEETTIPTTGDALRAYLSGKSSDWPVVFETGTHCRWMKREVESLGMKAIVANPSRLRMVTESNTKNDRNDARELARFALADVGLLHPVRLRSERCQQMLRLMKARDLLVKVRTMHVNELRGFAKSMGFRLPSCPANRVHALDKAGWPDDFESLAWPLMDMLETIDLKIRAYEAQIRSLAESGELKDKVGRVREVYGIGLLSGAALVASIDADPGRFRKARDAGAYFGLVPRQRQSGEMDAQCHITRAGSGFVRRLMIEAAQIAMRESARDTDVKLKGRRICARGGRIAKKRALVAVARCLVVTAVALLKNPDAEYVPLSEPARREFEAMRSDEATA

SEQ ID NO: 504171 - protein, 389 aa, unidentified
MGIDVAKDKHDCCVLGPAGEILRDSFSFANTRQGFEALRTAIQEAVGSQDNLQIKAGLEATGHYSENLVAFLRTSGVEPVVFNPLRVKLFRQALSLRKTKTDKVDARCIASLLMSDDSNPVAQSYQIQELKSLTRHRSRLVSSRAKAKIHLARLVDILFPELPSVCWSLSQKSILSLLKELPGATRIAGCRIDRLPNLLSENSHGKYKQGKAEEIKVLARQSVGRGSEALSFELIQVIESIQFFERQIHVLDKQLAGFVKALGTPLLSIPGIGCTLAAIILAEIGDINRFASPDKLLAFAGLDPSTYQSGRFVAGKTPMVKHGSTYLRWALMQAARLVAMRCPDFRQFQAKKLAQGKHHFVVLGHVAKKLVRVIFHILTANEPFVSQAA

SEQ ID NO: 504172 - protein, 456 aa, unidentified
MAQRNPSISLKPGKSRVALTITHPNAAGIDIGSGSHFVAVPPDRDDEPVREFPSFTVDLTALADWLKACRIDTVAMESTGVYWIPLFELLESRGFTVLLINARHVKNVSGRKSDVLDCQWIQQLMTYGLLRGAFRPADQVCVLRSLWRQRGMLLRNQSRHVQHMQKALTQMNVQLANVISDVAGETGQKILRALVAGERDGHVLAKMKNARIRASGDEIAKSLQGNWRAEHLFALKQALDGFDFIGTQLAECDREIEQQLQRLQTHEGEPAKGKQRGRARNAPKFDLRTQLFKMCGVDLTRIDGIDVTTALAVISETGVDMSRFPSAGHFASWLGLCPGTRITGGKVMSGKTKRCANHAAQALRLAAAALRASQSALGAYFRRMCSRMDKPKAVTATAHKLARLIYSMLTKGEEYTDQGQDYYEERYRERVLRQLAQRATKMGMKLVAAEEPETVL

SEQ ID NO: 504173 - protein, 338 aa, unidentified
MKLKRIAIDTSKHVFTMHGVDEDERAVLRRDLRRQQVEGFFATLPPTEVVLEACGGSHHWGRRLSALGHRVKLIAPQYVKPFVKRGKTDRNDAEAISEAASRPAMRRVAIKSAAQQADALTLSARELLVAQRTQTINALRGHAAEFGVVVAGGTGRVAKLLAAVAQDADVPQAARSLLAFLGQQVAHLDREIAKLDTALMAQHKANPVSRLLAEIPGIGPIGALTLAVRIDPRQFQSGRHLAAWIGLTPREHSSGGKQRMGGISRAGDERLRQLLVLGATAIIRYAKPGRASAWLLSLLERRPRKLVAVALANKMARIAWAMMTTGEAYRRAPLAAAA

SEQ ID NO: 504174 - protein, 407 aa, unidentified
MSQHKPSPDRFVGLDVHKHYLIAAAVDPERKEVMGPRRVPLVRFDSWVRKTLSPQDAVVLEMTTNAFQLYDDLLPHVHSVTVVHPPHVALITRAQVMTDKIAARTLAKLHAVGLLTSIWIPPLEVRDHRALVAQRTKMVRLSTQAKNRLHALLHRHHFPPPPGMLFDPDMHPWWLGLDISALEKARLRCDLDTLVFAQAQIHLLEETMLTLAVHDERVVRLLHLPGVGLITAMTLLAAIGDISRFAQAKNLVGYAGLGARVHDSGQSHRTGRITKAGRRDIRAAMVEVAHTAARTHPYWQAELARLEPRLGRNKAIVAIARKLLVAVWHVLSSDCPDRFADPERVARKLLKLANRLGYARRPQGQSAVQYVRHHLDRLGLGAELTSFPWGKTRRIHLPPSQVAAEAN

SEQ ID NO: 504175 - protein, 403 aa, unidentified
MKQIVIGVDPHKLSATIEVVDQHERVLGSGRFATDKAGYAAMLGYVAQWSRPTWAVEGSNGAGRSLAQRLVADGEHVVDVPAKLAARVRLLDTGHGRKTDAHDAHAVAAAAVRAKKLRVLSENPELESLRMIVDRRDELTRQRVQTVNRLQRLLAELIPGTSKKDITVLQAKAKIASVRPRDLVGKTQRRIAAEELADLVAVEKKIKTLTKDLKTIVEASGSSLTTLPGVGTIVAARVLAEVGDVTRFADRNRFASWTGTAPLEASSGEQVRHRLSRAGNRRMNHMLHIAATTQIRLDTPGRAYYRRKLAAGKTRMEAMRCLKRRISDAVFRQLLADARADANRPVGAGPGGHCGASRESSAVDFHPLVDTSDQPLPGPAEPTLQPVPRRRKTAGASALSPAS

SEQ ID NO: 504176 - protein, 425 aa, unidentified
MKNTQNQKISQIKNETLVVGIDVAKETHYARAFDYRGIELARLLKFSNTAEGFKLLDQWMQDICKQKGKTEIVAGFEPTGHYWFVLGDHLKRQGHKLAIVNPFHVNRTKELDDNSPSKNDSKDCKTIAMLVKDGRYREVYIPDDIYQELREAVAERERLQEQLTSIHNRVVRWLDIRFPEFQKVFKDWRRNAALITLRSFPTPEKIVEAGARKICETWKIEMKRPSFKRAEALVKVASNSIGRTSGKLASEASLKNLLAQYDLYCQQYEALEQLMLELLMQVPNANKLLDIKGVGLTTAATFVGEVGDIIRFQDPRQIQKLAGYNLVANSSGKHKGKTTISKRGRKRLRHSLFFAMIAILAHNPEFRSLHQRNLTRENNPLNKMQSIIALCGKLIRIFYALLSKGVDYDPEKMLNDIHQSMQQAA

SEQ ID NO: 504177 - protein, 349 aa, unidentified
MDRTTYGLDIAKNVMQLHWVEIETGEIGRKKLARAKLSDHFARLQPVRVVMEACGSAHHWARVLGALGHQVELLPARQVRAFVRSNKDDAADARAIWLAAQQSDIRRVPIKSAEQQAVLSLHRTRQHWVSVRTATINALRGLLYEFGVVLPGGRHAGLKALGAHRAQIDARVPATMQRLVDEQLATLEHIERSIEWLEAEIGAVQKQLAEAIKLRKVPGIGVLGATALAATLGDGSGWKSGREFSATVGLVPAHSGTGGKARVGHLSKRGDPYLRTLLIHGARAVIERGKDKPKWLEQLLARRPHNVAVVALANKMARTAWALVAHERDYQREWKSTPPKGCTAQARAA

SEQ ID NO: 504178 - protein, 426 aa, unidentified
MRSAGRAIGLDVHRDFCEVAIAHDGEVRSAGRVDTTPEQLELFGSSLDPRDRVALEVSGSAWEVARILERHVARVVVVSPADTGIRQARAKTDRLDARTLARLLAAGELDGVFSPDERCRVMRRRLSRREQLVRARSRAKNEIHAVLVRRLVGRPPVVDLFGVKGRRWLAQLELPLEESETIGACLRHVEFLDSEIAAVERQIAAEALDSPEIRRLMTVPGVNVICAATFMAAVGEIGRFGTQRQLVGYLGLDPRVYQSGSAPATSGHISKQGSASARWALVEAAWSVVRQPGPQHAFYQRVRARRGHGIAVVASARKLVCLFWFLLTRGEDYAHQQPSLTAKKLRLLEIRAGARTLKGTPTGVWATRQAMRESERRLAEQAEASYKQMVRDWQAATPKKVGASVTPGRASQKPSKGKVARQTTSP

SEQ ID NO: 504179 - protein, 359 aa, unidentified
MVPIGVDVHKRRCKVVEFSDSKVKVRKPMENTREEWLELLAELPPDAEIALEVSTAGYFAMSVLEEAGWGERAHWVHTAGIDSPRKQKCDRLDAERLARKLAVHHLDPLPEAWFPPSEIRELRLRARQRCWLARLRTQAKNRLQSLLEMHGLQPPGSDPFGRRGRDWLDQQKLPAALSESVPQMLRLVEVLGKELETSEGYLEGVESQFPELSLLRTIPGIGPLLAPVIWSEIGCLKRFTSASALVNHTGLVPSLYESAEVSVQGHITRQGPRWLRWALITAANVAIQHRNPLARRYYRLRRNKKKPNVAKTAIACSLARCIYGVLKHRSPFREERWGRKVGALEQEACGSAGSTKTVL

SEQ ID NO: 504180 - protein, 338 aa, unidentified
MIGVDLAKAVFQLHAASMTGQLRFCKKLSRQSFLKFMAEQPRAVVVMEACGSAHYWAREMTSLGHEVKLIAPQYVKPFVKRQKNDAADAEAIVIAAQRPEMRFVEPKSAEQQGRAMLFRARTRLVQQRTELVNMLRAFLYELGHVVPQGINNVSRIAAIITEPNSDLPEIARIECRDLLEQIEAMTVRIATSDRRIKDLAGQADMARRLQTMPGVGPMTALAVEAFAPPMESFKCGRDFAAWLGLVPKQHSSGGKTRHGRVSKAGQSDIRQLLIMGAMSRLNWMGRKSISETSWLARMLARKPRMLVAIALANKMARMIWAMLTKQEDYRTPATAIAA

SEQ ID NO: 504181 - protein, 353 aa, unidentified
MIVIGVDPHKSTHTAAVVDPVRNTDLCSLRIDATLAGYRRMLAWAKQWPQRQWAVENAEGLGHHLAQWLLARGEVVLDVPSTATARVRELSRGARRKNDRIDAAGAACVAAAQGDARSVVREDHVDALGLLDERRMNLSQHRTRAINQLHRLLRELLAGGVATDLTAAKAAAALRGFRPRSTPQRVRLQLCKELIADIRRIDQQLADNQAQATRLLDEHGTRLREIDGVGPVLAARILGRTGHVTRFATAAAYATYNGTAPVEVASAEHQCHRLNRYGDRQLNSAIHTIAIVQVRMRDSAGRRYYDRKIANGKAPRAALRCLKRHLSNQLWRTMIADEHRHRDKPNNQSAKAS

SEQ ID NO: 504182 - protein, 322 aa, unidentified
MSVTVLGIDIAKQKFDVALLADGKTKHKACKNSVEGFEILMIWLEKQGIKKVHACLEATGNYGEALAMYLHEAGHAVSIVNPARIKGFAQSELIRTKTDKIDAGVIARFCLAMKPETWVPPASEIRSLRALVRRVDSLIGMRSQEKNRISTTHESVIVLIKEHIVYLDQEIEKIRKQIADLIKQNPHLKQRKDLLDSIPGLGKATIPHLLAELDNLDKFAHVREIVAFIGLAPKETLSGSSIKGKPRLCKIGHARLRKALYMPALVSIQCNPVMIAFYNRLKEKGKNGKVIVCAIMRKLVHVIFGVLKSGKMYDPNYKPTFA

SEQ ID NO: 504183 - protein, 334 aa, unidentified
MQNITLIGIDLGKHSFHIHCQDKSGKALLRKKFTRTKLMQFLATCPPSVVVMEACAGAHFMARRISDFGHETKLIFPQFVRPFVKSNKNDFVDAEAICEAASRPSMRFVQPRTEPLQAMRALHRVRESLIRDKVKTTNQIHGFLLEFGISLPTGDAVIKRLSLVLAEHEIPEYLSRLLVRLHTHYLYLVEQIAELESELSQSINADDTAQRIMTIPGVGPITASLLSSQPGDGKQFSCSRDFAASTGLVPRQYSTGGKSTLLGISKRGDKNLRRLLVQCARSFMMRLERQHGKLAEWVREQLNKKHSNVVACALANKLARIAWVITTQQKEYQA

SEQ ID NO: 504184 - protein, 412 aa, unidentified
MEQIYERVAGLDVHRDSVSACARTPGRRGGNHVEKARFATTTAGLVELGMWLAEQDVAVVGMEATGVYWKPPYYALEGQFEVWLCNARHVQNVPGRKTDMSDAEWLADVVAHGMVRPSFVPPPAVRQLRDLTRYRKRQVDTRVAEVQRLEKLLQDAGVKLSSVASEVLSLSGRRMIEALIAGERDPAVLAEMAIGRMRNKLPQLTEALAGHFGTHHAVAARQILAHVDFLDESIAAVSVQIETLTEPFKAAKILLTEIPGISRISAEVVIAETGADMSRFPSPGHLASWAGLAPGNHESAGKRRRVGTGQGDHWLRRVLIESAWAASRTKGSYFGAQYRQIARRRGPNKAAVAVAHSLLDVIWHVLSTGERFEDLGDDYFQKRHDPDKETRRLLRQLERLGHTVTVTPNPAT

SEQ ID NO: 504185 - protein, 408 aa, unidentified
MNTLYVGIDVSSKSNVVYLMLPNGDKHSNFSVANSHEGSTLLVKKIYSALTSHSLDTVLIGLEATSVYGDNLVYFLREDATLAPFNRKIHVLNPKQVKKFHDTYNDLPKNDYVDSFVIADCLRFGRINKEVYMGDYRYKALQNLTRARFFAVQNLVKEKQRFMNVLFKKYSTMTQEKVFSDTFSTTALAVYDEFESAEALANMDLHELTDFIIEKGKNRFPDPDAVAKAIQKAARSSYRLPKTVNDSVNQVLSISITSMKALESQIKEFDKAIKAQMELLPNVLISIPGIGPVYSAGIMAEIGDINRFNSQAALAKYAGLAWKQHQSGGFEAEVTRLIPSGNRFLKYYLCEAAFSLVRCDKEYSDFYHLKYKEVNRCQHKRALALTARKFVRLVFRLLKDNRLYCPAK

SEQ ID NO: 504186 - protein, 402 aa, unidentified
MNCVGIDVSKGKSMIAVMRPFGEVVVSPFEVRHTANELSELAGLLKSLDGETRVVMESTGNYHTPVAWLLHDAGLYVSVVNAMLVHDYGNNSLRRAKTDKKDAVKLANYGLDHWLTLPRYVPEEDTRLLLKTCYRQYQQYSKVQTMLKNNLISLLDAVFPEVNRLFNSSPRADGSEKWVDFVSTFWHCQCVSTLSLKSFSARYLKWCRKHGYYFSQEKAFEIHSKAQSCIGVMPRNETTKLLVQQAIAQLKETSAALAALKQEMQSLAASLPEYPVVMEMFGVGSTLGPQLMAEIGDVRRFHSKKALVAFAGIDAPPCQSGQMDIHSRSISKRGSAALRRTLFLVMGIYLQSAPLDEPVYQFMDKKRSEGKPYKVYMMASANKFLRIYYASVTAYLNTLARI

SEQ ID NO: 504187 - protein, 427 aa, unidentified
MPLPLVCLKFGRVVIDVVARYPSGTDDPVKELEAPRLSHGLGEPEARTVAGARTRIVQGRDKEHIMMKNPIAAAVQAALNAERRVELDQPPATLEDEPCSRQNLATTAVQPPLHPECWVGIDVAKAHLDVATWPTQDRLHVTRDEAGLAELIAWLRPRAPQMIVLEATGGLETLVVGTLIEAAFLTAVVNPRQARDFAKALGRLAKTDALDAEMLARFGQVIRPDPRPWKDEDTQALAAVLQRRRQVVEMLTAEKNRLASAHRQIRPDIQTTIDWLEGRLQDLDGDLQRRVRASPVWRERDDLLRGVPGIGPVTATTLLAALPELGTLNRRQISALVGVCPFNRDSGQCRGRRMIFGGRAGVRAVLYMATVSASRCNPVIKAFYERLRAAGKPATVALTACMRKLLTILNAMLKAKTPWQPPEECRS

SEQ ID NO: 504188 - protein, 420 aa, unidentified
MSPLSDQPFTAYVGIDWADIKHDICLQAAGGTRREFDCIAHQVAHIDEWASGLYRRFGGPIAVALELASGPIVAALQKYDFFVLFPINPLTLARYREAFQPSGAKDDPTDAELALDLLLRHPERFSRLRPQSAGMRSLMSLVVQRRQLVGDKTRFANRLCDTLKQYYPQALEWFDDRDTVLFCDFLARWPTLAAVRHASRKTLETFFHAHNCRRARLIGTRLESIHAATPLTEDPGIVAPCRLHVLALVEQLRTVLTAIDRFDREIAALACTLPDYALFHSLPGAGPQLAPRLLAAFGEQRDRFHGADEVQKYSGIAPVTQRSGKKSWVHWRWQCPKFLRQTFVEWAAQTINKSFWAGAYYRQQRAKGSSHQVAVRALAFKWIRIVYRCWQTRTPYDETTYLNALRKRGSPLLENVGLPG

SEQ ID NO: 504189 - protein, 340 aa, unidentified
MEHVAIDLGGRESQICVRSADGAVVREVRWPTARLREFLAGQPSSRVVVETCSQAFAVADAARELGHDVRVVPATLVRTLGVGARRTKTDRRDAQVLSEVSCRIELPSVHVPRAEARRRKTGCGMREALVAARTQLINTVRGWLRATSRRPRSGASETFAVRVRELLAMDGIPSFVERQLVAIECLTAQIAAADKELETEAKSDSTCRRLMTVPGVGAVTAMRFVAAIDDVSRFKSAHLLESYLGLVPGESSSSERQQRLSITKAGPRSVRWALVQAAWVLRTRCRTSAAVPLQLWAGEIEKRRGKRIAVVALARKLAGILYAVWRDGTTYSLQRGATIP

SEQ ID NO: 504190 - protein, 315 aa, unidentified
MEAMIERCAGLDVHQETVVACVLFGPLDKKPKISIETFSTTTTGLLALSDWLTTLQVSDVVMESTGVYWKPIWNILEGSFHLVLANARHVKNVPGRKTDVKDAEWLAKLLRCGLIESNFVPPEDIRDLRDLTRYRKKLIHHRTSEQNRIHKILQDANIKLTSVLSDIFGVSGRRILEAILNGEKIETDGLRKMVDWRTKASITDIAHAINGRIRRHHRDMLRYHWEHMSYLEKAIEELEKQIDQLLSPYHKEVELLDGIPGVNKAAAATFIAEMGVDMSVFKSAKHLASWAGVSPGNYESAGKKKRVKPHKVTKL

SEQ ID NO: 504191 - protein, 399 aa, unidentified
MFVGIDWANESHDICAVDPAGKISGRATIAHSQEGLDELTKHLGRWAEQGEILVGIERPEGRLVDRILQAGHPIVLIPTYAMKDLRRRYGVGGAKSDPGDAYVIADVTRTDGHRLRRLEPLSEQTRALRSVVRARGDLVDQRVALGNQLRACLQAYWPGAAVIFADVCSEIALAFVERYPTPDAAARLGEVRLASFLKKAGYSGRRSAAQLLGRLRSAPEGLGGVEAEARADSVRAMLRVMRSLNRSIKDLDRAVVAHLGEHPDAEVFTSLPRSGRINAAQMLAEWGDCREAYPCPDAVSMLGGLCPVTHASGKHRDVSFRWACNKRLREAITTFADNSRHASPWAADIYRRAIARGCDHPHAIRILARAWVRVIWRCWQDRRPYDPALHGAAVLLEAA

SEQ ID NO: 504192 - protein, 366 aa, unidentified
MFSVSQLRGPIHLGMDVAKDAIAVGVLGWGEEIPVVDRIFHDEASVRRLVARLGDPTVLRACYEAGPTGYELYRLLVSLGVRCDVVAPALIPRRAGDRVKTDRRDAQRLARLHRAGELTAIRVPSPAEEAVRDLCRARADLVADRRRVRQRLKAFLLRHGRVYRGGRAWTQQHQRWLAAQSFDDSALRLTYAHYRSVLEARDGELAAIEADLMGWCDREPLSDTVHRRAAYRGIGDLSGLVLAAEIIDWRRFATAPLFMGFTGLVPSEYSTGEATRRGHVTKAGNRSVRTTLVEAAHAYRHRPAVGATLKTRQRRVEAVTVARSWTAQQRLCGRYRRMSAQHKPTGVIVTAIARELAGFCWAEMTS

SEQ ID NO: 504193 - protein, 415 aa, unidentified
MDVLVERCAGLDVHRDTVVATVRAPGKRKGSRSHETRTYATTQRGLADLGDWLACQQVELVGMEATGIYWKPVFTALEDRFTCWLLNAQHMHNVPGRKTDVADSAWIAQLVEHGLVRPSFVPPREMRDLRDLTRSRTTVVQERARMIQRLEKVMQDAGIKLTSVASQAYSKSARAILEALVAGERDPRVLACLVKGRMRSKQELLEEALAHRFRPEHHGVLVRKLLEHVDTLEAAVADLDAEIARRLEPHREVVELLCTIPGVGAKTVQVLIAEIGLDMGIFPTSGHLASWAGICPGNNESGGKQRSGRTRPGCKWLKQALTEAAWGAARSKGTYLAAHHAQIRGRSGRYKAIGTTRHDIIVAYWHIVRDRVPYRELGADWTVRRYSPERRAQRLIAQLEDLGLVVTTEPAGPAA

SEQ ID NO: 504194 - protein, 414 aa, unidentified
MTDERKWYVGVDWGSESHLVFLADDDGHKVGKRIFKHGGEGLAEMATWLMATSGASEPSQINVAIEVPHGPVVETLMERGFKVHAINPKQMDRFRDRFTLAGAKDDSRDGEVMSSALRTDAHCFRLLALADPVVVELREWSRIAEDLGGERNRLTNRFREQLWRYFPAILELEADLASEWLLDLWETVPTPHKAVRIRDTTIAKLLKRHRVRRFDAAQLLGVLRAPPVRVAAGTAEAASAHIATLIARIRLVNRQLKQAHQKLDVLTARLVPTEEAEPGQTKQHDVEILASLPGVGRGILATLLAEASDALQRRDYTALRSLTGVAPVTKRSGKSCIVVRRYACHGRLANAMYHWARTAIQHDPTSRSKYAALRSRGHSHARALRSVADRLLNIACAMLRSGTTFDASIPKQTA

SEQ ID NO: 504195 - protein, 412 aa, unidentified
MDVLYPCCAGLDVHKDSVYACVRRVGPGGAVRETVKVFGTMTPELLQLADWLAGEGATHVAMESTGVYWKPVYYLLDEHFELLLANAQQLKRVPGRKTDTQDCAWIAKLLQHGLIAASFVPPEPQRDLRELCRQRVQLGRQKAAASNRIQKVLEDANLKLGSVASDVLGKSGRAMLRALIAGETDPEKLAALALGRLRKQLPRLRPALTGRVTEHHRFVLKLLLDEVEMIEGLVIRLEDRIGAVLGPFAEAVRRWMTIPGVDVRTAQAVAAEIGTDMSRFPSECHLAAWAGMCPGNDESAGKRRSGKTPKGSPWLKRALVQAAWAASHTKDTYLSAYYRRLAARRGRKRALVALGHTILVIIYHLQRNGTDYTDLGGDYFERRDKDKLTRRLLRRLESLGMKVTVESSEQAA

SEQ ID NO: 504196 - protein, 318 aa, unidentified
MNETLNTPRFVGIDVAKDEVVVATYGDTATRSLPNTATALKAWLDTLPPGSGLGMESTGGYHELLAGLAHAAGFAVYLLNPRDVRYYAHALGARAKTDQVDARLLARFIAHEHERLHHWQPLTPIQRHIDTLLKRRAALVRSQGAIRQTMEHVAGLRAETRTTLRAIDALLAAIDREIEQTLKQEPELQAQAACIRSVPGIGLLTGSALLNLFTRLPVARADAIVAFTGLDPRPCDSGHKRGRRRLSKRGPGELRRLLFNAAMSAARTRLWRPYYERERAKGLPTTAALVVIARRLVRIAYALFKTQTHFSPERMKIA

SEQ ID NO: 504197 - protein, 421 aa, unidentified
MIEEIAEEPAELLQRAAALDIGKASLVCCVRVPHESRPGARRQEVRTYDTVTPALLELRDWLICQGVTRVVMEATSAYWKPPFYLLEDDIECWVVNARDVKNVPGRPKTDKLDAVWLCKLAERGMLRPSFIPGRPQRQLRDLTRYRRTLVQERSREKQRAEKLLEDAQVKLSSVISDIFGVSGRDMLAALIAGQRDPYALADLARKSMRAKMSVLRQALTGHFTDHHAFLLGMMLDRTDALTAQIDALTARIEEAIAPFAAQIAQLDEIPGVGITTAQEIIAETGTDMSRFPTPGHLVSWAKFAPKARESAGRAKAAATGKGSPWLGGTIGEAAVSAARTQTFLAARYKRIVRRRGKKRALVAVGNSILTITWHLLSDPGAHFTDLGPDWHDRLAPQRRKRQLIAELERLSGKKVTLHDAA

SEQ ID NO: 504198 - protein, 344 aa, unidentified
MNSMHYIGFDIHKKVISFCEKRIDGTIVEQGVIRATRASLDDWLSQRRSIWAGAMEATLFTGWIYDYLLPHAVELKVAHPEMLKAITAAKKKNDAADAEKIADLLRCNLLPECYMAPEEHRNLRRILRYRNLLVREAAKMKTKTATLLMEVGAEYNKRRLHGGRYFKELLNSLEYIPESVLNLLFMSRSSVEMFDKMQKTLVSALLDDSKIRRRVDLLRSIRGVGEVTALTWVLEIGDVNRFGKISQAVSYCGLCSAQKESAGKEMRGPISKKRNKHLQTVLIEAAKLAPHWNPQLAEVYDREISKGHRNRATLAVARKLVAYMLFVDKNREPFTPREVLDEAA

SEQ ID NO: 504199 - protein, 364 aa, unidentified
MNKCHLNTELSSLEGTRSEFNRSKAVIKLGIDVHQDFYVVVEQMEGTNPKPAQRFQKQVFLHWAAKLSKSGSKVHAVYEACGFGFGLQRQLTALGIRCHVVCPQKLDERNKRVKTDGLDAKALCLKLDRFVQGNREALALVRVPTEAEEQKRAIHRQREQLVKARKGLEAQGRSLLVNHGMEPASNWWKGRTFAQLQVPEWMKELLQNSQPILLALEEKIRALTAQLQAAAISKQPRGLGLLSSVVIDREIGSWTRFKNRRQVGSYTGLCPGEYSSGNTRVQSCVTKHGNPRLRAALVETAWRLVRFQPNYKPVLKWRKILAKGALATGAARKKAIVAVARQLAVDLWRIRTGRVATETLGLIN

SEQ ID NO: 504200 - protein, 404 aa, unidentified
MSVHVAPVTSSTIVVAVDVGKTSAMLSVTDGARKRVLGPVEFSMTRSGLVATVHRVEAVVVASAQVKVGVEAAGHYHRPVLDYGWPTGWEVLELNPAHVAEQRRVVGRRRIKTDAIDLEAITDLLLAGRGQLITEREVLIGELSAWAGQRSRRVATRSATKNQLLAQLDRAFPGLTLALPDVLGTKIGRLITAEFADPARLCAVGVSRLIRFAAARDIQLRRAVAERLVTAAREALPTRDGVVARRVLAADLGLLADLDTQIETAERELAALLPASPYATLTSVPGWGVVRVSNYAAALGDPDRWPGPRQIYRASGLSPMQYESAGKRRDGTISREGSVALRRALIDLGLGLWLTEPAAKAYAAGLKSRGKPGGIIGCALAHRATRIAFAMVRDHTSYDPSRWA

SEQ ID NO: 504201 - protein, 412 aa, unidentified
MRRVIGIDVHRTFGEVVIWEDGIVRHAGRVDMTRTALEGMGKSLRSTDEVVIEATGNSMAVSRVLAPFVARVIIANPLQVKAIAQAHVKTDKIDAGTLASLQAAGYLPQIWTPDAETERKRRLVARRYQVVRHRTRLKNEVHSILHAHLIPKCPHADLFNARGRAWLAAQQLPDDERAAIDRHVRELDRLAEDLALLDREIAQDAIDDSAVNRLMTITGVNVAVAAGIVAAIGDIRRFRSPQKLVSYFGLNPRVRQSGLGVAHHGRISKIGRSHARAMLVEAAWAAAKAPGPLHAFFVRIRARRGHQIAAVAVARKLTVLCWHLLTKDEDYLWARPALVASKTRAMELQAGHPQQKGSRRGPAYAYNVKALRNQEMLVATQAERSYERFTAQWEPRRPKDVARGRLKPAGRK

SEQ ID NO: 504202 - protein, 478 aa, unidentified
MNNELFVGCDVSKGYADFLPVRPDGTPMEAAFRLEDTPAGHGQLKAIIEHWISEGIEHLHVGVESTGGYENNWVRLILDRTGELPVRIARLNPTGVRSLRKAGLIRTVTDAVSAEAIARYLFVFPEKVTWLTPRQAPGNEFAAARKFQRGTATLDKQRQQLASQLEKLMYEHFSPLLVYARNGIPRWLITLLSKYPSPRSLRRAGKKRLSAIKGITVEKAGAVLDKLSASKHEPEFLDRENIRQTAGQILHLYGLIEQRHKLLQAEYIDDWQVGLLMSVPGIGLQTAVLLRIEIEDVERFSTAKKLATYFGVCPKFVESGDKKGQIRMSKQGRPEVRKALYMSSLSGIRHDENMKKLYHRYRRKGHNHYQAIGVVMHKLLRIVYGILANQTPYDPAVDKANQRRAKQKQRVKKDDQKRIESQQKKRLNRYQKETVDAPRSRRSVQKLRKEQTASQSSTVEECAGSPKAPRIEIYENVT

SEQ ID NO: 504203 - protein, 467 aa, unidentified
MTPHKDYVLDPPPPAPTPLLPPSPVLSDALQVYHPHAAGIDIGEAEHWVAVPPGCDPQPVRRFGTFTADLDTLADWLIDCGVTTVAMESTGVYWIPLFELLEARGVQVLLIDPRQAKRVPGRPKTDRLDCKWLQRLHTYGLLAGAFRPDAHVCVLRSYLRHRQMLLTYAAHHIQHMHKALEQMNLKLTQVVSEITGVTGMAILKAIVAGERDPQHLAKLRNPHCHHDEDDIAKALQGTWRAEHLFALRQAIELYDFYHQQMTQCDQQIKAHLATFGDKSAGQPLPPKAHRHKKTNEPRFDARTPLYRLAGVDLTTIEGIEEGTALVILSEIGTDMTRWPSVKHFCSWLGLCPQHKISGGKVLSRRVRPGAHRVTVALRLAARTLHHSQSALGAFFRRMKARLGTPKAITATAHKLARLVYSLLQHGSAYVQQGLDAYEAQYRERKVTTMAKQAKALGYTLVPLAARG

SEQ ID NO: 504204 - protein, 381 aa, unidentified
MRKVCGLDVHKDNVFVCIDKEKGEKIQFKTGILTKDLDALRDTLVANDVTEIAMESTSVYWMPIWRVLESDFKLYLVNPYAIKQLPGRKSDIKDAEWIATCLRKELIRGSYVPDSTIQQLRQYNRRIFDINKQSVYIQNKIDAALQRCNIRIGNYISNVRAKSYCEIVDMLSEGKTSPELLIVKVHKRTVNKWGRETILAALEGVVNKTDCRILKQLKEELDMLRRHKVECLVMLREICMENYKEQLLDIQTIPGIGEQGAMQIIAETGVDMKAFMTAAMLVGWAGLKPRNDESNGKFKSRSTTHGNKYLRKILIECAWGASRTQGCFFNKFSYHQTMVRKKNRQKVQVAIARKILVVIWHILENGVVYNDIFGKGKAKDK

SEQ ID NO: 504205 - protein, 312 aa, unidentified
MVTIGLDPHPDSHTVAALDEHGSTLAFLTVSNSAEGLAQLHCFALPFSERRWAIEGAANRYILPFVNELLGQGEVVHHIPPNLTSQYRARLSRKKNDVVDAQNAARALMANPELPTFQPGEQQRELQDLSRTQRRLSEQLKANKMALQALDEASSVRPALTQVIQVLEIQLTKLAEQMKTLVKASAPTLLEILGVGPVVASVILGEVGSIRRFANEGQFASYCGAAPVERGSGKNSRMQLNHGGNRRLNWALHIIALTRSRCDERTKVLLAKLKAQGKTQRASLRILKTYIAREMFRHLNYSLSPGLAGMMT

SEQ ID NO: 504206 - protein, 374 aa, unidentified
MDTIYIGVDFHARQQTICYLKTETGELVICELKHQDKQEVQAFYAQFKGHVIVGLEASGYSPWFERLLEELGCEVWLGHATEIRRRARWRQKNDRRDAELILDLMLHNEFPRLHRPAVQSREVLRMLRYRQKLIKIRTMSKNSLQALALQAGLAKGSQLFSKAGAQELRTAVMSPVMQWQREHWLQLLEPLNQQLLETMVWCKAQSKGDVCVTRLRTHPGIGLLTSLCIVHTLQPVSRFRNQRKVAAYAGFDPVERSSAERKCFLGISKAGSRVLRYLLVEAAHTAIRKDEDLKRFYKRLAERRGRPKAKVAAARKLLIRAYIMLRDEIDYAEFRRRAVAARLARGGQRPNVPEVLIGQPASAECQELVHSSEK

SEQ ID NO: 504207 - protein, 337 aa, unidentified
MIHVGVDLHQAFCYMTALDSTGRSLKAGPVANEPRALRRWLRGFAEPVAVAVEACSFWPAFKDAVEKEVEQIHLVHPQRVKAIAAAKLKNDRVDSHTLAHLLRCDLLPAAWMADRATREKRQLVRLRISLGQHRASFKNQAHAILHQHGLRSPVSDVFGKKGRAWLKKAVLPAAARGSLDTYCALIDEVSQHIQVQDRQIGVIAQGDPRSRWLATIPGIGKYSAMILLAEIGEVQRFSTAKALFSYAGLVPWVRESAGKKSRGGISRCGSPRLRWVMVEAAHTAVRCSPAARRYFERLRRRKHPHVARVALARKLLGAAYALLRDGVCFDESIFAAV

SEQ ID NO: 504208 - protein, 300 aa, unidentified
MSAERANDCYVALELSQRTWLIGYLLPGSDTVQTTAVAGGNAEALLSALGRIESLARARSHAGCALGSMRVCFEAGYDGFWLARFLIDRDIDTTILDPSSFLVSRRGRRVKTDRVDVEAMVFTLKAYLLGDRSVCRPVRLPSVAEEDAKRLSRERTQLKKERTRHVNRIRALLVLHGIRSVPGLWGGRWKEALSNIRTGDGRELGRFIFRELCRQFERLDLVHSQLKSLEKERIQACETEGAINGNAKIRVLKQLDGIGEAGATQLVVEVFHRTFKNRKHLASYLGLSPSPYSSGDVHRD

SEQ ID NO: 504209 - protein, 419 aa, unidentified
MSFKILKNNCCGLDVHKTWIYACIGITDSFKRTEYKQARFSSFTKGLQELCLWLAKYNCIDVCMESTGKYWIPVFNVLEKNNIFVPLAHPKYTKPQKGNKTDRKDAKWICDLYMCGMVKPSFIPPADIRQLRDLVRYRFKLTCMITGEKNRAHNCLTVSNLKLDDVFSDIFGKSSRSITEQILQHPGEVFDVAPFVDSRCKTPIEEIQAAVDGAISHEQAVKLRQCLKHIDELEMHKAEIEREIFRLSQKYESVLGLIRTIPGFDKNPLTAIQVLSEIGADMSVFPTAKNLVSWAGCCPRNDQSSRKIKSTRISRAGSYFKPVLVQIANALIKSKKHPEFTTRYRRIKARRGHKKAIIAICRMILTAIWHILTDLKPYTPEGFLESRPVNKEKVLTISQALNLIKQRGYIIKDDVGPVT

SEQ ID NO: 504210 - protein, 385 aa, unidentified
MQHITKFDRLFVGIDVHKDNHAAVVVDCFSQPLAELKFENSHQSFKKLISQIQTLTRERRDKPIFGLEDTYGSGEFLARFLWNSGFEVKIINPVLVRRERNYETHPEKSDLRDALGVARVLIQRIDTLPTYSITESAEIARDLHALVKDRETLIVEQTRLKNQLHRYLHHSYGSPYRTIFKNPFSKKALTFWQTFPSAQVLACSRRQVAKPDWIKGVPVGELPFASTACKHQITRKARRLLAIREELSEIETELQILLGKTGQYLHTLSGCGPVLAAVVLSEIKDISRFRSPAKLAKYAGLTPRAFESGKQKRHIRTKSGNRRLNCALFRIALTQISNQGIPKAKTYFQKKIREGKSKRHALLCLERQIIDIIWSMLKDKRPYYP

SEQ ID NO: 504211 - protein, 408 aa, unidentified
MEVVYRCCCGIDVHKKIIVACLDQGGEQSLREFGTTTSEIKSLATWLTESGCEMIAMESTGVFWKPLYNLFELMDLDAMVVNAAHMKALPGRKTDVKDAEWIADLLRHGLLKASYIPSREQRELREITRYRKSLTEERCRETNRLQKILEGANIKLDSVVKDINGKSARKLLEKIIEDDVPTSEEEVSKMVHGRMRSKLGQLVTAIEGITTPLQRKLLAQVIDHIDDLTRRIADLDKLVQDYMDEYEAAIAALCDIPGIARRSAEVILAEIGLDMSRFPSAAHLCSWAGVCPGNCQSAGRRKHGKTTKGNKPLKTILTQCAKSARSVKGSYFSAQYQRIAARRGKNRATLAVTHSMLIAIYHMLKNSAPFRDLGSDYYDSFNRDRKIHSYLKRLKALGWEPDALPGSA

SEQ ID NO: 504212 - protein, 424 aa, unidentified
MGSVGEVGIKMDVVYQRCAGLDVHKKTVVACRIIPNAKGDWDKQVRTFGTMVDELFNLADWLRAGEVSHVAMESTGVYWKPIFNILEGDFQVLLVNAKHIKFVPGHKTDVKDAQWIGELLQHGLLKASFIPPAPQRDLRELVRYRSHLIDERTREVNRVHKVLETANLKLASVASDIMGVSGREMLAAIIAGQTDPTALAQLAKGRMRPKIAELERALKGYVQDSHRFLLRLHLEHIDDLNAKLVELEEEIGKHIPPFDDNNLLERLQTIPGVGPKVAQSVVAEIGVDMSRFPTAGHLASWAGLVPGKNESGGRTHSSRINKANRYLKAVLVEAAHAIGRTRDTHLATQYHRLAARRGKKRAAIAVAHSILIIAYHIIQRGTSYIDLGANYLDERKAETVQHQLVNRLEKLGFKVILETQTQAA

SEQ ID NO: 504213 - protein, 344 aa, unidentified
MEHYAGLDVSVKETSVCIIDAAGKVTHEVKVATEPEALRAVLLDNTFTIERIGLEAGPLSQWLYSGLAEAGLPIICVETRHMKAALSAQLNKSDRNDARGIAHMMRVGLYRPVHVKTLTSQKRRMLLTSRQLLQAKAIDIENDLRGTLRNFGLKVGPVGTSKFEARICELVADNPDLAAIAEPLLIARRVLREQLAVLHRRLLAGVREDEVCRRLMTVPGIGPMVALAFRATVDVPARFKNSKAVGAVFGLTPRRHQSGEVDRTGGISKCGDAMMRRLLFDSAHVMLTRTIRWSWLKAWGMKIARHRGMKRAVVAVARRMAVIMHRMWADGTEFRWTNTTAAAA

SEQ ID NO: 504214 - protein, 372 aa, unidentified
MEERSKVHVGLDVHKDSITVGAAEAGPERGRVVGKTAHDVNKLLKMLTKLGQPEQLHIVYEAGPTGYGLQRALQARGYVCEVIAPSQMPRRPGDRVKTDGRDGVQLAECSRAGQLRAVWVPDPADEAIRDLARAREDAVNSRTKVRQQLKGFLLRHGLRYGGKTSWTIAFYRWLAMLSFEAGASQTAFTEYWLAVQAADERVKRLTQALEASVTGWRFEPVVAALQALRGIDVVSAIGLVAEIGDLSRFDHPRKLMGYLGLVPSEHSSGDRVSRGSITKTGNAHARRLLTEAAWNYRFKARIGRQALRRQETLSEQVRAMAWKAQLRLTKRFAVLLGRGVQANKVCVAVARELAGFVWAIGMAATHEQSAQH

SEQ ID NO: 504215 - protein, 530 aa, unidentified
MAREASTLSLVTCLPGFPGVVLIPLGRLRTSPILLLARGALLSHDQYPQPKETSMVVPNQEPKKPAKRKKSTKPKKSPQRSIPVPVPASTAALNVINPDAAGIDVHSNMHMVCVPADRDANPVRQFGANTADLHEIAAWLKKCRVRTVALESTGVYWIPLFELLESEGFEVKLVEPGQLSRCGARPKTDVLDAQWIQRLHSYGLLRGSFRPPDSILALRAYWRQRQMQVRYAASHVQHMQKAMEQINVKLAEVVTDITGLTGMSIIEAILGGERDPVKLAKLRDERCHSSEDQIALALQGTWRPEHLFELRQAYELYQFHHQQITECDNQVQAELAGLPNRAGEKTRTHKPRKRGRKSNDLRFDATGPLFKALGVDLTLIDGIDVGTALVILGEIGVDVSRFPTEKHFASWLRLCPPQDESNNTKKRRRRRKNTSRVATALRLAARSVGKTMTPLGLFYRRIRSRIGALGAVKATAHKLACLIYRMLKYGHEYVVQSMEEYEAKTKANMIKVLQRKAMAMGFQLTPIPTQ

SEQ ID NO: 504216 - protein, 337 aa, unidentified
MTIKVLSIDLGKRFFHIYAVDQHGKLVVRKKFKRKELLSYLSNLEPCLIGMEACGGSHYWARKAKEFGHTPKLMSAKFVKPYLKSNKNDFLDAEAICEAVQRPNMRFVTARTPEQQTLGAQVKLRESFVRQRNAAINQVHGFMLEFGIEYPKGKKTLLRLNEIISNHEGEIPASMIVMLYHIVDEYRFLCDQISDLEDEMQALVSADERGQRLLEMQGVGLITAACLLAWVGDAKQFKSGRDLAAWIGLVPKQYSTGGKTTLLGIGKRGHRRLRCNLIHGARSSLQWHIDKPSRWNEWAKALKATKRPNVVAVAMANKMARMIWIILARNERYEMVV

SEQ ID NO: 504217 - protein, 389 aa, unidentified
MKIYVGIDIAKLNHFAAAISSDGEIIIEPFKFTNDADGFQLLVSKLESFDKNSLIIGLESTAHYGDNLVRYLVTELYQVCVLNPIKTCQMRKNNVRKTKTDKVDTYVIAKTLMIQDNLRFVSFFDLDMMDLKALGRFRQKTIKQRTRLKIQLTTYVDQVFPEIQYFFKSGLHQHAVYALLKEAPSPKETASMHMTHLANLLKVNSHGHFTKELAKELRVLAQKSVGANDSAISIQITQTIQQIELLDSQLEKIEAEMTDIMKFNDSVIMTIPGIGYINGGMILGEIGDIHRFSNPNKLLAFAGLDPSVYQSGNFQAKTTRMSKRGSRVLRYALVNAAWNVVRNNATFKAYYDAKRAEGRSHYNALGHCAGKLVRVIWKMLTDEVEFNLE

SEQ ID NO: 504218 - protein, 391 aa, unidentified
MFLLGIDIAKLNHVASCIDSSTNEVIFSNFKFKNDFKGFSALLNKIKSFDAKNLIIGLESTSHYGENLINFLFRHDFKVALINPLQTSHLRKANIRDAKNDNLDSLNIAKSLLFTKLNFVSKKNIECFSLKKLTRFRSNLIKQRSKAKIQLTSLLDLLFPELQYLFKSKIHNKAIYSLLKKYPSTEEIAALKDDEISNLLYASSKGHFKKEKSIELKSLAKTTVGIKDTSISLHLIQLTELIELYTKQIKDIEIKITDTVNKLDTTLLSVPGISIIACAIILGETSNFENFSSSKKLLAFAGLDPKIRQSGNFNASSCRMSKKGSPYLRYALIFTAWNIVRHSEKFNKYYSLKRSQGKSHYNALGHVAHKLVRILFTLIKKNISYQEEKLE

SEQ ID NO: 504219 - protein, 337 aa, unidentified
MNRNVVGLDIAKQVFHLFMMLEGKAIKRKLKRSELLEFIAQLPPSLIALEACGGSHHWARSFQALGHEVVLLNARYVKAFVVGNKNDFNDAEAIFTAARQPNKRTVAIKNMEQQDLAMVHGIRQGKVEERTALINQIRGHLAERGLVLPKSAHQVRKQLPLMLEDAEKQLSTLSRALFAEQYQALVAIDEAIKTMDRQIEALCRQNALSKRLIAIPGIGPLTATLAAADVGDGKGYTSSRDYAASLGVVPRQHSSGDRQVLLGISKRGNRRLRTLLIHGARAVLKYCGDKSDPLSRWLQALIERRGFNKAAVALANKNARIIWALATGSGEYAAQVA

SEQ ID NO: 504220 - protein, 442 aa, unidentified
MNLRLGVDVACRAARQASCTDDTGKFLWAGHRFRTDPGDLDALWAKLPAGAREVTVIMEPTRNAWVPLAAWFRRHGATVVMVPPEQSADLRDYYNKHAKSDRLDSKVLARLPLLHPEGLTAETGIGPGDALKRAVKIRSGLVHRRTTSMQRLDCPRADGPSLGWRDRVGHVQDSIPVAVPLRQPAHRPQLGKRRLTDFLHRSSRGAWAEERATEIIAAATTTIELWGDEFDFGELAADIATEARLALSLCEEISMMDKRIGALYAKADPAGIVRSAPGVGVVGAQRIHGRLGDAKRFRNLAGVRSFSGLVPRRDDSGHTATAGGPTKAGDACLSEALFTSADHARKIDPRLAQRYHRLMTVEGKHHTSALCHIATVLLTRIAACLRADQPYQLRDIDGTPITETEGRVIVADRYTVPKATRTARRAATTTSRQLVSPAFLGQ

SEQ ID NO: 504221 - protein, 343 aa, unidentified
MKHIGLDVHSTTTVVNVLNDRGRSILRRQVPTREADLVDLMQSIPGPKRVALEESQMADFVSRSIGPHVTEVIRCQPQHNRLISESEDKCDQRDAEKIAELLFLNKLKSVHQPSWVYRQLREGIRSYWTSSRDLAVAKNRLKAFYLFNGIHCTGDKAYSNRQQEVYRTQLKNRSGNLDLLDLKYRWLESGREQKAAHVRQLRNVSAAVKDDVTRLMSIPGIGFIGACTLVAYLESGWRISNKRKLWQYCGLSIRRHESNNKGHRGASRKGNRYLKNVLATAVACIAGRRQAENALAKAWHAGLAQGIESARLRRNMARTIVVLAHHLLRFKETYRDDRVMTRH

SEQ ID NO: 504222 - protein, 331 aa, unidentified
MTPAAPTPLFVGIDVAKATLDVASCTAAGAPAALAGPYPADPAGLAALVAACHAQPVALVVLEPTGGYEAPVVAALAAAGVPVAVVNARQVRDFAKALGRLAKTDRVDAAVLARFGARVQPAVRALPDATTRELDALLTRRRQLLEMLHAERQRAQQARTAAAPAVVREDVAAHVTWLQARLDAADAGLRALIEASALWRVQDALLQSVPGVGPQLSVTLLAALPELGRLDRRQIAALVGVAPHACDSGTRRGRRHVWGGRGDVRRVLYMAAHVAARFNPVLRAFHARLRAAGKPPKVALVACMRKLLTILNAMIAHQQPWQPRAAAAAGA

SEQ ID NO: 504223 - protein, 410 aa, unidentified
MERVIERCCGLDVHKKTVVAGVRVPGGTGGRDQHVRTFGTTTAELLALRDWLEAYGVTHVAMESTGVYWKPIFYVLEDAFTCVLANAAQIAQVPGRKTDVRDCVWIAQLLEHGLVRGSFVPPVPIRELRDLTRYRKALIHEHTREANRLQKGLEDAGIKLASVASDVLGVSGRAMLDALLRGTTDPDVLADLARGKLRKKLPALRQALAGRFRPHHAFLVSQLLAHLDYLDEVIETLSTHIAEVIAPFAEEVSRLDTIPGVNRRTAEVLIAEIGVDMGVFPTAAHLASWAGLCPGNNESAGKHKSGKTRKGNRWLRGALIQAALAAGTRSTKGAFAARYRRVMRHRGHQKAVVAVAHAMLVTAYHLLARKTTYHDPGADYYEHRHAERVRHRAVQLLERQGYRVILEPAA

SEQ ID NO: 504224 - protein, 286 aa, unidentified
MKITTIGIDLAKSVFAVHGVNEHGREVLKKVLKRDQVAKFFANLQPCLIGMEACGSAHHWARKLQGFGHDVRLIAPQFVKPYVKTNKNDAADAEAICEAVARPNMRFVPVKNVEQQAVLAQHRVRQGFIKARTAQANQIRGLLAEFGLIIPQGIANIAKRVPELLEDATNELPGSFRLLVQRLMEHLKELDRQAGEIEAQIVTWHRDNELSRKLAEVPGIGPITASALVATVSDAKNFDNARQLAAWIGLVPRQNSSGGKNVLLGISKRGDTYLRTLLIHGARSVI

SEQ ID NO: 504225 - protein, 408 aa, unidentified
MQVLYTRCAGLDVHKDTIVACVRCVSPPMHQEVRSFGTTTTQLLELADWLGEHDCTHVAMEATGVYWKPVWHVLEAEFELVLANAAHIRNVPGRKTDVSDAMWIADLLAHGLIRSSFVPPQAIQQLRDLTRTRKQLVREVSQHSLRIQKVLEDANLKLGSVLSDVLGKSGRAMLDAIVAGQSDPALLAQLAQGTARNKSAELREALRGRITEHHRTMLRLHLQVIDALQRTLAELDAAVGKALAPIRQRARLLTTMPGVSDLTASVVVAEIGVDMTRFPSAGHLISWAGLCPRSDESAGKRRSTRVRKSGTWIKTTLVTAAWAAVRVKTCYLRAQFLRIKARRGAKKAILAVAASMLTAAYHMLRDGTEYNDLGANHFDRQDRTKTIRRLMKRLQDLGCDVPVSVHTG

SEQ ID NO: 504226 - protein, 341 aa, unidentified
MEYCGIDLHSEYSEVCILDEEGEVIETSRVRTARPYLERFFRRDSMRVALEAGGSSPWVSRILESFGHEVIVCSPRRVRLIAESKLKNDKVDAEVLARLVRLDPEFLKPIQHRSEHAQLMRSRLKVRRAMVDARTAWINTVRGLLRSFGYKVAGKAPHTFCQRVDRVKLPPELGAVIAPLLEQLDLLSAEIGRRDEELARVAGGMPEVELLEAIPGVGVIVALYFVLTIEDPERFRHSRDVAAFFGLRPTMRESGSVSHYGRITREGDPEMRRLLVQAAHALLRTRADSELKQWALALAERRGKGKAVVALARKLAVLMHHLWVTGQVYQPFPSSEADAAA

SEQ ID NO: 504227 - protein, 425 aa, unidentified
MYRIAGIDVHKKVLAVVVVEFEGTQQAIQRRKVPYSPEQLRKLAEWFVAGEVEEVVMESTAQYWQALWHTLEVEWQPQRRQRPGAPPKAGTLHLAQAQSNRAPHGRKNDFADAERLVRRLVAEELILSFVPGPEQRLWRTLMRRRTQLMEARSTLQSQVEGFLEQAHVKLATLASDLFGVSMLRILEALGQGECDSQVLLGMVGSNMKTPAEQWMDVLRPCCEWDRHYRLVIGQMVAELRLIDAQVKELENSAAELMAPYQDAVQRLAEIPGMGLVSALLVIAEIGPLAESFPSAGDLSSWVGVIPGENITAGHNYSTHSPHGNRHLRRLLNQVAHAAVKTKGSIFELKFQKFRARMPYKPAIWCVAHFICELLWMILHKGARYEERGPGLIAQNQRKRMNRMRRHLKAHGYVVLPPNTPQPSVT

SEQ ID NO: 504228 - protein, 307 aa, unidentified
MTAVGIDVGKASLDVAIEGRPAVMRVANSAAGICKLVRQLSGLDQVRVVVEATGGYEEPLLEACCDAGLWVARVNPRQARNFARAAGDAAKTDAIDARLLCLMAGMFAGRLQRYQAPLPWQRELRDWLRRRGQVVTALQAHRQQMAMCPSSIRSLAARTIAALRRELAAIDQQIRALLDAHATPALGSCKGLGPIFQATSLALLPELGALSRRQIARLVGVAPMNRDSGQSSGIRRIRGGRAPVRVALYMATLSAVRWDETMKAHYRQLRARGKLAKVALVACMRKLLTIVNARRRDELLLEAAMPA

SEQ ID NO: 504229 - protein, 345 aa, unidentified
MKKLIAGMDLHSNNVVIGLMDMDGQRVAHQKVECKLSQVLKFLAPYKKRLEQIGVESTYNWYWLVDGLQAEKYPVVLANPAGMVQYKGIKHADDTNDAFFVAELLRLKILPTGHIYDAPLRPVRDLLRRRLTLVHHRTALMLSFKSLYTRTTGGEMTLGELKDLNVKGAQELYEHPANQLIAGMQIQHIDELIQTIEKIEKVVLASARELPYYSKLATLPGVGRILGMTITLEVGEVTRFAGPGNFASYCRTVAAQRVSNSKKKGENNSKCGNKYLSWAFVEAANFARRFDEQCRKWFDRKAARTSNVIATKALACKLAKAAWYLMAEGSEYDSKRMFGQPAKTK

SEQ ID NO: 504230 - protein, 366 aa, unidentified
MKKSITPIGTPVGIDVHKRRCKVVEFRQGEIKVRKPMGNTREEWLELLTELPPEAEIGLEVSTAGYFAMSVLEAAGWRERAHWVHTAGIDSNRRQKNDRLDAERLARKLAAHHVDPLPEAWFPPPAIRALRLRARQRCWLALLRTQAKNHVQSLLEMHGLQIPGSDPFGAAGQRWLAEQKLPPPLAESIPQTLRLRALLAEEIHTSEQSLRAADEQFPELALLRTIPSIGPILAPVIWSEIGTIERFRSAKALANGTGLVASFYDSGEVKTTGPITHQGSRWLRWALVTAANVAIQGRNPFARRYHRLRRSKKANVAKAAIAHSLARCVYGVLKHGCPYREDRWGRKVGALEPETRAGARSTKTAL

SEQ ID NO: 504231 - protein, 400 aa, unidentified
MRAVFGIDVSKTSSEVAILVNGEKVHGYTILNDAIGFNRLLGDLKTVHNPEIIFEATGVYSRRLQAFLEEYSYAYTRLNPLEAKKQLDSLRVRKTDKIDAEKLAKSQLVHNRKPTYVQEEVYQHLRDLSRFYQNMTEDLVRTKNRLHKVLQVTFPELETLLSTPTGEQYWNLVMAFPCKEFVLSLSQSNLCEIIRQSTSKRISEKRVTYLVDKLTKLANQSYCAVKKTSPMLEEVRYYAQELLRLSERRQVVLSDMVALAQPLPEYDILRSIPGIAETTATSIIGELGDIRRFQSTNQINAFIGIDLRHYESGNFLAKEHITKRGNSYARKILFKCIHNIASASHTNPCHIADFYEKRKRQSTIASTKPHTIASIHRLIRTMYYLITHNKLYDYSLTQNR

SEQ ID NO: 504232 - protein, 321 aa, unidentified
MTERSEREVFVGIDVSKRDLQVSIRPGEEEQRNFANTEEGRSLLADYLKALAPRLIVMEATGGIEAKVANVLVEAGLPLAVVNARHVRNFAKAIGRLAKTDRIDASVIAHFAEAVRPEVRPLRGETSQRLHDLNVRRRQLVRMITAEKNRLSRASKWTRKAIQTHIDWLKRELDQLDEEISHLIKSTPVWKEKDAILKSFKGVGDTTSSLLLTALPELGRLSNRKLSALVGIAPLNRDSGQYRGKRSIWGGRKQVRSALYMVALVAIRHNPVIKAFYERLLKSGKPRKVAITACMRKILTILNSMIRDMSEWQPQSPLMSA

SEQ ID NO: 504233 - protein, 464 aa, unidentified
MSKIVPVARKTAAESQDRPRGKGQQFAMAYPDACGIDIGSSSHFVAVPADRDGESVREFRAFTADLQALVAWLRQCQITAVAMESTGVYWIPLYEMLDEAGFEVHLVNARHVKSVPGRKSDVLDCQWLQQLMTFGLLRGAFRPADEVCALRAVWRHRDMLLSYQARHVQHLQKALTQMNVQLHHVITDLMGVTGQAIVRAIIAGERNAEVLAALRDRRIKADEAEIARSLQGSWRDEHLFSSKQALALYDAYAEQIAECDVELERLLGALKAHELPDDGLGRPKRRTPAKNAVRHFDTRSALFEASGVDLTRIPGIDTSTALKVISEVGTDLRRFPTVKHFTSWMGLCPGTKISGGKVLSSATKRCSNRAAQALRMAAQALRRSQSALGAYHRRLCARMDRPKAITATAHKLARLIYFMLTKGQPYVDVGQQYYEDRYRERVFQNLTKRAHTLGFQLIPVAAAV

SEQ ID NO: 504234 - protein, 426 aa, unidentified
MNCTQNYKIDQVTEQTLVVGIDIAKRTHYACFVDDRGRVLRKSFPIFQSKEGFQQLYKAIQGAMQAFGKSEVIVAVEPTGHYWLNLAYFLEEHGIPLVMVNPAHVCRSKELDDNLPTKHDAKDALVIARLAKDGRFLVPRLLHEIEADLRVGSTLKEKLRKEQTAVKNAIVRWTDRYFPEFWTVFRDLGKTALSVLEWTPLPADMAGRTVEELLEVYRQSEGMKCPQKAKIQALINTAKDSIGVTEGTAMARFEIAALVRRYRQLEAEIAALDAELKALVQTTMEYQWLKTIDGLGDATIIDLLAEIGSFAHYRDPRQLVKLAGLTLKENSSGQRKGQKHISKRGRKRLRSVLFRAVIPLIRHNEAFRELHEYYTTRPVNPLTGKQSIVALCRKLLNVLFAICTKKQAFDAERMKQDVLSQVQRAA

SEQ ID NO: 504235 - protein, 412 aa, unidentified
MEVIYPCCCGLDVHKKSITACVLWAEAKGKSRKEKKRFGTFTHDLLQLADWLEKCGVTHAAMESTGVYWKPVWNILAEQFEVLLVNAQHIKAVPGRKTDQKDSEWIADLLQHGLLRGSFVPPQPIRELRDLTRYRVSLVQEINRIANRIQKVLEDANIKLASVATDALGASGRAILEAMLAGEQDAARLAEMAQGKLRNKIPELKLALEGRMTEHHRFLLRELFDHLRFTESKLSEIEKEIDKRMLPFEDKVIRLCTIPGVDRVTAWGMLAEIGMDMNQFPSSGHLASWACLCPGSFESAGKRLSGKMRKGNVSLRRCLSQSAWAISMMKNNYLSALYRRIAARRGAKRAVMAVAHALLEIAYHMLKRKEDYRELGADHFDRIDANRTRRSLVRRLERLGHKVTLEPLAHTA

SEQ ID NO: 504236 - protein, 353 aa, unidentified
MEQYIGCDAHRRYSVFVVMDDKGQASKPVRVEHDRGELREYLRRLPAGSKVAIESTGGWYWLVDEIEAAGLKPQLANAYQAKQRMTGRNKTDKFDARGLAMELLTGTLPTVWIPPAELRDLRGLMRTRLALRSCSTQVKNRVSAALNRYGLKKPDEDGDLFTGRGRVHLNGHIQSLPAETREATLHEWILVDEIGEHIAALEKRIEQRIGQMNDMRLLKTLPGVGRILGATLLLEIGDVDRFPSAPHLASYAGLVPTVHSSGGKTWHGKVPRSANLFLKWAFIEAANCIVVHQSQLKGRHVVDLYQRLRAAKGHGKAAVAVARHLAEASWWILTKQQPYREPNRAPISSSAHG

SEQ ID NO: 504237 - protein, 383 aa, unidentified
MKKTQETLRIKDSIKEAILYIAFELSNSKWKLAFSDGSKIRYKTITAGNLAQLQVEMELAKQKFKITEDIRVVSCYEAGRDGFWIHRYLESRGIENLVVDSASLEVNRRKRRAKTDRIDAGQLLRMLMRYWGGEKQVWSVVRVPSEQDEDARHLHRSLENLKSERTRHRNRIKGLLVQQGIKVSNPSQKKFLEVLEKVRTWNGQAIAPGLKSQVVREYERLQVVEDQIKAWEKEKKERLKNPDTVSLQKVAKLASLYGIGSVSSWTFVMEFFGWRQFKNRREVGALAGLTPTPYDSGKSLREQGISKAGNQRVRALAVEIAWAWLRFQPQSKLSQWYMKRFGSGGKRMRRIGIVAVARRLLIDLWRYLEYDKIPEGARLKSSA

SEQ ID NO: 504238 - protein, 345 aa, unidentified
MQITTIGLDIAKNVFQVHGVDASEQVIVRKQLRRGQVFGFFKALSPCLVGMEACATAHYWARELTKLGHQVRLMPAKDVKAYVKRNKNDAADAEAICEAVRRPTMRCVSVKTAEQQSRLMLHRTRDLLMRQRAQLINALRAHMAELGIVAAQGREGIGELLRIIASERDARLPVDAHASLVVLAAGVQAVQTMIGSIEKRIVAQHRSDEASKRLRSIPGIGILGATAIAATIPDPKAFRSGRDFAAWIGLVPRQVSTGGKQKLGPISKQGDQYLRRILVVGAHAILKRARRQPEKYPWVTRLLGRKPFRVVAVALANKMARVAWALLAKGGTYRAPALTVAAQAL

SEQ ID NO: 504239 - protein, 375 aa, unidentified
MKEKLRFLGMDVHAETIAAAIAEPDGEVRSLGTIPNRMESVRKLIKKLGQVDKLRVCYEAGPTGYVLYWQLAELGVPCEVIAPSLVPVRAGDRVKTDRRDAEKLARSYRSGDLTAVWVPDEGSEALRDLVRAREAAKQDELRARHRLGKFLLRSGRRPPTGVRAWTHLHLIWVSQIRFTQVAQESTRLDYLHEVEHMRERVLRLEQAIAEAVKLASPALREVITDLQALRGIAHISAVMIAAELGQVSRFAGARELMGYCGTVPSENSSGQRTRRGGITKTGNAHLRRIVVEAAWSYHRPPAIWAGLRKRQQSASEEANEIAWKAQHRLHKRYARLAATGKDKRKIVTAVGRELLGFIWAIGTKAEATVSQRIAA

SEQ ID NO: 504240 - protein, 342 aa, unidentified
MGQYVGLDVSLETTKVHVLDEQGKRVWRGTCVTHPTAIEATIRQHAPEAVRIGLETGPLTTWLWQALTEVGLPMACLDARQAQAALNMRINKTDDNDAEGLAHLVRSGWYREVRVKSREAMLTRSLLGARTQLLGIVTDLSNQIRGLLKTFGLVVPKGAGKIFEANVRRLLEGEPAVAAIILPLLESWRAVRVRAAELDRQLLAAAREDRACRRLMTAPGAVVAASFVAAIETPEAFRRSRDVGAWIGLTPRRYQSGEVDYDGHISRRGDARLRSLLYEAATSILTHVHADSTLRSWGLALKKRLGFKRAAVALARKLAVILHAMWKTGTNFDARASASAAP

SEQ ID NO: 504241 - protein, 422 aa, unidentified
MLAKTQDSEEIIERVAALDIGKAELTCCVRVPDEDHRGRRLQEVETYSTMTRPLLGMSDRLACLGVTRVVMEATSDYWKPVFYLLEAAGFETWLVNAKDVKHLPGRPKTDKLDCIWLCKVAERQMIRPSFVPPPQFRRLRDLTRYRADLVAARTAEKNRAEKLLEDAQIKLSVVVSDIFGVSGRDMLAALVAGERSPTVLAQLARRTMRRKITVLEEAFTGYFTDHHAFLLGRMLARVDAISGDIAGLDARIEEQIAPFAATVARLDEVPGINLAAAHAILAETGLDMARFPTAGHLVSWAKYAPGVKESAGKKKGKNSTGHGNPYLARVLGNAAAATARTDTFLGERYRRIARRRGAKKANVAVGRSILVIIWHLLSDPDARFHDLGSGFYAARIDPERRRRNHIRQLEALGYNVTLEPAA

SEQ ID NO: 504242 - protein, 400 aa, unidentified
MRAVFGIDVSKASSEVAILVNGEKVHGYTMSNDALGFARLLGDLRTVHKPEIIFEATGVYSRRLQAFLDEHGYAYTRLNPLEAKKQLDSLRVRKTDQIDAEKLAQSQFVLNRKPTYVQEEVYQELRDLSRFYQNLTEDIVRAKNRLHKVLQVTFPELETILSTPTGQQYWNLVIDFPCKDFVLELSKDKLSESIRQSTSKRISDKRVAYLAEKLTALANQSYCAVKKTSPILEEVRYYAKELLRLSERRQTVLDQMVELAQPLPEYDILLSIPGIAETTATSIIGELGDIRRFQSANQINAFIGIDLRHYESGNFLAKEHITERGNPYARKILFKCIHNIASASHTKPCHIADFYEKRKRQSQTTSTKPHTIASIHRLIRTMYYLITHNKLYDYTLTQNQ

SEQ ID NO: 504243 - protein, 411 aa, unidentified
MEAAVITAVGIDVSKSKSTVAIRRPGGEIVLRPFDVRHTNSDLKKLTSTLKKLGGDIRIVMEHTSTYWRPIALTLKEAGFFVSVVNAMLIHDFSDNTIRKLKTDRADALKIANYALTFWDTLPPFNNEEETRLLLKMQSRANERITATATALRNGLIALADQIFPGVNIAFDPNTKNANGHEKWVDFFLRYWHKDCVCQYSMEAFTESYRGWCKRKNYKFRTDTAHQIYLLAQEGVATLPKCESTKMLITQACKSLNAVCEAKQSTQLEMQRLAAMLPEYEVVMQMEGAGPITGPALMAEIGDVRRFKNKKALVAFAGIDAPPFQSGAFESKSRHVSKRGSPHLRRTIFIVSNIILTRSNPENAVYCFMDKKRSEGKHYYVYTVAGSAKFLRVYYARVTEFLRSQPSPGAC

SEQ ID NO: 504244 - protein, 432 aa, unidentified
MPTNHPYDLVIGLDRSDRKADLHLIDTRTGHAQKQTVAISPEALHDWLAQLRQQQPATVAICLEQPAANLIVFLETYSWITLYPINPISLQKFRETFVTSRAKDDGKDAQYLAELLLSHHEKLKPWQPDDSQTRQLQQLVLHRRAVVDQRTGLTNRLKALLKQYFPQALELCGEDLWRPLATAFLLKWPTLQSLKKARKKSLKQFYYLQGSRSQTLIEQRLERIDKAVPLSEEIALLQSYTLRVQLICKELQLLLKTLEQFDQQIAKVFQQHPDRPIFEALPGAGPVLAPRLLASLGSERERLPRSANLQCFSGVAPVTKQSGGKRHVHRRYLCPKFLRQSFHEYAKESILHSRWAAAYYGQQRSKGCAHHTAVRALAYKWQRIIWKCWQSHTVYKETIYEAALKKNKSPLVGLLDQKELGKSPVKSGAKKS

SEQ ID NO: 504245 - protein, 391 aa, unidentified
MKKRKTETVNDLSRCLDALDMDATLIAVIEMSQSSWLVAGIVPGVERQPLKKLAIDEGALLNLLRRWRAEAEKEGHRITRIAVAFEAGHDGFWLARWLAAQGVETHVIHASSVAVTREHRRAKTDRLDTELLKRGFLGWLRGERGHCKMVTVPTLADEDAKRPSRERETLVGEASRIITRVKAAFVRLGIRGFNPKLKTAAARLETLRTPAGEPIPPNTLAGLKRDLERHRIVKQQIHEIEQTRLELLEQAPAEGRHAMVLLLARVIGIGVETADMLVQEVLSRNMRDRRAVARYAGLTGSPDESGAKRREKGLARSGNARVRRGMIQLAWRFLMFQKDSALAEWYRQRTANAPSARKTLVVALARKLLIALWRLARDGVVPEGVRLRPAA

SEQ ID NO: 504246 - protein, 433 aa, unidentified
MSLNRLQVGIDFSQKRADFCLLSPDGEPLVNHQAFANSRPGYQKARQMLLEHMRTQTFDGLDVSGEATSYYWLPYFWQMAHDDELSAADLSLFLLNPRQVFWFKKSLPPDDKTDQVDPFYIAERTRTRRPTSSWDPQDDWMPLRFYTRLRFRLAQSLTREKNYYLIYLFLLHNTYKQIKPFSNIFGVASQQVLGGELSLNELVALPEDDLAEKLDAWSGGTLDDPLETAHKLHQVAAESFSFPQPLALPVQRILDTTLDHINFIEEQIEQVEQWITAEVETRHPEVRFLDTVPGVGLVLAAGITAEIGDLQRFFKTKKWDKHHKAYRTRTLREVEDAVAKLAGLWWPMNASGDFVAEDRRLAKTGNRYLRYYLTQAANGMRRHIPAYISFYGSKFREATRFKHKRALVLTARKSIGLFVGLLHRKEAYRPQEV

SEQ ID NO: 504247 - protein, 432 aa, unidentified
MSKFFNLPVIGIDVSADFSMIAILAPNGDIYRKPFKVIHDALGFHYLIEQIKKVEEEYSMKSQLFMESTGIYHLTLFHFLKSSNLEAYVINPLITNSNKNSSIRKVKNDKMDALSIAKIAKYQNIKVSDVFDVATFAIKSLCRDYYGLTDSRSDFKKKLSSDLRIFFPGYHDVFSDTTGDTSLALLTAYSSPKAVLEAPKSDILVLLKQHARRGTDWCTNTYNKLIKAANNAVEIGIDSIAFISAVKINLAIIKAFNEQIEAIVSLIASQVESNDTPKIFRDYMALLVAMPGVGFITAVTILSEIGDPTRFKKPKHLIAFFGLDPSVNESGKFKGDKNKMSKRGTRYGRRALYTIALASVRKSKTGKPVNSILYKYRKENLIGKKNKVAIGAIMHKIVNYIFAVLRDKRPYEERNPQLHEQMFLNNPNKKTA

SEQ ID NO: 504248 - protein, 379 aa, unidentified
MEIITRNEKILYIGIDVHKDTYSLCCFDFHKNELSDEMTIKATTKAVIKYLEAIKKKHKEEILFACGYEAGPTGYGLCRGLQKAGYGCVVMAPTTMSNPDGKKRVKTDRIDARAIARILAYKSYSQVHLPSEEMEALKEYTRARDAKKRMFKKAKQELLSFLLRNGKSYPESGNYWTEKFFKWVKTVQFSEKWMQEAFNEYLAEVYSLKAKIELMDMKIREIAELEIIKDKVDKLVCFSGIDVTTAVETVVEIHDFTRFATAAQFVSYLGLCPGEDSSGKTKNMLPLTKAGNKRVRALFCESAKAIKRTNPYGQKSKRILERQKNASPEIVAYADKATKRIRTKMKHLEERGKNYNVSSAAGARELACFVWGMMNGKIA

SEQ ID NO: 504249 - protein, 367 aa, unidentified
MTVTIVDAARPVTGGVDARLDLNVASRLVTGGVDTHLDLNVAAALDPVGGLLGVAEFPTTAAGHRELLGWLSGFGPVARVGVEGTGSYGAGLARFLRASGVEIVEVDRPNRQARRRSGKSDPLDAVEAARAALSGRASGAAKSRDGNVEAIRALVVAKRSARSAKIQALNQIRHLSFTAPEQLRQRLAGVSRHHLAAHAAGLRPATGAGADPVITATKTALRILGRRVLALDEEKAGIDALLSALVTQTAPQLLAVFGVGVDTAAALLVTAGDNPGRLRSEAAWAHLCGTAPIPASSGKVTRYRLNRGGDRQANCALWGIVITRLGNDPRTKAYMTRRLAEGRSKPEVIRVLKRYVAREVYHRLPRP

SEQ ID NO: 504250 - protein, 385 aa, unidentified
MRKNSTGILGENNGLIAAKTKKKGTKSKGSRAIGVDLGDKSSCYCILERGVGEQVEVMKEAKVATTKKGMEDTFGALEPCLIALEVGTHSPWVSRLLKSLGHEVIIANARRVGAISQNSKKNDRVDAHLLARLALLDRTLLYPIQHRGEQAQLYLMEIRARATLVEARTSLINTARGVVKATGERLPSCDADQMGVKQTTLLPAALRETLRPLLENVEALTKQIYVYDERIEQIARTHYPESKLLKQVKGVGTLIALTYLLTVEDPARFAHSRDVGCYVGLRPKQDDSGDSRKQLRITKEGDIYLRKLLVQGAHYIMGRRGPDTDLRRWGRKLAERGGKNGKKRAIVAVARKLSVLLHCLWVTGEVYEPLRNSNREAARPKSAAA

SEQ ID NO: 504251 - protein, 367 aa, unidentified
MDEGTTYVALDDSKRKVVVAILRPGQSQPDEREMRKDPQLIGRLFQRLTREAPVAACYEAGVSGYDLHRQITACGVSCAVVAPALTPRRAGQRIKTDRRDAVKLVRLFRAGELTAIHVPNEAEEAVRDLLRCREAVRRDVLRWRHRLLKFLDRHGRLYVVGKNWSQRHWGWIRAQRFDLAPLQRTFEATRFALEQALAHRAELEKEITALAEQPPYAEPVGWLRCFRGVDTLSAMILVAEIVDFQRFRRPRELMAYVGLVPSEYSSGEAERRGAITKTGNAHARRALVEVAWHYRHRPTVGRALAARSEGQPRECLVHAWRAQQRLHRRYRHLLGHGKRPPVAVTAIARELVAFIWAAMTRRPAVAA

SEQ ID NO: 504252 - protein, 415 aa, unidentified
MAKVMEAMFRCCAGFDVHSRTVAVCLRRTDEQGQIHTEVRTFGTMTRELLGLCDWLTAEGVTHVAMESTGVFWKPIYNILEGQFEILLVNARHVKNVPGRKTDVKDCEWLAQLLQCGLLRGSFVPSRPQRELRDLTRMRAQLTHQMASVANRIHKVLEDTNIKVGLVATDILGVSGRKMITALIEGETDTAKMADMARGRLRDKIPLLEQALVGKVTEHHKFLLKALMDQLIYLESQIERFNQRIEEEARPFQQAITALIPMPGFDRISAQSVIAEIGPTLDTFPSHAHLCSWAKVCPGNNESAGKHKSGATGHGNRWLEAMLVQVAWAASHKKGSYFQAQYHRLAGKRGKKRAIVAVAHSILTDTYYILKHGRTYKDLGADYFDRLSRDKIRRYHVKRLQDLGYKVDLAEQAVA

SEQ ID NO: 504253 - protein, 357 aa, unidentified
MDSIAPGDVVVGVDTHKDTHVAFACDGLGRALDDIEISATNDGYGELLRWALAMGTVYGFGVEGTGSYGVGLARFLRRHGQRVIEVSRPPRAGARRLSGKSDVIDAEHAARAVLAGTAAAVPKLADGQVESIRVLKIVRDTAVKAKKSAMIALKATLVTADHDVRARLESLTDHRLIVACAELEAPTDLTDPHAAMLHTLHALATRWLDLHEEIKVHTRHLKSLTRAAAPAMFERFGVGFDTAAEMLLAAGDNTDRVRSEAAFAKMCGVCPIPAGSGRTNGRHRLNRGGNRQANAALYRTVIVRMHWHPPTISYVERRMAEGLSKKEIIRCLKRYVARELYALLPPPARSLELARAA

SEQ ID NO: 504254 - protein, 352 aa, unidentified
MSRQVTTMSPKLFIGVDIHKKTWKLHFTTGLVEGSGHTFPPDTQKIKKYVDRNYSDYEISIAYEVGCCGYEPARNFIAFGWDTFVVNPADIPKPAKNNFVKTDKIDAKNIAKQLRSGNLRKLIIPEKPREALRCLTRQRTALVRDYRRIKSRIKSLLLYHQIHIPPDLDTPKWPIKFLDWLKVLKFENQNTNFTLTSMINQYGFIDKEIKSVSNTIRAYCKKYHKLDYNLLRSIPGIAGLTAAYILAELGDLRRFTSFKKLASYVGFVPGIQQSGDSFYTTGATPRANRHVRNMIVEASWIAIRTDPVMQNYYRSHAGKNSKAVIFKVGRKLLSKLLSVIKTETPYSTGVIS

SEQ ID NO: 504255 - protein, 402 aa, unidentified
MNAVGIDVSKGKSMVAIMRPFGEVVASPFEVAHTGNELGELANTLKSLHGETKVILEYTGNYYQPIAYALHEAGLFVSAVHAKLIHDYGNNTIRKVKTDKADAIKIANYGLSHWLEVPQYWPEEDIRRMLRAYSRQYAKYIKLKTMLVNNFIALTDQTFPGVNELFSSPPRKSDGHEKWMDFAFKFWHCECVCSLTPKAFEERYRKWCKRAGYNFSSDKADDIYVSACGHVCVVPMNDSTKQLVMLSINQINAIAESIAVVAREMKRLAELLPEYPVVSQFYGVGDILGPQIMAEIGDVIRFRSKGALVCFAGLEPPEYQSGKFESTERSISKTGSPHLRKALFQVMDCILKQSPPNDPIYQFLDRKRAEGKHYYSYMTAGCAKFLRIYYARVNEYIDAMEG

SEQ ID NO: 504256 - protein, 392 aa, unidentified
MIYVGIDIAKDKHDCFITNSDGEVLFKSFTISNNRDGFETLFQKIQSVSDDLTKVKVGLEATGHYSYNLLGYLLDKGLPTYVINPLHTNLYRKSLSLRKTKTDKVDARTIASMIMSDVNLKSYSDTSYHNEELKSLTRYRFDKVKERAKLKTSVSRLICILFPELEKLVPTLHMASVYALLSEFPSAHAVASAHLTRLINLLSQSSKNRYGKDTAVMFREAARNSIGSNMPTKSLELKHTIKLIQELTSEIDEIEAAIKQIMDEEIQSPILTIPGISYRMGAMIIAEIGDFCRFDSADKILAYAGMSPSTYQSGQLDNCYSHMEKRGSRYLRYALYNATKYVCHWDKSFGEYLAKKRSEGKHYNVAISHAAKKLVRLIFAMEKSRKAYLPTA

SEQ ID NO: 504257 - protein, 349 aa, unidentified
MSAKFSFEIAVIGIDIGKNSFHMVGLDRRGAIVLRQKWSRRQVETRLANIPPCLIGMEACVGAHHLSRKLASLGHAARLMPAKYVRPYSKGQKNDFRDAEAIAEAVQRPTMKFVATKSAEQLDLQALHRVRERLVSQRTGIINHIRAFLLERGVAVRQGSRFLRAELPRILATRCDALSPRMVRMLEDLAGDWRRLDKRIEGLSSEIEILARQDVGCERLMSVPGIGPIISSAMVAAIGTGDAFSKGRDFAAWLGLVPKQISTGDRTILGKISKRGNRYLRVLFVQAAWVVLIKPKSWDRHGLKPWLEAAKKRLHHNVLAIALANKLARIAWSVLAHSRTFEASKIQAA

SEQ ID NO: 504258 - protein, 388 aa, unidentified
MQTAADRPEAPNAIRSDLAAIFVSLELSRSTWLITSLSPDGGEKMSKHVVRGGDVAGLLERFAQLQKKARARTGKVFHFVVIQEAGLDGFWIDRVLRKEGIESHVVDPASIATSRRRRRAKTDRIDGEALVRALLAYKRGEPRVCAMVKAPTPEEEDRRRLCRERKVLIVERVRHVNRVKGVLFSQGISGYKPLRRDRRERLDTLQTGDGRLLPDHLKAQVRRELDRLELLLEQIKAVESERDALLAVQQGAAPAPATMLLNIKGIGPEFAAILWSEGLFRHFDNRRQVASYAGLAPTPWQSGSVDREQGMSKAGNPRLRTTLIQLAWLWLRNQPQSALALWFKDRVSRNGGRLKKTTVVALARKLLIALWKYVTAGVVIEGAIVKSA

SEQ ID NO: 504259 - protein, 383 aa, unidentified
MLNLTDTPAANDYATIYVAFELSKAKWKLGVVVPGSPKTSYFNVAGGDSAALSELLAKWRAKATATGKPVRIMSCYEAGYDGHWLHRWLTDRGVTNYEIDPASIEVNRRARRAKTDRIDVDQLMRTLAAHVRGEPRVCSVVRVPSHEDEDRRRVSRERKRLQNERTQHSNRIIGLLHAQGIRDVQPLKRGLLASLDQLRTGDGRALLAKLKAEIVREHERLCLVNKQLSELEAASQAEVKAAASGSAGAQIKELARLRGIGLRSGRDLVNEVFYRSFNNGRQVGSFLGTVNSPYNSGNSKRDQGISKAGNKRARALAIQLAWLWLKHQPQSELSRWFHRRVGELKGRIRRINIVALARKLMIALWRYVTTGVVPAGAVLGRGI

SEQ ID NO: 504260 - protein, 341 aa, unidentified
MKRDISVVGIDIAKRVFHLVGLDERGKIVMRKRCSRGEVLPLLANLGPVTIGMEACGGAHYWARCLREQGHEVKLMAPQFVKPYVKSNKNDMRDAEAIAEAVTRPSMRFVPLKDVAQQDIQALHRVRERLVTARTALVNERRGLLAEYGMVLPQGMAKFRQTLLSTLEAEQTKLTSLGQELFHRLFAELGSLEAELASYQEKLEALADTHPVCQRLLTVPGIGPLTATALMAAVSDAQVFKNGRQFAAWLGLVPKQYSTGGQTRLLGISKRGDSYIRKLLIHGARATLRWAKTKADRRSQWIRGLLDRRGWNRTAVAVANKNARMVWALLSRGGVYEGNAS

SEQ ID NO: 504261 - protein, 405 aa, unidentified
MGSETHYARAFDWRNYEYTKKPLEFSNTEAGFQTFKAWMEDMAEKHGKTAVIPGMEPTGHYWFALGKFLQDNGMKPVHVNPHHVKKSKELDDNNPNKNDRKDPKTIAALVNEGRFAYPYMPVGIYAEIRSLSNLRFQTQEELTRIKNRLARWFAIYFPEYKDVYGDLKAVSGRMVLKEAPLPEDIRKLGVEGVNRIWRDAKLRGAGMKRAKTLVTAAEHSVGSKEAPEAARMELKNLLDDMDVYTARQEGLLRNIEEKLKEIPYIDNLLAIKGIGMVTVSGFIAEVGDIGRFDNPKQLQKLAGYAIVANDSGKHNGESRISYRGRKRLRYVLYEAAISLVGKNAEFREIHEYYRTRKENPLKKMQSVVAVACKILRIFYAILTKGVEYDPKKLLGDIKRPQVQAA

SEQ ID NO: 504262 - protein, 446 aa, unidentified
MKQKIEMTVKNLNAAGIDIGSKSHFVAIGQNAEEIKEFGVYHSDHVAIVKYLKDNNIKTIAMESTGSYWQGLYVVLVEGDFEVLLVPGSQTKGFRKTDVKDARQLQQLHSLGLLSSCFLPDNFTYRVRELSRHRKSMVRDGAKYSNRMQKCLRMMNLRLDVVISDITGVSGLKIIKAILNGERDGKVLASMADCRVKNSKEKIEDALQGNFHVELLYELKNNLELYETIQAKINNLDIQITKLLNEAPEIKNSEVNMDEIQLTKKHVRGKKQTKIPIQKLSYLLYDTDLSAINGVSINTILTIVSELGTSTDKFRNSKAFVSWLRLAPNNKISGGKVLSSRTPKGSNPLTIAFRDAANVIGNQRSGELTIFFKGIAFKKGRCAAITATARKLATIIFNMIKNKEPYNPKKDEVIKNKIEQKKVNNAKKILEKKGFIVIDNHGVMVS

SEQ ID NO: 504263 - protein, 335 aa, unidentified
MKVFYLGVDVSKKKLDLCLRSNGKDILYDVIPNDLSSIKSWLTRTFEKFFLSEDSLVVCAEHTGQYTYPLVCATKSIGVYLCLEDAAKIKYCHGIPRGKNDKIDACRIAMYAERYNDCLQPYTASELIIQKLKNLSTERSMLVADRAKYQSQLKDQVDYMEHSIYIAKCNRVEGIINTFTDYIAQIDLEIKELINQAPVIAHQMDLLMSVDGVGERVALKMIMETDAFTSFTDPRKFCCHAGVVPFVYVSGSSQRSKNRVSNRADKSIKHLLHLAALSVSQVKNSPLKKYYDRKVEEGKNKMSVLNAVRAKLVTIMFAVIRADAFFSRNYQNSLA

SEQ ID NO: 504264 - protein, 389 aa, unidentified
MKIFVGIDIAKLNHFAAAISSDGEILIEPFKFTNDADGFQLLVSKLEAFDKNSIIIGLESTAHYGDNLVRYLVAEFYQVCVLNPIKTCQMRKNNVRKTKTDKVDTFVIAKTLMMQDDLRFITFFDLDMMDLKALGRFRQKTIKQRTRLKIQLTTYVDQVFPEIQYFFKSGLHQNAVYALLKEAPSPKEIASMHMTHLANLLKVNSHGHFTKEQAKELRILAQKSVGANDSAISIQITQTIQQIELLDSQLEKIEAEMTDIMKFNDSVIMTIPGIGYINGGMILGEIGDIHRFSNPNKLLAFAGLDPSVYQSGNFQAKTTRMSKRGSRVLRYALVNAAWNVVRNNATFKAYYDAKRAEGRSHYNALGHCAGKLVRVIWKMLTDEVEFNLE

SEQ ID NO: 504265 - protein, 342 aa, unidentified
MHEITRIGIDTSKNVFTLHGVDAAGQAVLRRSLRRSEMQRFFEKHPRVEVVLEACAGSHHWGRWLGGLGHRVRLIPAHYVQPFVKRGKNDRNDAEAIAVAAAQPSIREVAVKSLGMQAEAMLLSVREMLVRQRTQLVNALRGHATELGLVAPQGDKGLNELQGKLASADEAIVPEAAKQAFALLGGDISGIEAKLAMIDARLKRQLASNAVAKRLAEVPGIGPIGALNLALRVDASAFRSGRHFAAWLGLAPRENSTGGKQRLGGISRAGNERLRQLLVVGATAVVQHASRPGRAGPSPWLQELLKRRPRKVAATAWANKMARIVWAMMARDQSYRPFRAAA

SEQ ID NO: 504266 - protein, 440 aa, unidentified
MAMRKREEVVFPNAAGIDIGASSHWVAVPAHLADESVREFGTMTDDLRGLADWLLTCGVEIVALESTGVYWIPVFEVLEQRGLKVWLVDARQMKYVPGRKSDVQDCQWLQRLMSYGLLRAAWRPAGEVCEIRAIARLRETLLAEQASWVQRMQKALVQMNIQLTEVLTDVMGMTGQAILRDIVAGERNPEVLARHRHTRVKASREEVVRALTGNWREEPLFVLKQALSMYDAIGRHLAECDAQLQSLLGRCAHGHANVGRAPKAGTKQARAFSLRQQLADWAGVDLTRINGLEVTTVMKILSEIGTDLSRFANVKHFCSWLGLCPGTKISGGKVLSSGTKRSANRVRQALKMAAMTLSRSDSALGAFYRRLCGRMDKPRANTATAHKLARMVYFMLTRGEAFVDQGQQRYEEQQRQRSIAALKRRAAALGFDINPMQTAS

SEQ ID NO: 504267 - protein, 457 aa, unidentified
MRTIGIDLAVTATHKAVVADDSGRFVTSVLSFRATWEEMAHLVACARAGVEVDHPVQAVMEPTGMAWFTVAVPLSRLGVTVYLVNGRKVHDLRRYYKRHAASDRISARVLAKLPVVDAESLYPLAILGTVQLACQRGCKQDDRLQSWITAIHNRLLDIDRFAWPGLEQVLPDAFGPVALLFRQDWYDPARVVEAGTQRLSMAFAAIASPKDDLEWVKDLVELAIGVLKLYGPEAIDYDRLQAEVRCEQRLLTQLQREQAQVQEDTVQPLYHQLHPSGHLETLYGVGVKGAPVFASFIGEPDRFADNRHFRGWHGLVPDSRQSGESESKALHISQAGPDLFRKHGYIAADTARRFDPQIAAIYYDQMVNKGKHHTQAVCACATHVLDRIRVVLRDDRPYELRDVDGTAVTPAQARAIIAERYQVPEEVRKRNSKKGRHEQADQQLERRQEQKGSRPRR

SEQ ID NO: 504268 - protein, 337 aa, unidentified
MVYGAIDLHLRYSHIRILDADGRVLRERQVLTAPERLVAAFADVGAVRVLLESGTESEWVAQALESAGYTVVVADPNFAPMYGDMRRRVKTDRRDVAALAEANRRGWYRPAHRTSARQRARRQVLRARRHLVQLRTGTISLIRALLRQDGYRVGSGDSDTFPTRLARLRVPPALQATLAPLVRTLTHLIGEIGQLDRQLVDEARQDPVVRRLQTVPGIGPVVALTFRAFVDDVTRFRSAAHVSAALGLVPREDSSAERRHRGHLTKVGPRELRSLLVQAAWVCWRAKRHRVLRSWADQLAARRGKRIAVVGLARRLSRILYAIWRDETEFTPSRVLA

SEQ ID NO: 504269 - protein, 365 aa, unidentified
MHTLNSAATLIPRTTTEAPRDHMYYIGLDVHKRTISYCVKDAAGHVHQEGKIGSTRCELDAWIKTVPQPRMIAMEATIFTGWIYDHLLQHAEKIKVAHPLMLRVIAAAKKKNDRIDASKIADCLRCDFLPECHMASTAIRDRRRTLRYRSLLVRQMVQMKNRVSGLLLETGVSYNKSRLHKVGYFADLMSTNEEVNESIRPLLKISREHIVRTQRLDYALVSSLERDPLLAERLKRLRTVPGVGPITALTWALEIGDFTRFRSIKQVISYCELCGDERSSADKVMRMPLSKQRNKHIQHVLIEAAKLAPRECHELAMVRERELQKGNPNRATLAVARKMVSYMLAVERRKQEFVPAENFKCTTAA

SEQ ID NO: 504270 - protein, 384 aa, unidentified
MSSSPATASRAPRSIIYLGLDVHKDSITIAVLPAAAKSPTRLERLPNDLTKLKRLLDRLARDGELRACYEASGAGYVLHRALRDWDYACEVIAPSLIPQRAGVQRKHDKRDACELARLYRAGELTAVRIPSEAEERVRDVVRCRETFQREILKSRHYILKFLARRGFVYRDGTNWCTPHLRWLEHLTSDGSPLAPADRLVFREYHALLAYKLQRRDELDRQIEQLALTPALAAAVARLQCFRGISLHGAMVLATEIVDWQRFERPGQLAAYLGLVSREYSSGDRQHRGSITKAGNSHCRHVLVQAAWTYHYRPHLSVEIRRRQQGQPPAIVAHAWKAQQRLHQRYTHLAYRKQPQIAVVAVARELVGFLWAVMRDLAVPEVAAA

SEQ ID NO: 504271 - protein, 347 aa, unidentified
MTIVSTRAITGGVDTHAGAHVAAALDPVGGLLGVREFPATAAGYGRLLGWLGGFGTVALVGVEGTGSYGAGLTRHITAAGVRVVEVDRADRQDRRRAGKSDPLDAVSAARAAQSGRAAGAPKGRDGAVEAIRALMVAKRSARTERVQAINQARALITTGPEDLRERFARHTAPALVTALAQLRPRPGGDVPGYATRVALRELGRRAQFLDAQAGRLDELIIPLVTGRAPGLLALHGIGPDTAALLLIAAGDHPQRLRSEAAWAHLCAVAPIPASSGKITRRRLNPGGNREANHALWRIVITRMRSHPATRAYAERRTAEGKSKAEIIRCLKRYVAREVYRHLRPAGG

SEQ ID NO: 504272 - protein, 412 aa, unidentified
MKLFVGIDVSSKDLKVCMMNGEGDMLQSFTVDNNLEGASHLRDQIVVVADKLHSKEIHIGLEATSVYSWHPAMFLHEDEALQKRKAKVFTINPKLITKFKEAYVDLDKNDHIDAWLIADRLRFGRLPMTMVMQEQYIALQRLTRMRFHLVHNLTREKQYFITNLFYKCSAFTSEVDSSVFGHAITELLLEKYSLEEIASLDVADLADYLKDHGRNRFPDPERVAKCIQKAARASYRLSKVVEDSIDLILGTSIQSIRSITAQIKELDQAIERIMQGIPNTLQTIPGIGPVYAAGILSEIGDIARFEDQAAVAKYAGLTWRKHQSGSFEAEDTKRIKSGNRFLRYYLVEAANSVKNRDSEFGDYYRKKYKEVPKHQHKRALVLTARKLVRLVDVLLRNDQIYTPRRKVTAAKD

SEQ ID NO: 504273 - protein, 350 aa, unidentified
MTGARAFLFLRVCMTELGVAAPLYVGNHGVSTAPWLRSRAGGAGSTAPGSRQKSRAGPQLDLRRRSGRTRTVARAGVNRARICKEGSTVHSDSNVVWAGIDVSQDWIDIAIVQQDKVVEQWRSAATPEALQETAARMKSSRVNGVVLEPTGGLEMAVATALMAEGIEVFRVNAKRIRDFARAHGVLAKTDAIDARVLARFGERMRPERRVWLDEDRQELAERIARQRQLVDQRTVDRNRLRRVRSAEVQASIERMLRLVAEELKRVEAELAAWWDEHADAWKESEARLRTMPGVGPKTARVLIAHMPELGRANRREIAALAGLAPWACESGGWRGARHIRGGRSVVRSAL

SEQ ID NO: 504274 - protein, 394 aa, unidentified
MKLVGIDVGKNSHHFCVMDKETGEFNVTPTSFSNNKEGFDFLINSLKPYSKKSILIGMEDTGHYHVALLKFLLSNGYTVALINPKTTDLTRKMEGGITKNDKLDTITICDVLDTPERKKQYRITKVDRFDLYEQRQLTRHHHNLKEELNVYCNRLQKSIDLVFPEFNTLFSSKYGIVYMNLLKTFGSAEAIASTDIRTIRKFFEIKGKGNRISLTPEKLKECAKNSIGISSEVETIQIKHLVSQITLIKEQIAEIDKKIEEFSITNNSPILSIPGISHFSGTSILAELGDIGNYSKPSQIIKFAGVAPYHYESSQYNAQHTAITKKGSKYLRKTLYQIILPVINNNPVFKKYYLLKISQGKGHRCAQGHCIRKLLRIIYHLLETGQSFDPALLR

SEQ ID NO: 504275 - protein, 360 aa, unidentified
MAKINLSQLNDVLEKQIGTVFHVGIDVHKNSYHVAFLGDIGNSSTFVCSAAPEEVIKHFNRFDGKIAQVVYECGPTGFELARVLQEAGYNVLVVAPSRVPRPVTTGAKTDRLDCMRLAQYSAHGMLKSVAVPSRDQEAQRSLIRRRHDLVDSIRTVKQRIRSHLLYLSVKEPPGLDHWGDKSVKSLLKLPMLAGARDTLKSLVRELTFLKSERQRIEKQIRCVCSQARHGKIFECLQTTPGVGPITAATFQLEVFDPGRFKTGDQVASYLGLAPMVRQSGESKGRSRLRPVGQKRLRSLLVEAAWCLCRKDEQAMAKYRRLVSKTNVAQKAIVAVARDLAVILWRLSLEQRAYELRPVTA

SEQ ID NO: 504276 - protein, 407 aa, unidentified
MWFAGIDWADTHHDAVVIDAAGQRIGAIRVSHNAAGLATLVVFLRGIGDGDSVADPDRLACIVETSHGLLITALLEAGLPVYPVNPTTVDRHRKPAGAKTDAIDAYLLARTGRSDLADLRRLTPGSPLIAELKALTRDQDTLIQSQTRLVNQLTACLKAYYPVALELFAKLQQPTTLAFLRAFPTPEQAQAATATQIARTLRAAGYAPADTKAAEIRRTLREPQLHAAAPLVRAKARLMRALVAQPRPLIDDIAAYDTEIDRLFRQHPDSTAFMSLPRAGERLAPRLLAEWGDDRGRYADAGSVQALAGTAPVAVQSGNYARVRKRSACIKPLRNVLYQFAWQSTLAEEWAAEYYQRKRPAGKSHPMAVRALANQWVRIIYALWTTHTAYDREVFRDAQQAHAPHAA

SEQ ID NO: 504277 - protein, 407 aa, unidentified
MSKEVLYLGLDVHAENIAVAIAEAGRDGEVRNYGEIPNTFHSVEKLLRKLGHPDKELRVCYEAGPCGFVLARFLKKKGIACDVIAPSLTPKGSGDKIKTDRRDARMLARLHRAGELTAVHVPDERDEAIRDLCRARTDAVQDQRSGRNQLKAFLLRNGYRYGEKTSLSAAHMRYLRELVLPHPAMKIVLEEYLQCIDAANERIERLEMHMKALLEEWHLAPVVKALMGFRGYQTVAAMITVSEIGDIHRFPHPRQLMAYLGLVPSESSSGGSRAQGTITKCGNGHLRWIFNECAQHYRLPPKVSQELTTRQEAIPKTHRRQVQEISWRCQNRLHERGRKLAARGKTRQKVQIAMARELSAFVWEVMRAVMPQADGTQAISTARTPRAIEATQPAAKKKGRDYTLKAK

SEQ ID NO: 504278 - protein, 475 aa, unidentified
MNLKGKKTKNQVVTANIFEQQELLKKAEVIREKLTASTWHELETNGKFDKNAKLSFISDDMLILGCDVDSETHYLRAIDTRGRELSKSAYSFRNNCEGFQSAKEWAVELAAKNEKKQIVLGLEPTGHYWFCLATWMIANGISVVQVNPYAVKQTKEVEDNSQLKDDTKDPKLIANLVKDGNFGMPYLPEKVYAELRRLSIFRDQLNEDRIRAINRMHREMKIYFPEYKEALGRVEGAFSLELLKQTPFPEEIQTLGEDGIRQIWHDAKLRGRGYSRAREIIGYAKTSVGMKDGAEASAMAVKWFVKEIRELDEKLAEIEKLMREKYQEIPYAKNILEISGIGENTLSGILAEMGDISRFDDVKEIQKLSGLGLVACSSGKHKGETKISHRGRKRLRYWLFQAAKSAVAHAEEFKELHVYYTTRTDNSLKKMQSLIVIACKLLRIIYGILKNGTVYDPKKMLRDIRRPEKKEVIAA

SEQ ID NO: 504279 - protein, 401 aa, unidentified
MKEFNAEEVRVETASALESVLEAEQAKRYGAYVGLDVHKETIAVAVALPGRTEPQSRGEIRHTRKAVGKLIERLSKEFEGRVLLLCYEAGPCGYGLYRQILGAGHACEVVAPSLIPKKAGERVKTDRRDALKLARYLRGGDLTAVWVPDEEQEAMRDLCRARGDMKSQECKARQQLNAFVLRHGHHWPANKTRWTATHYNWLESLKFTHDWQQVVLQEYIDAVKAASWRVAALMGQMQRVLPQWRLAPVVDGLTALRGIDKLSAMTLLAELGDISRFQSPRQLMAYLGLVPGEHSSGGRRRQGAITLTGNSHARRTLVESAWSYRFPARQTAHLKRKAARASDEAKDIGWRAQKRLCGRYRTLTQAGKNTKLVCVAIARELVGFVWAIVRQEMPKLKGAAA

SEQ ID NO: 504280 - protein, 320 aa, unidentified
MQQEGPGPVAGIDVAKKSLDCFVDSPPQSFTADNDALARAGLIARLLPLKLRLVCIEATGRYHRQLAADLLQAGIPVALVNPRRAREFARSVGKLEKSDRIDAKTLAVFAKAADHRLLAKPAENQTELNDLVSRRRALVQMRVAESNRLAEDQPELAANQAKKMLRLIEQQIEDLDRAIANLIEGNDDWNNKSQIIDSVPGIGTTTAHQLVAQLPELGKLNRAQIAKLAGVAPLLRDSGQMRGKRTIGGGRESVRTILYMGAFNAMRHNERFAAYAQRLREAGKAFKVVVTACMRKLLVILNQMIKTNSHWKDQLAFQLT

SEQ ID NO: 504281 - protein, 341 aa, unidentified
MDKNTTITIDLAKEVFQIAVFNQAGKSKLNKSVSAKKLKEIVDQYPHAKIYMEACGSAHYWARLFQEQGHFVGLIPAQVVARYRQGNKNDKNDAIAIFEASKSEQVKLVAIRTLEQQDIALMHTLREGYKKARNQIANRIRGFAFEYGICFPVGIAKLKKQLPEVLEDAENSLTPLARKVLNSLQSQLTEINELYDESSKDIQVQSQNNAHCKRLQKVPGIGWLIASMLYAKLGQGDGFEKGRDVSAMLGLVPSHSGTGGKIKIGSITKKGDTYIRAQLVNGARAVVSKIRDKQDELSCWIRGLLGRKSFNTTVVAVANKLARVAFAILKSGEPYKPTFAK

SEQ ID NO: 504282 - protein, 334 aa, unidentified
MENIALIGIDLGKNSFHIHCQDHRGKAVYRKKFTRPKLIEFLATCPATTIAMEACGGSHFMARKLEELGHFPKLISPQFVRPFVKSNKNDFVDAEAICEAASRPSMRFVQPRTESQQAMRSLHRVRESLVQDKVKTTNQMHAFLLEFGISVPRGAAVISRLSTLLEDSSLPLYLSQLLLKLQQHYHYLVEQIKDLESQLKRKLDEDEVGQRLLSIPCVGTLTASTISTEIGDGKQYASSRDFAAATGLVPRQYSTGGRTTLLGISKRGNKKIRTLLVQCARVFIQKLEHQSGKLADWVRELLCRKSNFVVTCALANKLARIAWALTARQQTYEA

SEQ ID NO: 504283 - protein, 341 aa, unidentified
MKKFIRIGVDLAKNFFQVHGIARDGAEAVSRKLTRAKFRAFFEGVAPCRVGMEACGSAHYWGRELKRMGHDVVLIAPIYVKPYVKRGKNDAADAAAICEAMSRPDMRFVPIKSADQQAVLMLHKRRELLVKQRTMIVNALRGHLSEFGLIAAKGIQRVHELVAMALGEEGFPEAARQAVAALAEQSEQLDGAIDGLEKQIAQSGARNPMVRLLKEIPAVGPLISSAMAASYPDPSVFKSGRDFAASLGLTPSQHSSGGKEKLGSITKKGNRYLRKMLVVGCTSVLRVAHKYKGALAEWIVAIKAKKPERVAAVALANKLARVCWAMLSTGEGFREELYAKA

SEQ ID NO: 504284 - protein, 411 aa, unidentified
MEAAVITAVGIDVSKSKSTVAVRRPGGEIVLRPFEVHHTNRDLKKLASTLKKLGGDIRIVMEHTSTYWRPITLTLKEAGFFVSVVNAMLIHDFSDNTIRKLKTDRADALKIANYALTFWDTLPPFNNEEETRLLLKMQSRANERITATATALRNGLIALADQTFSGVNIAFAPNTKNANGHEKWVDFFLRYWHKDCVCQYSMEAFTESYRGWCKRKNYKFRTDTAHKIYLLAQESVATLPKCESTKMLITQACKSLNAVCEAKQSTQLEMQRLAAMLPEYEVVMQMEGAGPVTGPALMAEIGDVRRFKNKKALVAFAGIDAPPFQSGAFESKSRHVSKRGSPHLRRTIFIISNIILTRSNPENAVYCFMDKKRSEGKHYYVYTVAGSAKFLRVYYARVTEFLRSQPSYDAY

SEQ ID NO: 504285 - protein, 464 aa, unidentified
MTASKKLWRNRKERKEWARRLQSEDPGLEVVHPHAAGIDVGNSAHYVAVRPDRDAEPVRRFECFTADLHRLADWLQSCGVKTVAMQSTGVYWIPLYEILEERGLEVYLVNARHTKNLPGRKSDVQESQWLLKLHTYGLLNNSFQPVSEIRVLRTYWRQRGEHVREAATCIQRMQKALTQMNVQLANVISDISGLTGQAIIRAIVAGERNPLKLAALSDPRVHASQEEIAKSLEGNWRPELLFVLQQEVDMYDTYQKRIAECDQRLQKHLASLTPPLPVQPPTQKPKTKKPAAKNAPRFDLSSELQRVTGVDLTRIDGIDVMVAQTLLSEVGLDMSRWKTESHFASWLGLCPDNRISGDKVLNRGTRRVVNRAATALRQAANTLMRSRSYLGAQYRRLRTKLGAPKAITAMAHRLARLVYRMLKYGQTYVDKGTDYYEERYRQQQIQLLRKRAAKLGLQVAEIHA

SEQ ID NO: 504286 - protein, 371 aa, unidentified
MNSIVYIGMDVHKENYNLCCYSFQEDELRYRQSIMPDSKLIMKYIGRIRESYPAGTEFVCGYEAGCLGYTLYRELTDYGVKCVILAPTTMAVTNTNKIKTDRRDAANIARCLAFETYSAVYVPTPEDESVKEYIRMRDDHKKSIKIIKQQILAFVLRHGYRYGSGRNYWTGKHVRWLKSLRLGGTLQESLDEYLVTYEYLANKIERMDKRIEELARGERYLDKVRRLTCLLGIKDHTALAAIVEVGDFNRFASAERLASFLGLVPGESSSGGRQNRGSITKAGNSHVRRLLVEAAQSYTRGKVGYKSKVLKRRQNGNTPQIIAYADKANERLRRKFYRMTLKNGTKRNIAATAIARELACFIWGLMTDNVA

SEQ ID NO: 504287 - protein, 350 aa, unidentified
MLIIGVDYHPSFQQIAFCNQDTGEGGEGRLNHSDGEADRFYRDLKQRGISVRVGMEATGYSRWFERLLAELGFELWIGNAAEIKTRRVRKQRTDRLDAQLLLKLMLEDRFPRIWVPSPENRDLRQLLWHRHRLVQMRTRITNQLQALAMNEGKRCKKLWSAQGRAELEKLQLAPWASRRRRELLELLDRLHPTIEELTTAVEKEAGKRPEVLRLMTHPGVGPLTALAYVLVIGTPERFPCGKQLGSYVGMIPSEDSSADKQRLGHISKQGNSLLRFLLVEAAQAAARINEEWRRRYVRLAVRRHRSIAKVAMGRRMAIRLYWMWRNQCEYSPSMEFGSYVGQLGLVHSVK

SEQ ID NO: 504288 - protein, 400 aa, unidentified
MAVAVGVDVAKEFHWAALVHCETGRVLASRKVDNDPSAIQALIDDIRAAEAEHGPATVAIDVLGGIAGLLQVMLGDAGLRLVHVSGLAVNRARRATRGGEHKSDPRDAKVIADQIRLRADELRTVEPATEADSELRLLVGRRRELVVDQTRRIGRLRDLLASIHPGLERVINPTHKVDTALLARYVTPTEIRRAGRRRITEYLRTTGRHNTPVIDALVDKALTAAGAQHVVVPGEAVAADIVRDLARETLACRDKLADLDTRIHDVLDRHPDAALIQSLPGMGATLTAEFLAVAGGITRFATGDQLASAAGLAPVLQQSGKVHYLRRATSGDKTLKRIFYQSAFCALQRDPASRAFYDRKRTEGKRHHQALIALARRRINVLHAILRTRQPYRLDHALAA

SEQ ID NO: 504289 - protein, 428 aa, unidentified
MKNRMKFDHLSTLCVGLDIGSRINFITALNFDSDRLINMRPVPNASNGVEAMESMILAVLEANPQFRYLLIAMESTSFYGVHVANYLSTTDKLKPYGVKVFCLNPKTIANYRKSFTGLGKNDGIDSFIVADYVRAGRINIEPWRGAQYLALQRLTRQRRHINEAIAREKNYVLNNVFLKFSEFALLSGEESPVSDKFSATAEAILTEYKTTEDIANAPLKELIDFISASGHGRFSDPDQVASLLQKAARNSYRLDKALYEPITTSIACSFNCIRAFEKEQKALDKAIAATVAGLNPTEYQILKSIPGIGPVYAAGILAEIGSVRCFNSNNALAKYSGIIWRDNQSGEFDSEDTPMMKAGNRYLRYYLIQAAGSVVRYCPEYEDYYNKKFAEVPKHQHKHALALTARKLIRLIFGLLDKNQLYSPAKSR

SEQ ID NO: 504290 - protein, 316 aa, unidentified
MNEETRAVYVGIDIAKAHVDVMVRPSGQQWRAAQDADGMRETVCRLQELRSTLVVMEATGGYEASLVKALHRGGVAVAVVNPRQVRDFARASGRLAKTDRIDAQVLALFGERMQPPAQPAPDPQREALEQLRARRRQLVENVSAEKNRLKQTTGVTRRSVEAHIDWLEGELARIEAQLQQAIAQNSEWGRQEKLLRSVPGVGPVLAMTLLADLPELGTLDRKRIAALVGVAPLNRDSGTLRGKRTIWGGRATVRTALYMATLAATRWNPVIRAFYQRLCLAGKAKKTALIACAHKLLLVLNAIVRHGVPWQPSYPH

SEQ ID NO: 504291 - protein, 409 aa, unidentified
MDQLIERCCGLDVHRDTVAACVRVPGPNGKQRHEVRTFGTTAVELLALRDWLEAHGVTHVAMESTGVYWKPVFYVLEEAFTCLLVNAAHIKQVPGRKTDVKDCMWIAQCLEHGLLRGSFVPPAAIREIRDLTRHRKVLIQERTRAANRVHKLLEDAGIKLASVATNILGVSGRAMLEALVHGTTDAEVLADLARGKLRKKLPALRQALAGRFRPHHAFLVSQLLAHVDYLDEAIATVSEEVEGRLAPFAAQLTQLDTIPGINKRTAEVIIAELGVDMSSFPSDRHLASWAGICPGNNESAGKHKSGKTRKGNRWLRMTLIEAAGAAIRTKDSALGARYRRVMRHRGHKKAVVAVAHAMLRAVYHLLAEGTTYREPGAAYYDRRHTHRVTRRAIQLLERQGYRVVLEPAA

SEQ ID NO: 504292 - protein, 343 aa, unidentified
MDHFAGLDVSVKETSICIVDDTGRIIREVKVASEPEALLPVQTSDTYHFKRIGLEAGPLSQWLFSALAEAGLPVICVETRHMRAVLQAQINKTDRNDARGMAQMMRAGLYRPVHVKTLRSQKLRMLLTHRKLLQSKAIAIDNDLRGTLRNFGLKVGMVGTLKFEGRIRELVENLPDLAVLVEPLLVVRRVLREQLGILHRRLLAIVRDDEVCRRLMTVPGVGPVVALTYRATVDVPARFKNSKAVGAVFGLTCSKYQSGEINRTGAISKCGDEMMRMMLYEAAQVMLTRTNKWSWLKAWAMKIARHRGMKKAIVALARRLAVVMHRIWVDGTEFQWAREAAVA

SEQ ID NO: 504293 - protein, 412 aa, unidentified
MGRMIIGVDPHKASVTIEVIDPDGVVAATGRFPTDRGSYLALLGYVKRWPQRVWAVEGARGTGRPLAQRLVADGETVLDVPAKLAARVRVFDTGQGRKTDATDAHSIAAVALRTAGLPVLQGDDGPLEALRLLVDRRDELARARVQVVNRLHRLLAELIPGGAKRDLSSLQAKALLAGVRPRDVAGGTRRRIALEEIADLVVLDAKLKTLKTDLRTAVAARQSRLMDLFGVGPGGAARLLVDVGDITRFPTKAHFAAWNGTAPLDASSGAQIRHRLSRAGNRRINHVLHVMAIVQLRHDTAGQAYYRRRLAEGKTPMEALRALKRRLSDVVYRQLVADAQTRRTGPGGHVGATVQSGADDAGTPIVVSSEKSHPGPAAPTLPPPSLSAARSSRPIPTPVNRADRSRSQAPFA

SEQ ID NO: 504294 - protein, 338 aa, unidentified
MPAGVAAEVLGLIARTKARVTRRLGTTPRVACCYEAGRDGFWLHRVLEAEGIASHVMDPTSLQVDRRARRAKTDRLDAQALLRALMAWSRGERQVCSMVRPPSPEHEDERRLSRERGTLLKERLRLSNRIKGLCAAQGIYDYEPLGADRRDRLARLVTGDGRALPGRLAAEIGRQLDCLELVLRHLAEVEAVRDARAAQAREEGGSKLAALLRLKGIGPELATVLELEVFHRHFATRRDLAAYTGLAPSPYASGGTSREQGISKAGNRRARKALIELAWLWLRHQPESALARWYRDRVGTATGRVKRIAIVALARKLLVAIWRYVETGLVPAEAAVRT

SEQ ID NO: 504295 - protein, 348 aa, unidentified
MEFFVGLDVSLDETHICVVDEGGRIIKETRSLSEPQAIAKAIRHKGRRIEHVGLETGNLSQWLYEGLVKEGFSVSVMEARHVRVAFAAMRVKTDRNDARGLAQLIRLGWFKRVHVKSLDAQETRALLTARTFLIEKIGATENSLRAALRNFGLKMGSVTRKTWEPRARELADGNELLEGIVDAMLRIRTLLREELAKIDGQLTALAKSDPVTRLLMTTPGVGVVVALSFRSAVDDPDRFPRSRDVGAWLGLTPRRWQSGKTDIVGRITKAGDARVRTMLFEAAASILGRVRVMSPLKAWGLRIAQRTSMKKAIVAVSRKLATILLAMWKSGTAYWATRHPPSCAADLA

SEQ ID NO: 504296 - protein, 388 aa, unidentified
MNRIIKIGMDVHSTNYTLCAMEPTIGAEDRIFGEIQVAPDYKEVLCFIESLKMKLGFFDDYSIECGYEAGCLGYTLYHQLTEAGIKCVILAPSTMLTQQGQRIKTDRRDALLIAQCLCYGGYHPVYIPTGEDDAVKEYVRMRDDHKLVLKKLKQQINAFVLRHGHQYAGTKWTIKHLIWLNKLELDPMYRETLNEYMTSYEEQEAKIERYDKRIEEIAANARYKDKAEKLGCFLGIRTHTALSLIVETGDFKRFAKGNTYAAFLGLAPGEHSSSTSIKRLGISKAGNTHLRCLLIEAAKGICKGAIGHKSKELRSRQNGQPAEVIAYADKANTRLRRKYYKMIRHGKKKNVSVAAVARELACFIWGMMTGNISIISGTRTSALAVSQG

SEQ ID NO: 504297 - protein, 320 aa, unidentified
MNVHIAITAAGVDIGRDYLDFAIAPTGLFKRFPNTDGGVAKLVAAVCKHQVKTLVIEAIGPYSYRLLRALRGVDLSVGVVNPQRIRAWRAAEGKRAKNDRLDAQAIARFAQKMPDVYRPIPDEASLKIKAMSARRRQIVEMIAMEKTRLKQAFDDELLASLRQMIALLEAQRDEVEARLNALLREAGRGDMLALLQTAPGVGPRIAATLAADMPELGHIGRRAAASLAGLAPHIQQSGINRGRASISGGRPCVRTALYMAALVASRSHPRTKAEYKAMRAAGKPAKVAFIAIARKLLVALNQMVAEKKTWTEEQKLQGKD

SEQ ID NO: 504298 - protein, 340 aa, unidentified
MENTDQNQPYSWILGIDVSKESIDACLVRQADGQLFESKFHNNLSGFRHLKRWCKEMHCECDSSTLCCMEHTGLYTRLLVHYLIGREVHVWLESSLQIKRSQGLVRGKSDKIDAQRIARYAHLYQDKARIMQLGILTLEKLKDLQANRKRLMKALQSLRTSVQELKPFDPTIGKVLEQTNREAIRGLEKSLDKVDAQILTFINEDQELKQKYDLMLSVKGVGKVLAAILLVYTHGFNRLNEGRKLACYSGVAPFVYESGTSIRGRTGVSKFANNDLKQVLHMAAISSVQHNSELHQYYQRKVQEGKNKMSVINAVRNKLLHRIVAVVNRGTPYELKLKNS

SEQ ID NO: 504299 - protein, 375 aa, unidentified
MFYSGIDLHKDNCFITTVDDGGRIVKQERLRNVPEIILAYFASLSGPHKVVVECTAGWYWLDDLLEAHGIKLILAHAKYLKAISYAKVKTDKVDSETLATLLRLDSIPEAHKIRRDIRDLRDVMRARLRLVQKRTSCCISIHNLGRKLNCCDQPVINQRTFPGDLPEAYRLQLRNLYEQIDLLETQILDLEHFLQPVLIPNDDIQRLVWVPGIGKTTAFTVYLEADGIERFLSDKHFVSYCRLVPGAKNSNKSIRHKSGCKDGNKYLKIAFTDMAVHAIQYFPEYRRLYQKILRHSNEPIARTVVAKELARIVYHILKNKTEYRGLKGQPISHQKANQYPRLKRRLQPKADKPLAYLATPGKPVRLTDESSASAA

SEQ ID NO: 504300 - protein, 374 aa, unidentified
MVWLERGTRLSILNQECPPRFPSTDDQEDLTEMVMIGIDPHKGSHTAVALDDQELELASLRVRAGRRQRQQLLEWATPFDVRVWAIESANGLGYLLAQQLLAAGERVLDVPATLASRVRVLSSGRSNKNDPNDARSVAVAALRSPAMTEVRCEDHVTVLRLLAKRHIDLGRWRNKVCCRLHAHVAELVAGGISTEIVVAQAAELLAGLHPRGVAAVERHRQALELVEDLARIDDQLRASRRRVTGAVAASGTTLTELFGVGPINAAILIGYTGDPRRFATQHHYAAYNGTAPIEIASAGRTIHRLSRRGNRQLNHAIHMAAVTQIRHTHSPGRAYFDRKVEEKKTPKVALRCLKRRISDSVYRRLVADARRARR

SEQ ID NO: 504301 - protein, 424 aa, unidentified
MQTDGANQQQYAASIGFDWGDQQHAIALQAAGSGRVETQTIKQTPESLHDWVLSLRNRFGGRNVIIAIEQSRGAVINALLGRDFVHVMRVPPKSLARYREAFYPSGAKDDIPDASLLLEWARDHRDKVKVWTPDKPETRALQKLTEFRRDTVGRRIVITNMLTQSLKEYFPQALSWAGELDTHMECDFLEKWPTLEKLQKAKQAQIRKFYQERGCRRTEVIQQRLEEIRLARPLTQDSAVISTSITVLETLIPQLRCLIDAIDRIESQIHELFNEHEDRDIFDSFPGAGPVMAPRLLAAMGSDRSRYDAALEVQQHSGIAPVMERSGNSTWVHRRFACPKFFRQTFHEFAGLSIRYSSWACAYYKMQIDKGKGHHAAVRALAYKWIRIIYRCWQNRVPYNEEIYLEALRRKNAPLLEFLDQAAA

SEQ ID NO: 504302 - protein, 340 aa, unidentified
MEQYVGLDVSQAETAVCVIDAQGKRHWQGSCRSTPQAIAQILKQRAPFAFKVAMETGPLAVWLWHSLRRAGVPIICLHARHVKAALSIQMNKTDANDAYGLAQIVRAGWYREVEVKSIESHRLRLLLAARAKLVSMRTTLYGQVRGLLKTFGVVLPAGKGSSFERLVLKGVPADGTVTMVVNSLLATWKQLTTEIRKLDRVIIKTAAVSPICRRLMTVPGVGPTTAVAYLATIDQPRRFAKSRNVGPYLGLTPRRHQSGEVDFAGRISKCGDRTMRSLLFEAAGVLLFRNKQASPLKDWGLRLVRRVGSGKARVAVARKLAVLLHRLWVDETVYRQAVAS

SEQ ID NO: 504303 - protein, 340 aa, unidentified
MSEITTVGIDLAKNVLSVHGVDGHGKSVLRKSLTRGKLLELMAQLPACRVGMEACSGAHELARTLQSLGHDARIMAPKFIVPYRKNQKNDGNDAEAICEAVGRPNMRFVPIKSAEQQAVLVVHRVRAELVGARVGLINQVRSLLTEFGIVLPQGRFSFRHNIGTALDDERLPILARQILHEVNARIRALDEDILAYDRRIEAMVRDSALMQRIVRVCGVGPITASAIVASVGDAKLFKNGRQFAAWLGLVPRQYSTGGRSILGRITKRGDVYLRTLLIHGARSALITLSRRTDRLSRWAAALTERRGFKKACVAMAAKNARIIWALLAKGEDFRLERTAA

SEQ ID NO: 504304 - protein, 364 aa, unidentified
MDTHKKEHKVALKYPCRQKIVRLIVRNSSSEISKMIRKIVKTSPGEVRFCYEAGVCGFNLKRRIESLGCKCAVIAPSLTPTKPGERIKTDRRDAVRLLEMFKAGLLTEVHAPDPQQEAARELTRLRQTARQNLMRIRHQLLKFLTRHGYIYTEGNHWTGKHLRWLRGLEFEEPLLQEVFDSYFTEMQHCMQRLDSMDKQVGHLADSQAYKEMVGLLKCFHGIDTLTAISIITEVFDFGRFSSPRDLMSYLGLTPSESSSGEKQKKGPITKTGNKRVRRLLLEVSWHYRHPYHISKVLKQRRKNQPQWAIDIADRAGRRLRKRYWYLIHRGKMQCKATTAVAREMAGFIWSVFREYQARNTHKAA

SEQ ID NO: 504305 - protein, 375 aa, unidentified
MKEKLRFLGLDVHAETIAVAIAEPDGEVRSLGTIPNRAESRRKLVKKFGPADKLRACYEAGPTGYVVYWQLAELGIQCEVVAPTLVPVKAGDRVKTDRRDAEKLARCHRSGDLTAVWVPDEGSEALRDLVRAREGAKQDQMRARHRLSKFLLRSGQRPPTGVRPWTRPYLIWVAQLRFTQIAQEATRQDYLHEVEHMRERVARLEQAITEAVKLASPALQQVINDLQALRGIADISAVTIAAELGQVSRFGSAKQLMGYCGAVPSEDSSGKRTRRGGITKTGNAHLRRIVVEAAWSYRRPPCIWYGLRRRQESISEEAKEIAWKAQHRLHKRYMRLGAAGKDQRKIVTAVARELLGFIWAIGIRAETISKQQIAA

SEQ ID NO: 504306 - protein, 373 aa, unidentified
MKKNTTTSSARSKKTRQTASTKTTPTRTVGIDLGDQNSAYCVLDAQGDVLSEGTIRTSESGFAEQFQSMSPCRIALETGTHSPWVSRLLQKYGHDVIVANARQLRVIYESDRKNDKVDARTLARLARIDKDLLHPIRHRSDKAQADLAMLRARDALVQVRTKLINCARGMVKSVGGRLPGASGPYFAKKVREHVPDAIREALTPVLDQVEQLATQVRDYEKRIEQMAQTEYAQTQLMRQIPGVGVITSMAFLLTIEDPHRFAKSRDIAGYLGLLPRQSDSGQSKPQLSITKAGDPLVRRLLVSCAHYILGHWGPDCDLRRWGLSLMEHGGKNAKKRAVVAVARKLAVLMHKLWVTGEVYEPLREAHRDKAAAA

SEQ ID NO: 504307 - protein, 412 aa, unidentified
MAEITRGAVARVGVDLSKHVFQVHAVDRSGRLVLAKALSPERFFAWCAELPAGCLVAMEACGGAHHAARRLRLQGVDARLIAGHFVTPYRMAGKCGKNDANDAAAICEATGRPHMRFVPVKTAEQQGQLSVHRLREGYKAERTALINRIRGVLAEFGLVFPQSPEALRRVLADVLEDASNELTGIARLVLQRAHLHWIDLDLQMKWCDERIEAHARSDERAAKVAALQGIGPIGASALVASVGDFRQFASAEQFGAWLGLVPSQNSTGGKARLGRITKRGDDYLRTLLIQGAKSAVMTAGKRDLPPASRTKVREGSPHIRRMADMRKSKYSEEQIIGFLRQADAGLPVAEICRKGGFSDATFYKWRSKFGGMEASDAKRLRELEAENAKLKKLLAEAHLDMHALKSVLGEKR

SEQ ID NO: 504308 - protein, 412 aa, unidentified
MDRLVERCAGLDVHKDSVAATVRVPGTAGQRLQETRTFPTTTRGLLTLADWLESYGVTLVGMESTGCYWKPLYYVLEERFECWLLNAQHLRNVPGRKTDVADSAWICQLVEHGLVRASFVPPKPIRELRDLTRYRKTQIEERSREVQRLDKVLQDAGIKVSSVASETLGVSVRRMLDALVAGTHDPELLAELARGRLRRKLPALQEALTGRFRSEHHGLLVSQILAHVDYLDETIATLSARIEHVIAPFSRKRELLETIPGVARLGAEVLIAELGVDMSVFPTDAHLASWAGQCPGNHESAGKRRSGKPRKGSKWLEKTLTESAKAAARTKGTYLSAQYGRLRGRRGPGKATGALRHSIVIAAYHILDRNVPYQELGADYFDRRRSSEQRTKRLVRQLEQLGHNVTLQPLAA

SEQ ID NO: 504309 - protein, 316 aa, unidentified
MHPSELFIGIDVSKARLDGAARPTTLTFQQPNDPAGIAAVVALLLPLRPALIVLEATGGLELPLAAALTAAGLPVAVVNPRQARDFAKASGRLAKNDTIDAAVLAHFAQAIRPQTRALPDADVRSLQALLARRRQLLEMQTMEQNRLGSCSEPPIQADLQAHLAWLAQRLGLVDKQLQEAIEHSDVWRAKENLLRSIPGIGPVSSRTLLAALPELGTLSNRQAAALAGLAPFDDDSGRHRGARRIKGGRAAVRQALYMAALSASRHNPALVAFKGRLVRAGKKAKVILTAVARKLVVLANAVLRTGRRWDPSLVMP

SEQ ID NO: 504310 - protein, 322 aa, unidentified
MKNTSSESTHRKVFIGIDVAKETLAVFVSSTGEYLELANDGEGHGKIIELCERTGPEKICLEATGGYQTELMLALTEEQLPVSMANPRQVRYFAKGIGLLAKTDKIDAKMLATFAELAKPEITVMPGDEHRLLTALLRRRDQVQKMLTAEKNRMELAHPSVKSGLKKHVKWLEKDLARLDKQIRSTLRESSLAEDAEILETIPGVALISSASLVSELPEIGKVSNRRISALSGVAPFTQRSGKWVGKDKIQNGRKWLRKKLYMAAFNAVRYSPEFKAQYDRLVARGKPHKVAMVAVMRKLICVCNSMVKNQTTWNPSLAEAR

SEQ ID NO: 504311 - protein, 359 aa, unidentified
MAMTMLEARRVTGGVDTHLDVHVAAALDPLGGLLGTESFEVNPAGYQSLLSWLESSGAVGKVGVEGTGSYGAGLARFLRQHGVSLIEVDRPNRAERRRSGKSDPLDAVEAARAALSGRAKSLPKSRDGAVEAIRVLLVAKRSARQARVKAVTQVRHLVITAPDELHRRMKGLSVSALVEEGAKLRPSRSTDPVVAATKAAISSLAHRMQALESELDELAEMINALLVATAPDLLALSGIGPDTAAALLVCAGDNPERLRSEASFAHLRGVAPIPASSGKSTGRYRLDSGGDRQANSALWRIVMVRIAHDPETTAYFERRVKEGRTKREVIRILNALRCPRGLPPPISRLSPWPWVWLIP

SEQ ID NO: 504312 - protein, 316 aa, unidentified
MNYLGIDVSKKKIDCCLIVGDKYLHRVLKNDQSGFEKLRDWLKKYTDKPVYACLEATGIYSEHIADWLHDEGHSVALVNPLSIKKFAEMQLLAVKTDKQDAKTIAKYCQMTQPTLYAPPPKSERQLKALTRQVEYLKEMVVANQNRFQVSQDVTAPIIADTIAHLRQQISQVEQQIQTHIKQSPDLKDKADLLKSVRGIGAATIPHLITLFGFKTFSTAKAAIKYVGLNPIIKQSGEKKTRFIAISKQGDKTIRTALYMPAVRAFTLPEWQPFVNRLKAAGKTGKQIVCAIMRKLLVYCFTVLKNGRPYDPQIQAA

SEQ ID NO: 504313 - protein, 424 aa, unidentified
MKVTYQTCCGVDVHKSFLVATIVKTTGGIEPSYQKKRFSTFNNSILEFKQWLLDNHCHDVCMESTGKYWVPVFNLLEDKINVVIANPKWVKAVKGNKDDTKDSKWIGDLFRLGLVKGSYIPCKKVRILREYTRYRYKLVSCRSSEKNRYQNALTVCNVALDSIVSDIFGKSSTSIIDYLLEQSGTSINHEEIASKLLRSLKSKEDAVIESVEGYQMTDAQKYRMRLVRAHMDYITAEINDVDKMIENMISSNPDFENAVQFLCTIPGVKRDSAITIISEIGTDMSQFSSSKRLCCWAGLTPGSNESAGKKKSVRITRAGVYLKPALVQCAHAAVKSDKSPYYKKKYESLVKRRGKKRAIIAIARMILTAIYQMLSTGEQWNPSDLYKIDMPVALVEKQKAKAIKQARKLLQREGLLPPDEPLAS

SEQ ID NO: 504314 - protein, 435 aa, unidentified
MSLSTPVPHAERSHMKPQVSEAFAAFVGLDWADAKHAICLQAAGTVQREFLSITHSPETVHTWVQTLRTRFHGQPVAVCLELNKGPIVSALRHYDCLVLFPVNPLTVAKYREAFTPSRAKDDPTDAELLVDILLKHRDKLAPLNPQSPAMRALAQLVEHRRRLVGDKVRLTNRLTSALKNYFPQVLQWFAEKDTAIFCDFLSRWPTLKAAQLARRTALEGFFRTHHVRSTDLIATRIEAIKSARALTTDDGVITPNAILVHALVAQLRVTLQGIADFDRVIVQRAQDHPDFPLFDALPGAGAVFAPRLLVAFGEQRERFTSAEDLQKYAGIAPVTERSGKKAWVHWRLQCPKFLRQTFVEWAAESTRHSFWAQVYYQQQRDKGKAHQAAVRALAFKWIRILYRCWQERTPYDEAIYLQALKRRNAPLLHNLADMS

SEQ ID NO: 504315 - protein, 343 aa, unidentified
MDTKRYLGIDLHRDCFTCCIRLETGRNYLSRWKLEELGKFVKKLRPSDAVAVEVTSNTRLFYQAVAPHVARVVVVDAHQFRVIAHSVKKTDPNDARNLALYLEKDLLPEVRMKDPQRAQIASLTQTRDTLVKLRTALKNKINNLLSAQGTNLSKESLGSEKGLAAVLQLRFDPLLELELKVIVQQIRSLNASIAELEEIIRREGEKLEGHSNLTSIKGIGGLSGSILLSIIGDVNDFAEEGKLAAYFGIVPRISHSNETEHSGRITKRGTKLGRTTLVQCALIAQRYSPYLKRYYEKIKRRRGTGKAIIALARKFLGIIYRTLKYRWVFEDFPNFVLADGTTA

SEQ ID NO: 504316 - protein, 465 aa, unidentified
MVKQREGGKKKPKVATPTALPVVRPRVAGLDIGSTQHWVCGPARADGTANVRMFGTTTDALHALADWLGAQDVESVAMESTSVYWIPVYELLESRGVEVVLVNARQLHHVPGRKTDVSDCQWLQLLHSCGLLRGSFRPAEAIVRLRALQRQMANLVAERTRCVQWMQKALDQMNVQVHRAVADLTGTTGMAIVRAIVAGERDPATLAGHRDPRCHKSVDEIARYLTGTWRAEHLFTLASALRLYDAFGQELAVFETQLRAELAALAPPARRADPVPAHPNATKEKAIRRRGEHPVRTTLWRVAGVDLTRIDGISTGVATVVLTEVGPNLAAFPSEDDFVSWLRLCPRTPISGGKPLKKRRNGLGANRIAGALRTAACALQHSKTALGAAFRRVARRKGAAVAVFATARHLAKLIYRMLRFGQNYVDIGEQAYERQFQLRRLASITEAARSLGFTLVEHTPEPASG

SEQ ID NO: 504317 - protein, 402 aa, unidentified
MAYDFVIGVDVGTYFHHACALDSQGRQVLSKRINQHESSLRKLFGQFLADNASVLVIVDQPNNIGRLTVAVAQDMGADVRYLPGLAMRQLSRIHVGNSKTDVRDAYVIAHAGLNLPDSLRSVDRVEEVFIQLKVLNGIDEDLARAYTRLINQMRSALVGTFPAFEHVLRGQMIHRKWILNLLAKYGGPTKIRRIGKTRLAAFARSHKARNPEPVIDAMLAAIHGQTVSIAGSEYAELGVAMSAKDALAKLEHRKEIEAQVLKLIQDIPQTEILLSMPGIGPRSATQILMAVGDMSDFPDAAHLASYAGLSPRTNQSGTSIMSNSPNRAGNKKLKNALWQSSFASIRFHERSRQFYERKRKEGKRHNAAVVALARRRFNVLFAMMRSGELYRDIPTVQEAAAA

SEQ ID NO: 504318 - protein, 321 aa, unidentified
MMTEPAKIQSILGLDVSCDTVALFDSRTHRSITIANDPDALRAALQPYQASATLAVCEATGGHEDTVLGVLLELSIPAHRADPAKVKAYIQSFGKRAKTDPIDARWLARYGQDRAEALPQWQPKDPIQQRLTLLVARRLDLVAMRVQEQNRLKAPRGSFLADDINAHLDELNRHIAALNAEIDSLITQDHDLTLRAKALRSVPGIGPVLMPMLLALMPELGSLNRRQVASLAGVAPHPKDSGKVSWHRATFGGRRTIRPALFTAALTACRGDGPLATAYKTMVKAGKPKRLALTALMRKIITIANARVRDALKPKTEKMPA

SEQ ID NO: 504319 - protein, 322 aa, unidentified
MSVKVLGIDIAKQKFDVALLADGKIKNKTCRNSTEGFETLKVWLEKQGIQKVHACLEATGNYGEDLSIYLHEAGHTVSIVNPARIKGFAQSELVRTKTDKLDAGVIARFCLAMRPEPWIPPAPEIRSLRALVRRVDSLIDMRSQEKNRISTAHESVIPLIKEHIVYLDQEIEKIRKQIADLIGQNPHLKQRKDLLDSIPGLGKATVPHLLAELDNFDKFTHVREMVAFIGLAPKETLSGSSIKGKPRLCKIGNARLRKALYMPALVSIQCNPVMIAFYNRLKEKGKNGKVIVCAIMRKLVHVIFGVLKSGKMYDPNYKPTLA

SEQ ID NO: 504320 - protein, 421 aa, unidentified
MNFINQEVFQMNAVGIDVSKGKSTVAILRPMGEVVQTPVDVPHDAVSLERLAYQILSLGENTRVVMEATGRYHEPVAIELHDRGIFVSVVNPLAIHGYCSGGTVRKVKNDQKDSLKIAKFALDHWVDLREYTPMDAVRQQLKIFSRQYNLYMKSRVALQSNLISLTDKVFPGVNEIFTSPERSDGHLKWVDFVTTFWHCECISLVSENAFTERYKKWCKHMGYKFSAAKVSDIYIDSLGHIVTLPKNNNTKLLIQTAAKELTAMNELLAVVKAEMIRLAKELPEYETVHAMFGVGELLAAQLMAEIGDIRNYPRRSSLVGFAGVDPEVNQSGKMNSESNPSTKRGSPHLRKTLFQLMTVYLRLSPADEAVYQFLDKKRSEGKPYYVYMTAGANKFLRIYYARVKECMAKLETPAELAEENG

SEQ ID NO: 504321 - protein, 396 aa, unidentified
MKKVYEKVVCGGMDVHYKFSVVAFRDASGRVVCRERLEHPDRKALMEQLSQWPRGIPIAMEGSFGWQWISDLMLQQGLNPQLANSLKVEKMREARGWAKTNKKDADLVSLLPLEKTDWWRVWMAPPEVRDRREWVRYRADLVQAQTRTKNRIHAVFHRHGIFHEFSDLFGAQGRKFLDALCQDGGGRLSGGALRAFRGHVGTLVHIRKELITVMKELHKHLLRTPLTCHLRKHVPGFGAVLPHVVVAEVGDMARFGYSHRRFAAYCLLAPRSWDSGKETDEPAVGRKLGRRGNRTLKWAFLEAARAAVRKGGHWRQLWDRHTQGGKKDKNRGYLKVARQLCKLVVREWHKAVSGPEESSRVRQEQPARRAKHRRRGRGQSSTRSGTGALNHPMVEV

SEQ ID NO: 504322 - protein, 323 aa, unidentified
MTTDYLGIDVSKVKLDVTLLQEKQAFSAIFKNNQTGFSALKKWLEKYQSKPHAALEATGSYGKAVTRFLYENGFPLSVVNPMQIKAFSRSEMLRVKTDKVDSALIARFCRTHQPRLWEPLAEVVEELQGLSRRLLELKGMKVQEANRQQAPGCVGLIRDSVERSLVHLEQEIAKLEKLIQAHLDQNPKLKAEKDLLKSIPGIGDITAALLLSEIGGWERYTSARQLAAHAGLTPMIRQSGSSVRGRGAISRLGNANLRKALFFPAMVAQKCNPIIRDFCERLAQAGKPKMVVIAAAMRKMLHIVFGVLKGKEGFKPDYLTSPS

SEQ ID NO: 504323 - protein, 406 aa, unidentified
MEVVHPRCSGLDVHKKSVVACVMVPGRKQVRTFGTVTAELLRLADWLQEEGVTTVAMESTGVYWKPVFNVLETTGLELLVVNAQHIKAVPGRKTDVKDAEWIADLLRHGLVRASFIPSRPQRELRELVRYRKTVVEQRSHLVQRMQKLLEGANIKLSDVASDIVGVSGSAMLRALANGESDLDRLVELAKSSLRNKREELRLALEGSFGSHQRFLLGKQLDQLEFLDRQIADLNLEVEQRLRPFEALLARLDAIPGIGQRNAEQILVEVGTDMSRFPSAAHFASWAKLCPGNDESAGKRRSGRTGLGSRWLRSTMVEAAWSASRVRNSYFAAQYHRLVPRRGKRRAAVAVAHSMLIAIYHLIKDGTIYQDLGPNHFDELDRQRITHRAVRRLQALGYQVTLQEASA

SEQ ID NO: 504324 - protein, 312 aa, unidentified
MAQVVIVAGIDVSKRWLDVALWPKSATLRVEPTASGYDQLVAWLTEHGVCRVGLEASGGYEIAVIDALQARSFEVIRCNAQRVRMFAKAKGRLAKNDRVDARTIAQATAVLVDVVPPARQRQLDPLIELLNYRRRLSDWMVDCANQLEHLKDHALRRATQRRVMALQRERLVIEHRLAQLVAADGDWQALARQLRTVPGVGPVLAQSLLAMLPELGKLPRRAIAALVGLAPYDHDSGARHGERHIKGGRATLRNVLFMATQAAIQHNPVIAAFAARLAGKKPKVIIVACMRKLLVILNAMVRDGTDWRAISA

SEQ ID NO: 504325 - protein, 385 aa, unidentified
MDEEANPTTKNGDKHMKKTDKYVGLDVHQDTTVIAVADGGRLGEVRSYGTIPSDLQALAKVLGKLGGEGVRLHVVYEAGPTGFVVYRRLKQMGIDCIVVAPSKTPQPKGVRLKTDRRDALQLARLHRAGELTGINVPDEVDESVRDLTRARADAVHDLTRAKQRLKAFLLRQGYRYPGKANWSEAHQRYLRKLTLPLPALRSVLEEQLLAIDQVTERVKRLDELIEVQVPQWRYYPAVRAVMCLRGFQLNAATVIVAELGDVRRFAHPKNVMAFLGLVPKEDSTGTTRRVGSITKAGNAQARWCLIEAIQKALTPPKVSARLSLRQEGQPAAYKELAWKTQVRLHKRGWHLLQRGVMKAKVNVALARELAGFLWDLLRQVPAPEA

SEQ ID NO: 504326 - protein, 337 aa, unidentified
MKQYSEAFIGVERMIRKLAGRYEKLHFCYEAGPTGYGLYRQLRALGHHCAVVAPSLIPKKSGERVKTNRRDAVTLARLLRAGELTSVWVPDTVHEAVRDLVRAREAASQDLRRKRQQLLSFLLRHGRIFGGRQHWSRAHLHWLAQQKFDHPAQQIVFQDAVDTIDDAATRLRRLDEQVAAIVPSWSMAPVVEAYQAMRGVSFVVAVTFVAEIGDLRRFDNPRQLMAFLGLVPSERSTGERVRRAGLTLAGNKRARRVLIEGAWSYRYPARVSQTLQARLEGLPKAVRAIAWKAQIRLCARYRRLNAAGKKLPVVIAAIAREMAAFLWAIARHVAPAV

SEQ ID NO: 504327 - protein, 399 aa, unidentified
MECRDAPAKRPRPAPGQALSRSLVALDQNSTIIAVVELSQSSWLVAGMLPGIERQPRKKLEPSPERLLALLHRWRDEAVKAGGTITRIALAFEAGRDGFWLARWLAARGVEAHVIHASSLAVSREHRRAKTDRLDTELLKRGFLGWLRGERGHCSMARVPTIAEEDAKRPNRERDCLVGERTRIVNRIKSTLARLGIRTFKPTLRKAAERLATVHTPEGMPLPPNTLAELQRDMARLGFVVSQIREIEEARQKRLEQQHETGSHAMVRRLARIVGVGVETADMLVHELLSRAMRDRRAVARYAGLTGSPDESGAQRREQGLARAGNARVRRGMIQLAWRFLMFQKESALTLWYRARTADSRSGTRKTMIVALARKLIIALWRFVTTGEQLEGVVLRPAS

SEQ ID NO: 504328 - protein, 338 aa, unidentified
MGTYAGIDLHSSNNYIGIMDQDHQRLFGKRLPNSLDKILEVLQPFKSDLKGIIVESTYNWYWLVDGLQEHGHRVHLANPSAIKQYEGIKHTDDKWDSFWLAHMKHLNILPEGYIYPKEQRAVRDLLRRRLFFVKHRTSNILSLQSTITRNLGIKMSSNAIKKLDMDDARNLFDCSNLVFMAQNNISTIKHLAKIIKGIEKQVKPQVELRKEFEMLTTTPGIGLILGLTIMLEVGDIGRFDKVGNYASYCRCVDSKRVSNGKKKGENNKKNGNKYLAWAYVEAAHFAKRYIPKAQRFYQQKMAKSNGAVATKALANKLARASYFIMRDQVPFDEDMLFR

SEQ ID NO: 504329 - protein, 375 aa, unidentified
MKEKLRFLGLDVHAETIAVAIAESDGEVRSLGTIPNRLESIRKLIKKLGPAEKLRACYEAGPTGYVVYWQLAELGVKCDVVAPTLVPVKAGDRVKTDRRDAEKLARSHRSGDLTAVWVPDEGSEALRDLVRTREAAKQDQLRARHRLSKFLLRSGQRPPTGIRPWTRPYLIWVAQLRFTQMAQEATRLDYLHEVEHMRERVERLERAITEAVKLASPALQQVINDLQALRGIADISAVTIAAELGQVSRFDRARQLMGYCGAVPSEDSSGKRTRRGTITKTGNAHLRRIVVEAAWSYHRPPCIWYGLRKRQESISEETKEIAWKAQHRLHKRYMRLAAAGKDKRKITTAVARELLGFIWAIGTKAETTVRQRLVA

SEQ ID NO: 504330 - protein, 365 aa, unidentified
MNSTQNKKIEQVKETTMIVGIDVGSEKHYFRAFNWRGIEITRKPVSFSNSMEGFSSFYDTLVELMQKSKLEEVLVGIEPTGHYWFDLGQFMDEKNIKFVMVNPHHVHKTKELDDNSPSKSDRKDPRVIAGLVRDGRYFYSCMPTGVYAELRNASNRRFVLVEEQTRAKNRLQKWIAVYFPEYKGIYTHIDAKGGLLVLKQAPTPEEIVRLGAEGIIKIWKDAKLRGNGHKKAMLILNAAMKSIGLKAGLTEARMEIQDLIEDYELQTKRLERVNDLIKELCRQVRYADKLLEIKGIGITTAAGFIAEVGDITRFDSTKELQKLAGLELVADSSGKHNGKTKISKRGRKRLRYLLFEAGDIGSGKE

SEQ ID NO: 504331 - protein, 340 aa, unidentified
MYCGLDMGKKSSHFCLVDEKRKVIEEGKVRNTEADLGRAFGKRPAMRICIEASTKSFWLADRLRELGHTVVVVDPGKTKAIGAGLIKNDKIDARVLATLCQADLMSAVDQPEESERLARMMVVTRDGLVRCRVSMMVMVRSLLDSEGIELRHATAEGFPAAVKELLQELQPAMAAALEPLVKGIEDLSVQVARCDKALEAAARKNPTMQLLMTAPGVGVIVAACFVNAIRDPKRFETSRDVGAYLGLVPKLYQSGTIHHKGGITKHGNRQARWALSMAANNILACTKKKSALREWGIKLSRKRGRKKAIVAMARKLAGILWAMWKNNASFEARLPQAKAA

SEQ ID NO: 504332 - protein, 400 aa, unidentified
MDRVEQGWIGIDAGKGHHHAVLIDRDGQRLLSRRVINDQPDLVALIDTVRDRVVDPVWAIDLAGGSASLVIALLLQHGQRVVYLPGIAVNRASAGYRGEGKTDAKDAAIIADQARMRRDLRELHVLDEDIAQLQLLSSYRADLAADRTRSINRLRGLLAGIFPALERVLDFTNRGPLILISGFQSPTAIRQLGAARLTGWLKRRGVHGAGRLAHAAVEAASRQTAHVPGQAAAASLIARLAQTVLDLDRQLTDLDREVAGIFRTHHDAAIITSLTGIGNVLGAEFLAVVGGSLAGFASADHLAGYAGLAPAPHDSGYRTGNLHRPQRYNRQLQRVFYTSAMISIQHSPASRAYYDRKRAQGKRHTQAVLALARQRVNVLWAMLRDHRPYQEQPPSHVLAA

SEQ ID NO: 504333 - protein, 338 aa, unidentified
MKLYAGIDLHSNNSVIAVIDEQDRVVLQKRLPNELERILLALASFKQWVAGVVVESTYNWYWLVDGLMQAGYAVHLANPAAIVQYQGLKYSAEEQDARWLAHLLRLGILREGYIYPREARAVRDLMRRRMQLVQTRSAQLSAMQTQFMRSRAQHPSSDELKRMLPEEVEALLSEVNVASGVRANLAVVRTLNSEIARLEREVLEQVKLAAQFAPLLSIAGVGRILALAIMLETGAIERFAKVGHFASYARCVDSKRLSNDKKKGAGNSKCGNAYLAWAFVEAAHFAVRYNARIKRFYERKAAKTNKIVAIKAVAHKLARAAYHVMRERVPFDEMRAFA

SEQ ID NO: 504334 - protein, 315 aa, unidentified
MAEGVYVGIDVSKAELVVAARPLGECVKLSNDRDGIRQLLARLGKWAPELVVMEATGGLQRQVMAALWSARIPAAAVNPAWVRSFAKGRGLLAKNDRKDAQLLALFAERERPQPRPPADSETQALQELVMRREQLVAMLVAEEHRLKRASAPVRKELRHHISYLEGRIKDSEEEIDKTVRRSDAWRRKRDIVHSVPGLGKVFCAMVLAKMPELGTLNGKQAGALVGVAPVARDSGTRHGPRVIAGGRFEVRHKLYMCALSAVRANPELKQFYRRLIARGKPKKLALVAVMRKLIVILNAMLKTNTLWRPPCPAST

SEQ ID NO: 504335 - protein, 357 aa, unidentified
MDIAIDLGKRRSYVVMEDNGNLVKEGYTETTKDGFSTFFGPVDNPKIIVEASSTLNRIANMFEGYDITVAHPAKVKLIAQSVKKTDKVDAHTIMDLYKKDYLPKSYLPSREIRDWRDLCRERSFIVGQRTAVKNKIRYQAYCLGIEFGKFTKKSIKMLKENPKMELLVEQLEYTTKIIKKYECMIDNVAETNPNAVLVDTVKGIGKVSALSIVSEIGDINRFQSEKNIFAYAGLVPRIYQSGDTVWKGRITKGNTFLKWILVECVAVHVMHSKSSPITDAYERVKERCGKKKAKIAAARHLLRAIYYMLKRNQNFDSYLRDRRCIDRPLLHCSAFKTNALLPYRKSVYRTAMDSRLL

SEQ ID NO: 504336 - protein, 412 aa, unidentified
MQTLVERGCGLDVHQATVVACLLIVRKDGRVQKQMRTFGTTTRELVTLREWLLSENCTHVAMESTGVYWKPVYAILEGALEIVVANAQHVKKVPGRKIDVKDAEWLADLLCHGLLRSSFVPPQPIRELRDLTRYRRKLVESQTAERNRLLKLLESANIKLASVASDVFGVSGLLMLQALVEGKATPQEMADLAKKKLRKKIPELELALEGKVEEHHRFLLKLQLDRLQAVEKDLALLEQRLQEKLQPYEAQVTLLDEIPGVDWTLAAAIIAELGVDMSVFGSVSQLASWAGVCPGNNESAGKRKSSRIPKGNIYLKTALVEAANAAAKAKGTYLRDKFYRLKARRGYKRAAVAVAHKILVAIYHMFSHQVCYNELGDVYLDKRNKHHLTRNLVHRLERLGYAVTLTPQEKAA

SEQ ID NO: 504337 - protein, 340 aa, unidentified
MTIATIGIDLAKNVFAVHGVDHNGKTVLVKPRVSRAALPELIASSPPCVIGMEACSGAHYWARLFRQYGHDVRLMAPKFASPYRMAGKSGKNDAADAQAICEAAQRPHMRFVPVKDENQQAMQCLHRTRQGFIEEKTATYNRLRGLISEFGVIAPQSTDALRYIVSDQKETLPVQVRQCVDDLLEHITNIEEKIAEYDRILSRVAKTDLRSQQLMELKGIGPTTASALVASIGNAHDFKNGRQLAAWLGLTPSQYSSGGKSKLGRITKAGDSYLRTLLVQGARSVLIGAEKRTDSFSRWVCSLVERRGYWRAVVAIAAKNARLCWASLHYGDDFKLYSAH

SEQ ID NO: 504338 - protein, 360 aa, unidentified
MKIVGCDFHPSWQQVAVFDPETGEIAELKLLNGDGEAERFYRELEAPALIGIEACGNSQWFIELAEQLGHVVWVGDAAQIRASYVRKQKTDRRDAGHILKLLMESRFPRLWTPTAAQRDLRQLLIHRHKLVEIRTRVKNGLQHLALNRGFPKQSSRLCGVRGRAYMEKLPLTDWTARRREDLLKLLAELDKHLGELDDAVQRAADEHPQARLLMTQPGVGPITSLAFVLTIGDVSRFKHSNQVASYLGLIPREHSSGGKQRLGSISKQGNRFMRQLLVESVQTVNRLDEGFRKQYAARCHHKAKGVAKVAAARKLAVRLYWMLRQNVGYPEIARIESSPRVALRGESHLETVNGRSRIQQ

SEQ ID NO: 504339 - protein, 339 aa, unidentified
MSQVTQVPQAMLYCGIDVSAASLAVALQPLEGAVEQREFDNTTAGHRALIAWLVKRGLPVRVSLEATGVYSLDLALALDGAAGIEVAVLNPKVVNRFAQTLRRSKTDKADAQVLAEYSQRMRFVAWRAPDRKALQLRTISRHIDGLTVEQTREKNRLHAAEGTGATPRCVIQDLKRSLAGLQRRIQRLRREAMALIQANDTMRQQFELLATVPGIAGISALQLLSELAPLSPEMTVRQWVAHSGLDPLHQESGTSVHRPSRISRAGNRHLRRALYMPALVTIQHDPHMKAFYKLLLSRHKAKMQALIAVARKLLHAIYGIFRSQTGYDGRKLFPDLLPQ

SEQ ID NO: 504340 - protein, 373 aa, unidentified
MRADRKRGKAKVGRMNSIVTGIDLGDRESLATVLSPIGDVTDRFTFPMNEEGYAFFASRVPKDARVAFESTIMAYPISRALRMHGYSDVTVAHPKTLAWIVRSKKKNDRADSLKIAKLHMAGMLPESHLLDRNDQIVRDLLVQRVKLGVEIGRLKNSLIGYLKREGVYDSLPQTRDNFSAKRRRAIRMLRFHDERDLILRTMLDRLRFLEKQCIPLEDSVRENAKVNDDVKILMSITGVDFYLASLISSFIGNVDRFPSDDHLASFFGIVPTSRDSANVKRRGRMSKDGSSIARWTLSIMVDTVMRHNEPIGEYYASVKKRTGSGKLAHVSTMRKLTRMLYHMLKTKQHWKWENPQLTERKMARLEMGGGDVS

SEQ ID NO: 504341 - protein, 387 aa, unidentified
MAKQNDLSRCLVTLEQDATVIAVIEMGQSSWLVAGIVPGLERNPLKKLSPDPDALLQLLHRWQKEAVQAGRAIKRIVVAYEAGRDGFWLARWLRAREIEAYVIHPSSVPVSREHRRAKTDRLDTELLKRAFLGWLRGEPKHCSMAAIPTVADEDTKRPGRERQSLVGERTRIINRVKANLARLGIRGFRANLAQASSRLEALRTPEGIAVPANTRAELQRDMDRLRFVKQQIKEIETTRAKRLAGAPNEQRHAMVRLLAQVVGVGIETADMLVQEVFSRNIRDRRALARYAGLTGAPDESGKKRRERGLAKAGNARVRRGMIELAWGHLLHQKASALTEWYRKRTSDTRGGTRKTMIVALARKLLIALWRLVTTGETPAGLLLRPAV

SEQ ID NO: 504342 - protein, 426 aa, unidentified
MYERMDEGHDSLDLTNKTKSMRSRQMNTTTILYVGIDVSKNKSDICIKDQLGNDLIQRFKIANNKADLGKLYETIESIKCRTPEKSDVVFGMEATGIYSLPLYSALKRDGYRVKLYNPIQTNGFRKMNIRKTKTDPIDSAIIADMLRHSEPPQVSELQDLNLYQLRELGRIRHRLIEKQTLCKVQLVRNIDTVWPDYESVMKRVLGAASIAILKKYSVPSKVRAKSFEEFYELVKKASRSKISHQKAEEIYNHAGNILTIPELDSIITIEIKTLIKQLELYEEQVNSVEIKIDQSMNRIDSKIMSIPGIGDTLGPIILGEIGNIDRFSNVKKLIAFAGLDPVVSQSGRFQNTSGHISKRGSPLLRQALFLAANMARQNDDNLKRFYDKKRTEGKHHFSALNAVAAKLLRIVYWVLKNKKEYQTQVN

SEQ ID NO: 504343 - protein, 419 aa, unidentified
MRSFKSQKVRKFNRKSLIVALDVGKRVHYGYFRAPNGSEVESFKVCNTKRSFNDFWYKVRQFARAHGLEQIVVGFESSGPYAEPLCHFLKDKPVQLVQVNPMHTKRVKELTGNSPNKTDRKDPRVIADVIALGHTLTVVIPQQAAAELRRLSHGRQRAIKKRTAAVNQLGDLIFILFPEFNTIIKDIACQSAFYLFRHYPRPEDLAVTDAQLLAQALCKVSRGRIGTEHVQRLINAARRSVGISQGTESIVLELQQLIREIQFHDEFIGHIEQQMQHKLEQIPYSGVILSIRGIGVVTVAGLIGEVGDFRQFNTIAELIKLAGLDLYEISSGQHRGRRRISKRGRPLLRKLLFFAALNTIKAGGIMHGQYQQMLQRGMVKIKALTAISRKLLAVIFALVRDNSVYVENHCQIHELKRAA

SEQ ID NO: 504344 - protein, 392 aa, unidentified
MFFVGIDIGKNNHVASMMNESGKVVFKAFSFPNTSDGGNSLFSKLSSYSSSTSDFEIGMEATGHYWLSVYSFLFEKGFLLHVINPIQTDGWRRGTEIRKRKNDIIDSLLIADLIRYGQFVETRLADEDLFSLRTLTRFRTYLVESISDLKRKVVCVLDQIFPEYQSIFSDIFGKTSKEILLQFSSPIDFENISSESLAELLAQLSRQKIGAAKAEQLKAAASSSFGITFAKNSFTFQLKALIEQISFIENQVKETESEISNIMRKLNSPITTITGIGNVTGAAIISEIGDISKFDNPRKLVAFAGLDATVTQSGEFEASHNVMSKRGSPYLRKAIFQAALIASFHDPVLSVYYQKKKAEGKHHLTCVGAVARKMCNIIYAVLKNNQPYVPKA

SEQ ID NO: 504345 - protein, 349 aa, unidentified
MTRYVGVDIGKRKCSVAVVDQQGLILEEYTFPNDHQGIASMVSRLSMDDRVVMESTGSVWTNLYNHLESSHIPVTLANPLKTKAIAWAKTKTDRVDARILAHLLRANLVAESYVPPVELREVRALVRHRLAIVKIRTMVKNKIHSLIDKNGLAPEYSDLFGRAGREWLRTVQFESSLDRLMLDNHLTHLNSLQDQIHTVDQEILSRATRDEYVRLLLSMTGVNIYTALLLRSEIGDITRFPDHKKLVSWAGLAPSLHQSGSIEYHGHITKQGSRILRWIMVETARGAVNHDERLRAFYERIKHRRGDQKAIIATANKMLKIIWTILTRKEPYQSRNQRLYQEKLNRIPD

SEQ ID NO: 504346 - protein, 430 aa, unidentified
MKNRTNQRLEEITAGTLIVGVDVAKAVQWARIVDYRGVEIGKALSFQNNRQGFESIVTRILEICKLKTLKYPIDNVIIGMEPTGHYWKTLANYLIKANYKVVCVNPYHTKKSKELDDNSPTKNDKKDAITIARLVKDGRFFDPYLPQEDYGELRNLTNARVSVMKRSNAVKNTITAILDEYFPEIWTVFKSPLRGKASRQVLRSCPFPSFILAIGEVGVLEEIQKAVKKTVGMKKVRQLISVAGMSVGVKYGLESAKMRLCWLLDELELIEKQLDQVEQAMENMLYKVGYAQQLLSIKGIGIVTAASFLGEVGDPLRFQNARQIANYAGYNLVEDSSGKNKSGTCISKRGRSQLRSVLYQMAFTMVGTNAEMKALYRHLTTRKNNPLKKKQALVVVSKKIITVIYSLLKKQEIYKPELVLGTVRKEMMAA

SEQ ID NO: 504347 - protein, 353 aa, unidentified
MKTYYVGMDVHRASLVMVVLNGAGKVVMQSVIETGAERVRGFLRQLRGKVYVTFEEGTQANWLHEVVRPLVTEVVVCDPRHNKLLQSGNKNDRVDAQKLAELLRHGALKAVYHGDNGVRALKELVRTYDCLVSDTTRVMNRLKALYRGRAIGCAGHDIYRQDRRQHWLEKLTERGAKQRASFLYQQLAALKPLRHEAKRLMVKEARRQPAYPWLMSVPQFGSVSVAQLLAIVSTPHRFRSKRQFWTYVGLAVVTRTTADHEVVNGVLRRSKRPVSTRGLNRNHNHLLKRVFKNAANGACHSGPFKAAYDLRMAQGMVPSLARLTVARQLAATTLALWKRGEQFNQERMKQQAV

SEQ ID NO: 504348 - protein, 348 aa, unidentified
MKSIQHPPAFVGIDIAKHHLDIHFRPEGRTFRLPYDRTGLARLLGELGALEDCLIVLEATGGLERAAVRLLADCGHAVAVVNPRQVRDFARATGLLAKTDRLDAAVLARYAEAIRPAPRAGRDRRSEALADLLARRRQLVAMTTAENNRLGACREPAIRRRIKAHLRWLDKELARMEDEMREAIDAHPAWRERLRRLEAVPGIGKTTAQGLIANLPELGELDRRRIAALVGLAPLARDSGLMRGTRSVWGGRAQVRAALYMAALVASRHNPVIAAFYKRLRENGKKPKLAIVACMRKMLTMLNAMMRDRTEWRGTPPPQRSPSLTPAIRPARRETPRRRPGVRARYRL

SEQ ID NO: 504349 - protein, 370 aa, unidentified
MSNSTTMFVGLDVHKDSISVACAPEERTADVAFVGPIGTRQCDIDKLVRRLHSKASRLVFAYEAGPCGYVLHRYLTAKGLTCFVVAPSLIPKKPGDRVKTDRRDAVELARRLRSNDLTPVYVPSVEDEAIRDVCRAREDAVKDLKAAKLRLKSFLLRLGLHYVGRADWNDAHQRYLARVVCPTPVQQIVFQEYLRAVTEIADRLKRVESELREHVPSWRLSAVVEALQALRGVQDTVAITTVAELGDITRFDSPRQLASYVGLVPSEHSSGPSRRQGSITKAGNSHARRVLVEGAWAYHHPAKVSEAIQKRLERLPKNIQDIAWKAQVRLCKRFRRLSARGKHPNVVVTAIARELLAFMWAIAREVPVKA

SEQ ID NO: 504350 - protein, 342 aa, unidentified
MYSGRQFVGIDLHRRRSVIVRMTAEGDPLECVRISNDVEMLSTVMARAGESPEVVLEATYGWYWAVDALRDLGAQVHLAHPLGVKAFEYRRVKNDERDARDLADLLRMGRLPEAWIAPPATRELRELVRHRAKLVGIRSNCKAQIHAVLAKCGIQVSMTDLFGLAGTELLDRLELPRPYAARIASLRRIIGALDFEIDAFAGQVRGRLARDPGFLAVQAIPGVGPILGAVFVAEVGDVHRFARAEELTCWAGLTPKHHESDTHVHRGHITKQGSRLVRWAAIESVQILPKHTLVGRIRDRVGDRRGRNIGVVAAARRQLEFVFYALRDHRVRALQGTRPVAA

SEQ ID NO: 504351 - protein, 415 aa, unidentified
MDKQITSSAGIDWAKDEHALCVIEQSGRKILLEGRFAHEERGIAKLCRTLEDMGVERVAIERPEGILLERLLDAQITVLVIHPNQLKASRPRFRASGSRAKSDSFDAFCLAELARTDHHRFRALVADSDESRALKVLSRAREDLVGTRVALANQLRAELEAFWGGAALLFSEIDCAISLAFLKRYPSPTDAARLGEKRLESFLSQNCYCGGKSAPELLQRLRKAPQGRASEAEIEARREAVLALVGILKTLVERIKLLEERIARAVRAHPDGELFLSLFRTNNSTLTAACLVAQIGDCRERYPTNEALAAAAGMSPVAVESGKRKVAVFRRACDKRLRRAFATLAESTRHHNPWAKDIYRRARGRGCDHAHAIRILGRAWVRVIWRMWQEGQPYDPARHGGLRRLRSAEGLSQGV

SEQ ID NO: 504352 - protein, 388 aa, unidentified
MIYVGIDIAKTNHYASIVNYSTGEVIETPFLITNNKVGFDLLYSKIKDFDKEKILIGLESTAHYGNNLIFYFHKKQFKLGIINPIQTATLRKTRIRKVKNDKVDSILICEALSLGYYNLLSDYDIELLEIKSLCRFRKELKDKTSDAKIQLKTYVDQLFPELNAFFKDNIDTKTAHELLKLYQSPEDISNVNLTKLSNLLIKNSRGKYNKSRAIELKQLASNSVGINNYALCIQIKMTIELIELLESQIKDIEKQVSEFIKKSDSVITSIPGIADTTAAIIISEIGDINRFNNPGQVLAFAGLDPSVKQSGTFNASSTRMSKRGSSLLRYALILAANNVQLNTKTFNNYYNTKRAQGKLHYNALGHCAGKLVRTIFYMLKNNVTFNLD

SEQ ID NO: 504353 - protein, 342 aa, unidentified
MQKVSIIGLDLAKRVFQAHGAHADGSVSFRKKLSRERLLAFLKEQPRCVVAMEACGSAHHWGRAIRDLGHEARLIPPIYVKPFVKRQKNDAADAEAIAEAAIRPTMRFVAIKTEEQQARAMLFRTRDLLVRQRTQLINALRGHLAEHGIVAPQGPTNVKVLEQAIEDEATSLPLLITELARVYLEQIYQLSERIGALEKTVAHEAKCGATTRRLRTMPGVGPITAMAIETFAPPMGVFRRGRDFAAWLGLVPVQHSTGGKQVLGRTSKMGQRDIRRLLISGAMVIVRWACRKGTPEGSWLHRMLARKPRMLVAIAIANKMARSIWAMLTKGEDYRFPVAVAA

SEQ ID NO: 504354 - protein, 319 aa, unidentified
MPTQNAVMYAGVDVAKASLQVHLQGRQSEFKNTPSGLRQLCLELRKTSGVHVVCEATGGYEHALVKALHKEQIPVSVTNPAQVRAACQARGQRAKTDRIDAQMLTDFGQRYQPQPTAPTTPSQDQLVALTQWLQQLIHGLALAKTQAEHHQDPFVGRQHSKLMTHLESQIEAVEKQIKALLEKDPVLQQRVDCLDEIKGVGARTAWMVLAHMPELGRLNRQEAAALAGLAPWTRESGTMKGMRCIGGGRPEVRVALYMACLSAVRSNPVLRPLYQRLRAKGKLPKVALTAAMRRLLIYMNHQLKHLAADVPASGGDKTK

SEQ ID NO: 504355 - protein, 348 aa, unidentified
MFADQLDYVVGVDPHRDSHALAVVHVASGAVVFEATVVASSDGYAQAWKIADQHAPGRRAFAVEGTGSFGAGLTRFLMRREERVLEVGRLRRERRSGGKTDALDAVRAARSVLTSEWSATPRAGGERQALQALVAAREGAVNAKRAGLCQLRDLLITTPEPLRSQLRPLTRARLLQRLAATRPGGGRDPELRGSMLALRSIARRVLQLTAEERELAREIETLTRKLAPQLLEQPGVGPHAAAQLVLSWSHQGRIRSEAAFARLAGAAPIPASSGQTIRYRLDRSGDRKLNRALHMILVTRKRSHPATIAYIERRLQEGKTRREANRCLKRYLARNLYRLFEHGAPLAT

SEQ ID NO: 504356 - protein, 329 aa, unidentified
MKKNWYVGIDVSKKWLDVAIFVENSDLKGYFHTQVSNDKPGYRELLRWLKEHDVDASTCTYGMEHTGFYSDGLQHFLDKKGYKYTMLEPAVIKHYPIQPREKNDRLDAAKIADYLYRFKDTVKLSRVPDKTMEKLRELHKERKFYVEDRVCYLNRKLVVGKEEAKRLDKMIEMLDKQIDAIEEKIRDIIQNDKSLMENYLYLDSIKGIGFVNAVNAIVITQNFTVFKTARDYASYIGVAPHTKTSGTTVRWKPKPRKHCDLTAKADISQAAKIAVVHDVELKRFYERKCNGKDDADTVRKAMNAVKFKLVLRMFAVVRQKHTYKQLTTI

SEQ ID NO: 504357 - protein, 327 aa, unidentified
MWYVGLDVHCRQSTLCVLDEQGRKVRVDTIKGPWTKVLLALAVIKEPWAVCFEASTGYGVLWRRLQPMAQRVVVAHPGHLRLIFRSKRKNDRIDAEKLAKLLYLDAVPAVHVPSEAVLAWRGLIAHRNRLVQERTALKNGLRALLRGQGIVAPRSLWSRAGIAWVRALELALLDALRRDQWLERILTVQGQIQRVEKELDRIGQQHVGVTLLRTIPGVGMRTAEAMVAYLDDVRRFAKVKQVGSYFGLVPSQDASAAVNRLGHITKQGPSLVRRLVTEAAWQGIRRSPHLRRYFERISQGNRERRKGGATQSIRHVVNEKPASPLAG

SEQ ID NO: 504358 - protein, 342 aa, unidentified
MDTIGLDLHKRESQLCVVTEAGEIVERRIVTSRERFTAVLGSRPPARILLEASTESEWVARHLETLGHEVIVADPNFAPMYATRRRGVKTDRRDARTLAEAGRLGAYRRAHRASDAQRHVRAELAVRDALIRTRTRYGNVVRALTRRDGLRLPSGEPAHTDAKLAALPLSPALAAELAPLRALWAPVNTQIAAADARLAHVAAADPVVTQLMTTPGIGPVTAVAFVATLDDVTRFASAHQVEAYLGLTPREYSSGEQQRRGRISKTGNARMRSLLVEAAWRVLRTPDPAAAPLRAWADGIAQRRGRSIAAVALARRLAGILYAMWRDGKDYRAPPSAAIAVA

SEQ ID NO: 504359 - protein, 337 aa, unidentified
MEQVIRVGLDTSKQVFQVHGVDAGERVVLRRQLRRGELGRFFGALGPTLIGLEACGGSHHWARVLRGLGHEVRLLPPSYVKTYRKRRSKNDARDAEAICEALGRPSMRFVPVKTEAQQAALMLHSARELLIKQRTMLVNAIRGHAAEFGIVGAQGLGKLSELLERVRSSDIPELARRMIELLASQIDPLDMKLREIDTRLRDWFSTSPESQRLATIPGIGLIAATALALKIPDPGAFRSGRHLAAWLGLTPSQRSTAGRHRLGKISRQGDETLRSLLIVGATAVVRWARPGRASPWLLELLARKPRKLVAVALANKTARIAWAIMMRGETYRRQMPA

SEQ ID NO: 504360 - protein, 300 aa, unidentified
MKTLDGWISGSGLELSVSRSPEGIAKLAGFCAEHDVELVVMEATGGYEKLPFGLLWAAGVPCAIVNARSVRRFAEAMGVLEKTDRIDARIIADYAATKGLTGQAPESQIQQRLRALVTRLRQLTQLKVAQSNQRRLVDEPQVVATFDEMLALIARQSRALEIQIAELLGADPLWRALDAALREIKGVAGRTVARLMAEMPEIGTVSNKAVAKLAGLAPIARDSGQRKGKRPIRGGRANVRSILVVVAGVVARHDPDLAAFHQRLTQAGKPKMAVRVAVARKLLVRLNAKARDARATLATA

SEQ ID NO: 504361 - protein, 344 aa, unidentified
MTPIELNATAHDASLSLFAGIDVGAEELVLVIRKNGNPFDPQKYTNTRADHARLAKKLSKLPGIIVCLEATGIYHFDLSIALHDAGVLLMVVNPKSSHNFAKVLMKNSKTDAVDAHTLAEYAARMDFVAWTRPTTEKLALRSFARRIYALTRQKAAAKNHLHALNATLETPKAVLRDARLAIAQLEKRIDRLTAEALLLIAAYPDLKRILTLLVGIKGIAETSAIALMGELLLLPPGLSHREWVKFAGLDPKAFDSGKSVHKKTRLSKAGNRQLRSALYMPALSAKQHDPHVRAYFQHLVDNGKKPLQAVCAVMRKLLHAIHGMLKHDQPFDNSRFYTIPSAVG

SEQ ID NO: 504362 - protein, 272 aa, unidentified
MFPNTPAGFAQFIEWLGRQRVTRAHACLEATGTYGDALATYLYEAGHVVSLVNPAAIKAYAQSVLSRTKSDRVDASLIARFCAERCPPAWTPPVPELRELQALVRRLDALVEMRTMEENRLSSGISVEAVRMSVEELIAHLSEQIKRTEERIREHIESHPGLKRQRQLLDSIPGVGETTAAVLLAEVPDFSQYRSARQVAAFAGLVPRERQSGSSVRGRVRLSKIGNSRLRKALYFLIWWLISREHFLFLNATSALSVQSGLVRLKLIIGRN

SEQ ID NO: 504363 - protein, 332 aa, unidentified
MSIIGCDLHSRYQVIAMLERETGEIVTRRLEHEGGEAERFYRGLGKPALIGIEATGYTQWFERLVGELGHELWVGDPAEIRARAVRRQKTDTRDAEHLLDLLVNNRFPRVWVPTVEERDFRQLLKHRDKLVKMQTSVRNQLHFLAMSQGVCRKRRLWSAGGRRELEALRLGPWASRRRQELLDLLDGLQPRIEEMDKAVKAEALRRAEAVRLMEQQGVGPVTALAFVLTVGPVERFSTSRRLVSYLGLNPREDSSGGHQRLGHISKQGNEMLRWLLVEAGHTAARLDPELRRVYLRLKFRRGGRVAKVAIARRLAVRLYWRLRRDAPGSHVQ

SEQ ID NO: 504364 - protein, 354 aa, unidentified
MLTSTASTLTEVIVIAGVDTHADSHHAAVIDIHGRHLADRAFPSTTAGYQDLLGWVAGHGVIDTIGVELTGSYGAALTRHLTAAGVTVREVNTTDKATRARRGKTDREDAYAAAEKTLAGMATAIPKDTTGNSEAIRVLTLTRDSAVASRTRTWNQLRAILVTAPAELRDQLRHLTPAKLRTAITALTIPDEADVVARTTITALQRLTARIGVLDAEIRAADTDLTTLVTTTAPTLASRPGIGTHTAARLLICVADNGSRIHSDAALAKIMGACPIPASSGKTTRMRLNRGGDRKANSALHMIAVGRLRYDPATRAYRDKAHARGHSTREAIRSLKRAIARETYNALKTDRIIT

SEQ ID NO: 504365 - protein, 407 aa, unidentified
MLFIGVDLSDKCFDSCITDSDGNIISRNQFEFDDDGFRSFVCAIQKHEADSQNCILGLENPRSRLVDFLIQMGYTVMPTHPESIARYRESRFPSRAKSDPADARLIADYVREHHKNLRPISMPDETIRELSILLEDRNRLVDQKVQFSNQLTSTLKEYFPQAIEAFGSITNKSALKFLAQFDTHEQVISMSPQEIESALRECQCFRRDSQERFHKAMGKTSSYIPSGVMKAKVRLKNALVRHLLLLLDQIDDYEKHIKNIMDETPHGDIFRSLPGADYILGASLLVLYSSREFQSASEAQAFWGTCPYTVRSGQSTSVRFRKGCNKFGRNTFHQLAFCSLQVSLWAKKQNAKKRKEGKNSNHALRCIANTWVKVSFAMWRNKTTYDASKHMASVANHMMNQPAFICP

SEQ ID NO: 504366 - protein, 311 aa, unidentified
MTQEDAFVGIDVSKARLDVAVLPSGEAFEVANDQGGWSELIRRLRPLEAAAIGLEASGGYERSVLRALMEAGLAARLVNPLRVRQFARACGTIAKNDRLDALAIARFVQLVPQRKAVRSRATDALAELVTARRQVTDEITRLKNQAAHATQALLKRLAKTRAAHLERDRTVIDKAIAAAIAADPNLAAKHRLLRSVPGVGPVYAAALLALMPELGSLTNKQAAALLGVAPFDCDSGGYKGQRRIFGGRRTLRDIAYMAALVAGKHNPVFKAAKDRLLAAGKPPKVAIVALMRKMIVTLNAILRTNLPWANA

SEQ ID NO: 504367 - protein, 362 aa, unidentified
MEQFIGCDAHKTYSVFVAVNERGEVSEAIRVGHDRELYRQFLERLPAASQIALEAGGHYYWIVDEMEETGHHPHLAHPLEAKKRMGKTGKKTDKVDASGLGILLRNGTLPEVWIPPAGLRDQRELLRLRMFLVQQRTRLKNRIQGVLARYNIQLGVADAFGAEGRRRVRLRVRELPEHTAQGMEVELATLQFLETQIEDVEKRLEAMMQESAEADLLKTLPYVGRILSMVMTLEIGRVDRFPSAAHLASYAGLVPRVHSSGGHTRLGQICGDVNRYLKWAFIEAGNLVVIHQRRLAGQHVVRLYQRVKRKRNHQKAVVAVARHLAEAAYWILKKHEVYRDPQPRLNAPTKGQAANTLSSTHG

SEQ ID NO: 504368 - protein, 345 aa, unidentified
MHNIITGVDLAKEEIQVCVCKRNKVQSNQAMTPIEFGSWLASSKPMTIVFEACSTSNYWKQKALEYGHDARLISAKLVASVRQNQKTDKNDALAVAQAAQLTDVSFINGKSKEQQELQTLVRLRELAVKHKVAMQQQIKSLLLEFNIRISPSQGGLSGVVEGVLEDAENGFSMVFRQALSTSWQQLQRGIESIKQYDLYLEKAANGHEICKSLQALEGVGPLNAVNLYMALGCGEMGQFEKGRDASACIGLTPIQHSSGGKVKLGSVGKYVKNNMLRSCLVSGAMSAVNQAMRRPAKTKKEMWIQQMVERRGKRCTAVALANKTVRTAFAMLANGTEYKAELLAA

SEQ ID NO: 504369 - protein, 320 aa, unidentified
MRNAVGLDISKTTFDATAIIGGIEKSAKFDNDSKGFGQFKDWLDKLNCPDAHICMEATGNYYEGIADYIGSLYKVSVVNPLKISKYAESRFARTKTDKQDAKLIAEYCQTAKAQDLVIRKPIIDDGYKLKRLSALYAQLTADSTAQKNRLEAAKDTFVVKICQSNIKHLQRQIKAVKKELEKLTKQPALKDQTDRLATIPAIGRLTAVMLLNYLSGTDFPTSNKFAAFAGLTPQIKDSGTSVRGKQSLTRYGNRRLRALLFMPAMVAYRIKAFPDFIARLEAKNKPKKVILAAIMRKLAVIAYHVHKKGEDYDPTRYKSA

SEQ ID NO: 504370 - protein, 413 aa, unidentified
MDLVHERAAGIDISKGDAKVAIRSPGKRAGTFSTEVTTWGSTTNQILALRDMLVAAKVTTVVMEATSDYWKPFYYLMEDLLPVMLVNAKAARNIPGRKTDVSDASWLAQLGAHGLLRPCFVPPQPIRVLRDLTRARTIATQDRTREVQRLEKFLESTGLKLSDHVSDLMGVSSRAMLKALIKGERDPQVLADLARGRMRVRVPELVEALTGRFEVHHAYLCNMHLERIDSITRCVEELTTRINEAMEPFQTAREFLATIPGVSTLVADVIIAETGADMSSFQSPGRLASWAGLSPGSNESAGRAKSTRTRPGNRYLKGALGVAALSISRNPKNSYLGARYKRLIVRRGKMKAIVATQHSILTAVWHMLADGECYHDPGSDFFTKKDPTRTKNNAIRRLQELGYNVTLSNQEAA

SEQ ID NO: 504371 - protein, 383 aa, unidentified
MNYSAIDYHKKNSFISTCNEQGERIAEAKICGNDPSAFARYFARLGEGPGKVVVEACWNWSWLHDVLSELEPIEEVVLAHPYKTRVIAEAQIKSDKLDARILSQLLRTKLIARAHVPSKQTRQRRLLLRQRMFWVRLRTMVRNRVHALLARQHGLTLPQRADLFGSGGMKFLRSVQLEGSEAKLLGQDLEVLEQLELQIKQSEKEIRRQMGQEPEVERLQSIPGVGILLSAVIAAEFDGAERFQSNTKLWAYCGLAPSTRSSDSHTWHGPLLFRCNKWLRWAFIEAAWIAIQHSAYFAAIYQRQLTRGKIPNKAIVVVARRLCEIAWKVLREKRSFSAQPPPRQANPFSRSPSRHSGGAYCKQYRLAPSLSIGDRESNPLPCG

SEQ ID NO: 504372 - protein, 341 aa, unidentified
MNVTTIGIDLAKTVFSIHGTDQYGKVLVRKRLNRPKLLPYIAQLPPCLIGMEACSGAHYWAREMTELGHDVRIIAPRFVAPYRKSSKNDDNDAEAICEAVSRTNMRFVPIKTEDQQATLSLHRIRRGLTKERTAQINQIRGLLAEFGLIIPQGRYHARHRIPEILEDAENGLPMLARRLLNNINQRILQLDEEILTYDREIEAMARRDEQAKRLMAIPGIGLQTATAILASAPDPRQFKSGRHFAAWLGLVPRQYSTGGKVRLGRITKRGDKYLRMLLIHGTRAVIAKLPDKQDRLSGWAIDLVERRGYKRAAVALAAKNARIIWALLMNQTEFKTQPMEG

SEQ ID NO: 504373 - protein, 335 aa, unidentified
MKNYLFYVGIDISKSKLDVVILKKEAPNVTNHFIVENNLKGIKEILKNLIKQKIDLTTVLFCCENTGIYTFPLSSHLSEINLDFWVVPAIEIKRSKGISRGKNDKADAKDIALYSIRNIDKLKLSTLPETVIQQLKLLYTEREKVMKSFKIFKAIKENVDFMPKQVYKTIVGINNKTVKFLKATLKAIEKEMKAIISNQLELKNQFELIKSVPGIGDKTAIYMLIATRGFTAFDNARKFACYAGTAPFEYSSGSSIKGRTKVNHMADKKMKSILQMCALVAVKHDPQLKEYYERKKGEGKNAMLVLNNVKCKIIGRVFSVINRQTPYINTYKFAC

SEQ ID NO: 504374 - protein, 360 aa, unidentified
MRYSTIVGIDTHSKKNAVCAIVPATGEMREAVLSEDPGQLLSWISGQGFPEPVGCVYESGPTGFGLARALEAGGVACTVAATSKLSYRVDRQKNDRADAKWLARQMLAGGVRAVRVPTPEEESLCHLSRLRGEVAADLRKAKQRVSSFLLLTGTEYTLTKKKWSKTFRKWAESHEFDQPADTFTFRCKMSAVLRLEERLAEVEAEILRTIASSPKLSERMSRFTCIHGIGKVSAFSLVCEVHDFDRFNNGASFASHLGLVPSESPSGKKVSRGAIAKQGNSHLRRILVEAASCYSKQFKAVRSEDAAVPEAVRAKAEKCAARLRKRRAALKMRGVSANKAKVAVARELAEWIYHIAVMPA

SEQ ID NO: 504375 - protein, 354 aa, unidentified
MERYIGLDPHGTSCTFGVVGPSGRRLREDVVETNGSALVRYVRSIPGRKHLCLEEGTQSAWLYEILSPHVDEIVVAGITKSRGQKSDSLDAFRRAEELRTGQIKTPVFKAPRQYSRLRELARVHRMLVQDVVREQSRLKSLYRARGVAVSGTGIFSPKSRSRWLSRLPMASRWGAERLYEAYNRLQILRRDAERELVREARKHPISKILATAPGLGPIRVAQLLPIVVTPHRFRKRSQFWAYCGLGIVLRSSSDWVRTEGGGWARANVQRTRGLNRNHNARLKCIFKGAALTILTQHPTDPLYEHYQRLTSLGTKPNLARLTIARRIAAIVLRMWKDEKEYDPEQLKPIASAPV

SEQ ID NO: 504376 - protein, 372 aa, unidentified
MAEIGAVFVGIDAAKLKHAVAIAEPGRNGEVRYIGEIEASAEAVRKLLTRLAAKHGKLHVCYEAGPTGYGLYRQVIGLGHECTVVAPSLIPRKAGDRVKTNRRDAVQLARLLRAGELTAVWVPDEGHEAMRDLVRAREAAVDDLRRKRQVISSLLLKHGRVFPGKKTWGATYVRWLQGQSFTYPAQQVVLQEMVLAERHARERLARIEAAIAELLPSWSLAPVVEALQALRGIRIVTAATIMVEAGDLNRFESARQFMGYLGLVPGERSTGNTVRRLGITKAGNGRLRRALVESAWTYRHPPRTGTAKHYVLEKLPASVKDIAWKAQTRLCARYRALAGRGKLLTVAVTAVARELAGFVWAIGREVKPMPTA

SEQ ID NO: 504377 - protein, 343 aa, unidentified
MKTTTVGIDLAKNVFQVCALNRAGKMVSNRSVKRASLTETVAQLHPARIAMESCAGAHHWGRTFQKLGHDVILVPPQHVKPFVRGGKSDPRDALAICEAAKRPGLHPVPIKSLTRQDLQSLHRVRQQHVEHSTGIANQIRGIAHEYGVCFPIGLKRLCRELPYALEDAENGLTTTARELLAQRLADLLAVREEIKRTSQRIVLLAEELPAWARLLDLPGFGVMVTSSYLSSIGDGRQFKCGRQVSAWLGLVPRQHGTGGKVRLYGMTKSGDRYLRTMMLHGARAAIRWNRGKETPLGHWIDPIIERRGFNKAVVALANKNARIAWHIVANGAHYDPGKAFGSA

SEQ ID NO: 504378 - protein, 351 aa, unidentified
MKVYVGVDLHSNNNYVGIVNEANAVLFKKKLPNDLSTVLTVLEPFRNDTAGIAVESTFNWYWFVDGLMDNGYKVHLANPAAIQQYEGLKNIDDKRSALWLANMLRLGILPTGYIYPKEERPTRDLLRKRLQLVRHRTSHILSIKNILSRSLGIRMKSDEVKKFTENEVKKLFPEEHLFLSVNASVTIMRELTKEIDRVEKAVLAKTKLRKEFHGLLSLPGIGDTLGLTIMLEAGDIRRFPEVGDYSSYCRCVKSIRTSNGKNKGEGNRKNGNKYLSWAYVEAANIAKRYYPVVNRYYQKKMAQTNKTVAIKAISNKLARASYYILRDQVTYDEKKLFGGRAEPIVGLAHNP

SEQ ID NO: 504379 - protein, 393 aa, unidentified
MVCVGIDVAKDKHDCFIISSEGEILADVFTIPNNAEGFDTLLQAIRRSTRPEDKIKVGLEATGHYSYNILGFLLNKGLPTFVINPLHTNLYRKSLSLRKTKTDRVDARTIAAMLMSDVDLKSYTDTAYHNEELKSLTRYRFDKVRERAKLKQSVSRLVTILFPELEKLVSSLHSASVYALLSEFPGAKQISSTHMTHLKAVLKNASQGRYGQEMAETIRNAARSSVGSVMPAKSLELQHTIRLIRELDAEIEDIETAIQAIVDEMQSPITTIPGMGVRMGAVILAEIGDFSRFDSPDKILAYAGMSPSTYQSGQLSLSGAYSHMEKRGSRYLRYALYNATKHVCHWDPTFAAYLAKKRAEGKHYNVALSHAAKKLVRLIFAMEKSQRPYCAAA

SEQ ID NO: 504380 - protein, 338 aa, unidentified
MIVIGLDVHKQSVTAVAVDEAGRPLAERVIGVGSSELLAWAAPLGDERLWAVEDCRQLTGWLERQLLSAGEDLVRVPPKLTVPERRAGRTRGKSDPIDALAIARAAIREPGLSRPRPDERVYREIKLLVDHREDLVAQRSRNQQRLRWHLHQLDATYEVPLRMLSRASHLERVARWLGRREQELQVRIARELVSTIRQLNRAISELDQELEVRTNQVAPALLELPGCATVTAAKLLAEIGPVDRFRSDAQLARHSGVAPLEASSGRTQRHRLDRGGNRQLNAALYRIAITQARYHAPARDYLDRKRSEGKSRREAIRCLKRLLIRIIFNTLKASPALT

SEQ ID NO: 504381 - protein, 338 aa, unidentified
MKAYAGIDLHSSNNYLGVIDSKDKRLFGKRLPNCIDTITEALKPFRKNLEGVVVESTYNWYWLVDGLQAAGYKIHLANPSAMRQYEGLKHTDDKSDSFWLAHMLRLGILPEGYIYPKQQRSVRDLLRRRLLFVRQRATHMLSLKSMITRNLGITVSTNEIKKMKEQDVDPLFDDPYLALTAKSTIATITFLKTKIRDIEKAVLSHLSLKPEFEILTSMPGIGTILALTIMLEVENINRFAKAGNYASYSRCVKAERLSDEKKKGQGNRKNGNKYLAWAYVEAAHFIVRLCPEANRFYQQKKAKVNGALATKALANKLARASYYMLRDQVVFDKDKLFR

SEQ ID NO: 504382 - protein, 351 aa, unidentified
MIVVGVDAHKKTHTAVAVDEATGRVVDSIDVIARAKGHERLIRWAGRLSAERRFAIEDCRHVSGALERMLIERGERSARVPPKLMAEARRSSRRRGKSDPIDAEAVARAAIRHPDLPEARLEGPDREVRLLVDYRETLVSQRTAFQNRLRWNLHELDASIEVGLRSLDRLRVLADLERRLGVYEDTVLVRVALDEIVRIRELTLKARELEREIKVRMRMIAPFLLAVPGCAELTAGKIFGEVAGVDRFRSDAALALHAGAAPLEASSGERSRHRLNRRGNRQLNAALHRIAVTQLRIHEPAKLYVKRKMAEGKTKREALRCLKRHLARVVFNALSNMTTDTINVEPAMGLT

SEQ ID NO: 504383 - protein, 425 aa, unidentified
MAQISEKNYMSEKVDCAGQLASSITWHVKGAGKWLSSPALMQNTIVHHEGAASFEAAVKKVKLSGSIIKIGLDVHARLYVAVAQYDCLLPKPVRRLGPSEFVPWVKQLLRADHTVHVVYEACGFGFGLYRELKAAGAHCYVIAPRKLDEQCTRVKTDPRDATTLCQRLSRYLEGNTRELAVIRVPTEGEEQARHVSRQREQLVCLRQKLEAQGRSLLVNHSLPSPAHWWKNQTWSRLLKLLPGWICLRLEVHRPVLLGLEQQIGVLSAQLEATAPADVPVGVGKLTTVIMTREICSWERFTNRRAISSYTGLCPGEHSSGSKRIPGSVTKRGNPRLRAALVECAWRMVRFQPNYPPVKKRLAILAKGAHATGAQRKKAIVAVARHLAVDLWRVHTGRCSAAQLGLKSAETLIVRGEQKAKLNALA

SEQ ID NO: 504384 - protein, 318 aa, unidentified
MPELIHVGIDVSKDALEVACGPESPTQCFTNDDAGHEALVNVLHVHRVDLIVVEATGGYEAPCACALQAAGLAVAVVNARQARDFAKAMGYLAKTDRIDAQVLAALAAVLANRADRQKLIKALPSDEQQRLHALVLRRRQLVQMLVAERNRLPMSHQAARVSIEALIKAIRKQIVDIEADLSSHIAHHHADLAGLLRSAKGIGPHTSMALIADLPELGKLSNREISALVGLAPFNRDSGKMRGKRMIFGGRTQVRCALYMATIVAMRHNRVIQRFYQRLLAAGKPKKVAIVACMRKLLTILNAMVRTGKQWDETFHFA

SEQ ID NO: 504385 - protein, 416 aa, unidentified
MNAVGIDVSSRKSTVAVLRPLGEVVCLPFDVTHDIAGLASLVEKLKALDGETRVVMEHTGRYYEAVEKALHEAGLFVCAVNPLLIKEYGANSLRRVKTDKADAVKIARYALDNWADLRDFTPMDAIRYDLKTLNRQFQLASKQRTASANNLIALLEQSFPGIRKCFDSPVRSDGTQKWVDFAHSFWHVDCVRKQPFAAFCERYRKWCKRHAYLFKLSNAEEVYALAKRAVVLTPKSKVVKVLVQEAANQLSSISRSVEVYRAEMDRLAAMLPEYPVVMAMYGVGKSYGPQLMAEIGDVRRFERKQALVAFAGIDPMPNQSGDKNVRSNKSSKRGSPYLRKTLFNVIRTYLQCAPQDEPVFQFLNRKRAEGKPFYVYMLAAANKFLRRYYAKLRDYFASLDTLQPVAPIPTILKATL

SEQ ID NO: 504386 - protein, 339 aa, unidentified
MELYGGIDLHSTSIHLGIIDGKDKRVVKKKLPNDPEMILKTLGPYKEALVGIAVESTFNWYWLVDLLMEEGYRVHLANPSGMKRYEGLKHCDDTHDAFWLAHLLRLGILPEGYIYPKEQRPLRDLLRKRGHLVRLRTSLILSLQNIISRNCGCKVNVNRIKRIRENEVTPLLVGHGELELSGRVSKEAIDFFTRKIREIETVVEKKLRVKEPFTFLKTICGIGKILTLTIMVETGSIARFPTVGDYVSYCRKVPTRWTSNDKTKGKGNKKNGNKYLAWAYSEAAECARRYDPFARSYYNRKAAKTNFMVAHSALAHKLARAAYYVMRDQVPFDHHKLFV

SEQ ID NO: 504387 - protein, 402 aa, unidentified
MNSVGIDISKGRSTVAVMRPFGEVVISPFEIPHTDSELSELARQLKSLDGETRVVMEATGNYHAPVAKLLHDAGLYVSVVNAKLVHGYRNNDLRRVKTDRKDAVKLANYGLDRWLALPRYIPEETTRLLLKNCYRQYRQYSKVQTILKNNLISLLDTTFPNANRLFNSPTRADGSEKWVDFVAEFWHCECVRERSEKAFANKYQRWCRKHGYNFSEEKAHAIYDEASGHIGVMPKAETTKLLVEQAVSQLKATSTALAALKQEMQSLSSQLPEYPVVMEMFGVGPTLGPQLIAEIGDVRRFYSKKALVAYAGIDAPPNDSGDVTGRHKGMSKVGASSLRRTLFLVMSIYLQTSPLDEPVYQFMDRKRAEGKPYRVYMMASANKFLRIYYATVKAYLESLEQV

SEQ ID NO: 504388 - protein, 407 aa, unidentified
MRVIGLDVSRTFGEIAYLENGLLRPGGRVVLQHAELERFAQSLRASDEVVLEATGNTAAIVTALKPHVAKVVIANPLQVRLIAEARVKTDKIDAAILAQLYASGFLPQVWMPDERTLTLRRQVARRSQIVRHRTRLKNEIHGVLASHLIPHCPATDLFGNKGRAWLGQQPLPMDERLAVEQRLRELDRLQEDLAAIENLLCKSVLQEEQVKRLLTITGVNCIVAIGLLAAIGDIGRFASAAKLVSYFGLNPRVRQSGLQPAQHGHISKVGRAHARAMLVEAAWSAANAPGPLRAFFLRIRGRRGQQIAAVATARKLAVIAWHVLTGQEDFAWTRPALAARKRRELELRAGLPVKKGHRGPAADYNGKEIREREHAAAQLAEQAYTRFVANWQPRNKSSPPPLTPLGR

SEQ ID NO: 504389 - protein, 338 aa, unidentified
MEVYAGIDLHSSNSYIGVIDEQDQRHFGKRLPNSLTQILVALQPFKEDLEGVVVESTYNWYWLVDGLQQEGYKVHLANPSAIKQYEGLKHTDDKWDSFWLAHMKRLNILPEGYIYPKEERPVRDVLRRRLLFVRQRTSQILSLQSTIARNLSLRMSGNAIKKLSEEDAEDLFDSPYLVLTAKSNISAIQFLTKRIKDIEKVVKSEVKLRKEFQLLKAIPGIGDILTLTIMLEVGDIGRFAEVGNYSSYCRCVNSKRLSNGKKKGENNRKNGNKYLSWAYVEAANFAIRFSPKAQKFYQRKKAKTNGIVAIKSLSNKLARASYYVMRDQVAYDESKLFR

SEQ ID NO: 504390 - protein, 385 aa, unidentified
MQKLNDLSRSLTALEPDGTLIAVIEMSLSSWLVAGIVPGIERQPLKKLAVDESALLKLLHRWREEAEKAGRRIERIAVAFEAGRDGFWLARWLKARGIEAYVIHASSVAVSREHRRAKTDRLDTELLKRSFLGWLRGERDHCKMVEIPTMKDEDAKRPNREHDSLIGERSRIVNRMKAALVRLGIRGFNPKLKRATTRLDGLHTPEGEPIPPNALAELRRDMERRRLVNNQIRQIEEERLERIEQAPCDGAHVMVRLLARVMGVGIETADMLVHEVLSRNMRDRRAVARYAGLTGSPDESGRKRREKGLARSGNVRVRRGMIQLAWRFLLHQKNSALTKWFRSRTENARGTRKPMIVALARKLLIALWRLVREGVVPDGVVLRPA

SEQ ID NO: 504391 - protein, 421 aa, unidentified
MTVADSTPADAVLVAIDIAKVRNEVLIEASGQKRRRRLSVLNSRAEHDRLIDVLLAYGRSVVVCAFEATGNYHRPIAWRLAEAGFEVRLVSSLALARTREALHNSWDKNDPKDAQVILHMLRIRATQVYHDPLRVGINDVQELSKTHEAIARAKTEIQHRILTHYLPLYFPEIERFRGNSRSDWFFAFLDAFPTPASITALTKEEFVKAAWDVVGRKVSKTQILMDIYQTARTSIGLPLPLDAPAIRMFRMVIAEARSLIRQRNAIEAQADELLRHSQDYQLLRQIPGIGPINALTIIAEAGDLRRFHHHRQFLKFCGLDLSTQQSGQYRGQTRLSKFGNARLRRTLWIAGQVAIRQRENGFRHKFERYIARDRDNPNLRRKAMTAITAKMARVVHAVVKSGSDYRPFVEGRVPGGRTSVS

SEQ ID NO: 504392 - protein, 303 aa, unidentified
MHSENIAAYVGLDVHKETLAVAIAAPERLGEVRYYGTINNEAQAVRRLFQKLQGLYGNILSCYEAGPCGFGLYHQLTAMNIKCQVIAPSRIPKSPTDRIKNDHRDAISLARLLRAGELTPVWIPDLTHEAMRDLIRARAAAKRDSRVARQRILSMLLRTDKHYAGKHWTGKHRTWLANQSFSQPSQQIAFQHYCQSLEQIEDRILQLDQEISRLLPEWSLCNLVCQLQALKGVGQLIAITLVAELGDFSRFSNPKQLMAFLGLVPGEYSSGNSIRPRGITKVGNSELRRLLYEAVNRPGNPGD

SEQ ID NO: 504393 - protein, 344 aa, unidentified
MRYFAGFDVSLEETAIGIVDETGRLVREGKVATEPEALDAYMRAGGLPIERVGLEAGPLSTWLHGELTAGGWTMVCIETRRLRAVTRAMPVKSDRKDAEAIAQAMRTSWYRAVHVKSAESQRIRVLLRNRKILQAKRLDIDNEIRGTLKAFGLKLGKVGRAGFAGRARELVAGEAVLEAIMPPMLQARSALIAAFDKLHRQVLAIVRQDPVCRLLMTAPGIGAVTALGYKTAVDDPHRFRHSADVGPHFGLTPRRYQSGETDYSGRISKCGDAMVRALLFEAAMAVLYRVKAASRLKTWGRALMRRIGARKAATALARRLAVVLHRMWLDGKPFNPKPVHAAAS

SEQ ID NO: 504394 - protein, 346 aa, unidentified
MEHYVGLDVSLKLTAICVVDRTGKIQREGVVHSGPEAIATFIKLHAPHVVRIGLETGATSTWLWTELNKMGLPVICIDARHAKAALKMQINKSDRNDAVGIARIMQCGWYKEVCVKDLDSHATKALLVSRALLVKIKRDIENQIRGLLKNLGLVIGRAKMNMFAVRAAQLAEDRSELLAAVDPLLKAREAVEQQILDLDRKVLRLARNNAQVRRFMTAPGIGPVTALCFLATIDDPARFKRSRSVGAYAGLTTRRYASGEIDWTGRISKCGDRMLRSYLYEAANVLLTRVAKWSALKAWGVKLAKRSGLRKAKVAVARKLAVILHRMWIEGTEFKWSSKEAADQPA

SEQ ID NO: 504395 - protein, 370 aa, unidentified
MGKSALYVGLDIHKMSVDVAIAETGPAGEVRFYGRIGGDLEALDKVTRKLQAKGAELRFAYEAGPCGYQVYRHLTAQGHSCLVAAPALIPRRPGDRLKNDRRDALALARLLRAGELTPVKVPDADDEAMRDLTRAREDAICVERRARQRTVAFLLRHGRVYPGKTTWGRGHWAWLLQQVMDHPAQQIVLQEYLDAVREASARVLRLTGQIRDLVPQWHQAPFVAAYQALRGVSFIVAATVVAEVGDLDRFNNPKELMAYLGLVPSEHSSGASVRRGRITKTGNSHARRVLVEAAWAYRLRARVSRTLLKRQEGLPERVRQLAWKAQLRLCTRYRRLLARGKARQTIVIALARELAAFLWAIGRAVAPATA

SEQ ID NO: 504396 - protein, 350 aa, unidentified
MSKITRIGLDTAKNIFHIVGINKDNKEVLKKKLNRNQMVKYFTTIDPCTIALEACGGSHYWGRVLEEKGHRVMLIPAQHAKAARQGQKNDYNDARGILAASLRSDVRPVAIKSVADQDLQALSRLRSQAVNGRSNLARSLRGLLTERGIVLAKGLNKLREAIPGLLEDGENGLTPSFRGLLNREYDRLRGLDESVKSYDQLVKDTVKSDPGCQRLLTIPGYGPIVALQYRAKIGNGCHLGRGRDAGVLVGLTPRHFGTGGKNKIGSITKHGDGALRSGLAHGARAVVSRAKGKADPVSRWIQQLEARVGRNKATIAYANKMARVGWSVLRYETEFDPTLLCAARPTTASQ

SEQ ID NO: 504397 - protein, 396 aa, unidentified
MDRLFVGIDVGSRDNAVYIMLPDGSKHSSFGVQNNLGGAQTVSQRIQSALAGKSLTDVTIGIEATSVYGDSLMCFLREDGALGCFDRKLFILNPKQVNKFKAMYSDLPKNDPVDAFVIADSLRFGRIGSPIYMDDYRYKALQNLTRARFHAVQNLTREKQRFMNYLFMKCSGLAQEKIFSDNYGAAALAVFEEFETPDDIVDMDVEQLAAFIAEKGKNRSPRPDEIAKEVQAAARGSYRLPKTVNDSVNQVLSISISSMRAIQGQIKALDKEIERQFANIPNTLISIRGIGPVYSAGIIAEVGDINRFASQARLAKYAGLAWTQHQSGQFEGFLKYYLCEAANSLVRCDTEYRRYYDLKYKEVNKYQHKRALALTARKFVRLVFRLLKDNRLYIPA

SEQ ID NO: 504398 - protein, 334 aa, unidentified
MEKVTTLGIDLAKSVFSLHGVDGAGQVVLRRTVRRDQLAKVVAGIAPCLIGMEACSGAHEWGRRFQEYGHTVRLMAPKFVAPYRKSGKNDGNDAEAICEAVTRPNMRFVPVKSIEQQALLSIHRVRQGFVVERTATINRLRGLLCEFGVVLPLRSVTVRRQAAAAAENLPELVRRVIGDLLEQLRVLDDRIGGYDREIEAQAKLCEPAQRLMKIRGIGPTTALAIVATVGNAREFKNGRQFAAWIGLTPSQYSTGGKARLGHISKRGDAYLRNLLVQGARSVLNSAGRHQDRMSRWILELQPRRGYYRTLVAIANKNARIAWALLAKNETMRSA

SEQ ID NO: 504399 - protein, 412 aa, unidentified
MKRIRDRVAGLDIHRDTVVACCRVVDPDGSVHVSKKTFATTRKGLSELVGFCSDEGVETVAMEATGIYWRAPYYALEGLFSELWLCNASHVKNVPGRKTDLSDAEWLADVAAHGMVRPSFVPPPEIRELRELTRYRKTQADARGREIQRLEKALQDAGVKITSVASSVWSKSSREIIEALIAGERNPAVLAEMAKGRMRTKIAELEEALAGHFGAHHAILCRQIIDHIDFLDHSIAALTEEITTRLVPFEAAVAIVTSIPGIARTTAEVIVAETGADMSRFPTPGQLCAWAGVAPASYESAGKRRPAGTRHGSEWLRRALIEAARAGARTKGSYYSAQYSRIARRRGPNKAAVAVANSMLFTIWHLLSNGQLFEDPGADYFERRHDPAIEAKRLARRIEALGFDVNLSEKAA

SEQ ID NO: 504400 - protein, 390 aa, unidentified
MPKPQQRQPDDLSRSLVCVNMDTTLIVVIEMSQSSWLVAGIVPGIERQPLKKMKPDETGLLALLYRWRDEASTAGHTVSRIAVAFEAGRDGFWLARWLRAHAIDAYVIHASSVAVSREHRRAKTDRLDTELLKRAFLGWLRGERGHCKMVAIPTSVAEDAKRPNRERENLVSEQNRIVNRMKAALTRLGIRGFNPKLKKAPERLEGLRTPEGEAIPPNTMAELRRDMARRQFVRKQILEIETARQHQHAKGSEDGPNAMVRLLARVIGVGIETADMLVQEVLSRNLRDRRALGRYAGLTGAPDESGAKRREKGLARSGNARVRRGMIQLAWRFLMFQKDSALAQWYRARTENAASSRKTVVALARKLLIALWRLVRDGVVPDGVVLRPAQ

SEQ ID NO: 504401 - protein, 353 aa, unidentified
MDKITRIGVDLAKNVMQVHAVDSAGRVVVRKAIARERFVSWFANLEPCLVAMEACGAAHYWARKLRALGHDVRLIPPQFVAPYRKGGVHVKNDALDAEATCEAASRPHMRFVPVKSPAQQSVLVLHRMRTGYVEERTALVNRLRGLLAEFGVFVPQGIGQLRKHFVDRIEDGNNELAGPARQALMRGWAQWQALDEEIAWFDRQIAEHANHDSQAQRCMDVCGVGRLTASAAVATVVDARQFKNGRQLAAWLGLVPRQKSSGGKQRLGRITKQGDDYLRTLLFQGARSAVVRAHRRHDRLSRWIVQLQARVGYYKTLVAVANKHARILWAVLAKGERFDPSYAPARTRMAAGA

SEQ ID NO: 504402 - protein, 349 aa, unidentified
MKYYIGLDAHKSTCTAVVVRENGDQVLRETFPTTEGNLVGFLHKIDGEKHLTFEEGNLAQWLQLLLRPEVDRLLVCNPVYVAKKQGAKTDFRDALHLAQELRTNHLKPVYHDNSKWMELRTLVNSYSDLVDGIVGTKLRLKALFRSFGLDTDDGKFYENREQIKDLPNEVAKFVAESFFTQMEALEKQKAEYTEYFRKNRQRHKPVKNLCSIPGISDVRANIIVAIVCSPQRFKTKHQFWGYSMLVRHIQMSGGKIYGNRRVHGRKELRDVFIGAAENALRGESSLRGYYEAQRAKGLAHREAKLALARKIAGLSLALLKNNDTFKNDFEHQQMEKVAIRKTLNLEATI

SEQ ID NO: 504403 - protein, 428 aa, unidentified
MNYNQNHKIAQITAETLIIGVDIAKFNHVARAQDFRGMDLGKSITFENTQSGFDGLIGWIKQLQVDNQMNKVFVGMEPTGHYWLNLAHYLKELNIKCVVVNPLHTKKSKELDDNSPTKNDVKDAKVIAQLVKDGRYAEPSIPEGVYAELRGAMKVRELLSTDLRSVQGKIHNWLDRYFPEFFTAFKDWEGKAALRTLKLNLLPHELLKLSDGEILKHLKKGAQRGVGLSRVRRLKEAACCSVGIKQGNNMAKLELKTLLAQYDLLKEKFEELDAHLDELLKQVPGVHNMVAITGIGKDTVAAFLAEVGDLRNYSHPKQIIKLAGLNLRENTSGLHKGRTTITKRGRKKLRALLFRVVMPLVAKNQAFKDLHEYYTTRPDNPLKKMPSLIAICNKLIRILFTVGTKQCEFSEEKMLSDIPHFNNLQEAA

SEQ ID NO: 504404 - protein, 419 aa, unidentified
MSKNNITRQLAQAQPGALHAGVDLAVEKNVIEVINEKAVRLDRFSFPQDRGGYDYFLRRLEGLRQKYQASEVVVAMEPSNYFWKLLAQELEEKKITYHLVNAYTVKKHREGDQLDRSKDDPRDARQIAELSRNGKYTETHLQKGAYEDLRLYAPLYDQIQRSIRREEQVLWGLVGQVFPELFGVFKDLEGETSQALLMACAPAAVIRQMTVEAFTAQVRAAYTGKRLFVSKLHRLYPLAATSIGLTEGLGAIQLAIQLHLAHLQALQQQLQQVTSAMTACLATLPEAPYLLSVKSLGAVSAATFLAEVGDPKRYRSAAQWIKLAGIQPTPNTSGKRQRSLTPMSHQGRARLRTMLYYTCLRLVQHDDHFAQIYAQLQRRQNNPLTKMQAIGVLMNKLLHILWALIHNQTFYNPSFGQSI

SEQ ID NO: 504405 - protein, 335 aa, unidentified
MNKYTTKYVGMDVHKETIAVAIAKEGRGEAVYYGEIANNAEAIKKLVTKVTSDGESVSFCYEAGPCGYEVYRQLIDLGQRCDVVAPSLIPKKSGDRVKTDRRDANTLTRLYRAGVLTPVWVPDKEQEAMRDLTRAHEDTKAMEGHAKQRLGAFLLRHGKKYPGKSKWTQAYFRWLEGIKFEIPVQQIVFQEYVDTVNQMKERVAEMEQEMRHAMGGWSLVPVVTGLMALRGVDIITAMTVVAELGDISRFDTPRQLMAHLGLVPSEYSSGARRQRGGITKTGNGHARRVLIEASWSYRLPARKTAHLQRRAGKTSAVVQAIAWKAQKGYARGIGI

SEQ ID NO: 504406 - protein, 403 aa, unidentified
MSNYFAGLDWASRTHALCVVDERGGVVERFEIGHDAAGLADLQRQLRRLGSPPVAIERPSGLLVDTLVEAGFMVVPIHPNAVKASRPRYRSHGGKSDASDAYVLADLLRTDGHRFKALTAQGDEIKALQALVRGRDDLVASRVQLANQLRTLLESFWPGAAAVFADIDSPIALAFVERYPTPEAASSLGPKRMAAFCAQYAYSGRRGAEDLLARLHEAPAAVCGELQMEAKGELARCMARTLRSVVEQIRLLSSRIEHHVASLEDGRILMSFPRAGRICAAQILSELGSVRERFVSVEHLAAEAGVAPVTYESGKSKAVTFRWACNHRLRAALTCLADNSRHASAWAAHVYDKAKARGCDHPHAVRILARAWLRVIWRAWTNRKPYEPALHRGAQLLLQTAGG

SEQ ID NO: 504407 - protein, 407 aa, unidentified
MPRYYVGVDWADIEHAVWVGNEAGEEVMARSVTHTPAGLGEFGRWLYERQAEGIELWAAIEKPEGRVVDFLLDHGVVVYPVNPKALDRARDRFRMSGAKSDPFDARVLAEFLRTDHPHLTPLVPSSAPAQELKLLTRDYQRLVRQQTRLVNQLTATLKEYYPRPLECFEELTSAVAREFLRTYPTPEALAALPPKGWQRWARAQHVSQARTVDLWEALRAPQLPVPAHVVRAKARLVGVLVDELDTVVRAVNEYRTAIDDFFAAMPEAEWARSLPAGQSGTTVPTLWAELGDAPGRWQDFRHLQAQAGAVPVTERSGKHQFVRFRFACNTHLRYAVHLLAFLSLRQSDWARAYYTQQRARGHSHHQAVRALGAKWLKIIFVMWSRQVPYDETHHLAMMARQRLHQAA

SEQ ID NO: 504408 - protein, 404 aa, unidentified
MWFAGIDWADDHHDVVVIDGEARQVGVRRVAHTPAGLSELTEFLSSITGPERKEELACIIETTHGLLIAALLAAGYPVYPVNPKTVDRKRSAAGAKTDQLDAYLLAKHGRSEFVDLRRLEPDSPLVAELKALTRDQDSLIQMQTRLVNQLTACLKAYYPVALTLFTKLHQRSTLAFLQAYPTPRAARQATPEQIAAVLKQSGHPTPESVATKIVTTLQQPVLHADEVTTRTKARLMLALVRQLLPVLEEIANYDREIARLFLTHADSQIFRSLPRAGRRLAPRLLAELGEDRHRYQNAASLQALAGTSPVPYESGKYAKPHRRYACIKPLRNALQQFAWQSTQKEAWALDYYQRKRAQGKSHSVAVRALANIWCRILFALWTKRECYQTSTFEAAQQRHALRAA

SEQ ID NO: 504409 - protein, 345 aa, unidentified
MNKQVFAPQATVFCGIDVSAASLAVALIAPDGSLARREFSNNASGHEALSVWLKKRDSPVRVSLEATGIYSLDLALALDAEACVELMVLNPKLVNRFQQTVCRSKTDAADAMVLAEYSQRMPFCRWQRPAASHLALRTVSRYIGSLVVEQAALKNRLCSAESTATTPRAVRVDLKRSLAAIERRVKRLRVEALKLVESEVELRERYQLLTTVPGIGPVNALTILSELILLAPAMTVRQWVASSGLDPVHRQSGTSLNKPSRISRAGNRRLRAALYMSALSASRYDRHLAAFYRALRARHKTGMQALMAVARKMLHAIYGIFKSGTPFDGQRLFPNIQTEVESSAG

SEQ ID NO: 504410 - protein, 338 aa, unidentified
MKLYGGIDLHSNNSVLVLIDERDRVIYEKRLRNDATQILGELAPYRKRLTGLVVESTYNWYWLVDALMEAGYCVHLANPAAIKQYEGLKHSDDRHDARWLAHLLRLNILREGYIYPKEARAVRDLLRRRHRLVQQRVSNLLSIQNQFARVGIRGFSAERLKRLRDSELDGLIADANVRSALVANLALVRCLNLQITRLEREVLGQVKLAAQYEPLLSITGIGKILALTIMLETGEIARFGRVGQFASYARCVDARRLSNEKKKGSNNAKCGNRYLAWAFVEAANFAIRYSPRVKRFYHKKCTRTNKIVAFKACAHKLARAAYHVMRERVPFDEARAFA

SEQ ID NO: 504411 - protein, 342 aa, unidentified
MDYFAGLDVSVKDTSVCIVDDAGRIGREVKVGSEPDALLAALRNPAYRFKRIGLEAGPLSQWLFSALAEADLPAICVETRHMRAVLKAQINKTDRNDARGIAQMMRVGLYRPVHVKTLRSQKLRMLLTHRKLLQAKAIAVENDLRATLRNFGLKVGMVGTIKFEARVKDLVDNFPDLATLVQPLLVVRRVLREQISILHRRVLAVVRDDEVCRRLMTVPGVGPIVALTYRATIDVPARFRKSKSVGAVFGLTPARDQSGERDRPGAISRCGDEMMRTTLYEAAQVMLLRSAKWSWLKAWAMKIARHRGMKKAIVALARRLAVIMHRIWTDGTEFRWTREAAV

SEQ ID NO: 504412 - protein, 412 aa, unidentified
MEGETVIAGVDTHKDVHVLCLLDGLGRKVWSGSFGADPEGYDRLAEAIGDPGSCMVVGVEGTASYGAGLTRRLVELGYNVVEVLRPKRDKARPGEGKSDPLDAERAARKAASGRGCSVPKSQDGWVEAVRQLYVARRLAVATSTSCVACAKSMLTTAPSALRERFRGRERPKDLMPLLARGRKAGDALEESVLASLRSVAAVWKEARSQVESLDERIRALLEANAPALLGIEGCGTTTAAALVVAAGDNPGRLKGEAAFSMLCGVSPIPASSGKTERHRLNRGGNRQANWALYEIAIKRMAYDERTRRYVAKRTSEGKSRREAIRCLKRYIAREVYRVLMDPNPDGAAPEGPELAKMRKAMRVTQKQAAAGLGMSAASLGHLEHGRRRSTKLERRYYELLCELKGALPQTAY

SEQ ID NO: 504413 - protein, 366 aa, unidentified
MKRVMAGMDLHGNNVMIGIVDADGTRLRHRRLACDLEEVIAFLNPYKPLLDRVAVESTFNWYWLVDGLKAAGFPVVLANPAKIDQYEGIKHADDKNDAYFLAELLRLGILPTGYIYDPESRPVRDLFRRRMGLMRLRTTLLLSSKSLHHRTTGHSLAVGQLKALSPADLAALYSHPANRLTAEIQKELIEALNQCIRRIEKTVASEALKKPYYKRLQTLPGIGVILGLVISMEVGEIERFAEPGQFASYCRTVDSNRVSNGKKKGANNEKCGNKYLAWAFVEAAHAARRYDAHCRRWFDRKSAKKGTTIATKALACKLAKAAWHVMANAVDYDPARMFPELAAGRIDQLSGGQTSASKGVGPEPEN

SEQ ID NO: 504414 - protein, 435 aa, unidentified
MEEVTDEPLYRDRVCGIDIGKAGLAATIRVPSDRDPARRMQETRGFGTTRREVLALADWLRCWQVPAVVMEATGDYWKGPFYRLEAEGFECVLADAKQVKNLPGRPKRDPADSRWLAACFERGAITPCFVATPEFRIIRLHTRYRRDLTEERTREKQRAEKLLESAAIKVSSVVTDLHGVTGRDIMDHLIAGERNPKVLAQLARAAARRKISQLEEALEGAEFFTPAHAALLAKVLARIDRLSADIDDLSQVIEQLLAPYEEQLQQAESMPGWGRRAAQDAVAETGVDMSRFRTGGHLSSWAGRAPQDHQSGKRKGRAKAKKGNRYLGAITGETAVAAGRTQTREGARHRRLARKRGAAKACVATGNTQLKVYHKLLSNPGMRHQDLGPDYYDRQRDTRRQIAHHVGKLGSLGFEVTLCRIPDPEPDGTGPAQAA

SEQ ID NO: 504415 - protein, 379 aa, unidentified
MAELATKMMLWTAPTLRHRCAKGWLRQSATTMRGAVHGEVSTLGLDIAKSVFQVHGVDVDGAVMIRKRVSRAKVLEFFAALTPCLVGIEACPTAHYWSRKLQALGHTVRLMPPSYVKAYLKRSKNDANDAAAICEAVTRPSMRFVPTKSEQQQSALMLHRSRQLLVRQRTMLSNAIRGHLAELGVISAKGRNGTAELLEIIAKDEDDRIPGIARLSLTVLARQYAAITTEIGTIEKHIHALHRSCEESRRLAEIPGVGPIIATALIAEVGDWTVFSSGRSLAAWIGLVPRQHSTGGKDRLGKISKQGNRHLRWLLVAGAMAVIRYARQHGTKRLWLVRLMGRRPVKVAAVALANKIARMAWAMMVRGERFNEPKLLSAV

SEQ ID NO: 504416 - protein, 355 aa, unidentified
MKFYVQQHKYYCGVDLHARSLYVCIIDQKGKIVKHKNIDATPEDFLEIIKKYRKDIVVAVECMFSWYWVADLCRKEKIPFVLGHALYMKAIHGGKAKNDRIDAHKIGVLLRGGMIPMAYVYPSEMRATRDLLRRRNHLVRKRADLLAHIQNTNHQYNLPRFKKVISYKRNREGIAEQFSDECVRKSIEVNLTLIDQYDQILRKLEYYIDKKAKVHDPESLFRLRSIPGIGHTLGLVILYEIHNINRFPRVQDFVSYSRLVKCAKESAGKRYGSSGAKIGNAHLKWAFSEAAVIMLRECTDVNKYKMKLQRKHGKAKALTILAHKIGRAVYYMLKRKEVFNIERFLNKQLLQTGRA

SEQ ID NO: 504417 - protein, 344 aa, unidentified
MSNLDTCGIEVSAKELVVRLRRQEDLEPLRNFTNTPEGHLIILRYLRQAGRVVRVCMESTGLYGLDLALALSGQQGIEVMVANPRAVRHFAQAMMKRSKNDQIDAGVLEQFALHMPFKPWQRPSVAALALHALARRLRELVEIQTAEKNRQHAAGASKAIPAVVRRDLARSLRAQERAIERLTRQARKLIAQDPQLAERFELLDSVPGIGETSAVQLLGELGVLAPDLGARQWVAYAGLDPRQYTSGTSVHKKPRISKAGNKHLRHALFMPALVAVQHDPHLRAFYQHLLAQGKFKMQALVAVMRKLLHALHAMFKTHQPYDGSKLFRLKSAPAQEVIHVLVAS

SEQ ID NO: 504418 - protein, 317 aa, unidentified
MRASAAFFVGIDVSKQQLDIAVRPSGESWTVAHEEAGLSALVARLRGLAPTLIVLEATGGWEVPVTGALAAAALPVAVVNPRQVRDFARSTGLLAKTDRLDAQLLAQFAEVLRPAPRPLPDAQAQELTALLQRRRQLVEMLTAEKNRLPLAARRIRPQLQAHIAWLHQQIAQFDEDLRQRIRSSPLWREKDDLLRSTPGVGPVLATTLVAALPELGTLSRRQIAARVGVAPLNRDSGTLRGRRTVWGGRAQVQAVLYMSTVVAVRHNPVLIAFYQRLRAAGKAPKLALTACMRKLLTMLNAMLKHHRRWAPVRAQHA

SEQ ID NO: 504419 - protein, 323 aa, unidentified
MDDIVGVDVSKARLDVALLSGGRTRRYQGTNDAAGHRAIGQWLARWGVGQAHICLEATGAYGFEFACLMAQGGHRVSLVNPAKIEAFRRSELLRSKTDKVDAGLIARFCRAMTPPAWTPPRRAVLELRALVRRCAALKDMRTQEINRLKSGSLSPAATTSVERLIAVLEDELETITAASERLIAEDAALTADAELLRTVPGIGPRAAAVLLGELPDLRNFAHPKKLAAFVGIAPSARSSGERQGSGTISRVGNGLVRSTMVLCALSAKRYNPITRTFAERLAASGKPPKVVLVAVAKKLLFIAHGVLKHGRPFDPAHTLAHMA

SEQ ID NO: 504420 - protein, 349 aa, unidentified
MQHYVGLDVSVKETSVCIIDEAGKVIREVKVATEPVAIFAVLTEEALAIERIGLEAGPLSQWLYSALAEAGLPVICVETRHMKAALSAQINKSDRNDARGIAHMMRVGLYRPVHVKTLASQKRRMLLTSRQLLQAKALDIENDLRGTLRNFGLKVGMVGTVKFEARIRELVADHPDLATIVEPLLIARRVLREQLGVLHRQLLEIVRHDQVCRRLMTTPGVGPVVALTFRATVDVPSRFTSSKAVGAAFGLTPRRQQSGEIDRMGGISKCGDALMRETLFEAALVLMTHSRKWSWLKAWGMKIARHRGMKRAIVAVARRLAVIMHRMWVDGTEFRWSRKEASGGVTVSV

SEQ ID NO: 504421 - protein, 355 aa, unidentified
MNATHYIGFDVHKKSISFCAKTVDGQVADEGKLIAERSVLRQWASQRQQPWRGAMEATLFSGWVYDSLKPYAVQLDMAHPAMMRAISAGKKKNDKIDARTIADMVRCDWLPVCYVAPPEMRELRRLLRYRSLVVREAVRMKNKIAGLLMEVGAPYNKEKLHGRQYFAELLQNLEEVPESVKDLLRLTRGAMDTFQATQKQLVKRLLADRELAQHVERLASIPGVGEITALTWALEIADPRRFSSSAEVMSYCGLTAALKSSAGKEQRGPISKQRNAWLQTALIEAAKLAPHWNPQLATVHERELKRGHRNRATLAVARKLAAYLLAVDKSGKPFQLRTPPPAEETQATSEAEKAA

SEQ ID NO: 504422 - protein, 369 aa, unidentified
MNECITYIGLDVHKETIAVALAEGTTRGEVCKHGQISNTPAALTRLSVKLSRSGSVLRFCYEAGPCGYGIQRQLAAAGHDCVVVAPSLIPRKPGDRIKTDRRDAINLAGLHRAGALTAVWVPDPAHEAVRDLVRARLAAVRSLRQARQQLSGFLLRHGRHYSRPAWTLIHRRWLAGLRFEQPAHHIVLEDCIATIEAATARRDRLTAQIATMLADWALAPVVHALQSLRGMALVSAATVIAELGDITRFANPRQLMAYLGLVPSEHSSGGTRRQGGVTKAGNSTARRMLIEAAWSYRFPARISREQLLRQEALPKPIRDTAWKAQLRLCGRYRKLTRAGKPATIVTTAIARELAGFVWAIACQLPRPTN

SEQ ID NO: 504423 - protein, 347 aa, unidentified
MRFYTKQHRYYCGIDLHARSMYLCILDTQGEILLHRNMPCAPESFLKAIAPYREDIAVAVECIFTWYWLADLCNQQNIPFVLGHALYMKAIHGGKAKNDKIDAHKIAVLLRGGMLPIAYVYPPAMRATRDLLRRRMYLMRKRSELLAHVQNTNSQYNLPEIGKKIAYKANRDGVAERFSDPGVQRSIEVDLKLMDHYDQLLTEVELYIVRSAKQHDANAFYRLRSVPGIGKILALVILYEIHDIERFPTVQDFVSYSRLVKCAKESAGKRHGTSGKKIGNVHLKWAFSEASVLFLRANPKGQSFVEKLSSKHGKAKALSILAHKLGRAVYYMLKRKQAFDVNKFFSS

SEQ ID NO: 504424 - protein, 357 aa, unidentified
MLSSNVKYIGLDVHKEAIAIAVVNGAGKLVMESIVETKSSTVLDFLHGLRGELHVTLEEGTWAAWLYDVLKPHVREIVVCNPRRNALLKEGSKSDKIDARKLAELLRAGLLRAVYHGENGLQTLRELARSYLTISKDLKRVKNRLKALYHSWGICCAGKQVYAPRHREQWLSKIAQVGVHRRAELFYQQLDGLLVLRNTVRGELLSESRKHQAVKILRQVPSIGPLRAALLLALMQTPHRFRSKRQLWTYSGLAVVTHDSAQHRYVDGQLQRSKKPQQIRGLNQNHNHAMKEIFKSAALNASRCAGPLQEFYARLLAKGMKPDMARLTLARKIAAITLALWKKGGSFDAEHLKSQAA

SEQ ID NO: 504425 - protein, 344 aa, unidentified
MEHYAGIDVSLEASSVCVVDGSGKIVREGKVASEPAALIAWFAGLELARIGLEAGPLSQWLYAGLAAAGLHAELLETRHVRAAFKIMPVKTDRKDARGIAQLMRLGWFRPVHCKSLPAQETRAVLSARRLLQAKLHDVEMSVRGVLRGFGLKVGATTSKSFESRVRELAAGHPTLELITQALLSARSTLAAEFAALDRKVRSMARTDGKARLLMSMPGVGAIVALTYSAAIDDPGRFRSSKAAGAHFGLTPKKYQSGETDVTGRISKIGDKEVRCALYEAAHVMLTRPTKGSKLKTWALAVARRAGMRKAKVALARRLAVVLHRMLTDGTAFDPDLGGLVAKAT

SEQ ID NO: 504426 - protein, 318 aa, unidentified
MSDSVFVGIDVSSQTLEVASSSELKTSQVANDAAGLEALVSRLLELKPALTVLEATGGYEFEAACALQAAGLAVAVVNPRTARDFARAMGALAKTDALDARMLAAFARVLHQHPERERFVKPLADAELQRLQALVLRRRQLVQMITSERQRMRISHVAARPSIERVIEFLKTELADSDADVAAHVQRHHAELAAALASVPGIGATSVAVLLAELPELGKLDRRRVAALVGVAPLNLDSGQMRGQRTIWGGRADVRRTLYMATLTAVRHNPILKTYYERLLAAGKRKKVALVACMRKLLTMLNAIAKHGSNWDPTLHRA

SEQ ID NO: 504427 - protein, 368 aa, unidentified
MDKAITFFVGLDVHKQSIAIGVAAAGDEPPRFVGTVGPALAELLTALGRIGPAASLRVVYEAGPTGFHLARELAGRSYDCQVIAPAKIPRRPGERIKTDRRDCQKLARLARAGELVAVVVPDARDEAIRDLSRAREDAVAARLKARQQLKAMLLRHGHRYAGKTSWTAAHERYLAAVSFPHPAQDLAFAEYRLAVGAADAQVTRLTDALRAQVETWRMRPVVAALSTLRGIDFVAATTLLAELGDLTRFAHPRELMGFLGLVPAQYSTGETRRHGAITRTGNGHARRVLVEAALNHRFPARMSRLLQQRQTGQPEAVRAIAWKAQIRLCHRYRRLVDRGVPKNKVGVAIARELAGFVWDIARHVAPTR

SEQ ID NO: 504428 - protein, 279 aa, unidentified
MEITVVGLDIAKRVFQLHGVDAAGKAVLRRKLQRSEVLAFFKALPPCLVGMEACGTAHYWAREIRELGHEVRLMPPSYVAPYVKRGKTDAADAAAICEAVTRPTMRFVPIKTAEQQAVLMLHRTRDLLVRQRTTLVNALRGHMAELGVIAPQGIARVADLMAVLLGEDTTNVPALARQALRGLAAELEALDRRVKEIEVAIVTWHKDNEASRRLATIPGVGSITASAIVATITDPFQFHSARHLAAWIGLVPRQHSAKVGSPNRVIATCADCWCWVQPR

SEQ ID NO: 504429 - protein, 350 aa, unidentified
MLIIGCDYHPAFQQIAFVDTATGDCGERRLEHREGAEKFYRDLAAQGMKVRVGMEASGHARWFERLLAELNFELWIGDATEIARKRERKQKTDRQDAQHILRLLLKDDFPQIWVPSWENRDLRQLLWHRHRMVQARTRIMNQLQAVALNEGLRSKKRLWRESGREQLEAFRLAPWASRRREDLLKLLDGLNPMIAELTQAIQQEVEKYPAAQRLRTHPGVGPLTALAFVLIIGKADRFQCGKQIASYLGLVPLEDSSGNRRRLGHITKQGNSLLRFLLVEAAQVTTRSLPEWRSHYVHLTMRRGRKIAKVAMARKLAVRLYWMMRKEWDFETLTKFGSHAGKPGPRDGVK

SEQ ID NO: 504430 - protein, 348 aa, unidentified
MSNNIIYLGVDLHKEFCQIAVLAANNNITQHRVPTEREPLRDFLGSLGARKCLVVEATGNWYFFHQCVSDMVETFKLAHPLKVKAIASARIKTDKIDAATLARLLRADLIPECYIPTMIEVHQRELLRHRMFLVKQRVQLKCRIRATLMKNGLKPPIKYLWGPNGRRWLDGLDLPPVFRFQIDTMLFLMEEQSRLIGQAEERIAREVRLTPQAKLLTARGGIGEILALTIVSEIGEISRFPSPGKLASYAGLVPSTYSSGGRTLNGRITKQGSRYLRWALIEAAIHAWRDDEKLKRLHARISRRKGRKTARVAVARKLAEQIWTTLTFAKIKGVRYAPPSVGEEIEAA

SEQ ID NO: 504431 - protein, 345 aa, unidentified
MENITRIGMDTSKQIFQLHGVGADEKVVLRKKLRRKDMVTFFEKLPPTTIIIEACGASHHWARLLQSMGHTVKLIAPQLSKPYVKRGKNDSADAEALCEAGSRPTMRFVPVKTVEQQAALMLVGVRDRLVRNRTQLGNSIRGYAAEFGLTAAKGIAHLATLLQRIQADEGLPSLARDMFAFQANEYTALQVQIDDIEAKLIARHRADECSQRLDKIPGVGAIGATLLIMKTPEPERFRSGRQFAAWIGLTPRDHSTAGKVRLGGITRAGDEGLRCALVAGATAVVQHALRSGKASPWLADLLRRKPPKLAAIALANKIARVAWKMMRTGESYVIKNERVSIASAI

SEQ ID NO: 504432 - protein, 442 aa, unidentified
MSNLEQINFNAAGIDIGSKEIYVCVPEGRDDNSVRSFGSYTEDLRNISSWLKKCEVETVAMESTGVYWVPLYEILEADGFEVYLVNARQLKNVTGRKSDIGDCQWIQQLHTYGLLNSSFIVDKEIKKIREVVRHRENLLRTRAVHIQRMQKTFEIMNIKLPEVISDITGSTGMRIIRDILKGVRDPKLLSKHRDINCKSSEEEISKALDGNYIEEQIFILRQELELYDYYTGKIHECDKYTENLYSGYSKKSGTKEDLRDNGSKKKKPNKNTPEYDLRGYLYEMAGVDLTQVDGLNVSTIQTILSETGVDMSKWRTVKHFTSWLRVCPNNAKSGGKLLYSKKKKTKNRANLALRMAALGLSRSDSWLGSFYRRKCARLGPAVAIVATAHKLAKIIYTMLKYKVEYKDLGKEYYENKFRDKIIKNLKLKASKFGFKLEPCVAL

SEQ ID NO: 504433 - protein, 347 aa, unidentified
MRGFLSLDTAKSVFQVHGIDVAGKVQLKRKLRRDEVIPFFEKQEHCTIVLEACGAGHHWARMLTQLGHEAKLLAPEAARPFVKKGKKNDAADAAALCAAASQLQVKFVPVKSPEQQGVLALHSTRTLLVKQQTMLANAMRGLATEFGLVVAKGIGKLEDLEAQVRAETSVPATAKLAFAELHGHMRVAAARITELEARIVEHARHDDTARRLATVPGIGPITASLISATVGDNIGAFKSARHFATWLGLVPRQHSTGGKTRLGRITKAGNGEIRRLLVLGATSMAYRAEQWNSDVGAWLRGVLERRPMRLVTVALANKMARIAWAVMTRKEDYRARGRATAAAAAAA

SEQ ID NO: 504434 - protein, 337 aa, unidentified
MTLYCGIDLHANNSVISVLDERDHVHFEKRLPNDLAAIIDALQPFKNELLACVVESTYNWYWLVDGLMDRGFDVRLAHTGAITQYAGIKYTNDETDARHLAHLLRLEILPEGYIMPRDQRAVRDLLRRRMLLVHQRTLHLLSLQSLIVRHTGERLSANQIKALNREKIAQKLSPPIQLGGQISMMAMQWLNGAVDQLEQEILKQLKENKGYGLLTTIPGVGKILGSTIVLETGDIGRFATPGNYASYARCVSTEKISNGKNKGRGNKKNGNKYLAWAFMEAAHYAAIWSPEIKRFYQKRKAKRHILVAKKTVANKLAKACYHMLSKQEVFNVQRAFG

SEQ ID NO: 504435 - protein, 422 aa, unidentified
MSKRKNRVCGADVHRDLIVATIRDDDNPLFQEEFGTTHAELKRFRDWLVANNCEQLAFEATGVYWLPIYDFLSSSIDTIVANPWKIKNIPKDKTDSKDSQWIASLCLNGQIKRSRILSKNERDLRTMTRARSGYVKTRTQFRNRIHKYLASNGIKLSSCISDIFGESGRYILGGLVEGRCIDAILEGIPSGRVRKKRDLIKVALGNGLDAISRMLVKDTMDLLDHLETKVEAASREAINRLQTKSKDLAIVMSVPGIGFVSGSVILAEIGDYHDFKTPEQLAKWCGLSPGENESAGKKKPCGITKQGSKYLRTVLVQIAHIVARKGNSNLSKFFQKLSKRKEYNVAITALARKLICLVYHLLINQELYLEEDGRRRKSKPAKSDPTSSYSPENQLEDKVAAIVDAFYHLKEQNRKTTSDGGG

SEQ ID NO: 504436 - protein, 359 aa, unidentified
MIVIGADSHKRTHTVVAVDQVGRRLGERTVRATSDGHLELVRWSAQWSQVTFALEDCRHLTRRLEQDLLAAGQPVVRVPTRLMAATRRGARHPGKSDPIDAEAVALAALRHPDLPVAELDGPTREVKLLVDYRRDLVRQRTRVANRLRWHLHELDPALQVPSRGLRRYRVIDELAARLAGVEGTVARLAWLLLGRCRELTAEINALEAELRPLVRRLAPALLAVPGCGVLGAAMILGETAGVGRFRSKDAYARFTGTAPIPVWSGDRRGKVRLNRGGNRTVNTALHMIAVTQARGVGPGQAYVERLMGRGKTRTEAVRLLRRRLSDVVYRALRADEQARSTATQTGRSTAAAAASARAA

SEQ ID NO: 504437 - protein, 391 aa, unidentified
MIYVGIDVAKDKHDCFAMNSDGEILIEKMTIQNNFDGFSSLFNSISQFNESFENIKVGLEATGHYSNNILNFLTSKGFNVFVINPLQTNLFRKGQSLRKTKTDKLDARFIATMLITENLKPYSNLSYHISELKSLVRHRFRLVQERSKFKTSLSRLVTLIFPELEKIVWSISQNSVLYLLNELPSVKDISQCNLKHLTSILEKYSKGKYSRDKAIEIRELARISIGTNSRSLSFELKQVIQTVLFLQSQIDDIDKELKALVDELNSPIMSIPGISYVSAAFILAEIGDINNFDSPAKLQAFAGLDPSTYQSGKYSATHSQMVKRGSKYLRWALLNATRLVCMRDKTFNDYKNSKLAEGKHYFVALSHTSKKLIRVIYYLLKTNNSYQLCPK

SEQ ID NO: 504438 - protein, 355 aa, unidentified
MNCEKYIGLDVHQATISVAVMDSTGKLIMESILETKASTILEFLGGLRGTLSVTFEEGTWAAWLYDLLKPHVAHVLACNPRKNAALNQGNRSDKIDARELANRLRLNDLKPVYHGENGIRMLRELARSYLTVVKDLSRVMNRLKALYRSWAIPCAGRDVYYTRHRSQWLEKISEAGPRRRAEQLYQQLDMLQHLRQQARRELLAEGRKHSITTKLRQIPSLGPIRSALAVALIQTPHRFRSKRQLWKYCGLALQTRITGEYVYVQGERRRSKKQISIRGLNKDHNHDLKGLFKAAATRASVIPGPFREFYQRSLAKGIKPTMVRLTLARKIAAITLTLWKKGENFDVEKLKSQAA

SEQ ID NO: 504439 - protein, 421 aa, unidentified
MPRLPKDEFAAFVGIDWADTKHDVCLQAVGDHKREFMMLEHKPEAIDEWACTIRKRFEGRPVAVGLELNKGPLVYALRKYEFLVLFPINPLTLAKYREAFTPSHAKDDPTDAELQLELLLKHRDQLKPLNSQSPAMRALEQLVEPRRRLVGDKVRLTNRLTSALKNYFPHVLQWFDDKDTTIFCDFLAQWPTLKAVQLARRTTLEDFFRAHHVRDVEVINHRIRAIKSATPLTTDEGIIAPHALLVQALVSQLRVTLHAIETFDNAIAQRAQSHPDFPLFAALPGAGAVFAPRLLVAFGEQRNRYTSADELQKYAGIAPVTERSGNNTWVHWRLQCPTFLRQTFVEWAAASTQHSFWARTYYQQQRDKGASHQAAVRALAFKWIRLLFRCWQNRTPYDESVYLNALQRRGSPLIHNLARGS

SEQ ID NO: 504440 - protein, 353 aa, unidentified
MKTYYVGMDVHRASIVIVVLNGAGKIVMQSVIETGAERVRGYLKQLRGQVYVTFEEGTQANWLCEVVRPLVTEVVVCDPRHNKLMQSGNKSDRVDAQKLAELLRLGSLKAVYHGDNGVRALKELVRSYDCLVSDTTRVMNRLKAIYRGRAIGCAGHEIYRQDRRQQWLEKLRERGAKQRASCLYQQLAALKPLRHEAKRLMVKEARRQPAYPWLLSVPQFGSVSVAQLLAIVGTPHRFRSKRQFWTYIGLAVVTRTTADHEVVNGVLRRSQRPVSTRGLNRNHNHLLKRVFKNAANGACHGGPFKAAYELRVTQGMVPSLARLTIARQLAAITLAVWKRGEQFNPERMKQQAA

SEQ ID NO: 504441 - protein, 349 aa, unidentified
MAENNTGVIIGADTHKRSHTVALIASTGLELAAQEFEANAKGYKDALAWACSFGEPLRAGIESTGSYGAGLCSYLIESGIMVYDVYSPDKKRRRLKGKDDVKDAFQAAQAALSYTRCAQAKDRNEAVSAVLALENAYCLCVRQRTACINALKAEIVKLPDAMRARLEPKRNAELFKACAALRVTEGPASGTRLALRHYAKQILSLDKEASFLGKEVKRYAEELLPNTMELVGVGPHNAVTFLGAAGPNIGRLKTSASFVMLCGSSPVPASTGDTHHYRLNRGGNRKANSALYIMAITRMKLCEKTQAYIAKKMSEGKSKDDGIRALKTYLAREVYNALMADLAMLGLVS

SEQ ID NO: 504442 - protein, 336 aa, unidentified
METVKVVVGIDISKKKLDVALLINGKIKSKVFENAVAGFQQLRQWLGKSQPGSESFHICMEASGVYYEPVALALHDAGMKISVVNPGCIKGYAQSENLRNKTDSVDAALIARYCATMQPALWQPPPLEQRQLRAWSVRVQALKDIRQQELNRLEVHQISGMSHVAEHVEQHINWLNKEIKALEKNIDDHINRHPDLKRDADLLTSIPGMGNTTAARILGQVGNLRRFTSAKAFAAFLGVTPRQRSSGTCLRGRTMISRTGSCALRAALYMPSLVASQHNPILRAFSERLRSTGMAKKAVIGAVMHKLAHLMYGVIRSGKPFDKNFLAKELAIQDGI

SEQ ID NO: 504443 - protein, 393 aa, unidentified
MIYVGIDVASEKHDVAICNEKGEFLCDVFTIQNSRSGFNTLEAAIAKFSAEKDFSDTKIGLEATGHYSNNILSFLSQKRLCVKVFNPLVVNNLRKSQTLRKTKTDKSDAKFLARMLMSDCSKPYKESMPQIAELKTLTRHRKRLVAEISKHKLHLVRLITIVFPEYNGVFSNPYGKTSLAILTEFSSAKEIANANLTRLTNLIWKASKHRFGREKAVEIRELARNSIGNANRGEMLELCQHLASIEFLKEQLCDLESEIKLIMDEIDSPIMTIKGIGYATGAAIIAEIGDINNFQNASKLLAFAGLEPSTYTSGKFTAGNTPMVKRGSIYLRHAFIQAAKCVSIHNAGFYEYYGKKSAEGKHHFVVLSHVAKKLARMVFSMLKNNTVYELKTT

SEQ ID NO: 504444 - protein, 345 aa, unidentified
MQLYIGLDVHKKQWSVSIYTDSAHHRTFSQPATPQALKSYLDHHFPGAKVICAYEACKLGYWIHRVLTSYGYTCLVVNPADIPTSNQEKANKTDPIDSRKIGKSLRAGLLSSIHVPDEATEGDRHLFRYRRKLLGDLTRVKNRIKDKFLFTGTSLPLEFDNSNWSKAFLRWLKQAHLPDAHTRLCVDMLLEQYHFLYRHFLKTSIEVRKLQRESRYKQRARLLRTIPGIGPLTTVELLTEIADIHRFPSFKKFNSFIGLKPSSHSSGERDWKGRMSYRQHKGLRSSLVECAWTTISKDPVMLQRYDELRKRLTGKRAIVKIARKLASRIYYVLKNEKPYEVGLAK

SEQ ID NO: 504445 - protein, 459 aa, unidentified
MSRKHKKAKRAGQGGAVPSLSCIEPNAAGIDVGATEIFVAVPQDRDPGPVRSFETFTEDLHRLKSWLQHCGITTVAMESTGVYWIPLFQILERAGLEVCLVNAQHVKHVPGRKSDVIDCQWLQYLHSVGLLRASFRPEERICAIRSLLRHRDSLVQMAAAHVQHMQKALTQMNLQLHHVLSDITGQSGLAILDAILAGERNPAVLAQLRHARVQASQEVITKSLVGDYQREHLFTLRQSLQAYRYYQSLITTCDQEIAEQLQNLDSRTPPDASPLPPEPYPHRPRKNEFRFDMRSELYRIYGTDLTAIPSINALTGYTVLAEVGTDWSKFRNGDAFASWTCLCPQNKKSGGKILSAHTRRSANRVNRALRLAAQTLERSTSYLGTYYRKMRARHGAPAAITAAAHKLARIIFHLVTTGQAYDESLFAAEEQRQRKRLENKLKRSAQQLGYQLIPLGQTA

SEQ ID NO: 504446 - protein, 413 aa, unidentified
MNFIGVDLHKKSITVCVMDQNRKVLARRTIPCTETNKIVDFFRKFRPFKVVVEATASYPWFVELVESMADEVILANPKKLRVIAESTKKTDRLDAQILAEFLVLDMIPRAYQPTPRQRQHRALVRHRQYLQGRITSVRSKIRHILSNYNADRKDLFSAKCGPAYFKEVPLSDADRFVIKQLWALWQEFVAQREALTKKIKAFVAKAPQREAEDRALLKTAPGVGFVTAEVVLSELGDYGRFRNSKAVSAYAGLAPAVRQSGDKRSKDMRITKEGSGLLRWALVESAWRLVGTSPKWSAMYARLKQRKGSKRAIVAVARKLLCVLYAMLRTRTPYKIVATETKAAQKTRKRLVLVRTSTAEQTRTTETATARTTRKRSAKAPVVEQTTITQAAVPRVTRRRSSRTLAPKQTTTA

SEQ ID NO: 504447 - protein, 356 aa, unidentified
MSSISERQFVGVDLHLHRSVIARLDDRGSELGWVRIDNDPKALVREARKAGRGCSVAVEATYSWYWAVDALTAARFDVHLAHPSGMKALRARKRVKNDVRDAYELAKLLRLGALPEAYFAPKEVRELRELVRHRQQPVKLQTAVKAGVRALLAKHGIRIAARDLNGDGAIAVLDSLSLPGTNALRLAAQRRLLLALGEEIDATEVELVHRLKDHKGYRRLLTIGGVGPTLAAVFVAEIGGINRFKDAAALCCWAGITPRHYESDKTVRRGHVSKEGNTLVRWAAVEAVQRNCEPGVRAVRDGIIARRSKDARNTAKVAAGRVMLEAIYHVLRDGTSRRLTNSWWALDERNDLVAAG

SEQ ID NO: 504448 - protein, 368 aa, unidentified
MFTERRSLGLDARARSIKAAAIDTLTGELIERTMPSDAGEVMALVAGLRAGHGDVKVTYEAGPTGFELARALAEEGIACQVAAPSKLLRPSGERVKTDRRDAILLARLARNDDIVAVRVPTRSQEGARDLVRSRADARGDLMTARHRLSKMLLRRGIVYDGARTWTRIHDAWLRRVRRDHVIGMGPSALAAFDDAYDTVVHATARRDRLDEAIAGLYHDGELAPTARRLACLRGVSALTAVSLAVEIGDWSRFKGSTIASYLGLVPSEHSSGTSRSQGPITKTGNTHARRLLIEAAWHHAPAYRPSKAIRARWALAPAPVAERADAGNRRLHARYQALTARGKKHAVVATAIARESAGWLWSLATMDA

SEQ ID NO: 504449 - protein, 361 aa, unidentified
MSHDENGGSRAVVGGVDTHKDMHVAAVIDMVGRLLGTRSFPTTAAGYDALVRWTGTFGVPLRIGVEGTSSYGAGLTRALRTAGIAVVEVNRPNRQLRRQRGKSDAIDAEAAARAALAQSAPRIPKAQDGAVEILRLLRLQRRSAIHARTQAGNQLHAVVASAPDSLRTPLRELSLVRLVATLQRQRARKSDPPLDATTRRVLQGLARRWSQLDAEIESLTVQLAPLVRACAPALLERPGVGPEVAAALLVAAGDNPERLRNERSFAALCGVSPVDASSGRQRRHRLNRGGNRDANRALWVIAFVRWRMDPTTKAYAARRMAEGRTKLEVIRCLKRYIAREIFALLRPGPSASSNEPVATAA

SEQ ID NO: 504450 - protein, 356 aa, unidentified
MTSIPHPVAPQLTFGVDTHLEVHVAHANDQLGRPVATLQIPTTPAGYQQLLRWAHELGEPVAWGVEGTGSYGAALARFLTVNGQVVVEVNRPDRQARRLKGKSDPLDARAAAKAVQAGEVTVLPKAGTGQVEMIRCLRVARATAMRARTQTINALKGLLVTAPTELREQLRGRSVTRLVQAAAALEPGPLTSPLAAAALALGSLARRHQALSAEIDSLTSQLERLVATAAPELVARFGIGHDSAGALLVAAGDNPDRQRSEAAFSMLCGASPIPASSGKTIRHRLNRGGDRQANAALHRIVIVRLRYHQPTRDYMTTRLGQGKTKKEIIRCLKRYVAREVFAALHQMSQDLPTLAA

SEQ ID NO: 504451 - protein, 363 aa, unidentified
MEAEKRRYVGIDLGKREYTMAVIGKNGKMSIHHGKTSIQGRQGLYRLLEKSDKVALEAGNLAFIMAREIMERAGSEVRVLNSAKLPLIWDSPTKTDKEDAMKLAHLIEERKDEKLPLVPLPSEQEMERRKTLASYGREVRNRTKQINTLHAMFVHQGHTTVVRKDLATADRRRQAVDILRGQDREEAEYILKHLELHEQRLEEMRKKIKKESKTDENMKRLQGIAGVGPIVAYAFVAHVGDGSRFSKGAQVSNYLGFVPRLDYSGTIQRHGHISKRGNAYLRGLLVQAAWSTVRSKSGGALRERYKYKTAGQGTSKKKTIVSIGRRLAEIMYSVLRNKTEYEPRQWKGVINKTAVLAEQAMSA

SEQ ID NO: 504452 - protein, 342 aa, unidentified
MGKIEIVGLDIAKSVFQVHGVDEKGEVVVRRRLKRGRVLPFFASIEPCRIGIEACATAHFWARELGALGHDVRLMPPSYVKPYVKRQKNDAADAEAICEAVSRPTMRFVPVKTVEQQSVMVLHRTRELLMGQRIRLSNAIRSHMAEYGIIAPVGRNGLQKLIEVNNDEADERVPAEARLCLKMLVAQLQLVNVQVLENDRQIRASARATEVGRRLMEIPGIGPVIASALVATVPDPHAFRCGRNLSAWIGLVPKQNSTGGKERLGSITKQGNRYLRQLLVIGALAVIRYAQRNGTRRPWLVQLMERRTTKVAAVALANKTARMVWAIMVSGERYREPVSQAA

SEQ ID NO: 504453 - protein, 339 aa, unidentified
MKRYLGVDLHRNCFTVCTLKEDGKSEFKKWSIHSLGEFAQEVQTTDAVAVEATGNARHFCQALKDRGCRLVVVNPHQFQVISRSVKKTDAHDAKALAEFLAKDMLPEVRMKEDLPAEIASLLQTRDKLVKLRTTLKNKINNLLSARGILLPKESLSTEKGLEQVLQANVGELARVELLVLVEQIRHLNQGIAKLEAAIKQQGPKLPGYENLKSIKGIGDIGGSTLLSAIGDINDFADEGKLAAYFGIVPRVANSNETERSGRITKRGNKLGRTALVQCALIAMRYSPYLANYYARLKAARGTGKAIIALARKFLGIIYKTLKNGWVFEDFPGFVIAASG

SEQ ID NO: 504454 - protein, 340 aa, unidentified
MTPIRIGLDIAKNVFQVHGVDDKGTVVIRKRLRRPDMLRFFASLPPCLIGIEACSASHHWAREPIRLGHEVRLMPARYVKPYVQRGKSDALDAEAICEAVGRPTMRFATIKTAEQQAVLTLHRARELLVKQQTMLANLIRGCLGEFGIVAPLGIRRVSELIAVINDDADTRILPEARIAMRAVAGQLCDLQTRIKQIEQAIRAWHRSNEASRRLATIPGVGSITASAIVATVANATEFKSARHFAAFLGLTPKQYSTGGRQRLGRISKQGDVYIRRLLILGGTSLVRYARGAGGSIWAKQLLARRPTRIVTVALANKAARIIWALLTRGEVYRAPQPQTA

SEQ ID NO: 504455 - protein, 424 aa, unidentified
MNDNCLSTLFVGIDVSSKSNVLCAIDFNSNKLLNLDVPNNDPGCEIIINELISVLVIHNLSHLVIAIESTSFYSTHIANLLSSNTSLLNFNVLVFCLNPKTVKAYRNSFVDLDKNDFLDAFVIADFARCGRISSSPWRGSQFLALQRLTRHRLHLVECLTREKNYILSNIYLKFSELTRLDDDRPFSNIFSNTCSSILTDFFSLDDIAYASLDSLVDFIKDKGKNRFDNPLETAKLLQKAARDSYRLDKVLYEPINVSIASSFNVIKSLEKEIKEVDKAISKNILGLYSSQYSSLISIPGIGPVLASGILAEIGTISNFSNNDKLAKYAGLTWRETQSGNFSSDNTRMTKTGNKYLRYYLIEAASSVIRYIPEYHEFYLKKYSEVNNHKHKRALVLTSRKLVRLIFGLLNKNQIYSNYYIGEIK

SEQ ID NO: 504456 - protein, 343 aa, unidentified
MEHYVGIDVSLESSSICVVDGSGRIVREAKVASEPEALIAWFEGLEIRPGRIGLEAGPLSQWLYAGIRKAGFAIELLETRHVRDAFKAMPVKTDRKDARGIAQLMRLGWFRPVHCKSVPAQEMRALLTARKLIQGKRHDIEMSLRGILRGFGLKIGLTTPRNLESRVRSLVEGHPTLEAVSDALLLARSMLGEQLNKLHKRLVSMARDDTRVRLLMSAPGVGVLVGLTYVAAVDDPGRFRSSKAVGAHFGLTPKRYQSGETDVTGRISKIGDASVRTTLYEAANVILTRPVKGSCLKSWAMRIAKRAGMRKAKVALARKLAVVLHRMLTDGTGFVADKAAAAA

SEQ ID NO: 504457 - protein, 318 aa, unidentified
MPAPENSKVSVGIDVSKNKLDIAVHESGAIWSSNNDSSGCTALAAKLKQLQATSIVLEATGGCETLVTAMLAAVGLPVIVVNPRQVRDFAKATGQLAKTDRLDCCVLAHFAAAIDPPLRPVKSEETQHLEALLGRRRQIVEMLTAEKNRLASNRDRAVSKDLQAHITWLEQRLKSSDDELQRVLKDSPAWRERDQLLRSVPGVGAVLSLTLLAQLPELGQLNRRQIAKLVGVAPFNWDSGQWRGTRHIWGGRAEIRSSLFMATLSAIRFNPTIEAFYQRLISAGKAPKVAIVACMRKLLTILNAMLKTQTSWSTLCSS

SEQ ID NO: 504458 - protein, 411 aa, unidentified
MKLYVGNDWAEEHHDIALLDEEGRLLATRRLPEGVAGITTLHELIGQHTRHSEEPPQVVVGIETDRGPWVQALLAAGYLVYAVNPMSVARYRERHVTSGAKSDPADARVLADLVRTDAHRHRPIAGDTELAEAIKVLARSHQSLCWMRGQQANQLRSTLREFYPAALAAFDELTHPDALAVLAIAPTPAQGKRLTRAQITAALRRGGRRRYLSQRTEEIHAALRSEHLEQPPLVADAFGAGVTALVGVLTASIQATARLEQELEASFGRHPAAELIRSQPGLGTVLGARVLAEFGDDPARYADAKARKNYAGTSPITKASGQSHIVLARYKTNKRLRDALRQQAFSALTTSPGARTFYDAHRAAGDGHDKALRALANRLVGILHGCLKNHTNYDEHTAWAHRTATADPTAA

SEQ ID NO: 504459 - protein, 346 aa, unidentified
MSHYVGLDVSLKDVSICVVDGEGEVLNRATVATEPDAIAEYLAKHARHAERVVHESGILATWLTRELERRGVPITCIDARMAHKALSARLNKSDKADAEGLAQLARTGWFTKVHIRSEASDRVRALTAARERLVRMRKDLEAHIRGVLKTFGIRMGPVSMAHHRQAFRDKLAEAGVNDPMLKLVGQTMIPIHKTLCASAEALGDELTHIARQNTLARRLMTVPGVGPLVALNFIATVDDASRFRRSSDVGAFLGLTPRRYQSGEIDRSGRISKCGDAEMRRLLVSAATSLMTQVRRFSPLKSWAMRLCARKGFKKAAVATARKIAVILHAIWRDGTEFTWTKEPIT

SEQ ID NO: 504460 - protein, 346 aa, unidentified
MVTTIGIDPHKATHTAVAIDGSEMVLGEITIAADRSQTEQLMDWANELDGDGRLWGVEAAGGLGYLLSQQLIARGERVVDVPPVLASRVRVLSSGRSEKNDPNDARAVAIAALRQPNLAVVHREDYSQVLRMLAKRHQELTALRTQAVCRLHALLAQLKPGGHSRHLSAKAASRMLQGIRLLDVVGEQRRQMAHTHLGDIRRLDRDIKANKTLVRKAVTAADSTLTDLYGVGPMVAAFVIGYTGDPSRFATADHYAAYNGTAPIEYSSGGSKKHRLSMRGNRVLNHAIHMAAMAQISKPASIGWVYYNKKQAEGKTKKEALRALKRRISDVIYRQLVADQKRHNKS

SEQ ID NO: 504461 - protein, 389 aa, unidentified
MQLSIDRPKEPTAIHTDIGAVFVSMELSRSTWLITSLSPGGGEKMSKHGVPAGDVGALLARFAELRRKAFARTGVSFPIVVIQEAGLDGFWIHRVLQREGIESHVVDPASIATSRRRRRAKTDRIDGEALLRALLAHKRGEPRVCAMVKAPTVEEEDRRRLCRERNVLIAERIKHVNRVKGLLFSQGVSGYEPLRRDRRRRLDELTTGDGRALPPHLKTQVSRELDRLELLLEQIKAVEAERDTLLAAQQVAAPAPAGKTLLDIKSIGPEFAAILWTEGLFRHFDNRRQLASYAGLAPTPWQSGSVDRDQGVSKAGNPRLRATLIELAWLWLRYQPQSALALWFKERVARNGGRLKRTTIVALARKLLVALWKYVTAGVVIEGAVMKAA

SEQ ID NO: 504462 - protein, 360 aa, unidentified
MSSTESFTNLYYTFGKNFIGSSIVYIPKDVLQVAIATRSGKILEHLRLNRTQFQKLLVQREPATLVFEACGTAHHWGRVANSLGHTVRILPAQYVAPYRQRNKTDKADAEALIEANRRDGITPVPVRSVEQQQMLQIHSLREQWKKTRVQRINGLRGCLREIGFFIPLGARTVEPRVRAILAEEDIPVPLAHLYNGLLEEIEELAIKIKQAESSLKALSRHDERVQRLQQVPGIGIMASTALVASVGNPHRFSNGRKLASWLGLTPSERSSGHRRMLGKISKRGDCYLRMLLTHGARSVLIRAKLLKRTGQTLTSLQRWAAQLEERVGYNKATCAIANKLARICWAVWTTESSFNYPITD

SEQ ID NO: 504463 - protein, 360 aa, unidentified
MAKAKTLVGLDVHATKVVAAVLDAETGQLQVFAMSGETAKVAAFCAGLPRPVRVAYEAGPTGYGLARELAKRGIECVVAAPSKIPRASGDRVKTDRRDAEHLVRLLLAGKLHAVRVPGDEEEALRDLVRARDAVRMDLMRCRHRLSKLLLRHGIRFDDGAAWTARHRQWLATVTLEWPAAQTTLLDAQGAIDALAHRRDSLEREIIAMLPTSPWALQVGRLRCLRGVDTLTAVGLCAEIGDFERFARAEQMMSYVGLVPSENTTGQQRRLGAITKTGSGHARRLLVEAAWHYRARPSIGRGLTDRQENQPGEAIAIAWSAQRRLHRTWTRLEARAKRRTIIAVAAARELAGFAWAITRIE

SEQ ID NO: 504464 - protein, 359 aa, unidentified
MQTQSNKLDFSGQNIYVGFDVHLKNWKVTIMTDELTHKTFSQPPSPEALHQYLEKNFSGGIFHSAYEAGFCGYWIHHKLESLGVKSIVVNPADIPTTNKEKVQKEDKRDSRKIAKSLRSGDLSPIYVPSAKTLEDRSLVRTRSMLVKDLTRYKNRIKSFLYFHGIEIPTLFSNPQSHWSKRFIDWLEGIELNENSAKESLLALINESKNLRGSILSITRSIKKISQTEAYQENEKLLRSVSGIGLITAMMLLTELDSISRFNKTDQLHSFVGIVPSTNSSGDKDQPGNITPRGHNILRTAIIESAWIAARNDPALMKSFHDYCKRMEPNKAIIRIAKKLLNRISFVLKNKQSYTCSVIK

SEQ ID NO: 504465 - protein, 387 aa, unidentified
MPQPNDLSRSLVALDQDSTIIAVVEMSQSSWLVAGMLPGIERQPRKKLEPSAERLLGLLHRWRDEAVKAGRKITRIALAFEAGRDGFWLARWLRARGVEAHVIHASSVAVSREHRRAKTDRLDTELLKRGFLGWLRGERGHCTMARVPTIAEEDAKRPNRERECLVGERTRIVNRMKGTLARLGIRNFKPTLRKAAERLGTLHIPEGSALPPNVSAELQRDIARLGFVTRQIKEIEEARQERLEQEPETGPHAMVRHLARVVGVGIETADMLVNEVLSRPMRDRKAVARYAGLTGSPDESGAKRREQGLARAGNARVRRGMIQLAWRFLRFQKESALARWYQARTADSRAGTRKTMIVALARKLLIALWRFVTTGETLQGVILRPAG

SEQ ID NO: 504466 - protein, 443 aa, unidentified
MNKSYKKYMEKKQMISGKRIVGIDPAKEKHQAAVVDEKGIQRGKSFSFSVSHEGYTVTLWSRLEKILGNYGPDDLVFAVETSCALWKTIVDYLFVQGYTVLLVNPLTTYHSRPLMNHDFSKTDQKDALLVATNARSGNYTLYQHFSPEVNKLHRLGIVHSKLTKDRQKAISRLRAVMEEVFPEYLSCVGIDTETSLYLLEKYLLPEDFQKLSIDEEEMPTRRVSNGNHGVKTLTKLKECAAKSIGSRVLEEKEVLRLTLDAWIMQIRQIDKSLNTVTDTMIEQAKTTKYFEILVSLKGISEVSAALFIAECRDLSLYSHYKQIEKLAGVNLKLDDSGKHVGIRRISGIGNERLLRLIYIMTAHTARFIPEIRIKFLTRQLKKKCYRKNIIACSSLLLKLLMALIKEGRTYTVREEVTKKLAQLDVKYEALENKQRKESSKKAA

SEQ ID NO: 504467 - protein, 359 aa, unidentified
MKIVGCDFHPSWQQVAVFDPETGEIAELKLVNGDGEAERFYGALEAPALVGIEACGNSQWFIELLERLGHEVWVGDAAQIRASYVRKQKTDRRDAGHILKLLMENRFPRLWTPTAEQRDLRQLLIHRHKLVEIRTRVKNGLQHLAMNKGYQKRFHQCGVRGRAFFEKLPLEGWTSRRREDLLKLLTELDRHVGQLDEAVTGAAQQHPQARLLMTQPGVGPITSLAFVLTIGDVSRFEHSNQVASYLGLIPREHSSGGKQRLGAITKQVNLFLRQLLVEAAQSVTRLDEGFRKEYQARCHHKPKGVAKVAAARKLAVRLYWMMRQNVGYPEIVHIESSPRVPRRGDCHPVTLNERSRIQQ

SEQ ID NO: 504468 - protein, 330 aa, unidentified
MNTAGIDVAHKTLALAVSTAEKLGQVREFANTPSGHAALIKALHGAQVERVCLEATGSYHLDLALALDAAGVPLMVLNPKAAKRFAEALLTRNKTDAVDAGVLAQFAQRMPFEPWQRPAAEALELRACARRLEALVADRTRAKNQLHALLQSTTTPAVVLEDVRLSIRQYADQIEALRDWAAGRIAADAALAEVYGLITSIPGVAAASAIQLMGELLVLPEDMRAKQWVALAGLDPRQSTSGTSVNKKPHLSKAGNCHLRKALFMPALSAARHEPHVNRYYTHLIETRGLKKIQAVCAVMRKLLHAIHAMLTHRQAFDGSRFCLLPEAAA

SEQ ID NO: 504469 - protein, 387 aa, unidentified
MQSATSATAVATTARASDTTLFASLELSKSKWVVTINSPGSEKFSQHLVEGGDGAGLIDLLSRSRAKAEQRCGVQVKAIVIQEAGLDGFWIHRLLLAHGIESHVVDAASIAVDRRHRRAKTDSIDGEMLLRALMAWARGERRVCSMVRAPSLEEEDRRRLTRERGTLLKERIQHTNRIKGLLSGQGVRDYNPLRRDCFERLEAFRTGDGRELPPMLKAEIRRELDRIAVVTTQLATVERARDALIRTDAEERNNPAALLLKLKGLGPEFASLLWLESLFRNFGNRRQVAAYGGLAPSPWQSGGVERDQGISKSGNRRLRKTMIELAWFWLRHQPDTALSRWFHTRVGSAKGRIRRIAIVALARKLLVALWRYVTQGVVPEGAVFKAA

SEQ ID NO: 504470 - protein, 401 aa, unidentified
MISVGIDVSKGKSTVCILKPYGEIVASPFEVMHTESELRKLAQMLQKLDGEVRVVMEATGIYHLPVLSALQDQELYVTLINPFEMKEYASRGLRRVKTDKKDSITIANYGIDNWYRLKNHQGSDDVYSELKLLGRQYCHYMELHVKALLELTHMLDYTMPGVKKEFHSWNEGNGKDKLSDFVERYWHFDNITAMTKEEFIEDYVSWAAEKKYHQNRSKAAELYNLASDGISTLSANTPSTKMLVLEAVRVLREIDSTLLKIITRMKELAKTLPEYDTVRAMGGVGDVLAPKLIAEIGDIRRFHSGKALIAFAGIDAPPYESGQFVGTNRKISKRGSKVLRKIGYETMRVLKTHKAPEDDAVYRFILKKEAEGKSKRQAKIAGLNKFLRIYYARVSEVYKAL

SEQ ID NO: 504471 - protein, 412 aa, unidentified
MSFFVPCMFKAASIGSTDVCRIRGTTSGARSHADATAGPQPIVPRLATPVTKHGSSRRRVLTPEQPTEPSLRSKRSHSQERVHAVTDTPPTPDLPVTPKPFAGIDVSKDFLDSACSDSPNTWRVANDPAGIASLVRQFQSLGPACIVIESTGGLERPLLSALLEADLPVALVNPAKVRHLAKGLSIMAKTDAIDARVLALFAQKATPRLLEKRPQIQAELDALVTCRRQLVKTRTEQANRQLTTFSKSAKKALQAVLNILDKQIAKLDKQIRDHIDSNDQWKHLDALIQSAPGAGNVLASTLVANLPELGHTESRQLTALVGVAPFNHDSGRFKGQRTIQGGRVDVRSVLYMATLAAMRCNPVIKNFGDRLIQAGKKRKVAIVACMRKFLILLNTMVRENLTWPQLNVVKNT

SEQ ID NO: 504472 - protein, 407 aa, unidentified
MDKVNPRCAGLDVHKDSVWGCVRFGGEKSIEKFGTSSRELLRLGDWLASRGVTIVAMESTGVFWKPVWNLLEGRFELMLVNAQHVKQVPGRKTDVTDCDWISQLLEHGLLKASFVPDRPQRELRDLTRQRTQLLGDRARVVNRVQKTLEDANIKLASVATDITGKSGRAILDALVQGKLTPEQMAELVHKRMEPKKPALREALAGRVTPHHRFMLGQLLGQIDHQDRMIESFDARIEEVMSPLERESVKRLDEVPGFDVRTGQNLIAEIGTDMSRFPTAHHLASWAGMCPGNDQSAGKRRSGRTRRANRWLKAALTQAAWGASRTRRSYYSAQHRRLTTRRGVKRATIAVAHSLLVTTHCLLSNPRPYADLGAAYFEKQQTPQQQAQRLLQKLQRLGYTVELKRPAA

SEQ ID NO: 504473 - protein, 358 aa, unidentified
MEYGAIDLHKKESQVRIIDESGAIIDRRITTTRERLTGVFWGRPRARILVEASTESEWVAQHLEGLGHEVIVADPNFGAMYASRGRRIKTDRRDAAVLALACQQGHYRPVHRRSERQRTVQSMLRVRRELIESRTRAISLARAITRAAGFRIRGGRTEMFLDRLGALELSETMRATLVPLRSAIDILNQELATADERFTTLVADDPVATRLMTMPSVGPITASAFVAALDDATRFDTAAQVTSYLGLVPREYSSGERQHRGHVLRSAHPQVQSLLIQAAWRMMRSRDARTAGLRAWADAIAGRRGKRVAMVALARRLARILFAMWRDQVDYQPDRIRDGGRRSVRSSHDGEAAQASVT

SEQ ID NO: 504474 - protein, 423 aa, unidentified
MTKLTSTPAGAVLVAIDMSKNRQEVLIERPEGGRRRRMTVMATRQDYDGFAEQLAAIGRPIIVGFEATGNYHRTLAHRLLTAGFELRLISSVALARTREALHNGWDKNDPKDAQVILHMLRIGATQRYVDPLAAGINDLQELSKTHETISRMKTQTWHRILTHYLPLYFPEIARFAGNSRSDWFLALIERFPTPVTITVLDRDAFSAAAWPLIGRKVSKARLINDIYETASASTALPVPEDSAAITMFRMVIAQGRSLIHQRDEIEQLAHARLADHVDYQLLRNIPGIGPINALTILAEAGDLRRFNHHRQFLKFCGLDLATCQSGTFRGRTKLSKYGNARLRRTFWMAAQVAARQRDNSFRDKLGRYTAGHADDADRRRKAMTALTAKMARVAHAVVKTGTEYRPFLERSDARWKDPSLQVP

SEQ ID NO: 504475 - protein, 413 aa, unidentified
MDVFNERCAGIDVHKEVIYIRVLIGTGSGFQKIPLKFGTFHHQLVQMRQKLVELGVTHVLMESTGVYWMPVYDALEGFVEIVVGNAQHIMNVPGRKTDETDADWLAKLLRYGLVKPSFVPQRQFRELRQLTRYRRAVVQTRASEQNRVEKHLQIAGVKLSSVASHLFGVSGTTMLNRIAQGDTDPTRLADLALGRLRRKIPQLRDAFKGSISEHTQQLIATQMDQMNRLECTIAQVELKIDDKVKPYYGILARLDQIPGIDLRCAIDILAETGIDMSPWATHRQIAAMAGLCPGNYISAGKRLKNRSRQGNPYLKSILVQAASSAINTDGSYFQSKFRRLKQRRGHKRALVAIAHAMLVTIYYMIKKGEPYRELGANFVTDYENGRKKDDLVKQLHKLGYSVSLVENAAAHTT

SEQ ID NO: 504476 - protein, 338 aa, unidentified
MKLYCGIDLHSNNSVVVILDEVDKVVYQKKLNNDLASMLAQLSIYKDKITAVAIESTFNWYWLVDGLMEAGYTVKLVNTAAVQTYSGLKHTDDKDDARWLAHLLRLKILPTGYIYPKEERAVRDLLRKRSQLVRQSTTNILSLQNILARNTAQSLSSYKIKKLDDVQAEKLLDDPNTTLALKCNLNVIRCLQSTIAEIETTVLQQARIRAEFKQLLTVSGIGEILGLTIMLESGDMSRFPKVGNFSSYCRCVKSERLSNGKKKGEGNRKSGNKYLAWAFIEAANFAIRYNDKVKAFYQKKKAKTNGIIATKAVANKLARACYHVLKDQVPFDVNKSFS

SEQ ID NO: 504477 - protein, 398 aa, unidentified
MLSIGIDVSKGKSTVCGMKPGGEIVYTPFEVQHTREGMSELVSLLRGSGEEVRVVLESTGSYHCPVVAALLENGIFVSVVNSLRMKRFCSQSIRRVKTDQIDAMQIALYGLAYWQELQPTRLPENTYRELQLLARQYYQMTSMLIKAKVDFNAICDQVLPGMQELMSDHAGRHKLSDFVLRYHHTAHILKMGETRFRKDYCKWAEKKGYRNHERMAALIFATAQNGIPVLPDAPSTQIVITEAIRVLHTVEASRDAILTQMQALAKTLPEYSLVREMPCIGDTLAPRLIAEIGDVRRFHSKRALIAYAGIDAPPYQSGKFSANNRHISKRGNRYLRKTGYEVMQSYVMHKPANDPIFTFIEKKRGEGKSGKLAMVAGLNKFLRVYYGKVTELYRSLPQ

SEQ ID NO: 504478 - protein, 420 aa, unidentified
MSNKVIFNLDELFISVGIDVGADFSWMSIALPNQQFVGKPYKILHNSIDSLTTAVSKIKEAEELYSLESRIFLESTGIYHYPLFCYLRDKGFNCSVINPIITKNSTNINIRKVHNDRFDSKKAALVGLKPDLKVSLMPSDLALNCRNLCREYYDLMDNRSAYVNKLQGELRMAFPQYLGIFSKVTVNTSLTLLETYTSPSAFLKADKQEIIDIIKSTARFGLTYAQNKYNAIIQAATDANQFGYIIDSNIKRIRLYISFIRKYDEEINNILESLHELVDANEDADFVKQIHLIETFKGAGFLSAVSIMGEIGDFSAFSKPKQLFAYFGLDPAVKQSGKFEGTKVQISKRGSAIARRVIHTLTLQSISISRNGEAKNPVLREYYLKKCDSKPKLVAMGAVSHKVCNMIFAILRDNKPSPAE

SEQ ID NO: 504479 - protein, 410 aa, unidentified
MEVLHAHCAGLDIHKETVVACVRHMTGAKVKTEVRTFATMTGTLLDLSAWLATEQITHIAMEATGVYWKPVWHILSDGEFELILANAAHVKNVPGRKTDVKDAEWLADLMAHGLIRPSFVPDEPTQQMRDLLRTRKQLVRERSSHTQRIQKTLEDANIKLDCVVTDILGLSGRRILQALVKGETVPQALATLAHRRIHASTEELEAALRGRVTTHHRFLVKLHLDQIDAIDAAIQSIDKEVDGNIEPFRAAAELLTEIPGISQLAARVVLSEIGLDMSRFETSGHLISWAGLCPRSDESAGKRRSTRMKKGAPWLKTILVQCAWAAARTKGSYFQAQYHRLRSRRGSKKAVCAVAASLLTTVYHMLKNGTCYQDLGASHFDQQDKDRHIKRLVSRLENLGVEVKIIQKAA

SEQ ID NO: 504480 - protein, 354 aa, unidentified
MYVAGIDAHATYLVVGVVSNTGQLVQQPTRIANSEPQRLVDLLEPYRPVEAVVETSPAWPWLYELLNQHGIGFVLAHAKKLRLIAEANYKTDEIDAEVLARMRVAGLIPEVHPKSSDQREQALLIRHRTRLVRIRTAAAGRIHAELHAVGLRLPRGRLLTKKGREALLESAWPRLRTEQRRLAETHLTLIDHLRPMIGALDKRIEEVGQAIPAVELLRTIPGIGSFRGLLIATEVLPIDRFPTPAHLVSYAGLAPTSRKSGLAPVRHGSIPAGVNRWLRGAFVQSVLSHMQSDPDSWLARYYDAHKKRIGWQTARVAAARKLARATHAMLRTGEVWQQRASTDERGELGTQHVA

SEQ ID NO: 504481 - protein, 344 aa, unidentified
MEYIALDVHKKYTWARVENTEGEKLYESRLQHAHGSIKNFINRWERQSPVAVETVGNWYWIVDEIEEGGGKPQLVNARLAKLMMGSVNKSDKLDAKGMNRLQRTGTLPTVWIPPSSVRDARELPRTRMVFSRQRTQLKNRVHATLAKYGFVVEEASDAFGKKGRAIVEGILVKLPPYTEQAVRRVLGQLDHVNENLKVIEAQMMEAFAPWAETNLLKSLPGVGDILAVVIWTGTMERFARAEQFASYCGLVAREHSSGGKFHYGAVRRDVNVYLKWAFVEAANSSILNRERCGYDHISRLYQRIKSRRGHGKAKVAVARHLSEASFWMLKKGESYREPVSSTQR

SEQ ID NO: 504482 - protein, 427 aa, unidentified
MSVTQNDKIRQVTDTTMVIGVDIASELHWARAFDWRGLELGKTVKFENSAEGFNFFLRWVSELTVEQKKDSVMVGLEPTGHYWFTLAAHLQGGDFKLVLVNPYHVKRSKELDDGHPSKSDKKDPKTIAKLVLEGRYVYPYIPQGLYAELRVAMNCRWRIRKELASLQNQIQRWLKIYFPEHSKVFGRFTGAGSMALLHSAPFPSDLISLGVEGISGIWKQMKLRGIGRKRAQRIYEAAQTSVGCTTGMEAARMELQILLEDYDAKLQQYERVMQVVENLCSQIPAVAELLKIQGLGLVTVAGLFAEIGDIRRFESPRQIQKLAGLAITENSSGKHKGPTEISRRGRSRLRAILFRAAIPLLAKNREFQLLHRYYTTRQNNPLQKIQSVIAICCKLLRVFYALATKDCAYSPEKVLADIQRNQPLKAA

SEQ ID NO: 504483 - protein, 405 aa, unidentified
MRYYMGVDWADVQHAIWVADEQGTRVLTRAIAHTAEGFAEGGRWLDEQRTAGTELWAAIERPDGRVVDFLLNHGVLVYPVNPKALDRARDRFRPSRTKSDPFDAHVLADFLRTDHARLHALQPSSEAAQELKLLTRDATRLVREQTRLVNQLTATLKEYYPRALEVCEHLTAHRAWAFLRAYPTPATAADLTAKQWQRFARAQGWPAAEAARLWARLQQPQLPVPPHVVRAKARLVAVLVTQLEAAVAAVTEYREAVTRFFATLPAAEWATTLPAGHGMTVPTIWAELGDAPGRWSSWQHLQGHAGTVPVTVRSGQYCGVAFRFACNKQLRTAIHQFALCSLTRSDWARAYYDRQRERGHRHHAALRALGAKWLKIIFVLWHRQVAYDETHHLATMARQHLRQAA

SEQ ID NO: 504484 - protein, 410 aa, unidentified
MYGKAGPMIYAGIDIAKNDHVVGATDEHGRDASKPMRFANSAGGFDRCVAYLEGLAESKSDLMVGMEATGHYWLPLFCHLQNEGFSVVVINPIRTDAMRRFKGSSRVKTDAIDCVLVAETMRCGDFEPSRLGDESMMELRQLTRLHQELKESVADLKRQVITALDQVFPEYDSIFSDTFGESSKAFLKRCPTPEECLGIRADSLAGTLAKASHGKLGRKKADEIKSIAKGSCGMRMATSALSFQIKLLIDQIDFIERQAEEVEAKIREGIQEIEPLILTIPGIGHVLGAQIVSEIGDIRRFHSAPAIVKYAGINPSVSQSGKFSSDDNHITKQGSPYLRRALYLAAMGQLKLKTPFYDYYAKKRADGKSHREALIAVSRKLVHVIFAVLSKQQPYDPNVAKSPELASRSE

SEQ ID NO: 504485 - protein, 326 aa, unidentified
MEHELHYIGIDTAKEKLDVDVLRPDGRHRTKKFANTTKGHDELVSWLKGHKIDHAHICIEATGTYMEPVAECLYDAGYIVSVINPALGKAFAQSEGLRNKTDTVDARMLAEFCRQKSPAAWEAPHPLERALRALIVRHQALTDMHTQELNRTETAREVQRPSIDAHLLWLEAELKRLEKQIKDLTDDDPDMKHRRKLLESIPGIGEKTSAVLLAYIGLKDRFAHARQFAAFAGLTPRRYESGSSVRGASRMSKAGHVSLRRALYMPAMVATSKTEWGRAFRDRLAANGKKGKVILGAMMRKLAQVAYGVLKSGVPFDASRHNPVAA

SEQ ID NO: 504486 - protein, 396 aa, unidentified
MTTIGIDIGGRTHVVARCRDGVARADREILRVSESRAGFAALDTWLERQPEPVTLVTMESSGHYWMPLAAHLRRRAVPVAVVNPLAAKYFARSRLGRTKSDPADARSLAEMAMRDTPPARDPLAGAELRQAARFAMTLVTEQAKACQRLIRLVELGFPELGELFDDPTCRTAREILRIAPTARAATRRRTATLANANAGPGHRRLGQARAERLQAAAADSIAVPELAAEVAFEVGLLLDQYDLLEGQIEAADRHVAELLDGELARRLRTIPGVGPSIVATLIAEVGDIGRFSDFDQLLAYAGVHPAERSSGRKGSNPETAWHMSKAGNSHLRAAAYRMAVVGVQHNPVIAAHYARKRAAGKSKMNALGHCMRKALSLVWGVWRNGQDFDADWGVEA

SEQ ID NO: 504487 - protein, 422 aa, unidentified
MLGVGIDWAEEFHLVALGRPGEGVITVRRVEHAPAAVAALLADISGLEPDPTEVRVVVETRHGMLVERLLDAGYVVLPVNPDLIARRRGPARKKDDAADARIACLLALDRHASLRPLVPHGELAGELRAIARDDERAARDQRRLLNRLRQDLIATFPAALVIAGDDLGSPTILKLLERWPTRDQLAAAARDELVGFARAAHHGWPDRFADRVQQALAGEHFTPRAYLVRAKADTIRLAAVQLLAIAAQRHAWERRMGALLLGAPRYGRAKQPRKDELGQAFPGGGVYLSMPGLGDCLAARVAGEIGDHPEQFGSPNALACYAGKAPVTRRSGKSELVVACRLACNRYLANAVQQWAFCSLRESAWAREFYDAQRGRGKTHQAALRALGNRWLEVLWHCLRTGVRYDEAVHVANRNRALGKAA

SEQ ID NO: 504488 - protein, 333 aa, unidentified
MTDLIHGILGIDISKAKFDVALMVAGKVKKTRVFENAPDGFKALSDWLLKQGISSVSACMEATGCYGDALATYLHDQGFAVSVVNPAQIKSFSGAQLNRAKTDKADAKLIAQFYQQMSPAPWTPPPMHVRELQALVQRLSALMQMERQEHNRMDTAPAVIRPSIATVLATINAQIKMVEAMIRDHIDRNPDLKEQSELLDSIPGIGKATIAKLLAFIGDVQRFDHAKALAAFVGLNPTVHQSGSSVRGKPHLSKKGNSVLRKALYMPAIVARRYNPVIKEFADRLKKAGKPNMVIIGAVMRKLLHIIYGVLKSGKPFDPSWSANHDLTVKTVS

SEQ ID NO: 504489 - protein, 311 aa, unidentified
MTETTIGIDISKATLDVHRLSDGTAAQFGNDKAGFRALKSWLKGHDIARVVYEPTGPYHRNFEIALEADYPLVKVNPLQARRFAQSRGTKAKTDAVDARMLAMMGATFSLLPQQQTSAKQRDLKELHVTRLALIKDRTRILNRQKSLTIALLKRQAKARLKLMIAQIEQVDAKIQELLQNAPDTTRATEIICSVPGLSKVSSAAILTEMPEIGTLSRKQVASLAGLAPMARQSGQWRGKSFIQGGRKLLRDALYMPALVAMRHNPDLKAKYTALIKAGKPAKVALVALMRRLIILVNTLIREDREWEKNRA

SEQ ID NO: 504490 - protein, 329 aa, unidentified
MYYVGIDISKRFIDVCLLVDGIKGKRKTKVLPNDLNSAQALAQWLILQKCDPSQAHIIMEATGVYHEHLADGLHQSDILVSVINPHRVREFAKGMGILTKTDKVDAYVLACYGCLKQPENWLPPSQEIRKLKALLQHRDSLLNDKQRIENRLSTLKSTTAPEEILTSLESIEQNLKDELARIERLIAEHIDKHPRLKNDLKLLKSIDGVGEQIGWNMLAIIRGNNFRSAEQVAAYLGVIPIERRSGTSVCGRARLSRIGPPGIRAKLYMGAIAAISWNSHVRALYERLRLKGKAKMVAIGAAMRKLVHLCYGVLHTQQPYDKNHGVVAG

SEQ ID NO: 504491 - protein, 410 aa, unidentified
MIFVGDDWAEAHHDVELVDEAGRVLARRRLPEGVAGLSVLHALLADHLGDDDEPAVVVIGIETDRGPWVGALVAAGYTVYAINPLQVARYRERHGVSGAKSDPGDAHVLAELVRLDRAHHRPIAGDSALAEQLKVLTRSHQNMIWARQRQANSLRSMLREYYPAALVAFSEDLAGRDALAVLGIAPDPETGRRLSLSKLAATLRRAGRQRNLEATAARIQDALRTEHLRADAGVVDAYAAAAGAIVAVLSTLAAQEQVLGEAVGAGFGRHPDAEIYRSQPGLGTVLGARVLAEFGDDPERYPDAKARKNYAGTSPITRASGTKRVVLARHVRNRRLADALYQQAFCALTSSPGARAYYDTHRARGATHHQALRALGNRLVGILHGCLRHHRAYDETIAWPKPEHQTTAAA

SEQ ID NO: 504492 - protein, 354 aa, unidentified
MTSTKYIGMDVHTESISIAVRNSVGKLVMECVIETKASTIVQFIDGLRGDLRVTFEEGTWASWLYDLLKPHVTEVLVCNTRKNASRNGSKSDRIDARKLSEQLYMNNIKSVYHGEHGLRTLKELARSYLTITKDLTRVMNRLKALYRSWGVPSAGKEVYAPRHRAEWLAKISEAGVRRRAEHYYQQLDLLRPLHQEARRDLLLEAKKHQPWKLLRLIPGIGPIRAAIVIAVMQTPHRFRTKRHLWTYSGLALETHDSAQYRVAEGQLQRSKKPATVRGLNKDYNHDLKDIFKGAAMRASTAAGPMHDFYEALLAKGRKPTMARLTLARKIAAITLIVWKKEVRFDANYLKPQAA

SEQ ID NO: 504493 - protein, 354 aa, unidentified
MKKQLKLLNFDGQNLFIGIDCHLKSWKITIYSEEFELKTFSQEPNSAKLAQHLHKNYPGAAFSCVYEAGFSGYWIQRELSEYGIDCIIAHPADIPTMDREKKLKSDVIDSRKLCRSLRNKEIEGIYVPSIELQEARSLVRARVKLVNDMTRVKNRIKFFLMFYGTTISTQGNSWGKNYLAKLQQIQLKTEAGQRSFEFFLQELHFLIEKEKWLRKQIELLSLTEPYQEDVRLLRTIPSVGLITAMTIITEIGDIMRFKSLAKLCCYFGLIPTSYSSGEKERIGRNTSRGNKYLKHLLIESAWIIIRKDPGLLLYYKKQIAVMESNKAIIKVARKLLNRIRLILTMKVEYQCGRP

SEQ ID NO: 504494 - protein, 332 aa, unidentified
MFNLPIYVGLDYHSKIIQVCVMDQNRKILANQSVENDAAAVFRVVAPFGSQVFVAIEACTGSADFAEKLIEKYSWSVALAHPGYTARIKQTPDKSDWTDAKLLADLMRAGYLPRVWLAPKNIRDLRDIVRYRHGLVEQRKQVKLRIRSLLRNHGVKNPCNAWTTAWKTWLFSEQNPMSPNAHWILKQHFEHIEHFHKLILEAEKQIQQLVADDSVVKKLLEQPGIGPITAATMRAMIGHFDRFRTGKQLAHFCAVCPRNHSTGGKTTTCGLIKTGEPLLRNTLLEAAHRLMRYDPHWKNMADRLRAENKKGSVIAAAVANRWVRQLFHQMTS

SEQ ID NO: 504495 - protein, 408 aa, unidentified
MEVRYPRCAGLDVHKKTVVAAVRIAEGRQVRPEVRRFATTTTALLALGDWLAAEEVTHVAMEATGVSWKPVWHVLEDAVELVLANAAHIRQVPGRKSDVPDAQWIAELLAHGVIRGSFGPPAPVQELRDLTRTRKQLGRELTQHNLRIQRVLEDATIKLGSVISEVLGVSGRAILDALVAGETDPGRLAAAAKGRLKCAPEDLVEARRGRVTVPHRFRVGQPLQLGASLRARMAAFDAESERRREPFPPAVERLTTIPGVSEGAAQAIVAELGVDMTRFPTVSQLRSWAGLCPRLDESAGKRRSTRIRKGAPWLKAMLGQCAKAAARAKGTYRQAQYQRLKSRRGGKKAAVAVAASILTAVYYRLRDGVEYRDLGADPFTRRDKVKIAARLARRIRDLGYEVDIRQAA

SEQ ID NO: 504496 - protein, 384 aa, unidentified
MMVIGVDPHKSTHTATAVDPSTNRSVASIRIEATLADYARMLRWARQYEQRRWAVENAEGLGRHLSSWLLARGEQVVDVSSTATARVRQLSRGGGRKNDQIDAAAAACVAALQGDGRPLAAEGITDALALLDESRMNLAQTRVRLVNQLHALLRELLAGGARKDLSATAAAELLRRVRPAGDVERVRKQIAAGLITQIRSVDALLKSNAKQISELVAASGSTLTSTVGVGAITAGRLIGRTGRADRFPSAASFANYAGAAPIEVASAERARHRLSRSGDRQLNAALHTVAITQIRTPGSRGHAYYNAKIAQGKTAREARRCLKRRLADHIWRTMITDQRRMAANPGRHPGATLQSSAAGSTASSSDKSLPRPTMHDTTTPRPAT

SEQ ID NO: 504497 - protein, 401 aa, unidentified
MHYVIGIDVSKATSQVAVAVDGKVTQHFKITHDVLGFNQLNTVIMQFNEFPDIVFEATGIYSRRLKSFLDWHNYPYTYLNPLAAKKQLDQLRPNKNDLNDAKNLAETQFILARAKSYVQNPIYIELQDMSRFYQQINHDIVSTKNRLHRILQLTFPEIEGLFSATDSPHYWELLTIVPHAIITRRSRQALMDTIQGGISWHIGHERLRKLVDQLMSMGQISAPAVAANSYSVAQVIYYAKRLIELHGTKGDILTAMVDKAKDLPEYSIYQSIPGFSDKTVVSLIAELGDLHRFRTANKLNAFVGIDLRFNDSGDYKSTGFITKRGNSTACKVLFRAISNIASTASYGHPSHINDWYQKKKQSSLSKGTKKIAIGAMSRLLRTMHYLVINHQLYDYKAASKH

SEQ ID NO: 504498 - protein, 311 aa, unidentified
MTRIERFVGVDVSKARLDVHVQPGGEEFAVDNDEAGVAGLVERLATEEACLVVLEATGGLQERAAAGLAASGLYVAVVNPRQVRDFARAMGRLAKTDRLDAAVIAAFAQAVKPEPRPLPDAERQSLIDLVARRRQLVEMRAAEKIRRGQLAAALRPRLDEHLAFLDAAIQELDRDTSQALRNSSAWRANDDLLASVPGVGPVARATLAAKLPELGQLNRRQIAALVGVAPLNRDSGQMRGKRAICGGRADVRNVLYMATVAAIRCNPAIQTFHQKLKAAGKPPKVAITACMRKLLTILNAIIKAQTPWSPA

SEQ ID NO: 504499 - protein, 311 aa, unidentified
MPEVVIGVDVSKRWIDVSVGGAKARRLEMETEVLAALAVQARQQGALVVFEATGSYDAPLREALEAAGASYVRVNPAQARAFAQGCGTSCKTDAVDARALAEMGKRLDLVPTVPLPPARRALKALAARRRQLVDTRKQELARCDAGNDAIARASLDAHLDWLNAEIARIEAALREAIRADRDLAAAERLLRTAPGVGPVVAAALLSQQPELGQADRRSQAALAGLAPLARDSGQRRGTRAISGGRPELRALLYLAALTAIRCDPEFAATHARFMAAGKAFKQSIIACAHKLLRRLNAMLKSGKPYTPQNTP

SEQ ID NO: 504500 - protein, 321 aa, unidentified
MAAAVQVVGGVDPHADTIHVAVLTAVGKVIGDAEFATDAGGYARAVEFLTSYGLVERVGVEGAASYGAGITCALTAAGISVVEVERPTRSARRRAGKSDQIDAYHAARAVLAERSTPVKDPAIGGLRALHLARRSAVKARTAAGNQMKAILVMAPEAVRARFRGLDSDELVATVLRCRGFYADTIVADTIVALKALAERHRDLGRQISMLTAHIDPIVTAANPALRAAIGVGPQVAAQLLITAGLNPDRLTSEASFAALCGVAPVPASSGKTRHYRLSRGGDRQANHAVHRIALNRMSHHQPTIVYVHRQTDRRRSNNEPS

SEQ ID NO: 504501 - protein, 429 aa, unidentified
MKIIYPRVCGIDVHKKFIVAVICISESVEPVYLKKRFSTFHNDLIRFRDWLIQNDCQNVCMESTGKYYIPVYNILESHISNIVVANPKWVRAVKGEKDDDKDAKWIADLFKLGIVKSSFIPQKDFRILRELTRYKYKLVNMRSSEKNRYQNALTSGNCKLDMVFTDVFGKSASNIIDLILSDNPYTDEDILSKVHKNCKASPDMILNSINGTDLTPVQKSRIELVNNHIKQLSSNIQRLDKLIDLMIEPYEDYISFLCQIPGVSRNSAITILSEIGVDMNHFTSTRRLTSWAGLTPSSNQSAGKKKSVRISRAGVYLKPCLVEVAHAAVKDTNHPYYANKFNKISKRRGKKRAYIAIARKILVAAYHMLLTGEIWNPADLAEVETPVEQRIKYVKNNLKSDIKQLLDIGLTVEELTLMIQQNANNIATQ

SEQ ID NO: 504502 - protein, 348 aa, unidentified
MRNNITIGMDLGDQDHVVIVMDEKGNEIEIKTIHNTERSLRKFFSRYKKATVAIEAGTHSPWISRLLKELGCQVYIGNPRKLRIIWDCNDKSDERDARILAMVCRVEPRLLWPVKHRDRQAYVDLGNIKARDALVQNRVRLINHIRSVTKSCGYRIPKCSTPSFSKRAPEHIPPELEESLLPLLLTIDHLSQQVKQLDRQLNKLCLKYPETERLRQVPGVGPVTALAFTLTIEDPHRFTKSRQVGNYLGLTPKRDQSGKCDKQLRISKAGNTYLRSLLVSCGHYIIGPFGPESDLRKHGISIVARGGKNAKKRAAVAVARKLAVLLHSLWVSDQSYGPFYKNVARDAA

SEQ ID NO: 504503 - protein, 446 aa, unidentified
MSDRSGLSRGDRNRNARLARLRQLLPPENAIVGIDLADDKQAAVVTDHDSRVIARRRVSARAWELGGLLDWAVAGAAGAGFASVTVVCEPTGHRWRVLDQLAAGRGLALVCVQPLLVYRAREGEDLTRDKSDPKDAVIIARLAAGLHCYEPERADAVWARLRHLGARRHQLTTSATAQVNQIRDLLECAWPAVLGASGSPFRSANWRAAVAVVVDRCAGDLGRVRRLGEARFTAAVRRELPRWGATRPCLRIVRAVFAALADPAGVTAHRPGALERVHLAMSDWRDTRARLADAGARMVAVLDDLGLTGLVTTIAGLTPAGAAAILAETGDPARFASPRSLVKHAGLCPRDNASGAFQGKTSISGRGRPRLRVAAWRAVWAALPDNPVMAARFTHLTTREDNRLARQQARTACAAALLRWIHVVVTRRVTWDPAIAAGTTPLRQAA

SEQ ID NO: 504504 - protein, 348 aa, unidentified
MRITTVGIDLAKNVFQLHGVNEHGKTVLKKQIRRDQMIAFFVNLPPCLIGMEACSGAHYWARKLQSFGHTVKLMAPQFVKPYVKTNKNDAADAEAICEAVARPNMRFVPLKYIEQQAVLALHRVRQGFVKARTAQANQIRGLLAEFGIVVPQGLSHISARVPELIEDASNELPGTFRVLVQRLLDHLKELDSQVDELEAQIKQSHRNSEMSRKLEKIPGIGPITASALVATVGDARTFENGRQLAAWMGLVPAQSSSGGKTNLLGMSKRGDTYLRTLLIHGARSAVRAFQNKQDQSGNPWLQQLLVRRNLNVAAVALANKNARTVWALLVHDRRYEPGYTSARPVAAA

SEQ ID NO: 504505 - protein, 353 aa, unidentified
MENYYVGMNVHLATISIAVMNKLGRVVSEAIIETKSETIRNFIRSLRGQIHVTFEEGTQSAWLNDLISPIVAEVIVCNPRHNRLLHSGNKNDRVDARRLAELLRHGSLRAVYHGERGTRTLKELVRSYESLVEEITRVKNRLKAIFRARAISSHGRALYRASQREAWQEKLEDVGARARAESLYRQLDFLLPLHREARRAMLKEGRRHQANSLLQQIPELGPVRVAQIIATIDTPHRFRTKRPLWAYIGLAVVTHSSADYQVRAGKVGKRKRAAQTRGLNRHYNHRLKAVFKSAAAGACDAGPYKQYYERLLESGMRAEMARLTVARKLAATVLALWKRGESFDEGKIMNEAA

SEQ ID NO: 504506 - protein, 400 aa, unidentified
MRTVFGIDVSKASSEVAIVINGEKIHGYTMPNDTIGFTRLLDDLKTVQKPEIIFEARGVYSHRLQAFLEENGYTYTRLNPLEAKKQLDSLRVRKTDKIDAETLAISQFVLNRKPTYIQEEVYQELRDLSRFYQNLTEDIVRTKNRLHKVLQVTFPEMENILSTPTREQYWNLVMTFPYKDFVLELSKDELLEGIRQSTSKRISDKRVAYLAQKLAALANQSYCAVKKNSPILEEVRYYAKELLRLSEQRQAVLEQMVELAQPLPEYEILLSIPGIAETTATSMIGELGDIRRFQSANQINAFIGIDLRHYESGNFLVKEHITKRGNPYARKILFKCIHNIAAASHTNPCHIEDFYEKRKRQSQTTSTKPHTIASIHRLIRTMYYLITHNKLYDYTSTQNR

SEQ ID NO: 504507 - protein, 462 aa, unidentified
MGSRKKSTKQSKATRSLRVIRTNVAGIDLGSREHWVCCPGEEARPNVKTFGTTTPELARLANWLEEERIESVAMESTSVYWIPLYELLEARRMEVVLVNARQLSHVPGRKTDMLDCQWLQLLHSCGLLRGSFRPHESVCKLRALHRERANMVQESTRAVQGMQKALDQMNIQVHRAVSDLTGKTGLSIVKAIVEGERNPSQLAAFRDKRCKKSEEQIAEYLTGNWREEHLFNLKMALRLYEEIQGILFAYDQEILRLLDDLQNPDLKEIQPPSHPNPVKEKAIKKRGEDTLRDALWGFTGVDLTRIDGISTGTAQVILAEVGSDLQSFPNEKHFISWLRLSPKTSFSAGKPLPKKNKGTGATRVAGALRMAALSLKHSASALGAYFRRMARRKGGSTAVFATARKLAVYVYRMLRFGQDYVDEGAQAFEQRFQQKRFTYIQNIAKQMGCQIIALPDQPQVSS

SEQ ID NO: 504508 - protein, 419 aa, unidentified
MKSIETKKVKTVNKKTLIVTVDISKMTNVGYCRCQDGTDTKPFKFNNNGQGFNYFWERITQMRNTYSMEEVVFGFESTGPYGEPLIHFMNKRDVKLIQVNPMHTKRVKELQGNSPNKTDDKDPKVIADIIELGHALTVVIPEGPAAELRRLTMARERAMQRRTSLFNQLQDLEFTIFPEFSQVFKNVKIKSAMFILEHFPAPQDIAKFKPECLTMVLKRVSRGRLGEERAKTLYEVAKTTVGIMEGQRSILFEIKETLATIKTTESFIAELEKEMSSYLNDIPYSKLLLAIRGIGEITVGGLIGEVGDFRNFNTIAEILKYAGLDLFEISSGIHKGQRHISKRGRSLMRKILFFAAINVVRKGGIMHEQYQKHLEGGMLKMKALIAISRKMLGIMFAIVRDHSDFIENYAEIEKLKEAA

SEQ ID NO: 504509 - protein, 387 aa, unidentified
MPQPNDLSRSLFALEQDATLIAVIEMGQTSWLVAGIVPGIERQPLKKLATDQEGLLQLLHRWRKEATQTGRTIKRITVAFEAGRDGFWLARWLRAHEIEVHVIHPSSVPVSREHRRAKTDRLDTELLKRAFLGWLRGEPNHCTMAAIPTIEEEDARRPSRERESLVKECTRIVNRLRANLARLGIRSFRPTLAHAADRLEALRTPEGAAVPPNTLAELQRDMAHLRFVRQQIKEIEVARAERLNRTPEEGRNPMVRLLARVVGVGIETADMLVQEVFSRKLRDRKAVARYAGLTGAPAESGKKRREQGLAKAGNARVRRGMIQLAWGHLLHQKDSVLAEWYRKRTADARGGTRKTMIVALARKLLIALWRLVTTGEVRAGLLLRPAA

SEQ ID NO: 504510 - protein, 325 aa, unidentified
MTLHVLGIDIAKETYQVVLLRDDKKRSHTFRNHPDTFAELTAWLAKHHVAQVHACMEATGRYWEDLAVFLFQAGHLVSVVNPARIHGYAKSKLSRNKTDKLDAALIADFCATQNPPLWTPPPPEVHELQAMVRHLEALHQMRTQEGNRLASGVPSDQVLQMLREHVAFIDEQIDALKQRIQDHINQHPGLKQQQDLLTTIPGIGDLTAAKLLGENIQSFSSTRSLAAYAGLSPQKGESGTSVHRRSKLCKVGNGSLRKALYFPAICAMRFNPLIMDFCDRLAQRDKHTMVIIGAAMRKLLCLALGVLKSGVPFDPYYAENVQLTA

SEQ ID NO: 504511 - protein, 410 aa, unidentified
MTVYIGVDFHARQQTISYLTTEEGTIQHLVLLHDNPVTVRAFYAQFAGQRVVVGFESSGYAAWFEELLEELGCELWIGHATYIRQFAKRRQKNDRRDADLILELLHTGDFPRIHRYSRTTREMLQQLRYRQRLVKMRTMAMNMLLFMASSRGVSLRTQLQSKRGQAKLQQLALPATLGRQRDELLSLLQTLNEKISTIERWLEQQTKADLAVQRLQTHPGIGLLTSICLRYTLEDAGRFANTRKVSAFAGFDPAQVRRSAEATAKLLKDHMTIFINFEEEMEAGHDTSHDGPAIRNENLNRSVEELELSVRSYNCLKNANIATIGELIQKTEAEMLKTKNFGRKSLNEIKEILAQMGLSLGMKIDENGNPQPGPTSVLPAATLAASFGRFDDEDEDEDEDLHIPADSETF

SEQ ID NO: 504512 - protein, 365 aa, unidentified
MRFYTEHHKHYYGIDLHTKTMYICIINAEGKIVFHENTPVNAELLLEIIKPYLPDIVISVECIFTWYWIADFCEERDIPFVLGHALYMKAIHGSKTKNDKIDSRKIAMLLRAGMMPVAYVYPRGLRSTRDLLRRRMHFTRKKAELLAHIQNTKSQYNLPGFAKSISYKANRKNVVSHFDDPSVQQMIACDVSLIDHYDKLLQHVELYILKHAKAHRPQDLFLLQTIPGVGEILSLVMLYEIHDSTRFEKVQHFTSYSRLIKPTKESAGKIKGGGGKKMGNAYLKWAFSEAVLLLIRESDAVKELHNHLKNRYGKPRALAILSHKLGRAVYYMLRNKEAFNIKTFVNEKDKEKAQEETAMPVEPNA

SEQ ID NO: 504513 - protein, 356 aa, unidentified
MSQKSSSAIAVVGIDIGKNSFHVVGHDRRGAIVLRQKWSRGQVEARLANLAPCLIGMEACVGAHHLSRKLQGLGHNARLMPAKYVRPYSKGQKNDFRDAEAIAEAVQRPTMKFVATKTADQLDLQALHRVRERLVSQRTGIINQIRAFLLERGVAVRQGLRFLRAELPGILATRTDVLSLRMMRIIEDLSADWRRLDARIEGLSGEIETLARQDQHCERLMTVPGIGPIISSAMVAAIGTGDVFSKGRDFGAWLGLVPKQISTGDRTILGSISRRGNRYLRSLFVQAAWVVLVKVGPKHWERYGLKSWIEAAKKRLHHNVLAIALANKLARIAWAVLNKGRAFACDKTDAMAYRPA

SEQ ID NO: 504514 - protein, 368 aa, unidentified
MNNHTLEAALTAGAKELKNQKTAKAKRIVMGADVHLRSYQGARKIDNGPIGAVANFRSQAELLLYVEKQMEQAEEVVVVYEAGPLGYVLYRALKARGVKCYVCAPDSGEQQRKRRKNNAIDTRNLTSKLFNYLNGNEGALQLVRVPTETQEQARLASRQHDQLVEDRKRLGAKGNALLLSQGFGSWKNWWRPKAFSRLSQLVPEWLKEMLQSWVDLLRGLDEKIRPAKAALAKRCRGPRPKGAGAISLVQLQSEVLDWGLYPNRRKIGCLAGMVPSEWSTGDNQWRGSITKVGVPAIRRIITEMVWRMILFQPQYKAVQKWQEVLRGTNRALKKKAVVAIGRQLMVDLWRLQTGRVNAQELNLVMIGG

SEQ ID NO: 504515 - protein, 336 aa, unidentified
MWYVGLDVHWTTTTMCILDENGKKVKSRTVRGPLWHLPGVVREAAEGRRCVIVYEASGSYGWLYEQFQAMAEQVVVAHPGQVRLIFRSKRKSDRIDAEKLAKLLYLDEVPAVHVPQAPVRAWRGMIEHRKRTVDKRTRAKNALRALLRTHVIEAPKNLWSRKGMAWLAAVEWPDASAALRRDMLLEDVQHFNRQIARAERVLDRVAEGHPGVALLRTIPGVGPRTAEAVMAYVDEPRRFRRTKSIGTYFGLVPCEDSSNQQRFGHITREGPATVRRLVVEATWQAIRRDAAVRAYFERIRRGDRERTKIALVATAHHLLRAMLAMLRRGQAWRSAA

SEQ ID NO: 504516 - protein, 371 aa, unidentified
MKSIIYIGMDVHKKTYSLCALLKETGEIIGETKIPADVSLIIKFIENAKKSVDSDDVQIKTGYEAGCLGYSLYWQLAAKGIECDILAPSTMHRSAKNKVVKNDKRDAKNIAANLANGTYKSVYVPTDEDVEIKEYIRMMHDFKIELKKVKQHINAFLLRFGHHYPGKSKWIPAHIKWLKELELSDMHREILDEYLSQLEILSEKIERFKYRLEELSQKETYNEKIGQLRCIKGIDTTAAMTMHAETSDFDRFPTANAFASYCGLTPGEDSSGDSYHRLGITKQGNSMIRTTLVEAAQVLVRGTIGKKGKKVKSKQKDQDVKVIDYADKAVVRLQKKYHRMIFRGVKRNIAITAVARELACFVWGIETGHIS

SEQ ID NO: 504517 - protein, 345 aa, unidentified
MELHTIGIDLGKTVFHLVGLNLCGEVVVRKKFSRAQLLRFTANRHVGLIGMEACGGAHFLGRALREQGHEVRLMPAQYVKPFVKTNKSDYIDAEAIAEAVTRPRMRFVPIKTDDQLDMQSLHRVRERWVMRRTAIVNQIRGLLLERGITLPKGRSHVDTVLPRILEDADLKLSGALRTLLAQLKLELDQMAVRIDEADTVLSRTAHQNPACQRLVAIPGVGPVIATALIAAIGNGAAFRKGREFAAWMGIVPGEYSTGGKQKLLGISKRGNSYLRRLFIQGARSVLQHSTKQTSALSAWLKQLQARTHPNVAAVALANKLARIAWAVLAKDEPYRPPLLPCTAAA

SEQ ID NO: 504518 - protein, 330 aa, unidentified
MRYIGIDISKDSFTVAFSSVKGSKTQSYKNTPKDIQKFIKTLDKEQDHCVMEATGNYTFKLLYLLIEQGYKASLVNPKQTKYFAKTMLSVTKTDPQDACLLACYGEKMTPPVYKMPSEKIILLKQKRTVIRQLRKQLTALKNLEKSLEVLPRKDKNAFTCLNNTISYTEKQTEKLEKELIDDITEDFDKQLDLLTSIKGIGDKLAASLIIVTGGFSFFENPKQISRFLGICPTYQQSGSSINIKGSINRNGDSHLRGMLFLASLAAIRFNTACKELFSNFKAKGKPVKVALIAVANKLIRQAFAVVKSGISYIDGYISKPPITTVKIISN

SEQ ID NO: 504519 - protein, 412 aa, unidentified
MPKIVYPICCGIDVHKSFVVACIATTDEKLVTTYKSKRFSTFTGDLRRLSDWLSQNNCHDVCMESTGKFWIPVFNILEPTCHVVLAHPKYVKAIKGKKTDKRDAKWIADISKHDLINGSFIPPADIRQLRDLVRYRFKLTNYTTGEKNRAQNCLTVSNIKLDDVFTDVFGKAASAITDRLLESNEPFDVRPYLTKGIKASPEEIQAAVDGVMCANQAEKLRIIRSHMDSLELCKTNLESEILTVAEKFLPQINLVLTVPGIQTFSAVAIIGEIGVDMSVFETSRHLCSWAGLAPQNDQSAGKKKITRISRAGVYIKPLLVQCANCAIRSKKHPEVANRYNAIKKRRGHKKAIIAIARMLLTAIYNILKKNEPYNAELYLADKPPIQREVTVEQAIFILQRQGYLVNQGASAP

SEQ ID NO: 504520 - protein, 327 aa, unidentified
MPRKTDAVVARTIGIDTGKNTLHLIGLDEKGAIILREKLSRGRIAARLANVPRCLIGIEAGMATHYVARELIALGHEVKQVPPAYARPFRQGHKNDFRDAHAIAEAVQRPSTRCVPVKTDDQLDLQALHRVRSRLIGERTAVINQIRSFLLEHGIPVRQGMRFLRQQLPDILAKRIDVLSPRMIRIIEGLIGDWWHLDERIEYVTTEIEVLARGNEGCRQLMTVPGIGPIIASAMVAAIGNGTAFAKGRDFAAWLGLVPKQMSTGDRTISAASQSAETAICARSSCKAPALFCSDRQTGQSTASDRGSQPRRNACITMFWQPHWPTN

SEQ ID NO: 504521 - protein, 358 aa, unidentified
MRIIGVDLHARQQTIAMLDTETGELIEKTLQHEGDEVRKFYSAVPGQVLVGIEATGSMQWFLQLMEELGMECRVGHPAKIRKTETRKQKHDRRDARLLMNLLAENRFPTIWMPSTEQRDLRTLLRHRHQWVRMRCRVQHTLQSMALTNGLRRGHSLWSQRGQHELQALPLAPHANQRRTALLTLYPQLQESIDELDQRVKEQAQQHPQARRLMTHPGVGPVTALATEVFLGNPMRFSDSKTLASYIGMIPSEHSSGGRQRLGAMSKQGNSLLRYLWCEAAMHAVGRDPELQRFYRRKLVQKGLGKAKIAAARKLGIRLWIMLRDKIDYEEFCRRGKQRQRFGSARAGMPDFNSGPAAQ

SEQ ID NO: 504522 - protein, 412 aa, unidentified
MFKIFRNNCCGLDVHKTWIYACIGITDPNGRTDYKQARFSSFSEGLRKLAAWLAKYSCTEVCMESTGKYWIPVFNILEKSCSVTLAHPKYTKPQKGNKTDRKDAKWICDLFMCDMIKPSFIPSPEIRQLRDLMRYRSKLTNMLTGEKNRAQNCLTVSNLKLDDVFSDVFGKSARSITNYILEHPGETFDVSSFVDPRCKTPVSEIQAAVDGAISPEEADKLRQCLAHIDELEAHRKEIESEILQIAEPFSAVLDLLYTLPGLDKNPMTAIAILSEIGPDMSVFPSSKHLVSWAGCCPRNDQSNQKVKSRRISRAGSYLKPLLVQVANALIKSKKHPEFKERYHRIKSRRGHKKAIIAVCKMLLTAIWNMLSKLEPYNPEGFLEHRPVRQDKTLSVSQALELLRLRGYTITSP

SEQ ID NO: 504523 - protein, 464 aa, unidentified
MKDNSLSQYPTAQQPPALPPHLSQLNLNAAGIDIGATRHYVAVPAGRDAVCVRDFGTFTTELNQLADWLVQCGIDTVAMESTGVYWIPVYELLESRGLEVKLVNARHVKTVPGRKTDVLDCQWLQQLHTFGLLAGAFRPPEQLCVLRAYLRQRANWVRYAAVHIQHMQKALNQMNVQLHHVVSDITGVTGMKIIRAIVAGEQSPQRLAGYRDHRCKQSREVIAQGLTGNYRPEHLFALKQALELYDTYHAKITECDQAIEQFLQTFDSQLDPATSPLPPPRRSHKPERNQPRLDLRTELYRITGVDLTQIDGISAYTALVVVSEIGLDMSRWPTYKHFTSWLGLCPGNKKSGGKVLSGKTKPSANRAAAALRLAAQGLHHSQSALGAYFRRQKTRLGAPKAATATAHKLARLIYSMLKHGTAYVDAGQDYYEQQYRQRVLQNLQRKARALGYQLVTVESTDQAA

SEQ ID NO: 504524 - protein, 342 aa, unidentified
MQIYGIDLAKEKFDVSFFDLTSKKVSNQPSHKVVKNNLKSIGRFLETLPSDAVLVAEHTGVYGDTLLKCCMDCNVKIAFVGGYVIHRYRATPDRAKTDVLDCALLREFGERYPDKLKYKTFPEEALYELRQLARHREMLVEQRKQLITADKSEDCRPVRSLVVKRSMDRIKEMLDTEIAETEKEMLKVINGHDSIHHNYELVKSVDGVGLITAVELLVKTENFTKITTARQYSAYAGTAPYEKSSGKMDKGAHISKIGNRRSKTLLYICAESARLHNKEIKLYYERRTLIDKKPRHYVLNAIANKLLRIIFTLVEKGEYYDANCIKPNGKPQTGRVGLTCET

SEQ ID NO: 504525 - protein, 343 aa, unidentified
MQTITTIGLDIAKSVFQVHGVDAGGRVIVRRQLKRRSVLAFFQKLPPCLVGIEACASSHHWSRELQALGHTVRLMPPAYVKPYVKRQKNDATDAEAICEAVTRANMRFVPTKTPEQQSGLVLHRTRHLFIRQQTAVINAIRAHLAEFGIVAPVGRHGVEELLNVVADPGDRRVPEMARACLLAFGAQLRRIKEQILEFDRLIRAWHRSNEMSMRLDEAPGVGPVLATAVVAAVADPKSFRSGRNFSAWIGLVPKQHSSGGKNRLGNISKQGDRYLRGLFVAGALAVIRYAKIHGTKHRPWLTALLARRPTKVAAIALANKIARMVWAMMARGERYKEPVALAR

SEQ ID NO: 504526 - protein, 320 aa, unidentified
MRNAVGLDISKLTFDASAMVGKTEHSAKFDNDSKGLDQFSDRLKSLGCQNLHICMEATGNYYEEVADYFAQYYSVYVVNPLKISKYAESRFKRTKTGKQDAKLIAQYCRSAQESELVKRQKPTDEQYRLLRMTAAYAQIKSECAAMKNRHHAAKDEEAAKAYAQIIKAMNEQLEVLKEKIKEQTEKPNCKEGVKRLETIPAIGRMTAAVLFHHLTSSKFETSNKFAAFAGLSPQQKESGTSVRGKGKLTKFGNRKLRAVLFMPGMVAYRIRAFPGFIKRLEEKKKPKKVIIAALMRKLAVIAYHVHKKGGDYDPSRYKSA

SEQ ID NO: 504527 - protein, 413 aa, unidentified
MVVGVDIGSQIHYARAFDNRGRELTKRIFSFHNDLEGFNSFNLWAETLKTENKKTAVLIGYEPTGHYWFAFAKYVNDHQKRLVMVNPFSVKKIKELDDNSPKKTDSKDPKTIAKLVVDGRYSIPYMPEGIYAEIRDLVYSRDRIMKQHNISANRIQRWLAIYFPEYLGLYTRFDAISGLAVLEKAPLPKDVIALGVNGIRKIWHDKKMRGRGVTEDRAKTLVEAAHNSVGLDGGIGTKSELYMLLEEHRLWTSQLEAVNKVLEEMILKVPHVEKLLAIKGVGSITIAGFIAEVGDIRRFDSPKQIQKYAGLELVENSSGKHKGRTRISKRGRRKLRKILYQVMVPLLARNKEFRGIYDYYVTRVKNPLKRRQAMVAVSCKLIRVFYAVLTKGVEYDRFKMMSDIHRKSDIIAA

SEQ ID NO: 504528 - protein, 347 aa, unidentified
MRFYTKAHAYYCGIDLHAHWMYLCVLDQQGEVLLHRNLRACPEAFLKAIEPFRRDLVVAVECIFTWYWLADLCAQQGIEFVLGHALYMKAIHGGKAKNDRIDSQKIAVLLRGGMIPVAYVYPPQMRSTRDLLRRRTYLMRKRAELLAHVQHTNSQYNLPEIGKKIAYKANRAGVAERFFDPAVQTSVETDLALIGFYDTLLNQLELFITRQAKDHDSQSFYLLRTVPGIGKVLALTILYEIHHIARFQRVQEFVSYCRLVKCSRQSAGKNYGFSGKKIGNAHLKWAFSEAAVLFLRNNPEGQKLIARLERKHGKEKALTVLAHKLARAVYFMLRREKAFELTQFLAA

SEQ ID NO: 504529 - protein, 265 aa, unidentified
MLYLGCDVHKNYTTMSFVTEDGKVADTSSFSNNIGELKDLLKRFPEEEFSAVLEAGLNWGVIYDMLDSLSEVKNVSLAHPPKVKAIASAKMKTDKIDSKILGQLLRTDLIPEVWIPCKETRMLKDIVRFRAFTVRIKTMIKNRIHDILRKSHVNPSEVKDIFGKYGRMWLEEIELSDPRMDKLLRYHLKLKGIFEEMEIELKKWINKEMKSNKDLRLVKTIPGIREVFGPIIVLEIDDINRFPDPAHLHSYSGLVPSTHVSGNTS

SEQ ID NO: 504530 - protein, 363 aa, unidentified
MVSKGSRLDFSGQRIYVGIDVSLKSWSVTILTAHAEHKTFCQPPRAEALVQYLQRNFPGAEYLCVYEAGYCGFWPQRALAAAGVACLVVHPADVPTKGHERRRRRDPVDSRKLARALRSQELTAIYVPSLPAQEDRALVRMRAELVEKQTRCKNQIMAQLRLYGYELPADLRTAHWSRAFLSYLQELAFSRPSGRQALDALLDELFHLRELIAQVTRQIRALTLEEGYRENVALLRTIPGISIVSAMILLTELVELSRFRSGDELSSYVGLVPDEDSSGDVRIVTGLTRRRNRRLRVLLIECAWVAVRKDPALLLKFEQLTTGREGQLRQKKNQAIVRIARKLLSRIRHVLVTREPYVLGVTQ

SEQ ID NO: 504531 - protein, 350 aa, unidentified
MLIIGCDFHTRYQQIAMMDSETGELVEQRLEHENGEARAFYARLPKPVLVGMEATGYAQWFERMLAEQGHELWIGHASEIRAGVVRKQKTDARDAAHLLRLLVEKRFPRIWIPSPAERDTRQLLRHRHKLVCFRVSVKNQLHGLAMSQGICRKKKLFTAKGREELEKLSLGPWASRRRQELLEMLDRFNPLIDELDRAEQQQAESHADAVGLMTHPGVGPVTALAFVLTLGPVARFQRGKHVVSYLGLNPKERSSGDKQHTYSISKQGNTMMRWLLVEAAQTAVRFDPELQRLYQRLKFRRGASVAKVAVARKLAVKLYWMLRATASCAQRAPMQGSSGGTPIPHVGSKV

SEQ ID NO: 504532 - protein, 402 aa, unidentified
MKDGTSRFGGVDWALDAHAVAIVDQAGAVVDEFVSEHSGAGLDELCRRLARQRVTRVAIERPDGPVVDALLGAGFCVVVVASRSVKALRERYGTAGNKSDRSDAYVLADCLRTDGHRWRDLQADSPDTVTLREHVRARKDLVETRVALANQLRAHLHVVFPGAVGLFRDIDSPISLRFLERFPSAARAAWLSEKRLAAWLVANAYSGRKCPALYCRLREAPAGSTGDGEVRGAVVVALVEVLKAVRAQIDELTTRMAEQLETHPDAAIFTSLPRVGVVRAATLLSEIGDCRERFPDPESLACLAGVAPSTRASGRHRAVTFRWSSDAKLRDALCDFAGDSWRGNAWAETRYRQLRASGKRHPHATRILARSWVQIIWRCWQDRVPYDPEFHGGYRRLASQGA

SEQ ID NO: 504533 - protein, 365 aa, unidentified
MNTHNAHVDYNNAVYIGIDVHRYQHTAVAANRFEEEMGELTFPNTPDGVATFVAWSKNIAEVNLTRIIGVEGTNGNGRLLRNAVVPVYPDVYEINPIYTKQRRDHGTRGNKSDPVDAKLMIEVLTRKLDQLPRVNKQDHSESMQALSELVAFHDDLTRSQTRLKNQLHRLFYDIDPTSETSRSRTFSRKRLIGWLARTARPPEGIHHNTQRLILRSKIHELLDLEKTRSKTDIRINQLLTQKNKNLLTMPGAGTITAAKIIAAVKGISRFGNIQQFIKYAGIAPVERSSGKTRKHKQAKGGNRQLNTAIYTIALTQMRCEPKAKAYFAKKIAEGKTKKHALRCLMKRVACIVYGMLKNGETYRGN

SEQ ID NO: 504534 - protein, 349 aa, unidentified
MDYFAGLDVSVKETSVCIVDETGKIIREVKVTSEPAALLEALRNPAYRFKRIGLEAGPLSQWLYSALAEAGLPVICVETRHMRAVLKAQINKTDRNDARGMAQMMRVGLYRPVHVKTLRSQKLRMLLTHRKLLQSKAIAVDNDLRGTLRNFGLKVGMVGATRFEARIKELIENFPDLAVLVEPLLVVRRVLREQFGILHRRLLAVVRDDDVCRRLMTVPGVGPVVALTYRATIDVPARFRKSKAVGAVFGLTSAKYQSGEIDRSGAISRCGDEMMRMMLYEAAQSMLFHSTRWSWLKAWAMKVARHRGMKKAIVALARRLAVIMHRIWVDGTEFCWTRQVAAVCQPPMI

SEQ ID NO: 504535 - protein, 430 aa, unidentified
MKSNTQNAKIEAITEKTLVLGIDVGSETHYARAFDYRGIEYSKKPFKFSNTEAGFVTFKEWILDIKERHEKDKVVPGMEPTGHYWFNLGKFLQDNEMKPVLVNPHHVKKSKELDDNNPTKNDRKDPKVIAGLVREGRYMIPYLPDGVYADLRTASNIRFQLQAELTRIQNRISRWFNIYFPEYKTVYGKPDAKSGMLILKAAPLPEDILTLGIDGVNQIWRDAKLRAVGKARAKTLIEAAEHSVGSKEGAVAARMEIRMLLEDYESRNMRLQEVMVLIEELVKGIPMAEKLLEIKGVGIRTVSGFLAEVGDISRFNNPKELQKLAGLALVENSSGKHKGKTTISRRGRKRLRYLLFEAAMSLVAKNPEFRELHNYYTTRRLNPLKKMQSLMAIAAKLIRVFYVMLTKGVNYDPKKMVNDIKRPAVYLQTA

SEQ ID NO: 504536 - protein, 367 aa, unidentified
MPLSTNRYLSLCPKIRNTQEVKSPMMRTTYVGMDIHKNFIQAAALDEQGNIIKEQKLKTDEKEIKRFIETLKPQKIHAAKEATCTWYHVYETLNALDVETTLVNMRRTKTIAESKIKTDKLDAKTIAQCLRTGFIATAYIPPKAIMEQRNLLRHRMSLRKEIIRYKNKIHAILLRNGVHHPDYSDLFGVGGMKFLRSLTTLPDSEHYSLTSYLNIVETLIREKTQTAKNIETLCKNNHQAMLLTSIPGVSYYSAMIILTEMGEVQRFSNPKKLCSYAGLVPRTIQSGNHVYQGRILKECNHNLKWILDQCAHIHIRHCPNSSITRLYHRVETKKGAGKATIAASRKLLTCVWHMLMKDEMFKYSNDN

SEQ ID NO: 504537 - protein, 349 aa, unidentified
MKEVTTIGLDLAKHVFQAFGADAEGTPLFNRKLRRAEVLRFFERLRPCLVGMEACASAHYWAREISALGHEVRLLPPQYVKPFVKRGKTDAADAEAIVEAMTRKTMRFVPVKTAEQQAAVMVLRTRALLVRQRTQAINALRAHMGELGIIAPTGIANVKALAPIIRDEKDARLPPAARFALSEIIDQIEMLATQIDKLEREIVIQSKQDDEMRRLASIPGVGPIIAMAVKAFVPDPAGFKSARHFAAWIGLTPKSHSSGGKERLGRISKMGNPVLRSLLTTGAASVLRHVQYRDRVWPWLKNMLTRRPFKVVAVALANKIARMIWALLTRGGIYRDPTRIEAGPVAAQA

SEQ ID NO: 504538 - protein, 377 aa, unidentified
MNDGTTTTPLVFVGLDVHVATIAIAVARGTAAPESLTTVRNAPGPLRKALARLGPPEQLRVCYEAGPCGYTIARDLAAYGMTCVVIAPSLLPRVVGDRVKTDRRDAIKLARLLRSGDLTTVTIPTPELEALRDLSRLREQVIGDLHRVRQRLLKFLIRHDIAQPAGIGRWSTAYQAWLTTLTLDQPSLQAALEDYRTELAHQTARRDRLTGALEDARLTGEQTPVIQGLEQLHGIGTITATGIVAELGDLTRFTTPDQLTAYAGLVPREQSSGSRVQRGGITKTGNAHVRWLLIEAAWHYARPYRAVPEPPLTDPLAHLAWTLRQRLTRRFGQLLRRGKPRGVAIVAIARELLKACWAVARLVRQQPQSRTVPALAA

SEQ ID NO: 504539 - protein, 368 aa, unidentified
MAKCIMVGCDLHDKSMLLKIAADRDRPVVRSWGTDASARRAMIQDLQNRARQRGAQRIVFAYEACGFGFRLHDELAEAGVEAHVLAPSRISRSPKHRKRKTDARDAQVLLNIVRSYVLAGVEMPAVWVPDLQTRDDRELVRRRLAAAEDRAKAQVRVRWLLKGQGIETAPAKAWTEEYWKWLEGLAAGQLPGGAAAALASLMRQILWLGEEVRRLDDQVLGLSQAPRHAPVISALRRRKGVGVLTAMVFLTEMGDLGRFRNRQQVGSYLGLVPSSFETGQDADRKGHITRQGSTRVRKVLCQAVWSRLRLAASDRGAYERIVSRNPRHKKIATVACMRVLGVRLWHDGLAAQEALRARTEGGGGQSPG

SEQ ID NO: 504540 - protein, 339 aa, unidentified
MKLYSAFDLHSNNSYLAIIDENGKRVFHRKVKNDPQLVVQILGPCKNDIEGIVVESTFNWYWIVDLLSDEGYEMHLASPTKIQQYSGLKHSDDKDDAFWLAEMLRLKILPEGYVYPKEQRPLRDLLRKRGHLVRLRTSLIVSLQNILARNTGDKMKTNHLKALKEDRVTPLLAGNDDLSLAGRVSKEAIDSLTRQINAIEVAVEKKMTLRKPYDLLLSMPGVGRILALTIMMETGPIGRFAKVGNYVSYCRKVPAGRFSNEKKKGIGNRKNGNTYLSWAYAEASELARRFDAEARDYYDRKRRQTNAPIAHSALAHKLARAAYHIMREEVPFMPEKTFA

SEQ ID NO: 504541 - protein, 391 aa, unidentified
MSQYFVGIDISKYKHDCCIINAADQSIVAKFTIQNDKDGFNELLTSLQSLSTPDDIKIGFESTAHYALNLELFLEKAHHSFMEVNPVLISEYKKSTSLRRTKTDSIDCESIARWLMTVEYKPHSKGFYHAYSLKSLTRLRDRLIRQRSFYLVKITNVLDHTFPEFKPFFQERFSKTALYLLENYGSAEKMAHMNSASYDNLRRISRGKFTPQKFLELKALATNTVGVNNSIFDTELTCLLTLYKEAAKQISVLETQITGLIEEVHPHYMSIPGIGPLSAAVIYAEYGDISNFSSPAQMLAFAGLEPGISESGTESHKGRMIKRGSSQLRYTLMNCALPLIRFDMTFATYYAKKRSEGKPHRIAISHVTKKLVRVIFALERQNTDFVATALH

SEQ ID NO: 504542 - protein, 331 aa, unidentified
METDQYIGVDLHKVFFQACAMTRHGERQWEGRFPRTPEGIGALVARCTATSAIAVEATTPTWHFVDQIASRVATVCVVDTRKTKLKAGYAAKTDRLDARRLADALRRDSVVSIYVPPPAIRELRELSRHRLMLTQLRTRVLQRMRALLLRQGLGDPPASRLRSAAGQAWLDQVSLPPQAQAALTTMRRVEHDLTAQLAVVEADVAREALADPIVERLQRLHGVGPVLGVMLRAEIGEIARFPSPRHLASYAGLVPYVDSSASHTRYGRITKAGSPWLRWALVEVGLHTLRRKDPLGRWGRKLAVRKGKLTAQVALAREMCQEIMTMWQHVA

SEQ ID NO: 504543 - protein, 498 aa, unidentified
MPPVVTVSPWTVRGRNLDWRRSPLPGNPRCCCVRVCQSPVLTGALAGGALVPIRWGVPLQEVAAKVKVLYERVAGIDVHKDMVKVAIRSPGDKPRARKTEILEFRTFYGVLQHMARELRRREVTHVVMEASGVYTEPVYHALCEQDFEQIAVINPAHAKALKGHKTDARDCARLAELFECGLLRGSYIPAPELKEVRDLTRYRTKTVQARTSEIQRLGKALESAGIKLGSVASDITGKSATAMIEALIDGERRGQVLADLAIGRMRTAGKLADLSQALAGRFTGHHALLCRLHRDRIAVFGAAVDDLDERIAGKAALWQRQAGLLKTVPGFGDIVAWAWLGEIGPAPHRYFPDHEKLASWVTLCPGNNISARKRKHGRTGDAGTYIKPMLIQAAWAAIKGRGRLQARYNRLVRRFGGNKNPGAKKKAITAIAHTLLKIAYQVLKSGTPYQEPGADFCTRRESPAQRQAFLERQLQNLHPGCTITITISPPEAALPAGA

SEQ ID NO: 504544 - protein, 358 aa, unidentified
MKIVGCDLHARQQSIAMLDTETGEFPEKIVRHEGNAVREYYAALEGPIVVGIEATGSMQWFLQLLEELGIQYRVGHPAKIRAAATRKQKHDRRDARLILDLLVMKDRFPEIWMPSMEQRDMRTLLRDRHQWVKMRARLQHTMQSIALNPGLRQGPGLWSGAGQSALQALPLAHYTSQRRNALLSLYAQLQKRIQELDKVVEAEAQSRPQACRLLTHPGVGPVTALATEVFLGDPKRFRTGKQVASYIGMIPGEHSSGKRQRLGKLSKEGNALLRYLWTEAAMHAVGKDPELKRFYRRKLIAKGMGKARVAAARKLGIRLWIMLRDQIDYEEFCRRGRLRQEGEAHAGMPAFNSGPAMQ

SEQ ID NO: 504545 - protein, 401 aa, unidentified
MSTMPANVQRVKRFRELKATLRTDRSRLLVGLDIAQAEHVAHLRHAHTRIVGPTLTIPNTRQGFATLWARIDQACRATGCREVVCGLEPTGTYHQAVAAFLEAQGADVLLLSSSVAYWHRRTQDGTWDKNDRKDAANCAELLEAGKVLFYSQPDGPLAELRRLVRCLRRARGELAACQARWRTTLRPALGPMGEPLPNRLRAELPELLQAWEEAAPGRPALATGRLPLGLATACADLAAQVVAVQARIAALEQALTPVAARLPAYALLQTIPGIGPTVAAILLAEIGDIGWFTQFSQLRKLAGLDIVRVQSGRFEGRWRISKCGRGLLRWALYQAARGCARTAGGRARLAALTAKRAGDRYAGRKATVELAAKLLRVVWGVWRSGRPYDPIRAGGLQRQPR

SEQ ID NO: 504546 - protein, 400 aa, unidentified
MLSIGIDVSKGKSTVCGMKPGGEIVYAPFEVQHTREGMSELVSLLHNSGEEVRAVLESTGSYHCPVVAALLENGIFVSVVNSLRMKRFCSQSIRKVKTDRIDAMQIALYGLAYWQELQPARLPEDTYRELQLLARQYYQMTSMLIKAKVDFNAICDQVLPGMQELMNDHAGRHKLSDFVLRYHHTTHILEMGETRFQKDYCKWAEKKGYRNCERMAVLIFATAQNGIPVLPNAPSTQIVITEAIRVLHTVEASRDAILTQMQALAKTLPEYSLVREMPCIGDTLAPRLIAEIGDVRRFHSKRALIAYAGIDAPPYQSGKFCANNRHISKRGNRYLRKTGYEVMQSYVMHKPANDPIFTFIEKKRGEGKSGKLAMVAGLNKFLRVYYGKVTELYRSLPAIE

SEQ ID NO: 504547 - protein, 438 aa, unidentified
MSNKVIFNLDELFISVGIDVGADFSWMSIALPNQQFVGKPYKILHNSIDSLTTAVSKIKEAEELYSLESRIFLESTGIYHYPLFCYLRDKGFNCSVINPIITKNSTNINIRKVHNDRFDSKKAALVGLKPDLKVSLMPSDLALNCRNLCREYYDLMDNRSAYVNKLQGELRMAFPQYLGIFSKVTINTSLTLLENYTSPSAFLKADKQEIIDIIKSTARFGLTYAQNKYNAIIQAATDANQFGYIIDSNIKRIRLYISFIRKYDEEINSILESLHELVDANEDSDFVKQIHLIETFKGAGFLSAVSIMGEIGDFSAFSKPKQLFAYFGLDPSVKQSGKFEGTKVQMSKRGSAIARRVIHTLTLQSISISRNREAKNPVLREYYLKKCDSKPKLVAMGAVSHKVCNMIFAILRDNKPFKIIAPQEHIQQYNAAKCDIAA

SEQ ID NO: 504548 - protein, 445 aa, unidentified
MAHANRLSRGDVRRNARLDRLRRVVSRDHAVLAVDLADDTQVVVVCDHDSRVLARRTWRCRPWQLDRALRWGLAVACRHGFAGVVVACEPTGHRWRVVVEQASRLGLEAVCVQPLLVRRAREAEDFTRDKSDDKDALLIARLTTQLHCYLPERPTAAWARLRHLGNRRVEQLTLATAAQQRLRDLLECGWPAALEVTRHPLDSSTWRAAMTVGRCDPARIRRLGFTRFARAVARELPRWGGRRRNLRILRALYAATGDDRGVTSQRAGSLERSALVLTDFKQALAALAEVEGRMAKVLAELGLAELVTSIRGVSVVGAAAILAETGDPTRFDDAKAVVKHAGLCPRDNASGAFAGKTTISGRGRPLLRLAAWRAVWGALPHNPVFAARYTHLTSRQRNRLSDGQARTAVAAALLRQLWVVCVNRTPWEPAVAGGTIPKEVTDPAA

SEQ ID NO: 504549 - protein, 368 aa, unidentified
MDRKSSKLFVGMDVHKESIDLATGEAQGEVRHYGAIGGDLAALARVVRKLESQGRALVFVYEAGPCGFVIYRWLRSRGHECWVVAPSMTPRQASDRIKTDRRDCLKLCRLARAGELSPVYVPDAADEAMRDLVRTREDAVVMQRQARQRLAALLLRNDIRYNGKTAWSAAHRRWIAEIKLPHAAQHIAFEEYVQAVEEAGLRVARLTQAIEAERTHWRWTPVAQALEAFRGIQAIHGTRIIAELGDLRRFPRPRSLMGYLGLVPSENSSGARRHQGSITKAGNSSARRALVEAAWAYRYHARVSVGIARRQSDLPQSVTDLAWAAQLRLCARFRRLCARGLHRNKIVVAVARELAGFVWALGQQVAPR

SEQ ID NO: 504550 - protein, 319 aa, unidentified
MQSKLTIGMDIGKAQVVVACHESAFAVLKMANAVPVLRRWLATLPAGSRLGLEATGGYHEPVAELAHSLGFTVYILNPKDVHHYARALGARGKTDRLDAQVIAAYVAEHNARLHAFVPLSADEKLLRELARRRATLVNAKSMLQQSLRVLPGFEREGRELLRAMGSFADRLERKLAEIAARSSERAALVKRLQTIDGVGTLTSIRCATLFTRVPLHRSDAAVAFFGLDPRPHDSGQHRGRRRLSKRGPSEDRRLLYNAAMSAIRTPTWRPLYQHLRNRGLASTEAIIIIARRMVRIAFAMYQNHSDFNPRLVPRPCCPA

SEQ ID NO: 504551 - protein, 439 aa, unidentified
MTIPRIRFVGLDVHKRVVEACIVDHAGKVVLRHRFALNRRNLELVAHKLLQPSDHVALEATTNCWAVADTLRPHVARVLVSNPMATKAIAQAKVKTDKVDAHVLAQLLRCDFLPEVWAPDEATRRLRELTGRRSALVGQRTMMRNRIHSVLAMRLIEAPTRLFNAAGLEWLAAVDLDDQGRMLVDSDLRQLGFLQKEIDLLDGELARRGHARESVKLLMTLPGVDVATAEAMIAAWGDAKRFPDGDHAASYLGLVPSTKQSANQCYHGPITKRGNSHARWMLIEAAQHLDKHPGPLGHFFRRLAKKKNHNVAVVAGARKLAMIGWQMLVKNEPYRYAIPRSTEAKLSRLRVKATGVRRKCGPPKGTKCTAKLPGGSRSIRALHEVCRAEGLPSLQPLSPGERRTLKAAGCDAFVAQIATARLVPRPPKRPKLQEVAAHE

SEQ ID NO: 504552 - protein, 389 aa, unidentified
MKIYVGIDIAKLNHFAAAISSDGEIILEPFKFSNDADGFQLLVSKLDSFDKNSIIIGLESTAHYGDNLVRYLVAEFYQVCVLNPIKTCQMRKNNICKTKTYKVDTYVIAKTLMMQDDLRFITFFDLDMMDLKALGRFRQKTIKQRTRLKIQLTTYVDQVFPEIQYFFKSGLHQNAVYALLKEAPSPKEIASMHMTHLANLLKVNSHGHFTKEQAKELRVLAQKSVGANDSAISIQITQTIQQIELLDSQLEKIEAEMTDIMKFNDSVIMTIPGIGYINGGMILGEIGDIHRFSNPNKLLAFAGLDPSVYQSGNFQAKTTRMSKRGFRVLRYALVNAAWNVVRNNATFKAYYDAKRAEGQSHYNALGHCAGKLVRVIWKMLTDKVEFNLE

SEQ ID NO: 504553 - protein, 352 aa, unidentified
MTAKTWAGLDVGVETTSLCVINDAGEILQEARCPTDLACIHRELRGLRRRRHSEVGLEAGAATLARGLRTLGYSVTLYETRQLSKFLRVRRNKTDAGDAIGIAEAGRIGASLVSKVHLKSLECQLLQSRLTIRRHLVRQRVATVNLLCRQIESYGGRIAGPTRRLVLRSRVEAELNRLFGKQEGPVQNELRKLVAHCEDLIARQYAIDRELKRLATETEVCRRFMEIPGVGPLAALTFYAVVGDPDRFTPSTDVGSYLGLTPKLHQSGLSSRSGRISRMGNVAARTLLVQAAITFMRLGRTAGTELRSWTVSVEERRGRGRSRIALARKLAVIMVSMWKSGECFVARPAVES

SEQ ID NO: 504554 - protein, 438 aa, unidentified
MSNKVIFNLDELFISVGIDVGADFSWMSIALPNQQFVGKPYKILHSSIDSLTTAVSKIKEAEELYSLESRIFLESTGIYHYPLFCYLRDKGFNCSVINPIITKNSTNINIRKVHNDRFDSKKAALVGLKPDLKVSLMPSDLALNCRNLCREYYDLMDNRSAYVNKLQGELRMAFPQYLGIFSKVTINTSLTLLETYTSPSAFLEADKQEIIDIIKSTARFGLTYAQNKYNAIIQAATDANQFGYIIDSNIKRIRLYISFIRKYDEEINNILESLHELVDANEDADFVKQIHLIETFKGAGFLSAVSIMGEIGDFSAFSKPKQLFAYFGLDPAVKQSGKFEGTKVQMSKRGSAIARRVIHTLTLQSISISRNGEAKNPVLREYYLKKCDSKPKLVAMGAVSHKVCNMIFAILRDNKSFEIITPQEHIKQYNASKCDMAA

SEQ ID NO: 504555 - protein, 351 aa, unidentified
MPRTTTLHAVTVIGIDMGKNTLHLIGLDARGAIVLREKVARGRIALRLANLPPCLIGIEAGMATHYVARELAALGHDVKQVPATYAKPFRQGHKNDFRDAHAVAEAVQRPTTRFVPAKTNEQLDLQALHRVRSRLVSERTAVINQIRGFLLERGIVVRQGLRFLRQQLPDILAKRADVLSPRMVRIVADLANDWRRLDERIETVTDEIEALAKSDDSCRRVMTVPGIGPIISSAMVAAIGNGVAFARGRDFSAWLGLVPKQMSTGDRTILGRISKRGNGYLRMLFMQAARVILLRPANWPKHGFGAWLARAAQRLHPNVLAAALANKLARIAWTVLAQERSYEARVTKAAA

SEQ ID NO: 504556 - protein, 270 aa, unidentified
MTEAYDGRQVVGMDLHRRRSVLVRMSMDGRKLETVRIENSPAALRRVLARCGQRPLVVLEATYGWYWAADVLAAAGAEVHLAHPLGVKAFSYRRVKNDERDAADLADLARMGRLPEAWIAPPGVRALREVVRYRHKLVRQRTSCKDQVHAVLAKLGIPVTHSDIFGRGGGLWLGQLVLPEPYAAKVASLRALIGVLDGEIARLGEQAAGVLAAHAGYRVIQRLPGVGPVLAAVIIAEIGDVTRFRTAAQLSSWAGLTPKHRESDASPAGA

SEQ ID NO: 504557 - protein, 324 aa, unidentified
MTHSAEKRNIEFVGIDIAKGKFDICLGSDNKKSSLSNSPHGFNKLKKLLPPPADSLIVLEPTGGYEKNVIVFLQNNSYRVILANALKVRRYAEAMGFLAKNDPIDSYVIKSFGEDLYPKGKLAVLIPKSDNFRKLESWLNRSRQIVKLLTSEKNRLDKTSDEYIKKSIKRIIRCLDKELALIEKKLEKISDQCQLSEQAEAFKQVKGIGKVCSNALVTYLPELGKFSHSKIAALVGVAPYCNDSGKHKGKNKIKGGRKTLRGLLYMGTLSAIKHNPVIKSFYDRLTGKGKHHNVVMVACIKKLLRIVNAMAQNGTPWQENYGIK

SEQ ID NO: 504558 - protein, 331 aa, unidentified
MKNKEIVGIDVSKKVLDIYILSEKYHYRVSNDPTGFFHMVEICSEKLGKRFENVFFCFEDTGRYSKLLSVFLQDARYPFAVLNALDVKRSMGLTRGKSDRKDARMIARYAWRKRDELTVSNLSGPIIDQLKQLLSLREKLIKHRTAFKNASLDLHDCYTDGEFNFIRERHNSMLLHLNNEIDLVEKEFYRIIKLNNEFADNFKLLLTVRGIGKVLAAYLIVLTENFTKFIAPRKFACYAGIAPFEYTSGTSVKGKTKVHSCANKQIKSLLNMAAMSSIQLNGEYKNYYHRRLAEGKNKMSTLNIIRNKLVFRAFAVVKRRTPYVDLYKFAA

SEQ ID NO: 504559 - protein, 367 aa, unidentified
MIVNEVAKNVEKIISIDTAKNSFQVLVVNQKTGKKKNTKVQRSKFVEYILKQGPCLIFMESCSASQHWARLFESFGFTVKLIAAQHVKAFLRNRRVKNDERDAEAIYTCGIQPDTKFVRIKTVEEQTVALLHTLRKAAVSQRVELSNRIRGILAEFGIVVARGRGSFNSEIEALFNECEKIHDVYLRSAISSLFEDYHRLEQREKELSEKIESLNKDNELVKIALTCPGVGPLTASAIVAEVGDASQFRNGREMAAWNGVVPSQHSTGGRSTLGGITKTGNRYLRTLLAQCACAVIQKASRHLEQGKDTHLDRFALRLKLNGKPVKKIMIAIANKIIRILWAMLTQRKTFENKAEETSDISAELQLA

SEQ ID NO: 504560 - protein, 369 aa, unidentified
MKQPITYVGLDVHKDTIAVAVAEAGKRGEAREHGKIANTAAALRVLAVKLARGGGDLRFCYEAGPCGYGIQRQLSAAGHECVVVAPSLIPRKPGDRIKTDRRDAINLAKLHRAGELTSVWVPDQAHEAIRDLVRARLAAVRTLRQARQQLSGFLLRHGHHYNRPAWTLMHRRWLAGLRFEQPVHHIVLEDCIVAVEAATARRDRLEGHIEVALPEWSLAPVVHALQALRGMALVAAATVVAELGDIARFANPRQLMAYLGLVPSEHSSGDTRRQGRITKAGNGAARRILIEAAWSYRFPARISREQLLRQEGLAEPIRDAAWKAQERLCRRYRKLARAGKPPTVVTAAIARELSGFVWAIAQLARPMNG

SEQ ID NO: 504561 - protein, 416 aa, unidentified
MSSRTQSRPRIKADILVVGIDVAKRTHVAAIRKPDGTKEKPFPFGNDRSGFERLRARSERTRERLGLNGVVFALEATGHYGHALRQYLGLQGYAVLGINPAHTKKAKEFEDNSPEKSDSKDARLISDLAAEGRGRLVRPVKGVFAELRRLGKLRERYVVERVRLSNRYSCLVDLVFPELVQEVRKLTIRSIRRLLAEYPTAREIAGLELEELEDRLSRWSRRRLRPDKIARIHRLARESIGIVEGLETARMEMRQLLESLELVEQRLQEVEAAQHAALEKVPYAELLLTVPQLGSVTVATILGETGDLRNYKNAEMVIKMAGYNLYTISSGMFRGKTRITKRGRPMLRRYLFLAACRLSKKGAPLREFHERLTARKAKPQVLVGSCRKLLRLLVAMVRDGKPYEPGRLAVPFGEAA

SEQ ID NO: 504562 - protein, 363 aa, unidentified
MTVTSLPQPTLPAPSEEPLAEDVILGVDTHKDVHVAAVVTVLGVLLAHQEFPVTAVGYRQLLSWARSFGALRRAGVECTGSFGAALARFLSRENICVVEVNQPDRALRRKHGKTDAVDAEAAARAVLSGRADVTPKTGEGPAADMRVLRLAKESAVKARTQAKNQLKAVLLGVDPVLREALSDLSNTALIATCADLPDAGDAAVFTLRLLARRIQQLTVEVKELARRVTKAVRRCRPQLLDIIGVGPDSAAALLIAAGDNPERLASEASFAALCGVSPVEQSSGKTQRRRLNRGGNRQANAALYRIVITRLRRDTRTRLYLERRTKQGMSKREIIRCLKRYVAREIYGQIQRASALGAPSAAA

SEQ ID NO: 504563 - protein, 434 aa, unidentified
MQGIGRRRDRLVLRHSKKGETRMTEENLAWFAGVDWGSERHQVCVVDAQGNIVGERDFAHSGEGLAALGDWLLSIAGAANTMAVAIEVPHGPVVDTLVDRGFVVHAINPKQLDRLRDRFSVAGAKDDRRDAFVLGDGVRTDRRLFRRLHVADPKLIELRAWSRLAEELKQERRRLSNRVGQQLWRYYPQMQGLTDDLAAPWFLELWGIAPTPAKVRQLRKPTVERLLREHRIRRVGADTVLRMLREPAIKVADGVAAAAGVHLRSLVARLRVVNRELQETEKQIEKLCMSVGESDAAAGECLRRQDVLILRSMPGIGSINLAALLCEASGPLVRRDYQALRTLCGAAPVTKRSGKQHIVVMRYAAHVRLRNTVYHWARVASQRDPKCRARYAALRHRGHSHGRALRSVADRLLALACVLLQRQTLFDPNFARAG

SEQ ID NO: 504564 - protein, 314 aa, unidentified
MTKTMKDSIGIDISKDHLDVHRCATGAAARFTNDPDGFRALKRWIGDRQPHLLVYEATGPYHARFEQALAGELPLVKVNPLQARRFAQASGTRAKTDQVDARLLAQMGAALDLVPDRPAIEGQSELKELQVARTALVKDRTRLKNRLKTQTLALTRRQTKARLAQVERQLDALQGEIANRLKASANRARAYAILQSIRGIGEVAAAAILIECPEIGTLGKKQAAALAGLAPMTRQSGKWKGKAFIQGGRKYLRDALYMPALVAIRFNPDLKHKYQAMIKVGKPPKVALTAIMRKLIEMANALIKTDRMWQTKLA

SEQ ID NO: 504565 - protein, 266 aa, unidentified
MIIVGCDFHPAWQQVAWVDTETGETGERKLEHSSGEARVFYASLSVPALIGVEATGNCQWFLDLMMELGHQVWIGDAAQIRASYVRKQKTDKRDAAHVLKLLLEDRFPRIWVPNREERDLRQLLLHRSKLVEMRTRVKNELQHLALNQGVQRKRKLWSQAGQQLLRSLPLQPWASRRREDLFSLLALLDRHIGVLDEAVEKASQLDKMAQLLKTQPGVGPITSLAFVLTIGDVSRFQNGKHIASYLGLIPREHSSAGKQRLGGITK

SEQ ID NO: 504566 - protein, 413 aa, unidentified
MEIVYKRCASIDVHKDTAVTTVRLPEANNRGGRRGETRTFSTKTPGLLELYDWLVACEVTHVAMESTGIYWRPIHNILEGSFEILLVNAPPVKALPGRKTDVKDSEWLAELLEHGLLRGSFIPPQPIRDLRDLTRYRRRLVEDRSHHINRLMKTLETANIKLSSVATDILGKSGRRMIEALISGQQDGEVLADMALGVLKKKRADLKAALTGRIRPHHAFLLREQLQIIDDLQHRIAAFDKQIEEHMAPFREAVARLVTIPGVAQRTAENIIAEIGTNMSQFPTPEEFCSWAAICPGNKETGGKRKSGRTRRGNSWLKTTLVEAAWAASRCKRSYLHTLYWRLKLRRGANKAIVAVAHSILQSIWYMLSMNVDYKDLGPEHFDRLNHKRVRDHHVRRLQELGYEVTLSEAEAA

SEQ ID NO: 504567 - protein, 342 aa, unidentified
MEHYAGIDVSLEYSSVCVVDATGKIVREGKAASEPEALIAWFGSLGFGLVRIGLEAGPLSQWLYAAMREAGLAVELLETRHVRDAFKAMPVKSDRNDARGIAQLMRLGWFRPVHCKSIGAQETRAVLTARKLVQSKLQDVENSLRGILRGFGLKAGKTTSRSFAGRIRELVANHPSLETIAEVLLAVHAVLLREFKAFEKQVRSMARSDAKARLLMSTPAVGPIVALTYASAIDDPGRFKSSKQAGPHFGLTPKKYQSGQTDVTGRISKIGDASVRTVLYEAAHIMLTKPIKGCSQLKSWAMRIARRAGMKKAKVALARKLAVILHRMLVNETSFNAAAAAA

SEQ ID NO: 504568 - protein, 260 aa, unidentified
MTPQTTAQPKLFIGMDVHKKNWTVHFKTDLFDYKTVTMPADSLQLFNYVSTHFADHEISCCYEAGCCGFWMARTIQQYGWKVLVVNPTDIPRKSKKEWTKTDKIDSRNLSEQLKSNTIHGIGIPTEEQEQLRSLFRRRIHLTKQLRTIKSHIKSQLLYYGIYLPEQYDNPNWSHEMKVWISNIKWDYSTAAAILAELGDLRRFKRLDELASLVGLVPGIYQSSNTNINLGLTRRSNRQVRSLLVEASWIAVRTDMAVKRP

SEQ ID NO: 504569 - protein, 340 aa, unidentified
MNTMTLLGIDIGKHSFHLHGQDAKGHQVLRKKTNRGQLLSTLAQLPACTVVMESCGGAHWLARQIGALGHEVKLIAPQYVKPFVKGNKNDFIDAEAICEAASRPAMRFCSIKTAEQQTLSALHRVRDSLIGHRTVATNQIHGFLLEFGISLPIGATALHRVPALLDDAQHPVPLRLKGVVMRLHHQIQLLNDEIKDIESDLKQQLKEDDAGSRLQSIPGIGPITASAVLADVGDASNYRSGRDFAASLGLVPRQYSTGGKTVLLGISKRGDKHIRQLLVQGARSIMQHIDKREDAIGPWVRELLTRRHSNVVACALANKLARIVWAVLAKGGQYDPHPNV

SEQ ID NO: 504570 - protein, 363 aa, unidentified
MKEVKRRFVGIDLGKREYTMAIIGKTGRMRIHKGKTSIQGRQALYKKLEREDKVALEAGNLAFIMAREIQEQAGSEIRVLNSAKLPIIWDAPTKTDKEDAMKLAHLIEERRDEKLPIVPLPSEKEMERRKLLANYSREVKGRTKMINLLHAMFVHQGHTTVVRKDLVTAEKRLAAIETLHGQEREEAEWLLKHLELYEQRLLELKEKIKQEAKADEDMQCLQTIPGVGPIVAYAYVAHVGDGSRFSKGSQVSNYLGFVPRLDYSGTIQRHGHISKRGNGYLRGLLVQAAWSMVRARHSGSLKERFVYLTTFQGKSKKKTIVSIGRRMAELMYSVLRNKTKYESRPWTGSGNSPEDLAGQAMCA

SEQ ID NO: 504571 - protein, 325 aa, unidentified
MTTYVGLDVHLRTCHATVMDEQGRILRQEKFPNERMELERIFKGIDDAKVAMEACYCWQPVYELIENMDYEVNLAHPLKTRLIAEAKIKTDAVDSEALAHLLRANLLPTSYVPPKELRELRELVRLRTYLVHERTRFKNKIRAELAKRGIRFTKSPFAKRRIPLLEELGIPVVSKCLSMIGALDRQILNVSVELRQKAHESEDAKLLMTIPGVGYFSSLAISAEIGDISRFGDAEKLCSYAGLVPSVHQSGTTRRYGRITKQGSGLLRWVLLECVWVHLRCDTWLTRFFHRIVRRKGKKVAAVAAARKLLVAIYWMLRNQEEFRA

SEQ ID NO: 504572 - protein, 407 aa, unidentified
MDLFVGDDWAEEHHDLELMDSSGRILARARVPEGVAGMAQLHAMVSKHVGEEEDSFRIKVGIETDRGPWVQALVAAGYEVFAVNPLQAARYRERHTVSGAKSDRADAHVLADMVRTDSHQLRAVAGDSPMVEAIKVVARAHKTLIWERTRHSLRMRHALREYFPAALEAFDDLAAPDALALLTKAADPEAAARLSLSRISAALKRARRRNVAEKAAAIQAALRTPQLRQPEPVSAAYAATVRSSAAVLTVLNAQIDTLHAEVDAHFGQHPVADIVLSQPGLGTILGARVLAEFGDAPNRYTSAKARKNYAGTSPITRASGKRKTVMARFVHNDRLLDALHAQAFTALNASPGARAYYDQLRARDVGHRAALRQLANRLTGILHGCLKTETLYNEATAWATPQHQSAA

SEQ ID NO: 504573 - protein, 342 aa, unidentified
MEYYAGIDVSLECSSVCVVDASGKIIREGKVASEPDALISWLKSRGYELIRIGLEAGPLSQWLFAAMREAGLAVELLETRHVRKAFEAMPVKSDRNDARGIAQLMRLGWFRPVHCKSMGAQEVRAVLTARKLIQTKLQDVENSLRGILRGFGLKVGKTTDRSFSGRIQELVKGQPSLEAIGEALLSVRAGLLREFNAFEKRVRAMARLNARTRLLMSTPAVGPIVALTYASAIDDPARFKSSKQTGPHFGLTPKRYQSGETDYSGRISKVGDASVREALYQAAHVMLTKPVKGCPQLKSWAMRIARRAGMSKAKVALARKLAVILHRMLANGTPFNAAAAAA

SEQ ID NO: 504574 - protein, 326 aa, unidentified
MDIHSKIIVCTTLDEDGKVVRKDSFENSFDRLNEYISQFHEGDIFVMESTGFYEPLYDFIESHGFHVKLANPLKIRLIAESRMKNDDVDSEVLAKLLKNDWIPESYVPSKDIREMRRIVRTRIQLKRDLTRMKNRIHFELLRMHVDYDVNLFTWKGKVFLRNLNNNRILSYLAVMESLEAEIRKVDSLLERYTSIPGVINLQTIPGIGLFSAMVIYSEIGDIHRFSDSGKLISYAGMIPSVRQSSDIIHHGRITYQGSRYLRWIIVEGLHSHMINDPGSSITSFYKHLAKKKGKSKAIIAASNKLLKAIYWILKENRPYFSRNQAQ

SEQ ID NO: 504575 - protein, 350 aa, unidentified
MNVNHYIGFDVHKKSISYCVKTADGTITEEGKLGATHLAVREWAEKRREAWHGAMEATLFSGWIYDALKPYAAELQMGHPAMMKAIGASKKKNDRLDARKTADLVRCNLLPACYVATPEIRELRRMLRYRNVVVAQAVRMKNKMSGLLMEVGAEYNKQRLHGKEYFTELLDTIEAVPESVKDLLRLSRGALEMFQTTQQQLLAKLEKDPLLAKRVSVLKSIRGVGEVTALTWALEVGDPHRLCSVGNAVSYCGLTSALDASADKQRRGPISKQRNPHLQTVLVEAAKLAPRWNPQLAAVHAREVQRGHRNRATLEVARKLVAYLLAVDKSGKPFQIRTPATAEQEVETAA

SEQ ID NO: 504576 - protein, 396 aa, unidentified
MATIGIDIGGRSHAVARCREGLARADREILRVSQSRAGFAALDTWLLRQAEPVSLVTMESSGHYWMPLASHLRRQDVPVAVVNPLAAKYFARSRLARTKSDPADARSLAEMAMRDSPAARDPLAGVELRQAARFAMTLVTEQAKVCQRLIRLVELGFPELGELFDDPTCRTAREILRIAPTARTATRRRTTTLANANAGPGHRRLGQAKAERLQAAAADSIAVPELDAEVSFEVGLLLDQYDLLERQIETADARVAGLLDGETARRLRTIPAVGPAIAATFLAEIGDIGRFTDFDQLLAFAGVHPAERSSGRKGASPETSWHMSKAGNSHLRAAAYRMAVVGIQHNPVIRAHYERKRAAGKSKMNALGHCMRKALSLVWGVWRNGQDFDPNWGLEA

SEQ ID NO: 504577 - protein, 354 aa, unidentified
MNSVRYLGMDVHRDTISVAVLDENGRLMMESVLATQAGAILDFIHGVRGTLQVTFEEGTHSAWLYDVLVRRVAKLVVCNPRKNALLKSGSKSDAIDARKLAELLRAGMLSGVYHGERSALEVQQMARTYSQQTEDTTRVMARLKAVFRSQAVSCVGKKLYGKRHRDEYLAQLGGGLRRRAEHLYRELDALQPLRHEVRRELIAECRKHAAARWLQSVPFLGPIRAALLIGRVQTPHRFRTKRQFWSYCGLGLETRDSGQYRMVNGRVERRRKPALIRGLNWNHNHEMKNLFKSTATAASVREGVWREFYLGLLAKGMRPEMARLTLARKIAAITLKIWKKGETFNAEHLKLQAA

SEQ ID NO: 504578 - protein, 401 aa, unidentified
MPTMRDNAMRVNRFRELKATLRTNRKRLLVGLDIARSEHVAHLRHAHTRIVLPKLVIPNSTGGFAELWARIEQAQRATGCREVVCGLEPTGTYHEAMARFLDAQGADVLLVSSAVAYWNRRTQDGTWDKRDPKDAANCADLLEQGKVLFYSQPDGPAAELRSLVKCLRRARTELAACKARWRTTLRPRLAPMGEPLPSRLRAELPAVLQAWERAAPGRPAVAKGRLPLGLATACTDLGAQVTAVQARIRGIEEALAPLAERLPAYPLLRTIPGVGPTVAAILLAEIGDIAWFTKFSQLRKLAGLDIVRVQSGQYAGQARISKCGRGLLRWALYHAAMGLARTTAGRARLAALKAKRQGDRFAGFKAIVELAAKVLRIVWGVWRSGTPYDPRRTGGLKRQAR

SEQ ID NO: 504579 - protein, 293 aa, unidentified
MKDDSVIFIGMDTSKLKISVAIADGSRNGEVRFFGDISSEPAAVASMVNKLSKRGAKLHFCYEAGPTGYGLYRQIVELGHDCVVVAPSLVPKRAGDRVKTNRRDALSLARLHRAGELTPVWVPDEGHEAIRDLVRAREAASDALKQARQQLQSFLLRHGRIYTGREPWTRAHTRWLTCQAFDHPAHQILLAEYCQAIEDACVRLDRLTKLVDETAASWSMAPVVAAYQAMRGVAFMTAVTFVVEIGDIRRFDNPRQLMAYLGLVPSESSTGERVQFERLLGKPRCYFARAIEN

SEQ ID NO: 504580 - protein, 330 aa, unidentified
MKFKWFFGIDISKLTLDVTLYNESGVKKSKHIKIDNASKGFTELLKWVKKLKVDVKQSVFCMEHTGTYGLDLQVFFEEKNIAYSAVSPYEIKHSLGITRGKNDKIDSYKISYYCQLHAKELKLSKLSSKKIRSLKLLLNERNRVVKMQSVEKQTLTEFKDISSDLFSERSKQRLKTFSEQIEQIENEIKSLIESDTEIKKNYNLVKSVIGIGLVNAVTFIVNTNNFSGFTDGRKYACYSGVAPFEETSGTSVKGKTKVSHIANKKIKTSLTQASKSAVQYDPELKIYYNRKREEGKEHGTVMNAVKFKIIQRVFAVVKRGTPYVKLRVAG

SEQ ID NO: 504581 - protein, 381 aa, unidentified
MTTPATCHVPESTTAGTLFVAFELSEKTWKLGFTTGHGQKPRERTVTARHQERVLEEIAHAKRRLGLPDTAPVVSCYEAGREGFWLHRFLQGHGITNHVVDSSSIEVNRRRRRAKSDGLDVRKLLSMLLRYAQGERQVWQVVKVPSVEAEDQRHLHRDLETLKQERASTATRIQGLLSSQGLRVTSLTKLPEQLDALRLWDGSPIPPGLRRRVLRVYAQYTFLSEQIAAVEAERRAQLQTATDARIEKVRQLMQLKGIGINGAWLLVMEFFGWRAFKNRREVGGLAGFTPTPYQSGESAREQGITKSGNRHVRWMTTELAWSWLRFQPASALSVWFRERFGSGGKRLRRIGIVAVARKLLIALWRFLETGVLPAGAVLKEV

SEQ ID NO: 504582 - protein, 345 aa, unidentified
MPIVGGLDIHRKQITFDYLDTATGEVRRGQIAPADRAHLRAWLARFAGRDDVACALEGCTGWRYVAEELAAAGVTAHVAEPADTAFARGRKRHAKTDKTDSRHLRVLLEQGRLPECWIPPAQILECRALLEAYHDLRREHTAWIERIHAVFFHQGAPRLGEGALRTEHGLAALRQAAAIHLSPAGQLQVATALDMLAATEARMDTLRQQLLHAARHLAGARALQARLYGAGPLAGLAMTCWLGGAGRFSSARKAVRFAGLDVTVYSSDGRRSPGHLSRQGPEILRWVAYEAGKTHGRASAPRHDYYAAVKDRTDGKIAALSQARRLIRQACHILAELGDDALTAA

SEQ ID NO: 504583 - protein, 488 aa, unidentified
MTEQRLKKHVKGRKGEKFRQKIKGLQPREIVGVAIDVSKSFHRVMIFNFEGEVSREPFEVDVFEKGYREFIGEADRVVKEFEPKKTFWVMEPTGAYYENVSRHLKGDGEEVMFANPAQVASNRDQMMLHGLKSDDIDLGAMADLLIRGECYSYNLEEGVYLELKEKTWWREKKLKIQTRLKNQIRARLDKIFPGLTSEYGGNKPLFSDLWEQSSARGLMKVGLTPRQILDLPTMSLKKRFKDAGYPITTDCAKKIKGYMGKMLLPKDKVLNPEIELLRRDVKLLETLEAEIAEVEDEMVKGVKETPWSHLLGKIKGIGDIMVASFAGAVGDITGFKCGSQIFRKSGLDSKRKQSGEYEAKGLPIRRMGSKFLRCILYKMADSVIKHNPYFGLYYEYLVEKRNKLSKKAQIAVSNKLVRVMFAMVRARAEFNPPTAKIEYLEVLFSRTKHERKERREERKRRREKAHLDSSISLASRHRVPGKAVSLHS

SEQ ID NO: 504584 - protein, 360 aa, unidentified
MTVATQTPPATRSGHVAIGVDTHKHLHVAAVLDPVGGILETLTIPTEAAGYRRLLEWAASFGRIIAFGIEGTGSYGAALTSCVRRAGHKVVEVNRPDRRLRRMNGKSDTLDAENAARAVLAGYATAIPKSADGSVEMIRQLKIAHDTAVKARAATMVTLKAVLVHAPDELRHAVARKTPVMLARHLAALRPRGLATPEDASRHTLRSLARRWQYLQEEAHELEGMIEELVLATAPQLVEPFGIGVDTAAEILIVAGDNPERIHSEAALAKLAGISPIPASSGMSTGRHRINYGGHRQLNAAIYRTVIVRMRFHEPTIAYVARRAAEGKSKRDIIRCLKRYVIREVYHLIRPRPATGQIRG

SEQ ID NO: 504585 - protein, 395 aa, unidentified
MKSNTQNAKIEAITEKTLVLGIDVGSETHYARAFDYRGIEYSKKPFKFSNTEAGFVTFKEWILDIKERHEKDKVVLGMEPTGHYWFNLGKFLQDNEMKPVLVNPHHVKKSKELDDNNPTKNDRKDPKVIAGLVREGRYMIPYLPDGVYADLRTASNIRFQLQAELTRIQNRISRWFNIYFPEYKTVYGKPDAKSGILILKAAPLPEDILTLGIDGVNQIWRDAKLRAVGKARAKTLIEAAEHSVGSKEGAVAARMEIRMLLEDYESRSIRLQEVMTLIEGLVKQIPMAEKLLEIKGVGIRTVSGFLAEVGDISRFNNPKELQKLAGLALVENSSGKHKGETTISRRGRKRLRYLLFEVAMSLVAKNPEFRELHNYYTTRRLNPSTRSCFSPVCRQ

SEQ ID NO: 504586 - protein, 400 aa, unidentified
MRVVFGIDVSKASSEVAILINGEKVHGYTIPNDAIGFNRLLGDLKTVHQPEIVFEATGVYSRRLQAFFEDNSYAYTRLNPLESKKQLDSLRVRKTDKIDAEKLAMSQFILNRKPSYVQEALYQELRDLSRFYQNLTEDIVCAKNRLHKVLQVTFPELENILSAPTGEQYWNLVMTFPCNSFVLELGDAALRAIIRQSTSKRISEKRVTYLVDKLTKLANQSYCAVKKTSPMMEEVKYYAGELLRLSEYRQSVLEEMVTLAQPLPEYEILLSIPGIAETTATSIIGELGDIRRFHSANQINAFIGIDLRHYESGDFLAKEHITKRGNPYARKILFKCIHNIASASHTNPCHIADFYDKRKRQSQVTSTKPHTIASIHRLIRTMYYLITHNKLYDYTSTQNR

SEQ ID NO: 504587 - protein, 328 aa, unidentified
MKLSYVGVDLAKNVYQLHGVDRSGKAVWKRRLRRGQWMRVLLDTVEPGCVIGMEACTGAHHWARELQSHGYTVKLIPPQFVKPYVKSNKNDANDAEAICEAMGRPHMRFVTVKSVEQQDIQATHRVRTELKDHRNAKANQIRGLVAEYGLVAPQTLLALRRAIPDWLEDAQNGLTDYFRSLLHGLWDDLLTLEDRIKELDREITRLANSNEVTRRLQQLRGVGPMVATALVATVGTGEQYRKGRQMAAALGLTPRQSSSGDKYRLLGISKRGDAYLRTLLIHGARAVVSQAKHRDDPLSRWATDIARRKHTNVCQLQRPDIRAQSCHV

SEQ ID NO: 504588 - protein, 366 aa, unidentified
MRKISTVVLDTIENFKGHKLTIGLDLGDRFSHYCILNESGEVIGEHNLPTTPKGIDEVFRRIARSRVALETGTHSPWVSRQLARLGHEVIVAHARNVRLIGDSSRKDDRVDARTLARLARIDPGLLGPVQHRSAQAQIHLTVLRARAGLVSARTALVNTARGLTKSYGERLQKCGTQNMNREMAQGLSQELRDALDPLFGEIESLNERIAEYDGRIEQIATEVYPQVARLKQVKGVGTLIALTYVLTLDDPHRFRRSRDAGCFVGLRPGRRNSGMSQPQLHISKEGDVYLRTMLVQGAHYILGPFGEDCDLRRWGLRLAERGGKNAKKRAVVAVARKLAVLLHKLWVSGEVYEPLRNSHKVVAAVA

SEQ ID NO: 504589 - protein, 391 aa, unidentified
MIFVGIDVAKDTHYAAVSDDSGAVLVKPFAFQNNAEGFCLLLKKLSEFDRSKLLIGLESTGIYSENLICFLYESGFRLAVINPIQTATLRKTAIRKTKTDKVDTMLIIKSLMVNSYRLYSQRDADSLKLRTLCRFRQNLKKSKARMKIQLAEYVNLVFPEFGKFFKSGIHIAASYALLKKYSSPKEIAALRTSTLCTLLSNASHGRFGKDTAEALKSLALSSVGVKNPYISIQIAQTIAQIELLEQQIKDLNSAIEEAMESINSVLMTVPGIGAVNAACILGEIGDIKRFSKPCKLLAYAGLDPTVRQSGQFTAKSTRMSKRGSALLRFALINSAWQLTLNDTTFKAYYDLKRSQGLNHYGALGHVAHKLTRVIFKLLTSDTPFNPAKLVA

SEQ ID NO: 504590 - protein, 349 aa, unidentified
MNATIVAVDLAKNVFELAVADADWHIAQRQRLTRAKFFGFFVQLAPCQVVMEACGSAHYWARRIAGLGHTVRLLPAHYVKAYVRRNKTDQADAAALIEAARCAEIREVPVKTVEAQQIQSLHRLRSQWMSTRQRYVNTLRGILREFGFAIPLGVNVAKEQIGVALADFDSEVPQALRATLTDMLQEVRSLEEKILGVEHQLNALTRADVRVQQLRQIPGIGALTSTALRAIVGDIQRFPSGRHFASWLGLTPNERSSAEKRRLGKISKQGDVYLRTLLVHGARSALLAAHRAERSGHTLDHLRRWALDCERQRGHNKATVALANRLARIVWATWTHERPFDGNWSTQAA

SEQ ID NO: 504591 - protein, 370 aa, unidentified
MKKLQRHRDRFKGVTVGLDLHKKVLVYSVMDEQGDELANQRVLSKAEELSRLIDGLTAGGQAVQVALEASGCFMWAYDLLVQKLGPDHVHVAAPSRVKVIAESGEKTDATDAWWLAYLLWDGRLPEAFVAEGDLRELRIAARERRSVVDERSDLVRRMRSHLAQLGIVLGKSDFKSVVGRERIRQVVLEVEQTQGLRGQAVARLWSRIDQLTQEVLHWEGCVSELSKRFDQIKTLDEELAGVGENIAAVVWAELGDPRRYRSAKAYAKATGLTPGYRESAGRRNKKSITREGSAHVRWALTRAVIACRSCKKGDGLAVKRWVANMKKRKSPKAAVVAAARKLAEAVWRLFTLGDAFDLTLAFGGPARAEP

SEQ ID NO: 504592 - protein, 320 aa, unidentified
MNKYKETFGIDISKDVFDCYGSKVGHLQFKNNAAGFKKFLKVLPKDSLVVMEATGYYHCLLAQFLYKKGVTVSVVNPLSVKRFIQMRLAKVKTDRSDAKAICEYGQINEVPLYNALTDVQSECLQLFRLLDSYIKKRTATKNKLHGEEVLGMPSKHVYSSLKRNLKHLEKEIAGIDQKLLSLVKADQQSQLTLLTSIPGIGLKTALFLIVITDGFQKFENASQLCSYAGITPTIRESGSSVRGRSRISKVGNRKLRNLLFLCAFNACKCNKACRALYERIVNKGKSKKLALIAVANKLLKQAFAIAKSGRPYDETYVSVI

SEQ ID NO: 504593 - protein, 326 aa, unidentified
MQYILGIDVSKDKLDLVLITEPGKFHKVISNNSEGYKALDKWLVSRQVEQVHACLEATGQYGEEVAEHLYKQGHAVSVVNPARIKHYGESKLHRNKTDKADADLIAEFCLKEKPTLWQPLSPEIKHLRALVRRLEDLKTNCQQEKNRLSSGEKDEWVVKDLSTHVAYLETCIAATEKEIQNFIKRTPNLKKQQDLLNSIPGIADKTSARLLAEIGDISTFESASQLAAYAGLNPKGFSSGSSVHKKTRISKQGRRELRSCLYMPGIVASNHNPVVRSLKVRLHDRRLANKAIIVAAMRKLLHIVYGVLKTQMPFDAEYHKQFNFSA

SEQ ID NO: 504594 - protein, 426 aa, unidentified
MENRDFFVGIDWGDSNHVAVIFEPTTQTSRVVKAPHTAEGLKRLLAELPAADAVQGVALEGQPELLVCLLTQAGFTVYPINPKLSKCWREAHSVAGAKDDVRDAMQLARQVASQHDTELRPLHVRSQAMRTLTVLCEQEEALIQQRTALVQQLQAVLKQYYPAALDFFDDWTAPAAWQFLLAYSTPDALAKASKTKLCRFLAARHIGMSPVWQRRVDNRSHAADWPCTGTQSAFALTAQCLARQLQTMEANLRTFRKQIESQFKIHPDAELFQSLPGAGPKLAPRLLTILGDERGEYHSADALQKLSGVAPVTERSGKKDHKRMRRACKKFWRNTLRHFAHTSKFTCAWARAFYRQRRAQKETDSTALRKLGYKWLKIIYRMWKEKKPYDEARYLEALKKQKSPLLAYMDAQNTVENTVDICAQKT

SEQ ID NO: 504595 - protein, 342 aa, unidentified
MTLYIGVDIHARQQTLSYLETADGATGQVVLDHEVDDVAGFYRQFQGEVIIGIEACGYTNWFEELVERLGHQLLVGDAAEIRRLARRRQKNDRRDADLLLDLLVHDEFPALYRYCQASREVLRQLRYRHKLVKLRTMVANTLHALALNAGLRLRAKLLTKGGRKQLSALPLSAISQQQRNELLSLADELTRRIQLVEQWLAVQAARDGRVQRLQTHPGVGLLTSLCVVHTLGEVQRFSSTRKVAAYVGFDPMEDSSAERKAYGGISKAGSRLLRYLLIEPGQTAAKDDEQLKQFYRRLLPRRGKARAKVAVGRKLLIRCFIMWRAEIDYAEFLRRGQKEETE

SEQ ID NO: 504596 - protein, 415 aa, unidentified
MKRHSELSHFGGLDWAKHHHHVCILDHPGQVVERFCFEHSGPGWEKFREQIQKYPALGIAIETSQGAVVEQLLGSGVTVYPIHPKAAKEYRQRQAPGGTKDDELDSWSLGDALRMDGRQWRALSPQDPMIEELRLLCRDEEELIGQRTALVNQLQAALQEYYPAALEAFEDWTAPYTWEFIARFPTPQQLAGATVHRRRVFLHTHKLWRPGSAERRLEIFGRADRFCGGEALTRAKSRLALSLVKLLQALQQQLDNYRAAIEKLFAGHPDHDLFGSLPGVGEKLGPRLLGSIGANRGQYPEVQGLQCVAGSAPVSFKSGQMRRVKIRWHCDRFLRHTVHLWADCSRKTCAWAAAYYQAKRAQGKSHACALRCLAQRWLKILWKMWQTHTPYDPEYHARNQQRHGSWVLQLNPKKV

SEQ ID NO: 504597 - protein, 408 aa, unidentified
MSRVIIGMDPHKRSATIEIMTNDETVVGGGRYATDAAGHRAMVAEVRPWPERTWAIEGCQGIGRHIASRLLAAGEEVVDVPPKLSARTRVFATGQGRKTDATDAHSVALAATRMPGLRQVVDDQQLAVLRILADRRRSLGEDHTRMVSQLHQLLLELIPGGAKKDLSAAQAKALLARVRPRDAAGKARRRVAAELVSDLERIYQRKKDANKELSGLLAVTGTTLTDLHGMGPSGAARLLVEVGDVTRFPSRGHFASWNGTAPIDASSGDQVRHRLSRAGNRQINRVLHIMAVVQLRNPTQGRAYYDRKVAAGKTPREAMRALKRRLSDIVYHQMIIDARRAQTGPGGHVGAAAGSSAAGLHPSAGTSEKSLPGPATSDPMPGKPIHSSGHTRHLPSAPDRRRRQAQSA

SEQ ID NO: 504598 - protein, 415 aa, unidentified
MSDQKRWYAGVDWASESHHVRLIDEQGRDIGEKIFKHAGEGLAEMAAWLLATSGAAEPGQIHIAIEVPHGPVVETLIERGFAVWVLNPKQMDRFRDRYSMAGAKDDSRDALVMASALRTDPHCFRRLAATDPIIVELREWSRITEDLGSERTALTNRLRQQLWRYFPAFLDLEADLAAPWLIELWQAVPTPDKAKRIRQASIAAILKRHRIRRLDAAQVLDILRQRPLAVTAGTTEAARAHIVTLVARLQLINRQLAHAHHQLDALTAKLGASQDTEPGQIKQRDADILASLPGIGRIVLATLLAEATDALQRRDYPALRTLTGVAPVTKQSGRSHFVVRRHACHRRLANAVYHWARTATQHDSTSRAKYAALRARGHSHGRALRSVADRLLNVACSMLRSGTTFKPSLATQNAP

SEQ ID NO: 504599 - protein, 432 aa, unidentified
MAKGKNGSEPEFAAFVGIDWADRKHVWCLQAAGSRKREAGELEHKVETVDAWVAELCRRFGHRPIAVAVEQVKGALVFLLNKYECLHIFPVPSTTTAKMREALYPSGAKDDPRDADLLLDILRQHRDKLHRLSPDDETTRRVQNLVEERRKLTAERTAQSNRLTSYLKIYFPQMVEWFEKLDMPLVCDLLERWPTLEELQKVSPEELRTFFCQHHCHRGLRERRILAIGGAIPAKGDRAVIEAKSAVVKVIVQLIRSLLEGIAELDRKIAEAATEHPDFFIFDSLPGAGAVMAPRLLAAFGSQRDRYLYAAELQTYSGIAPVTERSGKRKWVHFRWACPKFLRQSFHEWAGHSIAQSVWARAYYQQQRDRGSDHHAAVRALAFKWIRILFRCWKNRVAYDERKYLAALAKRGSPLGKLLVVDMAACEIPCGS

SEQ ID NO: 504600 - protein, 341 aa, unidentified
MAQVTTLGVDIAKNGVCVHGIDTQGHVIVKKRLARQKVLPFVAQLPPCLIGMEASGGAHYWAREFTKLGHSVKLMSPQFVKPYVQSQKNDPNDAAGICEAVERPRMRGVPVKSVAQQDVQALHRIRERQIKARTALINQIRGLLAEYGIVIPQRASQVRHKLPFVLADADNGLTATARAWLSALAEELKALDQRIATTDTQIEEVFTSDDACQRLAQLAGIGPLTATALVAAVGDATAFKNGRQFAAWLGLVPRQHSTGGKTTLLGMTKRGNCYLRTLLIHGARSVLRVVDRKTDPWSRWLQGVQARRGTNCASVAQANKISRVAWALLARGERYRPRPAA

SEQ ID NO: 504601 - protein, 336 aa, unidentified
MKKKGNEIKWYIGIDVSSATLDVSVCVTGQEKDPVHKRISNNQTGFKEMLDWLRSLSVEAKQSWFCMEYTGVYSLELSTFLSKKKLKHTMYSPLHIKRMMGVVRGKNDKADSRTIARFAYLYRDRLKESKMASTTLLTLKTLINFRHSVVRRRAELKSDLHRIARLSRIADVTYITKGIHREIEFLKAEVKRVELQITKLIDKDELVKTNYVLARSVPGVGMIVAASVVAQTRNFEAFDTARQLACYVGSAPFEYSSGTSIKGKTKTHPIANRQLKALFTNSAFSALKYDKEIRAYYDRKTEEGKAPMSVINAVRCKQIYRIFSVVKRGTPFIKRA

SEQ ID NO: 504602 - protein, 427 aa, unidentified
MILPQAHQTVLSTMESEHALLFVGDDWAEEHHDVELQDEAGRLLSRAKLPEGVTGIARLHAMIGEHLGEGVDEADVVVGIETERGPWVQALIAAGYQVYAVNPLQVARYRDRHGVSGAKSDPKDAHVLADMVRTDRHQLRPVAGDSAQAEAVKVLTRAHKTLIWERTRHLLRLRHALREFFPAALVAFDDLTATDALQLLAAAPDPVSAAALSLEEIDAALKQARRHHRAAKAQAIRDALRTAHLGQPPVVAAAYAATVRAQVAILTVLNTQVAAMEQQVDAYFSQHPDAEVYLSQPGLGVVLGARVLAEFGDDKTRYADAKARRNYAGTSPITRQSGKKKTVMARHVHNDRLIDALNRQAFAALSASPGARAYYDQLRARGAGHHAALRQLGNRLVGILHGCLKTGTPYNETTAWPPAEQDQKAAA

SEQ ID NO: 504603 - protein, 309 aa, unidentified
MKQEVVYCGIDVAKKQLDVALGQERWRVPNTREGIAQLLKRFQGQRLKLHVICEASGGYEKPIVAALQKSTLAVSLVQANRVRAFARAAGVLAKTDQIDAAILVSFGMAMRPPPSAAQPEQIARLRELDAQRRHLSRLLSAEQNRLAQLSCAQLRSLSRSLISKVKKQISTLDVRISTLIAQDQNLCAKAQKLTSIVGVGARTAALLLAQMPELGSLNRAQAAALAGLAPFNRDSGSMRGKRTIFGGRRAVRTGLYMAALAAARYNHVLAPFYQRLCAAGKPPKVALTAVMRKLLLALNSALAPKLNPA

SEQ ID NO: 504604 - protein, 353 aa, unidentified
MTITSIDDVQVTGGVDTHRDTHMVAALDQRGAELGVREFTTTPAGHRAALCWLESFGVIERVGVEGTGTYGAGLTRFLHRHDVTVVEVACGDRQARRSHGKSDPVDAIAAARAAQSGKATTVPKSGTGSVEAIRALRMVRKSATRDRTSAINQMRALIVTAPDDLRETLRGVSIAKLVNGAARLRPSDATTVEGATKFALRELARRVQSLNAEIKRVNDVLGALVTTTAPRLVARVGVGVDTAATLLIAAGDNPERLHSEASFAHLCGSAPIDASSGQIVRKRLNPRGNRQANEALWRIVLVRMAKDPRTRIYVERRTAEGKSKREIMRCLKRYVAREVYQDLNPTKEALDRQ

SEQ ID NO: 504605 - protein, 385 aa, unidentified
MGNQTFIPRDYDVFAGLDVDKRSISVTFTDHHGFLKSLHMPYSVEHLVNHVRKHFPNQKVAFAYEAGPTGYGLYDGLVAQDFRCLIASPSMIPKAPGQRVKTNRLDSQGLSQNLRGGQLKSIHVPTAVYRELRHLTQLRDTFVSEMVGMKQRIKSLLLMEGIEFPPAPAGSQWSFMVKNKLRKLPCSSTVRFKLDQWLDSLEFNEKQVLKTTREIRRFCQNDPELSQCIKYVMSVSGIGWIVASQLLARIGNWRELTNIRQLAGFLGLVPTEHSTGDRTDRGSITHTGDGRLRSKLIQASWSAIRKDDELREFFRSICRRHPRRQGPRVAIVAVARKLSVRISVVLMKQRPYVVREKVHSAPLTQEETSPQGTTRRLREPGDKDS

SEQ ID NO: 504606 - protein, 366 aa, unidentified
MEQFIGCDTHKHYSVFVAMDERGNFSPAWRVSHDGDEVGRLLGALPAGSRIAVEATGSCYWLIDRMRAQGHNPCMAHPLESKRRMGKTKKTDKLDARGLAMLLRNGTLPEVWIPPAEVRDRREPMRLRMALSKMRTVLKNRIHGALTRCNIRIPVSDLFGVQGRKDLEGQMHALPEHTRGGVARALRALDFLECEIEDAGKAVAAMLEEDQAVRLLDTLPCVGPILSAVMALEIGDIRRFQTAGQLASYAGLTPSVHSSGGHTRMGPVRRDVNRTLKWAFVEAANLIAMQQRRWPARHTVRLYRRVKERKNHQKAVVAVARHLAEAAWHILTDNKGYREPKIAVRTSSKHPASLTHEQARPTPVRQ

SEQ ID NO: 504607 - protein, 376 aa, unidentified
MNEKLRFLGLDVHAETIAVAVAEPNGEVRSLGMIANREDSIRKFIRKLDSPEHLRACYEAGPTGFVLYWQLTQLGVKCDVVAPSLVPKKPGDRVKTDRRDALKLARSHRSDDLTAVWVPDEGSEALRDLVRAREAAKQDQLRAKHRLTKFLLRTGQRPPLGVKAWTEKYVEWVQQVRYTHPAQEATLLDYLNEVQHMEERVKRLEQSIVEVIQLAPAPMQEVVRGLQALRGIAHISAVTIVVELGNITSRFESARDLMGYSGAFPSEDSTGKRIRRGGITKSGNAHLRRIVVESAWSYRHRPAIGARLRRRQEGLPAEITEIAWKAQNRLHKRYMTLMARGKEQRKTMTAIARELLGFIWAIGIKAEAACKQQMAA

SEQ ID NO: 504608 - protein, 401 aa, unidentified
MAPTAGIDWASEAHEVCVSDEGRVAKRFSAPHDEAGIDALCVELSRLGVERVAIERPDGILVDRLLEAGLEVIAVHPNQAKAARDRYSVARGKSDRFDAYVLAELARTDAHRLRAICPDGDETRALRALTRTREDLVGVRVELANQLRAQLEAFWPGALIFAEVDSPISLAFIARYPSPADARPLGPKRLGAFLARHGYSGRRAPEELLARMRSAAAGRAGEAEAEARRAAVLGLVAALAPIVGEIRELTSQIRGALAEHPDAAIFAPLFRDPKTAICPATLIAELGDSRERYPTEAAMAADAGQSPVAVESGKRRAASFRRACDKRLRGSWSVLADSTRKWHPWARQVYADAIARGQDHPHALRTLGRAWARVLWRCWQDRVPYDPAKHGNLNRLLAAGG

SEQ ID NO: 504609 - protein, 352 aa, unidentified
MDEKYVAMDVHKASVVIGVRDGTGKMIARAMVETKAQTLKDYVRGLSGTIHLTFEEGTQSAWLYDLLRPLVAECIVCDPRRNKLLEDGNKSDDIDVTKLSELLYLGRLRPVYHGAAGTRALKELAHNYEALVKDQTRVKNRLKAIFRGRGISYEGDEIYDCQEAEQWLAKLSERGVRERARQLYQQLAQLAEWVGGARRQMLAESRHQKAKKILQLIPTLGEISVAQLIATVDTPFRFRSKRQFWTYCGLAVVRHTSADYHFEQGELRRRLKPGPTRGLNRNYNRRLKRIFKTAAQTGSTKGPFKSYYQGLLGRGLSPELAQVTLARKIAAITLTLWKKGERFDPEKLVKSD

SEQ ID NO: 504610 - protein, 341 aa, unidentified
MKQATTIGLDIAKHVFHVHGADGAGHVLFRKRITRVKLLSFLAAQTRCVVAMEACAGVHYWAREIAKLGHQVRLIAPAYVKPFIKRQKNDGADAEAICEAAQRPTMRFVAVKTEEQQANGIVFRARDLLVRQRTQCVNALRGHLMEYGYVFPKGITHVESLVALVEDLQSSLPDSVRAILKLLVDTFTALEVQISVLDAEINQRSKSDPTARRLMTIPGVGPIVSTAITALVPAAEGFPAGRDFAAWLGLTPLQKSTGGKQKLGAVSKRGERTIRRLLIIGASAVVQQASRRGAPKGSWLAQMLARKPKMLVTVALANKMARIIWALLVKGGTYRTPIAAA

SEQ ID NO: 504611 - protein, 308 aa, unidentified
MNSVYHTELSSLEETRGQFNGGKADIKLGIDVHQDFYVVVMQEGGSNPKPPQRFHKQAFLLWAAKLKSRSAEVHAVYEACGFGFSLQRQLSQLSIHCYVSCPQKLDEHNKRVKTDSLDAKTLCLRLDRFVRGNREALAMVRVPSEEEERSRAIHRQREQLVKVRKILEAQGRSLMLNHGIEPVKNWWKGNNFAALPLPAWIKELLQNSQPILIALQQKISALTLQLQVAAAFNQPRGLGAMTSVMIDREIGDWHRFNNRRQIASYTGLCPGEYSSGHTRLQSCVTKARQPAPACGPSGVGLATGPLPA

SEQ ID NO: 504612 - protein, 389 aa, unidentified
MEARTVYNPPPAAPHDDAVRCVLAIELSKKSWIVAVNTPLSEKISRHTLGACDWKELLKLCERIRTRIARELRKDVELVSCYEAGYDGFWLHRLLEAHGIRNYVIDPASLQVDRRARRAKTDRVDVERLLRSLMAYLRGEPKVWSVVCVPSVAEEDDRRLHRERGRLINERIQHVNRIKGLLAIHGIYDYPPLRHDRMQQLEGLRTADGRTLSPRLKAEILRELQRLELVIGMIKTIEAERDAIASAKIETEHGSAKRIQDLAKIKCIGPEFATTLVGEVFYRSFDNRKQLASYVGLTPAHFQSGETCRDQGISKAGNAKARRVMIELAWLWLRHQPASPLSVWFHDRVGKLKGRIRRITIVAVARKLLIALWRYLETGLAPEGAILKV

SEQ ID NO: 504613 - protein, 426 aa, unidentified
MLNSQINKIQTITSDTLIVGVDIAKNIQWAQFINFRGIEVSKHICFENNYSGFNSIMEKIEEIKSKNNFLSVIVGMEPTGHYWKTFATFLHNNGIKVVQVNPYHTKKAKELDDNSQTKSDKKDALVIAKLIKNGRYSAIYFPEGEYADLRNLSNTRLEVSRLLNICKNRIHACVDEYFPEFETVFKSFIKGKVALHILKRIPFPTDILELTLEDIISVIREAAKKSVGKKKAEELIRAAKVSIGVKVGLEGARIRLNNLLEEYELYHNQLEKIEKEMAQELEKTGYKDILTSIPGIGIISSASFIGEIGDPKRFSNPQQIIRLAGYNLVEDSSGKHKSKTMISKRGRKILRTILYKISLIVVCKNQEIKLLYKYLITRKENPLKKKQALIVISGKMVKIMYSLIKKEEVYDKEKVLGIYRKQQIVA

SEQ ID NO: 504614 - protein, 410 aa, unidentified
MELLHRRCCGLDVHKATVVACLRLVADGKVATEVRTFQTTTADLLRLSEWLAANDCTHVAMEATGVYWKPVWHILDDGEFELVLANAAHVKNVPGRKTDVNDAMWLAELLAHGLIRASFVPDTQTQEMRNLLRTRKQLVREQSSHMLRVQKTLEDANIKLDLVLSDLMGKSGRAMIEALIAGETNPAKLAGLADRRVKASPEELCEALRGRVTKHHRFLLRLHLNQIDALDAAMATLDAQVEVNLGPFRTAVEQIISIPGIKNLGAQVIVSEIGIDMSRFPSAAHLISWACMSPRNDESAGKRRSNRLRKGAAWLKTTLVQCAWAAVKKKDSYLQAQFYRIKARRGPKKAIMAVAASMLTAIYHMLKDGTMYQDLGRKHFDRRSTDQQKNSLVKRLADLGYAVEIKPLAA

SEQ ID NO: 504615 - protein, 383 aa, unidentified
MNDLIRIGVDTSKSVFQLHGVNAAEQPVLRKKLRRRQVIEFFQKLPATRVGIEACGASHHWGRELSALGHEVVLLPPQRVKPYVERNKNDAADAEAICEAMSRPRMSFVPVKTAEQQAALMLVGVRDQLVGRRTQLSNAIRGYAAEFGLVAAKGTDKIEPLLVRIASDENLPPLAKDLFATLGNEYVRLKPELRKIEARLMAWHRGNELSRRLAEIPSVGPIGATLSVMKVGNPHAFRSGRDFSAWLGMTPKDHSTAGKVRLGAITKAGDEALRSVLVAGATSVIQQVRKGRGRPSPWLVALVKRKPPKLAAVALANKTARIIWKLMVSGERYNPQRAPQRFVPPTDSLAPGTRRQGQAACGGDLRSALTACALRAPSAPPSA

SEQ ID NO: 504616 - protein, 344 aa, unidentified
MEAIVAIRLDIAKSVFQVHGVDADGAVVVRRRLTRAKVLSFFERLPPCLVGLEACATAHYWGRELRKLGHDVRLMPPSYVKPYVKRQKNDAADAEAICEAVTRTSMRFVEIKGPDQQSVMSLHRVRQMLMRQRTQVSNAIRGHLGEFGRVAPIGRNGLAQLIAIVADPNDNTLPDDARVAVAMLAAQISIVNEQILELDRRVRASARATDVGRRLMEVPGVGPVLARALVTTVPDPRAFKSGLNLAAWIGLVPRQNSSGGKERLGGITKQGDRYRRQRRVVGALAVIRYAQRHGTRRPWLVQLLARRTTKIAAVALANKTARMIWAIMTSGERYREPSPASAAV

SEQ ID NO: 504617 - protein, 491 aa, unidentified
MKEIINKKTKRKNLEKQTSSSYNTSRWSASGRELTLTRPMRTRERPVPPEAKRSESINRVPSFEDLYKATPERTRPLKFLHKEVLVMFYVGIDWACDHHNIFIADESGARIDSFRIPHSPKGMSLLRDKLRSLLTPKEQILIAIETPRNLLVEFLLNEGYTIYPINPKSVDRYRDRYRPSGARDDSFDAMVLANIIRTDREQFRAILPNSALARELKILTQDEQHLIHLKIRLVNQIQACLKDYWPTALELFSEIDQQVTLDFLLKYPRPEIIPIAELKEFLQKHHYPLSEEKAKEIHKKLSRPQIFVEDFTIRAKSRLLITLVGQLKALITQLDEYQREIAKLFNEHPDCPVFKSLPGSGPKNGPRLLAEMGDNRQRYSKAKNVQCEAGTAPVTDASGKSKIVKMRYSCRKPFRNTLYQFAFSTLTQSAWAKKFYDTQRAKGNTHTEALRALGNKWLKIIFRLWKDGTTYNEDRHLASIMRYQLNQGSAT

SEQ ID NO: 504618 - protein, 320 aa, unidentified
MSGSSVVVGIDVASQHVDVVVLGAQVGAERFSNDVDGHMVLVDALAPLKPQLVVMEATGGYEAALACALQAAGLAVAVINPRTARDFAKATGKLAKTDRIDAQVLAEFAALLARRPDANRFLRGLPEPAQQDLAALVMRRRQLTAMLLSERQRMRLARPVARISIEATIEFLRRQLDDVEAQMATHVQAHHAELDQLLRSAGGIGPIASATLIAELPELGRLNRRAICALVGVAPYAKDSGFSRGRRRVAGGRFEVRRTLYMATLTATRRNPAIHAFYTRLIAAGKLPKVALIACMRKLVTILNAMVRSGRSFDLDHVYA

SEQ ID NO: 504619 - protein, 345 aa, unidentified
MGPMYYIGLDVHKQKISYCVKESGGKIYAEGWIPATRHDLDCWMKNLPQPWSAALEATMFSGWIYDHLKPHAAAMKVAHPLMLRAIAAAKKKNDRIDANKICDCLRCDFLPECYMAPTTIRERRRTLRYRNLLVRQMVQMKIKISTLLMEAGISYNKQRLHKAGYFRELLATNPDIDESLSSLLRQCREMVVRLGKMETTLIRSLQQDRLLVERVERLMSIPAIGPITALTWALEIGEVQRFSSIKKAISYCGLCGDEQRSANSVQRTPISKQRNKHLQTTLIEAAKMAPRYSPTLAMLYDREKQKGNANRATLAVARKLIAYLMAVDRGQTHFLVVDREACTAA

SEQ ID NO: 504620 - protein, 342 aa, unidentified
MKDYIGLDVSMKETAISIRRAGERVWRGKCNSDPARIAQIVRKRAPNVVRVIFETGPLSVWFYHALKEEGLPAICVDARHAKAALDMAANKTDANDADGLAQLAEVGFYREVRVKGYDSMLARSLIAARTRLVRITVELSNQIRGLMKTFGLIVPSGKGRTFDANVRRLLADQTELSNILLPMLNAWHDMRMRVADLTKLLLAVARKSHACRLLMTIPGVGAITATSYATAIEDPSNFNNSRAVGAWLGLTSRRYQSGEVDYSGRVSRRGDRHLRGLLYEAALVILTRSKMQSDLRTWALKLKERVGTKRAAVALARKLAVTMHAMLKTGSVFNPIAQPLSL

SEQ ID NO: 504621 - protein, 360 aa, unidentified
MSKIRLEEWNAQALKARPQPGTAVYLAVDLSRTKWVYCARWGEAEQRRLSTPAGLSHLQAVVRQYAEVPLHVTYEACGFGYEVAWWLQEQQIAVTVVAPSRVERAPGLSVKTDRLDVGKLARKLEERQLQGIYVPPRSTHQWRQVGRTYTQAVKERQRAQVRVRSLMQEQGYLGPAPGVGWQRYASWVSQQPLAASVQQCVDSLLALREVADQQAQRLKAELAKVAALPEYRTLVRALCTQPGVGPLSAIRFVLELSSLKRFRSPAALAHYLGVTPSEYSSGEIVKRGHVRKCGPALLRATLLQCAWAAVRRDQALREVFDRLAPRVGRKRAVVAVARRLAEQLWRCWHTAIATPQPATD

SEQ ID NO: 504622 - protein, 375 aa, unidentified
MDEITRAPIARVGVDLAKQVIQVHAVDASGRRVVARAFKRDQFLAWCTRLPAGCVVAMEACSSAHYWARKLRALGLDARLIAAHFVTPYRMEGKNGKNDATDAAAICEAASRPSMRFVPVKTCEQQGVMSLHRVREGLKEERTACINQIRGVLTEFGLVFGKSPKVLRAVLADVIEDASNELSTMARLVMQRAFEHWRELDEHLRWCDRQVGQHVRANPEAKRAAKVIGIGELGASALTAGVGDFKQFKSGHQFGAWLGIVPRQDSSGGKTRLGRITKRGDDYLRTLLIQGAKAAVMSAHKRDDPTSRWLEQLTARVGWQKACVAMANKNARILWAVMTREEGFDPNHVSVKPQAKQFARQPLAAPPLSPTSCTA

SEQ ID NO: 504623 - protein, 466 aa, unidentified
MTLGVTDALLVVFHVICPACVVRVFVHAGQDGHDLIRSLAVPYQCLVCPPCPVCALPNIRSEGTTTILAESTLIVAGADTHADTIHVAAISMTGAVIGDREFATTRAGYAAAIRFLTSLGQVERIGIEGTASYGAGFTRAVTAAGICVVEVTRAVKSTRRLKGKSDSLDAYCAARTALAGDGLATAKDDATSGLRALHIARRSAVKHRTAVINQIKAMLVSAPDSVREKYRGLTTLKLVEAIARCRPDAQTEPWAQSVLVAAKLLAQRVQFLETQSEILQTQIDALVTEANPGLRAAYGVGPDTAAQLLITAGTNPHRLHSEAAFAALCGTAPVPASSGKTNRHRLSRGGDRAANTALHRIALVRMSCHQPTKDYAQRQLIKGHNRMEILRKLKRAIAREIFKLLTRQIAVPEYDDLRPARQAKKITLTAAANHFGVWPTVISRIERGLQRDDTFAERYRHWLEAV

SEQ ID NO: 504624 - protein, 457 aa, unidentified
MRTKGKRTKGMEEAHPFAGMSQVNANAAGVDIGAVEIVACVAGDATTQIVKAFGNYTVDLQAIGKWLKEYDIKTVAMESTGVYWIPLFEELERQGFECLLISSRSLRRVPGRKSDIQDAQWIQTLHSYGLLESSFRPQAELIALRTMLRHRTQLLEHRAPHILHIQKALLQMNVQLSQALSDVTGETGLNIIRAIVAGERDPQKLAALRDRNCKKSAEEIGKALTGTWRDEHLFIVKQSLEMYDFYTKQVETCDAEIDRMYATTRPDWEAGELKPLPQKKRNSHSKNAPQNKEEIRQHLKRISGVDISVVDGFGVSLAQTVIMEVGTDMSKFPSEKHFCSWLGLAPKHEISGAKILKNRTLKTKNRAGQAFRMAAQSVKRSDCVFGSLFRRLRSRLDNRQATVACAHAIARVVYRMLKYQVEYETISVEEYEQKYKEQQIKYMKKKAAKLGFQLVPA

SEQ ID NO: 504625 - protein, 365 aa, unidentified
MKKSSTAVAQSKRNFNGKLTIGLDLGDRSSWYCVLDEAGEVIHEQKLSTIAKAMKEVFGTIPRSRIALEAGTHSPWVSRLLEELGHEVIVAHARNVRLIGESRRKDDRLDARTLARLARIDPQLLAPVKHRSAEAQAHLMVIRARASLVRARTALVNTARGLTKSYGERIRGCNPRNMDMEKAQALSPELQAALGPLLQALESLSERIAEYNQQIEQIAKQSYPQTALLKQVKGVGTLIALTYMLTLEDPHRFRKSRDAGCYAGLQPGRRNSGQSAPQMHISKEGDPYLRTLLVQGAHHILGPFGVDSDLRRWGLKLAERGGKNGKKRAVIATARKLAVLLHRLWVSGEVYDPFHNSRSTMLATA

SEQ ID NO: 504626 - protein, 312 aa, unidentified
MDAIVVGIDVSKDRLDVAVRPTGESFVFKRTGVGIEDLIVRLEALSPKMVAIEATGGFEAMVAAGLAGAGLPVVVVNPAQVRAFAQALGKRAKTDPIDAAVIAHFVEATKPKLRHMPDETTRHLAGLVARRRQIVEMIAAEGQRARRMSDKRLIKSIARLRKALEKELSALDVLIGDQIRGSPVWAEKEDLLASVPGVGKTIARTLIAELPELGSLNRRQIAALVGLAPWTRQSGQWRGKSFIGGGRKSVRNSLFVGAMVAARYNPQLKSFRDKLVAAGKPKLIALVAVARKLITILNAILRDRRSWQQISA

SEQ ID NO: 504627 - protein, 348 aa, unidentified
MVLIGCDFHPSWQQVSWLNLETGEAGDRELLHAPGEVEKFYRQFPAGAIIGMEATGNCQWFVDQVRGLGHEVWIGDAAKIRACDTRQQKHDKRDARLLLQLLAEKRFPRIWTPSSEQRDLRQLLIHRHKLVRMRVQVQNGLQHLAMNQGLLKKHKLWSKAGQQALRELPLAPWARRRREDLLKLKSELDEKIGLLDQAAEEAAAQNEQARLLMTQPGVGPITSLAFVLTIGDASRFPRGKQVASYVGLIPREHSSGGHQKCRSISKQGNIFLRMLLVEAAQSVVRCDPEFRNEYLHRCHGMKKGIAKVAAARKLAIRLFWMLKTHTAYPEIVRNESSSRVPLVVRHGG

SEQ ID NO: 504628 - protein, 410 aa, unidentified
MRLCVGDDWAEDHHDIEVMDGAGQVLARRRLPEGVAGIGQLHELIGRFVPAGGDAQVQVGIETDRGPWVTALIAAGYVVFPVNPLQASRYRGRHGVSGAKSDGGDAHMLADVVRTDAHQLRPAAGDSPAAEAVKVLARTHKTLIWERSAVVQRLRAQLREYFPAAVTAFEDLDAPDALELLGKAPDPARAAKLTRAQVSAVLKRAGRYKITERAGAILAALRSPQLGQPPALTAAYAATVQSLIAVIATLNEQVASLQGQVEAHFGRHPDAEIYLSQPGLGAITGARVLGELGDDPHRYASAKARRNYAGTSPITRASGKRKIVAARFVRNDRLIDALMIQAFAALRVSPGARAFYDAQRAKGLEHNDALRRLASRLVGILHGCLKTRTRYDEATAWGHRENIPQSDAAA

SEQ ID NO: 504629 - protein, 430 aa, unidentified
MKSNTQNAKIEAITEKTLILGIDVGNETHYARAFDYRGIEYSRKPFKFSNTEAGFVTFKEWILDLKERHEKDKVVPGMEPTGHYWFNLGKFLQDNEMKPVLVNPHHVKKSKELDDNNPTKNDRKDPKVIAGLVREGRYMIPYLPDGVYADLRTASNIRFQLQAELTRIQNRISRWFNIYFPEYKTVYGKPDAKSGILILKAAPLPEDILTLGIDGVNQIWRDAKLRAVGKARAKTLIEAAGHSVGSKEGAVSARMEIRMLLEDYESRNTRLQEVMVLIEELVKGIPMAEKLLEIKGVGIRTVSGFLAEVGDITRFSSPKELQKLAGLALVENSSGKHKGQTTISRRGRKRLRYLLFEVAMSLVGKNPEFGTLHHYYTTRKVNPLKKMQSLMAVATKLIRVFYAMLTKGVEYDSAKMLGDIKRPAEYMQAA

SEQ ID NO: 504630 - protein, 348 aa, unidentified
MNDIATVVGLDIAKAVFVAVGMNDRGKVLWRKKLARDEVLPYFTTLAIAKVGIEACAGAHYWARRLNAQGHDTRLIAAQHVKPFVNGSKNDWNDAQAIAEVRSREETKYVPINTEAQQDMQMLHRARQALLVERKGVICRIRAFAGEYGKVFPVGVGKFRKGVEHWLGDADNGLSGQAVETLRELLEQLDEKEERQAGYDARIARAASEDERARRLMQVPGIGKLTATAVVAAVADPRHFPSSRDLADNLGLVPRQHSSGGKDRLFGITKRGDGYLRALLIHCARSALRCAGEKPDHMLRWAVQVQQRRGSKVAVVALANKLARIVWALLANGGDYQPVPQRRASVSV

SEQ ID NO: 504631 - protein, 319 aa, unidentified
MAQNDRVVVGIDVAKDKVDACIRALSQRQTFPSTAEGQRALIRWLRKHKVGKAVMEASGGYEREWAKALRNAKIEVRIVDPKRVRSFAQSAGRLAKNDAIDAEMIAWFAETFDEVRGQAYDAAREELVQIVNARQALLEQQTQMQNRCEHTVPIPVRKMHERLLKAIALEVTKLEAVIAALTKASPHFAETAEIIESVPGLGKITSAGLIAAMPELGQVSNEAISALLGVAPYDDDSGKRQGERQIKGGRRKVRNLFYMACMGAATQHNPVLKAFYRRLIAKGKKPKVALVACMRKLIVILNIMIARREKWDAGRYAVG

SEQ ID NO: 504632 - protein, 419 aa, unidentified
MVLFVGDDWAEAHHDVELMDAGGRRLARARLPEGVAGVARLHALIAEQLDEGRLDQDDGEAQVVVGIETERGPWVQALLAAGYRVFAVNPLSVARFRERHGVSGAKSDAADAHLLADMVRTDSHQLRPVAADSELAEAVKVVARAHKNLIWEQTRHVLRLRRGLLDYFPAAVEAYSDLGGGLAAPDALELLQVAPDPGSAARLSKPRIRAALKHAHRRDIEAKTLKIQAVLRAAQLGQPEVVTHAYAATTAATVAVLVTLAEQITTLQGQVEACFGRHPDAEIVLSQPGLGPILGARVLAEFGDDPHRYTSAKARKNYAGTSPITRASGKKHVVSARYIHNNRLIDALMAQALSALSASPGARNYYDQQRARGLEHRPALRQLANRLVGILHGCLKTHTPYNETTAWPQHHQTPTTTAA

SEQ ID NO: 504633 - protein, 423 aa, unidentified
MMKLKYSICCGLDVHKNVIVATIVTTNKDGISEYLQKSFSTINSDIQRFHNWLIENNCYHVCMESTGKYWIPIFNYLENDIDVCLTHPKYVKAIKGKKTDKKDSKWIADLYKFDLVRCSFIPPKDFRQLRELSRYRFKLVCMKSSEKNRIQNCMTISNVGIASVLSDPFGKTATEIISYLLEHTADSMDEKAVRKLIKKGAKYKSDEIIEAIKGYTIETDQAKKLELARGHLEYLDDMITQTEVELYVRIKPYYEFVEFVSTMPGMTELSSTIVLAETGVDMDIFDDAKHLCSWCGLSPANNESAGKKKSVRIAKAGDYLKPMMVQCALAAIKSKKQPYFAIKYGRIKKRRGHKKAIIAIARMMMVCIYHMVSEKKPFTPTDYEELMDPQNHVESVVLNENNVFAYLESLGYDSSKLVKRNDN

SEQ ID NO: 504634 - protein, 344 aa, unidentified
MSVAIIGVELAKNIFHIHAVDRHGGVVFRASRKRSDWVEHVCERIEPKTIVAMEACASAHHWGREFQARGFQVRLIPGQFVKPYVKSNKNDRIDAAAIAEAAVRPGMRFVTVKSRRQQDLQALHRVRDELMHQRTAKANQIRGLTAEYGIVAPVGLKTLRSAIPVWLEDASNGLSDLFRTILLGLQDDLTGLDERVDQLSKQIERIAAEDPIARRLSGLRGIGPLGATAWAIQLGDGRQFKRGRDFAASLGLVPRQHSTGGKARLLGISKRGDAYTRKLLVHGARAVIRHHKADNDPLNRWLHHQMSRKHPNVVSVALANKTARIAWAIARGAEYRPELAARTN

SEQ ID NO: 504635 - protein, 402 aa, unidentified
MNAVGIDVSKSKSVVAIMRPFGEIVSTPFEIKHTASDIHSLIELINSVEGESRIVMEHTGRYYEVLAHQLLEANLFVSAINPKLIKDFDNDSLRKVKSDKADAVKIARYALDKWQNLKQYNVMDELRNQLKTMNRQFGFYMKHKTAMKNNLIGILDQTYPGVNTYFDSPARSDGSQKWVDFASTYWHVDCVRKMSLNAFVDHYQNWCKRKKYNFSKSKAEEIYGKAKELVPVLPKDEITKLIIKQAIDQLNSSSTTVESLRTLMNETATKLPEYPIVMAMKGVGPSLGPQLMAEIGDVSRFTHKGAITAFAGVDPGVNESGSYEQKSVPTSKRGSSDLRKTLFQVMDVLIKTHPQDDPVYQFLDKKRAQGKPYYVYMTAGANKFLRIYYGRVKEYLSSLPES

SEQ ID NO: 504636 - protein, 371 aa, unidentified
MKQQTKSSNITVGLDLGDRRHRFCALDERGEVVEQDSICNDRVSLRKLAGRYHGALGVMEAGAHSPWISRFLEALGWRVVVSNPRKVRAIYQHERKSDQRDALMLARIGRMDLALLYPVRHGTAEAQQDLLRIKLRDSLVRARVAVINSVRFTLKSLGYTVRNPSSARFHKVVMEEVPESVREMITPSVQALAELTARIKMLELEINTLAQMKYPQSAQLQQIPGVGPITALYFVLKIEDPNRFAHVRDVGAYAGLCPRRDQSGESDPQLRISKCGDAYLRRLLVSGAHYILGPFGPQSALRAYGLMLAADGTARAKKRATVAVARKLAVLLLSLWKSQQPYQPFPGACLNGEQEDRRSGTIALHRMEATD

SEQ ID NO: 504637 - protein, 457 aa, unidentified
MSHKSKKSKKSKHNLSIHQAWPLVNVDAAGVDLGSREHWVAVPEDRDENPVRCFGTFTPDLASLADWLQACRITSVAMEATGVYWIPLFQLLERRGFRVLLVNARQIKNVSGRKSDVADCQWIQRLHTYGLVGGSFRPADTYCVVREYLRHRENLVAGRSTQTQLMQKALQQMNVSLNQVVSDINGQSGMAIIEAILQGERNPLKLASLAHARVKASPATIAKALVGNYRREHLFQLQSACKLYHNYEAQIADCDQELTRELEQLPDRVDVALKPLPPRATPAKRGVPESLRANLYQKLGVDLTAVEGIGALVAMTVLTEVGPDLSAFPTEKHFTSWLGLCPDNRVSGGRVLSSHTRRVNNRLSHALRLSATTLEHSPHGLGAYFRRMKAKLGAAAGITATAHKLARLIYRLLKHGEAYVQEGLEAFEQKHLKRKLAGLKKSAADLGMQLVQIPAAA

SEQ ID NO: 504638 - protein, 424 aa, unidentified
MTREMADYAALVGIDWADRKHDLCLQAAGSEKRERLVLEHRPEAIDEWACALRVRFSGQPVAICLEQHKGPLMAALSKYDHLVLYPINPLLVATRRRGLKPSGAKSDIADAEIILDLLTDNSAQLRPWHPDNARTRQLQALVEARRTLVESRVRTTNALTANLKLYFPQALDCFDDIASGLACDFLTQWPSLGQAQRAREATLTTFFHQHGVRGEDLIAGRIAALRAAMALTTDSGILIPALLRTKTLVAVLRAQLDGISDYDAAITKAFAAHPDAAVFASFPGAGPTFAPRLLAAFGSDRERFASARAIQEYAGVAPVTEASGQSHWVHWRFACPRFVRQSIVEWAGMSIRYSFWARTYYQELRERGKAHNAAVRAVAFKWLRILFRCWQDRKPYDEAKYLLSLRERQSPLLQAAAKPLGQPA

SEQ ID NO: 504639 - protein, 355 aa, unidentified
MNSEKYIGLDVHQATICVAVMDPKGKVVMESILETKATTILEFLAGLRGTLSVTFEEGTWAAWLYDLLKPHVANLVVCNPRKNALLKHGNKSDKIDARKLADLLRLNDLEPVYHGETGVRMLRELARSYLTIVKDVSRVMSRLKAIYRSWAIPCAGRDVYYTRHRSEWLGKIPEAGSRRRAEQLYQQLDMLQPLRQQARRELLAESRKHTITAKLRQIPSLGPIRSALAVALIQTPHRFRTKRQLWTYSGLGLETRDSGEYHYVQGQVRRRKKQVFIRGLNKDHNHDLKGLFKAAATRASVQPGPFQDFYQRSLAKGIQPTMARLTLARKIAAITLTLWKKGENFDAEKLKAQAA

SEQ ID NO: 504640 - protein, 270 aa, unidentified
MKITTVGIDLAKNIFAVHGVNEHGRTVLKKILKRDQVAAFFANLPACVIGMEACASAHHWARKLQGMGHTVRLIAPQFVKPYVKTNKNDAADAEAICEAVARPNMRFVPVKNIEQQSVLSLHRVRQGFVRARTAQANQIRGLLSEFGIVVPQGIAHLVRRVPELIEDATNELTGSFRLLIERLMDHLKGINRQVRELEAQIQAWHRRDGASCKLASVPGIGPLTASALVASIGDATSFKNGRQLAAWLGLVPRQNSSGGKNVLLGISKSV

SEQ ID NO: 504641 - protein, 343 aa, unidentified
MECYVGLDVSLKQTSICVVNERGSVVREGVVDSVPEAIAGFVRSKAPGAVRIGLETGPTATWLWTELARLDLPVICIDARHAKAVLKMQVNKNDRNDAAGIARIMQTGWFKEVRVKDLDSHAVKALLASRALLVKIKRDLENQVRGLLKNLGLVIGHGTFNVFAVPAKELIADRPELTSAVSPLLTARTAIEQQIGELDRQVLKLSRQDAQARRFMTVPGVGPITALCFKATIDNPARFRRSRSVGAYIGLTTRRHASGELDWSGRISKCGDAMLRMYLFEAAGVLLTRVPKWSALKAWGMRLTKRNGLRKAKVAVARKLAVILHRMWIDGTEFNWSNKEVAA

SEQ ID NO: 504642 - protein, 370 aa, unidentified
MIKLGVDVHWREHVVVRQIDGTSPQPAQRFAPEAFVAWVAKQAQQADVVHCCYEAGPFGFVLHRRLVGLGVKSLVVRPRNWDEYGKKVKTDRRDALALVSCLDRYVAGNTEALTSIRVPTENEERARSVSRQREQLLEHRKRLAAQGLSCARYYGHDLPDEWWRAKKFELLQAELPEFLVGLLASVQRIALLVHAELEAHSAEVESAQTQELPTGLGALTAQILDREIGDWGRFKNRRQVASYTGLVPSEHSSGERRQRGAITKHGNPRVRHILIEASWRLQQFQPGYRPLKSRQGALDTAKRKGDKPARKKLCVALARQFIVDWWRIRTGRTTPAKLGLQMSWPAAYVLRGKAPQPVVAPLAVPQPAAA

SEQ ID NO: 504643 - protein, 316 aa, unidentified
MSKIICGVDVASDSLQARIGREGAEGCFSNTKKGITKLVAFCRQHKVELVAMEASGGYEKLPFGLLWGQGLMVAILNPRAVRQFAEGMGLLEKTDRIDAGVIAWFAEVKHVAPTQPPSAEQQQLKALVVRLRQLTELQAAQRNQQLLVEDAMVRKSFTALLAVVKSQIRELEKAIADLIAADPLWQKLNQAFRSIKGVAGRTVARLMAEMPEIGMLSNKAISKLAGLAPLARDSGKREGKRVVRGGRRGIRGILFVVASVVRRYHPDFTAFHQRLTAAGKAKKAIRIALAHKLLVRLNAKAREVRSELAADAIVSV

SEQ ID NO: 504644 - protein, 414 aa, unidentified
MRVVYSAVAGLDVHKRTVVAAIIVPRDDGQWQRETRSFSTMTAELLALSDWLLAHQVTHVAMESTGEYWKPVFNILEGSVEVLLVNAQHLSRVPGRKTDQSDADWIAELMQYGLLKASFVPPVGQRELRELTRYRSTFVRERANLINRVHKLLESANIKLACVATDVMGVSSRAMLAALIAGQTDAQLLAELAKGRLRGKRDQLTQALQGRMKSHHRFVLTELLCQIDGLDETITRFDAQIAEACRPFEEGVALLDTIPGVGRETAEIIVSEIGIDMSRFPSAHHLAAWAGVAPGNNESAGKRRSGKTRKGDKPLGTALNQAANAASRTTNTYLSAQYHRLARRLGRKKAIVAVAHSILIIAYHLLQRHEPYRDLGADYFDTRRPEVTAKHLVQRLQHLGYQVALQPIAAADTT

SEQ ID NO: 504645 - protein, 367 aa, unidentified
MIENTLYVGLDTDKKHIDVGLAEPLPDGEVRYWGKLANDPTSVDRLVKRLQRMHQRLVVCYEAGPCGYGLYRQLNGKAGVTCQVVAPSMTPRRPGDRVKTNRRDCLSLTRLLRSQELTAVWVPTVAHEAMRDLIRERSAAHGDMTRCRQRIGSFLLRQGVAYVGKPWTQKHRRWLGRLDFAEAAHRLMLGEMLATSDQAQARCDQLTDHIAELVPHWSLAWLVEAIQTMRGFRLINASTVVAEIGDPRRFASPRQLMGFLGMVPSEHSTGETVRRGGITKSGNTRARTALIEAAWTYTRPAVAKRTHPSAEVRAIADKARHRLSRRYRRLTARGKLGVVAATAIARESLGFIWAIAHAAAPADPGKR

SEQ ID NO: 504646 - protein, 342 aa, unidentified
MKEVSIVGLDLAKRVFQVHAARSDGSVILRRKLSRGHVVTFFRELPRCTVAMEACATAHYWAREIGKLGHDVRLIPPAYVKPFVKRQKNDAADAEAIVEAATRPSMRFVVPKTEPQQACSMLFRTRDLFVRQRTQLINALRAHLAEHGVIAPQGTANLASLAEIIEDHESGLELIVVETGRLYLDQIAALSSRIASLEKALRSEAKRSQSTARLMSMPGMGPITAMAVEAFAPTMTTFRRGRDFAAWLGLVPKQHSSGGKQVLGRTSKMGQRDIRRLLIIGAMTVIRWACRKAPPENSWLARMLARKPRMLVAIALANKMARSIWAMMTRNEDYKDSVLPAV

SEQ ID NO: 504647 - protein, 412 aa, unidentified
MTQLSEYLVRVGIDWASESHQICIVDQDGHRTEHTVPHTSAGLAALATELVALSPEDPGRVAVGIEVPRGAVVDTLLERGLHLFALNPKQLDRFRDRHTVAGAKDDRRDAFVLADSLRTDRPAFRRVHLDDPLIVELRELSRLDDDLREELSRLSNRLRDQLHRFCPDTLALCPAADEPWFWALLDRALTPPRPKPVSIKAVTAVLKVHRIRRLTVDTVHAALQVPPLRVAPGTIEAACAHIALLLPRLRLVHDQRTRTVGARIETLLAALAKEDVEGEHRDVTILRSLPGVGRLVAATVLAEASRPLAERDYQTLRAHAGAAPVTRQSGKKAIVRMRRACNARLRNAVYHWARVSVQVDPRCRAHYDRLRQAGHEHARALRGVADRSLDVLMAMLTSRTLYDPERRCEKAA

SEQ ID NO: 504648 - protein, 345 aa, unidentified
MEIRTIGIDLGKTVFHLVGVNARGGVVVRKKCSRTQLLRFTSKLRACLIGMEACGGSHFLGRGLREQGHDVRLMPAQYVKPYVKTNKNDYIDAEAIAEAVTRPTMRFVPIKSDDQLDLQSLHRVRERWVVRRTAVINQIRGMLLERGITMHKGRKHLEASLPHILEDAENKLSGALRALLTQLQIEMQYLHRQIGESDKLIDRIAGELEPCRRLVAIPGIGPVIATATIAAIGNGAAFKKGRGFAAWLGVVPGEHSTGGKQQLTGTSRRGNKYLRKLFVLGAHTVLLQRTKQSSGLSTWLTSLSERKRKQVATVALANKMARIVWAVLFKGKAYRPPLLPEPVAA

SEQ ID NO: 504649 - protein, 366 aa, unidentified
MDVHTTNFTLCCYSFEDDKVYATVQVKPEYTQIIKYINRIRKQRGEDTRFVCGYEAGCLGYSLYHQLTDHGVECVILAPSTMAAAPGNKIKTDKRDAEKIARCLAYHQYKPVYIPDEEDDAVKEYIRMRDDVKAHLKETKQQIIAYYTRHGFQFDGSSYWTQKHLNWVEKLQFQNSIHQEVLREYLTVFYDLSEKIAVYDNRIEELAHSARYEENVGKLCCFNGIATHTALSLLAEVGDFNRFRSAPQFAAYLGLVPGEHSSSDKQHRTGITKAGNSHLRRLLIESAHCYGRGAVGKKSKALKEKQAGNSSEVIAYADRAIDRLKRKYYRIALRSRHNIAKTAVARELACFIWGMMTNNISPSTMA

SEQ ID NO: 504650 - protein, 395 aa, unidentified
MFIVGIDVAKRSHEVCMITSDGQTVQRPFSIRNNCTGYNLMLEKIRKHTNIKSQIVFAMESTAHYWLALFTRLRKDGYHVILLNPIQTSAMRDMFIRKIKTDAKDSFIIAELIRFGRYAESNVAQDRLLALKELCRNRFYLVDMAGDLKRKLIALIDRVFPEYEAQFDTIFCKSSVAVLKKYPTPQKLSNAHLDKLTELLWNSSNGHFGEWKARELRELARNSFGVEDCDGAYSTLILLMLDQIQSLSGKADALEKEISRLFQSFDTTVTTIPGVGPIIGAVILSEVGDISRFSSADKLAAYIGVDPSVNQSGEFQAAHAHMSKRGSPYLRRCIWMASQVAVQRDPMFRAYYEKKAAEGLKYMTIIGHVTRKMTAVIFAILRDHKAYEPVLSTVA

SEQ ID NO: 504651 - protein, 383 aa, unidentified
MKAVCGLDVHKDSVYLCILSEFGELIEKVFGVLTFQLEEMRDLMLHHHVVEVSMESTSVYWIPIWRVLSPHFKLNLANPYFIKQLPGRKSVVKDAQWIAESTMKELIRGSFVPPEIIQQLRQYDRRIFDLNEEIARKLSKLDAVLQRCNIRLGNYVSNVDSKSYKAVVKAISQGITAPEELVKLIHGRIIKHHGMDVITSSLKGVVSLAEIDMISQLRDELDMAEAHKEKCQARMLVICEREFPEELKRLQTLPGIKERAATSLIAEIGTDMNKFETANHLASWSGLKPRNDESNKKIKSRSITHGNVYLRKTIIECAWAASRTKDCFFSRFSYHQTRVRKKNKMKVLVAVARKMLIAVWHVLHDNTNYIDFTTDRKTSPTKG

SEQ ID NO: 504652 - protein, 459 aa, unidentified
MARHQRKGNGLPAQLAAVNLHAAGIDIGAQEHWVAVSSDSDSQPVRRFGACTADLEALASWLQQCGVQTVAMESTGVYWIPLFELLEAQGFAVVLADAREVQRAPGRPKTDVQDCQWLQRLHTYGLLAAAFRPPEQICVLRSYLRQRAMLVTYASQHIQHMQKALTQMNLKLQHVVSDVTSVTGMAIIKAILSGEHNPTTLAQLRARNCHHSEAEIARALQGNWRAEHLFALQQAVELYEFYHHQIAECDRQIEAQLQTLADHSAGRTLPPAPRPPKRRRNEHHFDARLPLFRATGVDLTAIEGINEHTALVLLSEIGTDMTRWPTEKHFAAWLGLSPLHKISGGKVLSRKVRPSANRAAVALRLAASCLHHSHSALGAFFRRLKARLGTPKAVVATAHKLARLVYRLLKHGEAYVVQGMAEYEHAYRERVVKNLIRKAKELGYQLLPTSEQTAQEAPA

SEQ ID NO: 504653 - protein, 370 aa, unidentified
MGEYSGAFVGFDTSKTKHAVAIAEGGRGGEVRFLGEIASSPARVERLVGKLASRYDKLHFCYEAGPTGYGLYRQIRELGHDCAVVAPSLIPKRPGERIKTNRRDAVTLARLLRAGELTAVWVPDAVHEAVRDLVRARAAAAQDLRGKRQQLLSFLLRHGRIFSGRQHWTLAHRRWLAEQSFAHPAQQVVFQDAVEAIAEALARLQRLEQQLVAIVPSWSMAPVVEAYQAMRGASFLVAVTFAAEIGDVRRFDNPRQLMAFLGLVPGERSTGETIRRAGLTLAGNRHARRVLVEAAWSYRHPGRVSPTLRARLEGLPKPVRDTAWKAQVRLCARYRRLSAAGKKLPVVIAAIAREMAAFLWAIVRHVAPAV

SEQ ID NO: 504654 - protein, 344 aa, unidentified
MHIASIGIDLGKTTFHLVALGERSKVLVRRKFSRTQLLVHTANLPPSLIGLEACSGAYFLGAALREQGHEVRLIPAQFVKPYRKSNKNDFLDAEAIAEAVTKQNMRFVPIKTQEQLDVQAMHRVRDRLVQRRTALINEIRGFLLERGITFPVQPSHLRKNLPTVVEDCEQNLTPRLRWLLDRLWQEWKQTEIDIETVTDEIERIATEDERCRRLRQIPGFGPLVSTAMVAAIGNGAAFRRGRDFAAWVGVVPRQYSSGGKQKLYGISKRGNVYLRRLLIHGARAVLFRIKYDTAGLGQWVHRLSQRAPRNKVVVAIANKLARIAWAVLSSGKDYRHQPLQRAAA

SEQ ID NO: 504655 - protein, 518 aa, unidentified
MKPFRTVVGVDLARRAPHKAVLMAAEGPQRGVAHRAWPVTHDVVGLERLCQRIRQETGQTSLEGVLVNMEPTSGVWPAVAAYVRLEGAEACLTRTDLTSQWRKVHSRCHKTDRIDARTLATVPLTFPERVWPVRPVPAPIRALRELSTQRQRLVEEIVRWKNRFLAVVEPVWGGLLGALTESQRFSEVLRAFFRRFVNPCDALRYGRARFDAWYVKQAHGLTEAGLDEVLWKAAESAAALWRLFEAHHALPWSPDALPFLIEQDLRLIEVYEQELAGIEARIATVRQAVPECDLLEQMPGVGKVVSVTLAGLLLPADRFANARQCGAYTGFVSRTKGSAGRETEGLRITKTGNRRLKRDLALAADTAMYHDPQLADFAIRLLTHGKHYNEVRVAVGRKIALRARALLQRAQNAPDATFEWRDLQGRKVTPQQAKALARTLWERHRATQAKGPSTSAHSGPSEDAARQTDAQPGCKYAHTIGQCAIATPDPAIVPPVDNSSSNCGKPSKNRHQTTPKQT

SEQ ID NO: 504656 - protein, 340 aa, unidentified
MDNTTKFFIGIDVSKPHFDVSLMAVINHEKQTVETGRFDNTIPGLKLFDKWLKKYRVSFDENSLLVIENTGIYHRLLWSYCSNKNLPIHIGNAAHIKWSFGIARGKNDIIDSLRLCQYGFKEADTLKATPGLNPVLILLKDLVTSRSKLISQINSIKTYIKELKDINDRATQNLLAESYKDAIKGIAKSIKKIEAEIKKIIAGDPALKTNYDLLISVPGIGHVTAVYMLCCTANFAGKINGKQLACYAGVVPFEYQSGISIKGKSRVHKMANKDLKKLVNMGALSAIRCYPEFRNYYERKTKEGKHPYSVINAIRNKIILRAVAVVNNQKPYVNNYIVAA

SEQ ID NO: 504657 - protein, 509 aa, unidentified
MKTKRCKAKNQPGKKTKQVRTVSSAEVAEELAILRPDAGGVDCGATEHYASVPPDRVPAGQAAVRCFSAFTEGLDALVDWFKECRISTVAMESTGVYWIALYQKLEAAGIEVYLVNARHVRCVPGRKSDVQDPQWLRQLHRFGLLNASFRPEDLVCRIRSLHRDKENRVGSAAAEIQHMQQALQQMNLHLHHVVSDVTGQTGLRILDAILAGQRKPEELVKLRDKRCTKSTPEQMQAALVGDYRPEHLSVLKRSLQAYRFYQSQIEECDRQIEPLLQELAQRVEAASAQLQLPNPELKAGEPGEKLAEKQQQQCNATVPNTNALRTKKKRKAKANEPKIELAALLQRICGVDLTRVVGLNVASVLLIISEIGIDMTKWRSARAFCSWLGLCPANKISGGKVLNSRTRKVVNRVATALRLAAQSAGRTDTCLGIFYRRKKAQLGAPKATTATARKLACVLYHLLKNKEPYQDPDPVLYQKRLQISALTKLQRQARALGYTLFPAHAPAPV

SEQ ID NO: 504658 - protein, 362 aa, unidentified
MRIIGCDLHARQQTLAMLDTVTGEVVNMILKHEGDNVREFYSKLPRPVLVGIEATGSMQWFLNLMEELGIECRVGHPAQIRACEPRKQKHDRRDAELILKLLAEDRFPAIWLPSKELQDLRALLRHRHQWVRLRTRVQNALQSIALANGLRRGTALWSHDGQSRIAALPLAPHTAYRRSELQAMYEKFEAEIEKLNQRVEEQACGRAGARLLMTHPGVGPITALATEVFLGDPARFADSKALASYVGLIPREYSSGGRQRLGGLSKQGNPLLRFLWGEAGAHAARKDPELQRFYRRKLVQKGLGKASVAVARKLGIRLWIMLRDQIEYNEFCRRGQKQQKSSDACAGMPETPYGAKSHRPVD

SEQ ID NO: 504659 - protein, 452 aa, unidentified
MLWIGTILLPRRWFSKGSNHSVLCSFVNQLNTAQTVYIEQGYESKAPCGYSITNTPLEVFTMISVGIDVAKDKHDCFIISSEGEVLANVFTIQNNMEGFCCLLQRIRDCSSPQDKIKVGLEATGHYSYNILGFLLDNGLDTYVLNPLHTNLYRKSLSLRKTKTDRVDARTIAAMLLSDVGLKPYTETAYHNEELKSLTRYRFNKVKERGQLKQSIARLVCILFPELEKLVPTLHLASVYALLEEFPGAKQIANAHLTRLKTLLQDASKGRYGRDMAVTIRDAARGSVGSVMPAKSLELRHTIHLIHEFDNEINEIESEIQAIMDEIHSPITTIPGIGTRMGAMILAETGDFSRFESPDKLLAYAGLSPSTYQSGQINNCYARMEKRGSRYLRYAIFNAAKYVCHWDPSFAAYLAKKRAEGKHYNVAISHAAKKLVRLIFALEKSGQPYCSAA

SEQ ID NO: 504660 - protein, 371 aa, unidentified
MNSIVYVGMDVHKEQYTLCCYSYDTDKVEYKQTIPSDYKLVLKYMEQVRSRYEGEVSFVCGYEAGCLGYSLYQQLKDHAVDCKILAPSTMAVTNTHHVKTDKRDAANIARCLAFHTYSEVYVPDNDDNDVKEYIRMRDDQKLYLKKVKQQILAFILRQGKRFEGGKTYWTIAHLKWLKTLELSDLQREALDEYLLTFEYLTEKISRFDERIEELASVERYEEKVKHMSCLLGIKTHTALSMIVEVGDFERFEKAPKFASFLGLVPSEDSSDTRVNRYSITKAGNSHLRRLLVEAAQSYTRGNVGHKSAALKQRQKGNPPEVIAYADKANERLRRRFYKMTLNKGVNRNVAATAIARELACFIWGMMTEHVS

SEQ ID NO: 504661 - protein, 315 aa, unidentified
MSESKVEVFVGIDVCKSTLDVRIEPPGEAFQVDNDDAGIRALCTHLSELVPTLIVMEATGGLETRAAGELAARGLCVTVVNARQVRDFAKATGQLAKTDRIDAGVVCSFARAIRPAARPMKEALTAELDDLVTRRRQLVEMRVQETLRLQSASKVQAQSLKAHIVWLNKRIKSIETDLGTRLRSSDAWRVKDDVLLSIPGVGEITSRSMLSRCPEIGQLNRREIAKLVGIAPLNSDSGKYRGQRHIWGGRADVRSVLYMAAVSAKRCNPLIKALAERLKRAGKAPKVVIVACMRKLLTIMNAMIRSNTPWNPKIA

SEQ ID NO: 504662 - protein, 335 aa, unidentified
MHYLYYVGLDVSKETFDASLVAFEDANEMAHRKFANSRKGICSCLHWVEKRHGIRLDDVIFCAEDMGSYISEMAVCASDRTLNFNFSLISPLVIKYSMGIARGKTDRVDARRIAEYAITHYRKIALYLPAEKELCQLRTWLILRAHLAKQRVAKLVLLEKLDYKEKFADVSIQRSMLQEEIAYAETHMKTIEREMKELIAADSNICRNYKLLTSIKGVGPITAIVMLCSTLNFTKITDHRKFACYCGLAPFEHSSGTSVRGGCRTSSMANRDIKVQLNRSALIAIRCDPQLKAYYERKVAEGKHKFSVLNAVRAKIAARCFAVVRRGTPYVALQI

SEQ ID NO: 504663 - protein, 356 aa, unidentified
MSQNLDGKVAVIGIDIGKNSFHIVGQDRRGALVLRQKWSRGQVEARLANLPPCLIGLEACTGAHHLSRKLQALGHDARLMPAKYVRPYSKGEKNDYRDAEAIAEAVQRPTMKFVATKTAEQLDLQALHRVRERLVSQRTDIINQIRAFLLERGIAVRQGLHFLRAELPGILAKRTDVLSPRMLRVIEDLAGDWRRLDERIEGLSGEIHALAHHDKGCERLMTVPGIGPIISSAIVAAIGTGDAFSKGRDFGAWLGLVPKQMSTGDRTILGSISRRGNRYLRKLFVQAAWVVLVKLGPEQWERYGLKSWIEAAKKRLHHNVLAIALANKLARIAWAVLHKGRAFEYVKTNATASRSA

SEQ ID NO: 504664 - protein, 400 aa, unidentified
MNPHHDWTKHTHFAALDWASDHHDVVIVDHTGAIAAEFRFAHTAAGWAEFTERMKPYAGAPLALETSSGPAVDQLLQRGWTLYPVNPKAAERYRERKVPSGTKTDRHDGWSLADALRTDGHGWRPLLPQDEATATLRALCRDEIALIEQRTALVNQLLAALREYYPVALEVFDDWTQPFTWALIQQFPTPLALQSAGQRQWEKFLHTHRLWRTDTAPARLALFARANALPASAAVRNAKSLLATSLVKVLQTLETQLQEYRRRITETFAQHPDHDLFGSLPGAAEKIAPRLLGELGAVRAVYPDADALCCQAGVSPVSFQSGKLQQYVFEVAPEASRAQIKEAIQILFDVDVERVNVLNLPAKRTRRQRNRRVVVRRGEYKKAIVTLAPGQTIDVFEGVK

SEQ ID NO: 504665 - protein, 353 aa, unidentified
MAEDRSGVSAVIGIDIGKNTFHVVGLDGGGAIVLRQKWSRGQVEARFANMPPCLVGMEACVGAHHLSRRLRALGHDARLMPAKYVRPYSKGQKNDFRDAEAIAEAVQRPTMKFVATKSAEQLDLQALHRVRARLVRQRTGISNQIRAFLLERGVAVRQGLRFLRAELPAILAKRCDALSPRMVRLIEDLAGDWRRLDERIESLSHEIDALARQDAGCDRLMSVPGIGPIISSAMVAAIGTGDAFEKGRDFAAWLGLVPKQISTGDRTILGKISKCGNRYLRALFVQAAWVVLIKPKSWERYGLKPWIEAAKRRLHHNVLAIALANKLARIAWSVLARGRGFEARLIASAAQPV

SEQ ID NO: 504666 - protein, 344 aa, unidentified
MKKKSDCTIGIDLGDRKHQLCVLDRDGEVLESKAIGSDRDALRTLAGRYPGARVIIECGMQSPWTSRLLSGLGMDVIVANPRKVRAIWQAERKSDKRDAEMLARIGRLDPKLLKPIRHGSEEAQRELLSIKMRDALVRQRVNIISAIRFTLKSLGHRVSNPSTARFHKVVLEQVPAECVSLIEPMVEVLAEMGEQIKKFDGLIKRAAEAHPVARQLQQIIGIGPITALYFVHKIEDPGRFARARDVGAYIGLCPKRDQSGDCDKQLRISKTGDPFLRRLLVSAAQYILGHFGKDCALREFGLRLSERGGPRAKKKAVVAVARKLGVLMLSLWKSGEDYQPQVAQ

SEQ ID NO: 504667 - protein, 405 aa, unidentified
MDIIIKRGCGLDVHKKTIAACIMGTGIKKETRTYSTMTNDLLRLKMWLKENFITQVAMESRGVYWKPVFNILEDSFDVILVNARHVKNVPGRKTDVQDSEWLCKLLRSGLVKGSFIPPIEVRELRDLTRYKRKLIQNVTSEKQRIEKILEDANIKLSSIASDTFGASGGRIIEELMKGNLNAEEMAELSKGRLRRRKEELKEALVGKMQENHKFMIKASLGHIKAIEEELSALECRIQEKIERHFKVEYELLKTIPGVKENASVIIAEIGVNMDIFPTEMHLSSWAGMSPGNNESAGKKKPGTTTHGNKFLRSILTEFAWAAAKTKGTYLGAKYRSIVGRRGKKKTLVAVGHKILIMCYHILKYKVPYKELGGNYLDDRKKDRITKGYIKRLNSLGYTVTLKEAA

SEQ ID NO: 504668 - protein, 344 aa, unidentified
MEHYAGIDVSLESSSVCVVDERGGIVREGKVASEPEALIGWLGAVGFDLARIGLEAGPLSQWLYAGMRKAGLAVELLETRHVRDAFKAMPVKTDRKDARGIAQLMRLGWFCAVHCKSLPAQETRALLTARKLLQAKHHDVEMSLRGILRGFGLKVGRTAPRAFAGRIGELVEGHGTLSVVAAALLAARRALGEQLQGLEKRLRSLARTDARARLLMTVPGVGTIVALTYASAIDDPGRFRSSKAAGAHFGLTPKKYQSGETDVTGRISKIGDGSVRTALYEAANVILTRPVKGCTVLKSWAMRLAARAGTRKAKVALARKLAVILHRMLADGTSFAAEKAAVAR

SEQ ID NO: 504669 - protein, 371 aa, unidentified
MSDSSKTVFVGLDVHKDSIVIAAAEAGRAPARVVATVPSEWKAIRKALERLGDPGAVSCCYEAGPTGYGLARALLAAGWDCDVIAPSKVPRKPGERIKTDRRDAVKLAQNHRSGELVAIVVPDEADEAIRDLERARDDAKRAERVARHQLGKFLLRQGRCYDGKTTWNERHLGWVRGQKFAEPAQEHVLADAIAAVETATLRVVQLTDRLREVTADWERMPLVKALQALRGVQFVTAVTVVAEVGDLRRFATAGDFMGSVGLIPTEQTSGEARRRGPISKAGNAHVRRLLVESAWHYRRQPRMSKELRERSAGIAPGVCAIAWKAQSRLHNRLRKLLGRGKHPAEAVTAVARELAGFIWAIGQAEPLLSAS

SEQ ID NO: 504670 - protein, 351 aa, unidentified
MRFVGIDVGAERHTVAIVDESGVVILKATAFTEDSAGYGRLLELLGTATDCLVAMEATGHYWRNLYAALVTAGFAVALINPLRTSRFAEEELQRTKTDAIDALGIARFAAQKRPTITQLPEAALQELRELVRLKGQVLQQLGDRVRQLHRAVDLVFPEFTRHVRTLDSELATAILARYPTAAALRTVSARKLARLCYDGSHHVGEARARALIVAARQSVGAHHGEPYQLQVRYACEDIDLLRRRLRALEKDIEQRLEQIEVGKLLTTIDGIGPQTAACIIAEVGDPARFHSSRALASYVGVVPRLHHSGKRRFSTSAKVPLGNARLRRALWMPALTAVQHNPGGAVVPTAR

SEQ ID NO: 504671 - protein, 350 aa, unidentified
MPQRNMPRPAAVYGIDIGKNIFHVVGLGSDGVPVQKVRFRRDTLLQFFERAAPAIVGMESCAGSQWIARKIQALGHKVRLIPAQFVKPYVKSNKTDIIDAEAIAEAATRPTMRFAALKSEEQADLQALHRVRDQMIGTRTRLINQMRAFCLEYGIALRQGAGLFKFDLPQVLEDQSNDLSSAMRKLLADLFSDLRQLEQRIGDVTREIEAVASREDVARRLMTIPGIGALGATALLAAVGSGKQFHKARDLAAWLGLVPREYSTGGKQKLLGISKRGNRYVRKLLVHGARSCFRHLDRTKDRLGNWLDGLQARMHPNKAVVALAAKMARIVWVVLTKPGALYERRDPAFT

SEQ ID NO: 504672 - protein, 447 aa, unidentified
MLQEGMKAATWRELETNGKFTKNDKLTFISDDMLIIGCDIGSETHYVRAIDSRGRELSQDAFPFSNCSEGFQSAKAWALELAAANDKHQIVLGLEPTGHYWFCLAAWMVSNDISVVQVNPYAVKQTKELEDNSQRKDDRKDPKLIANLVKDGNYGMPYLPEGLYADLRRLSMLRDQLTEDRIRNINRLHREMKIYFPEYRDAFGKLDGAFTLEALKAAPFPEDIVRLGVDGLKDIWHRAKLRGRGYSKADQIVQYAKESIGLEHGRAGGRKAVKIFAEQIESLSEALEEIEAELHQKCREIPYAENILEIRGIGENILAGILAEMGDITRFDDASEIQKLSGLGLVACSSGKHKGETKISHRGRKRLRYWLFQAAKSAVSHGEEFKELHAHYTTRKDNPLKKMQSLIVIACKLLRIIFTLLRTGCRYDPMKMLRDIKRPERAAAQAA

SEQ ID NO: 504673 - protein, 342 aa, unidentified
MDHFAGLDVSVKDTSVCVVDDAGKIVREVKVASEPNALLAALKNPVYHFKRIGLEAGPLSQWLFSALAEAELPVVCVETRHMQAVLKAQINKTDRNDARGIAQMMRVGLYRPVHVKTLRSQKLRMLLTHRKLLQSKAIAIENDLRGTLRNFGLKVGMVGKVKFEARIKELVENLPDLAALVEPLLIVRRVLREQIVILHRRLLAIVRDDEVCRRLMTTPGVGPVVALTYRATVDVPARFRKSKAVGAVFGLTCSKYQSGEIDRSGRISRCGDEMMRVMLYQAAQSMLRSKKWSWLKAWAMQIARRRGMKKAIVALARRLAVILHRIWVDGTEFRWTREQAAA

SEQ ID NO: 504674 - protein, 368 aa, unidentified
MTHGTRLVGLDAAGVAARAGFDASEAAERLPIVMGLDQHRVQVTAEWIDLASGEVSRGRVAPADRAAVRRFLGRFAGRELEVALEATTGWRFVVDELARIGAGAHLAEPAETSGLRGPKKRPKTDWADARHLRELLLIGRLPESWIPPVHILDLRARVRCRHTLSHQRTEWQQRIQSVLYHHGCPHKRDLMTAAGREWLAAQPLSATAREQVTVALQMIDAFDIQLAPLTCELRDYARRQTGCKALIAAHYGIGALCAVTIIAELGHASRFANSRDAVRYGGLDITVKQSDRHRAPGRLSRQGPPALRWALYEAAQQARHPRSPDRDYYLQLAQRIGGNRACLALARKLLKRCYHTLKDLGEDALAPA

SEQ ID NO: 504675 - protein, 340 aa, unidentified
MKLYAAIDLHSNNSVLVLIDEQDRVVYQKRLPNELALILMELSVYRCEVEGIVVESTYNWYWLVDGLMAEGYKVHLANTTAIQQYDGLKYTDDHSDARWLAHLLRLGILAQGHIYPRAERPVRDLLRKRSQLVRQRTTNLLSIQNLMTRNTGSSLSAKEVKGLDVQQIEELLPNSDLALAVKANLAVMMSADEQVKLLEQTVLQRVQLRPQFRFLKTAPGIGEILALTIMLETGEIGRFPTVGNYASYCRCVGSQKISNDKKKGKGNTKNGNKYLAWAYVEAAHFAIQHHSRIKSFYQRKQAKSKSIVALKAIAHKLCRACYYIMRDQVAFDITKAFGPK

SEQ ID NO: 504676 - protein, 354 aa, unidentified
MRRPKGKLIAGLDLHGNNVMIGVIDQSGKRLTHRKLDCDLKQVTGFLEPFKAQLQSMAVESTFNWYWLVDGLRAAGYPIDLANPAKIEQCSGIKHADDKDDAFHLADLQRLNILPKAHIYDPELRPVRDLLRRRVGLVHQRTALLLSFKSLYTRTTGQRLEQSQAKKLEPEEAAQLFTHRANQLIAEVQTEHIQALDQSIHRVEKMVLGCAQKIPMYEKLLTIPGIGRILAMTITMEVGDIGRFKTDGDFASYCRMVDAQRLSNGKQKAENNAKCGNKYLCWTFIEGANFARRYDLQCRCWFDRKAAKTNSILATKALGCKLSKAAWHVMAKRCEFDPNRMFGPLTNKKMKPKA

SEQ ID NO: 504677 - protein, 411 aa, unidentified
MEQNGVVDESTRFVGLDVHRRYATVAAVDSKQQVVLTARRIDFNDFDEWVRKHLRRTDVVTLEATSNAWHLYDMLVPLVASVTVANPIQVALIAKARVKTDPRDALTLARLLAVGMLPSVWVPPVEVRELRALGGHRRRLIKQRTQARNRLRAVLFTHNLFPPAGEAFGPANRPWWEGLDLPASEKLRVRHDLSILDCLEPLVKGVDAELVRQSSLAPWAEQTAFLVQLPGIGVHSAMQLLAAIGDIERFDGPHKLVGYAGLGARVHSSGEEHYGGRITKQGRRDIRTTMVESAWVAVESHTYWKALFERLAVRVGRPKAIVAIARKLLVVVWHVLAKQVADREAVAEQVAGKFLEWSWKLGRVNRDGLTSGAFIRRELCRLQLGDKVTAISRGKRKFPIPLSEHADQAVG

SEQ ID NO: 504678 - protein, 350 aa, unidentified
MLIIGCDYHPGFQQIAFVDTETGECGEWRLAHREEAEQFYRELKQRNLPVRVGMEASGHSRWFERLLRELQFELWIGDAAEIRTKRVRKQKTDRQDAQLLLRLMIEERFPRIWVPDAANRDLRQLLWHRHRLVQMRTRVMNQLHVVALNEGLRRKKALWRPAGRNELESLKLAPWASRRRQDLLDLLDQLTPKIQDLTRQLEQEVEKRPVTRRLMTHPGVGPLTALAYELVIGTPERFHCGKQIASYVGLVPSEESSGDRRRLGHISKQGNSLLRYLLVEAAQVTVRSQPQWRSKFFHLALRRGRKIAKVAMARKLAVHLYWMWRQGLDYGHLQKLGSHAGEPGHRHGGE

SEQ ID NO: 504679 - protein, 366 aa, unidentified
MTTAVLAREVLGGVDTHARSHHGAVIDAETGKLLGDQDFPATGAGYRQLLGWLRSFGSVRTVGVEGTGSYGAGLLRYLTGQGVAVVEVARPNRQQRRLHGKSDPIDAINAARAVLAETATAEPKPRDGALEAIRLIRTTRRSAVKARRAAIAQIYAVLFGAPEELRTKLAGFNRAAPVQRCARLRPDPAGSLADPGVVAKAMLRRLARRIHDLDAEIAEADAQLADLLQATAPTLLQVFGAGTEIAGQIVTTAGENPHRLHSEAALARLCGVAPIPASSGTTTRHRLPRGGDRAANSAIHLIVINRLRWHPPTQAYAARRTTEGKTKKEIIRCLKRAVVRELYTALKTDLPNPKPGAAARTGDRLG

SEQ ID NO: 504680 - protein, 312 aa, unidentified
MHTTTPDPIEYVAIDVSKATLQVQNENCSLVVGNDPPGHRKLLKHLKCSKNPLVVFEASGGYERGLSAFLAKSSIPMAMVNPARVRDYARSEGVRAKTDPIDGRMILAFAKSKAVKAMTPPSEASVKLSALLDRRGHLVEQLAREKNRLQNSEAFIHGSIRKMIRILEKEILSLEKLIEGFVLADKELQPRSQIIQSVQGVGKVTAWTLLAFLTEMEHLNRNRLVALAGIAPFNRDSGKFSGKRSIIGGRAKVRKCLYMSAHTAASCNPVIAAYVQGLRDRGKPYKCAIVAAMRKLLIHIQSLLKNAHLQPA

SEQ ID NO: 504681 - protein, 400 aa, unidentified
MNPVVGLDVAKGESQVQAFLDQSKPYGKSFSMKHIKEELDHFLEFLKEIEEVTGQMPMVILESTGHYHSPVIQYLEDQGILYILLNPIISYQAKKSSLRKVKTDAIDAYQLCVLYYKEDLEPHKIRGIQLLDLRNLSRQQEIVTNMYVEAKLQFHTILDQVFPEYRKVFGDLYSKVSLLMLKEYPTSEAVLTAGESRLTESVIEFCSSRSGEWAWAKAKKIMDSASRNPFQKSVYESHVINLRMYIELLFHYQGHLSDLEDRIVALANELEEYKIIQSIPGIGEKIAATIISEIGEIDRFNHPKKLVAFAGVDPSVHSSGKFTATINRITKRGSSRLRHSLYLAVLCGIRSSRNKKLKAFFDKKKSEGKPAKVAIVACMNKLLHWVYALLKRKEAFLDLS

SEQ ID NO: 504682 - protein, 337 aa, unidentified
MDNFYFIGVDVSKKKLDFCVLFEGKVLREEQVSNHQQAVARLIGELKNDLEMDNEQFLICAEHTGQYTFPLVCACKSVECKLWLENPSQIKYSSGMQRGKNDKVDAKRIAIYASRFGDKVKYYDRPTEEIERLKQLERERALYVTDLAKYKGQMYDQKDFMPAALYRKKTKRMKGLIQELQAAIDAITAEMEKIIGSTEVLARQMELLMSIDGVGKVVALNVIIETEAFSRFDNPRKFCCHAGVAPFSYTSGSSQHSKNKVSHRANKNIKKLLHMAAVSVTHRKEGELKAYYMRKVEEGKNKMSVINALRAKIVARMFAVIKRNEVYTPIYLSLIHI

SEQ ID NO: 504683 - protein, 334 aa, unidentified
MSKKVIGIDVGKKDLYLAHKYFTTTGKVKVKRKKFSNNLKGYKALIEWSKNIAKKEGSKSLHFIMEATGVYYEGIAYFLFEKGFAVSVINPSYIKSFANSSGVRTKTDQKDALVLVEYGEAMKPELWSPPAEEYRVLLNLCRAISSLKNRRDAVANRIESLKSSRVIAQAVLEEEERLFNEINKSIKRLEKQIREHVNKYPSLKKETKLLMSINGVGWNTAVLMVAIMEGGRRFKSAKEAAAYLGLSVQEYTSGTSVKKRSKLSKKGAKDIRKALYFPAITAVRCNADVKALYDRLLKRGKLKMIAIGAAMRKLVHICFGVLKNKTAFQPQTIG

SEQ ID NO: 504684 - protein, 322 aa, unidentified
MFLGIDVSKNTLDVALLNEGHKPRHKVFANDEAGHTQLLAWLQQHCGQAIHVCLEATGTWATPVAQALNAAGHHVSLVNPAQIHAFGRSGLKRTKTDKADALLIARFCQIHQPPSWTPLAPEIQHLQELVRRLEHLEEMRVMEENRLSSGGVDGLVRESLDEHIAYLTQQIEKTRRQIKDHIDQNPNLKNQARLLESIPGIGAATAALLLAELGDIKQFGSARQVAAFAGLVPRIRESGTSVRGRSRLSKVGSSRLRKSLYFPAITALRFNPLIKAFSLRLSAQGKSKMLIIGAAMRKLLHLAYGVLKSQRPFDPNFCIQNP

SEQ ID NO: 504685 - protein, 418 aa, unidentified
MELIYDRCAGLDVHKKTVTACRIYPGSSGHTTKDIRTFTTMTPDLINLSDWLAQVDITHVAMESTGEFWKPVFNILEGSFDVILVNAQHVKTVPGRKTDVSDAEWLAGLLQCGLLRASFIPPQAQRDLRDLTRYRTNLVQERAMVVQWLHKVLESANIKLAAVATDVVGVSGRAMLQQIVAGSTDPATMADLAKGRMREKRAALEQALTGRVRPHHRTLIADHLTHIDFLDERIEFMTQEIQKHMDEHFPDDDEALRLLDTIPGVDRKTAELILAEVGSDMSRFPSADHLASWAGLAPGNNESAGKKRSGKVRKGDRWLRSGLIQAAHAAARKSACYLASQYHRLAARRGKKKAAVAVAHSILIDVYYILSRREPYRDLGPNYFDERKKEATVQRLTHRLEKLGYTVSLKLTPAPLPA

SEQ ID NO: 504686 - protein, 376 aa, unidentified
MREKLRFLGMDVHAETIAVAVAEPDGEVRSLGTIANREDSVRKFIKKLGSAEQLRVCYEAGPTGFVLYWQLAQLGVECAVVAPSLVPKKPGDRVKTDRRDALKLARSHRSGDLTAVWVPDEASEALRDLVRQREAAKQDQLRARHRLTKFLLRTGQRPPMGLKAWSERYFRWLAQVRYAQPAQQLTLRDCMNEFEHMTARVKRLEEAIFEVVKLAPQPMQEVIRALQALRGVAHISAVTVVAELGNISARFESARKLMGYCGVFPSEDSSGKRVRKGAITKAGNAHLRRIVVESAWCYRHWPRVGEKLRKRQQGIPAEIIEIAWKAQNRLYKRYAKLIAAGKDQRKVATAVGRELLGFIWAIAVKAEQVFQQPIAA

SEQ ID NO: 504687 - protein, 369 aa, unidentified
MHRQEKQLFLSIELSKREWKLCFGDGKQERQVTIDAGRVEWLLKEVARAKAKFGLPADAPVASCYEAGRDGFWLDRELRRNGIDNIIVDPASIEVPRRARRRKTDRLDAVRLLRLLLRARLWGETRVFSVVAVPSEEQEARMRIGRNRERLVKERTGHRARIRSLLALHGIVVKNQRLSRVEVDKLRGGNGRALPPEAAAELRREQERLKLVEKQVRELEAQQIEAIGRGGSAADRKAGDLCRLKGIGPQGGWVLGHEVFGWRQFRNRKQVGSFAGLTGTPYDSGETLREQGISKAGSRRVRAAMIEMAWNWVRFQPGSALAEWFMENYGSGASRSRRKGIVALARKLLVALWKYVEQGTTPEGALFKA

SEQ ID NO: 504688 - protein, 401 aa, unidentified
MKRLSGGIDVGSESHHIIILDEEDNFLYNQKVSHQLSEFTESIKQFKQIEKQEGGKISFALEGKNGYSAPLDKILLNQGFTLYNVDNFKLKRFREAFAGEWRDDERDALMLSKMLKLKEHINSPREKVFIKIEKPSLVTESLKLLSRHQQTLIDEKVRLTNRLGKKLLEVCPQILKLGKLKNKKIIAVLAKYPDFSKYKRITLCSLLKIRGIGKKGAFFLLKRLNNIEYMPGLTDIYQTIILSYAKRILELQKEIEDLDKKLDEIGEESKEVKHLKTIPGVATKLASRLIGEIGDINCFPSEKQLAVYCGVACVDNNSGKVTKAHAVYKANKICKQTLITMAGGSIRFSFQCRDYYLKKRAEGKSHNHTLRCLARQLIKVIHRMLTEDRDYIVRKELRKVA

SEQ ID NO: 504689 - protein, 342 aa, unidentified
MQVTTYGLDLAKRVMQLHWVNLETGEIHRKQLKRRALLEFFANRQPGIVAMEACGSAHYWGRELRKLGHEVRLIAAQFVRPFVKTNKNDAADAAAIWEAVQRPDMRFVAVKSEEQQSVLSLHRMREQLIKMRTMQVNQIRGLLYEFGADLPQGRQRGLKEVPDALADLEKSISPMLRDTVRQQLKRLEEMDKDIADIEKRLTLWKKGQEAVTRLMAIPGVGLLTATAIIATVGDMKSFRSGREFAAFLGLVPRQSGTGGKVRLLGISKRGDTYLRTLLTHGARAVVNFQIKNRNPWIDKLLSRRPHNVVVVAQANKMARTIWALLVKNTEYVANHARNAAAL

SEQ ID NO: 504690 - protein, 386 aa, unidentified
MQKLNDLSRSLNLLEPDGTLIAVIEMSQSSWLVAGIVPGVERQPLKKLKVDEGTLLKLLHRWREEAEKAGRRIKRICVALEAGRDGFWLARWLRARDIEAHVIHASSVAVSREHRRAKTDRLDTELLKRAFLGWLRGERDHCKMVAIPTIKDEDAKRPNRERESLVGEQNRIINRMKATLIRLGIRGFNPKLKKAAERLEGLRTAEGEPIPPNTLAELHRDMVRRRLVSDQIRQIEDARLERLKQAPGDGPHAMVRLLARVIGVGIETADMLVQEVLSRNMRDRRAVARYAGLTGSPDESGTKRREKGLARSGNARVRRGMIQLAWRFLMFQKDSALAQWFRSRTENAPGTRKPMIVALARKLLIALWRLVQEGVVPEGIVLRPAS

SEQ ID NO: 504691 - protein, 316 aa, unidentified
MTKTITSAGIDTSKARLDIAIHGRGEHWQVDNSPPGWRQLARILDEARVSRIGIEASGGYERGVVEHLREVGLTVLVLQPMQVKAYARVRLRRAKNDKLDAALIAACAAMIEAPTIGPDQRLAQLARLLTFVEQIDSDIARLKTRLEHIDEPRLRRMVLGDITRLDARRSAELKRIIHALGMHEDLARRFDLVLSIPGIGERTAVTIVVRLPELGRLNREQIAALAGLAPFDDDSGTRQGQRRTVGGRGQLRRALYNAALPASHRWNQALMRLYASLRARGKLHKVALVACARKLLIYANTVVQRGTPWIARNAAT

SEQ ID NO: 504692 - protein, 417 aa, unidentified
MGKRRNRVCGADVHKDLIVATIQSADGTEFQEKFGTTYSELERFRDWLITNNCEQVAFEATGVYWFPVYDALSPSIDTIVANPWMIKGIPGNKSDASDSRWIAENCLDGKIKRSRIFSKEDRNLRTMTRARSGYTKTRTQLRNRIHKYLALCGIKLSSCISDIFGKSGRHILDGLVEVKDIDEILDSIPSGKVKKKRDLIKAALGNGLDDVSRMLVKDTLELLDHLEKKMEKTSLEILSRLQKRAKDLAIVMSVPGIGFTSGSIILAEIGDYRDFHTPEQLAKWCGLAPGLNESAGKKKPCGITKQGSKSLRTVLVEIAQVVAKMSNNKFSRFFHRLRARKNYNVAITALARKLITIIYHLLINQELYQENNCNTATSKPVKKDLLYLSKEERLKDGVAAIVDAFYHLKNRYSEGGG

SEQ ID NO: 504693 - protein, 465 aa, unidentified
MNSIGRTAEAQEVRKQTTRSMSGLDIIHPDAAGLDLHKEVIVACAPMAAGDTRHPVRQFGTYTSDLLELAQWLKQHGVTTVAMEATGVFWLPVIGILRAEGLDVLLVNAREVRSVKGRPKTDKLDCEWIRRLHACGLLRGSFIPDAETERLKSLWRHRLNMEEEDARAIQRMQKAFQIMNIRLDIAVTDLVGETGLRIIEAILAGERDPRKLAALRDRRVAKSEREIADALTGNFKEEHLFILRENLAHHRFLQERIRETDKRLGAQMETMQKKRAAAELPAATKPDRSRHGETLTRERLYELLGVDLTQVDGVGVLTISSFLVNAGRDMAPWMTENHFASWLGLSPNVKQSAGKTRSGPTRKTASALAHSFRMAAMTISRLDSWLGAYCRRLKARIGAPKAITATARKLAIIFYRAVKEGGVVKRLTAEDYEQANRGRILKTLRQRAARLGFELTMKSTVPVEA

SEQ ID NO: 504694 - protein, 465 aa, unidentified
MKSKTPKSKKKKQKISVEQGWEAINPHAAGIDIGAKEHFACVPANATPKNVRSFGTFTADLGALADWFKECGVTSVAMEATGVYWIPVFQILEERGLAVILVNARQTKNVAGRKSDVQDCQWIQRLHTYGLLQGSFRPEDPYCVLRTYLRYRDELVSARSTQCQHMQKALQQMNVQLVQVLSDITGVSGMAIIQAILEGERDPVKLANMVDRRVRATPVQIQKALGGDYRAEHLFVLQQAFSLYGTYEEKINACDEQIVRETATLSDKVDPQLRPLPPRKEGRPASKDKMQGQDMREVLYRKFGADLTAIEGIGVTTALVMLTEVGPNVTGFKTEKHFCSWLGLCPDNRISGGKVLSSHTRRVINRASDALRMAAVTLERSQSALGGFYRRMKGRLGAAEAITATAHKLARIIYRLIKHGEAYVRQGMEDYEKKFRERKLHALRKTAMSMGFNLIAKQELASHVS

SEQ ID NO: 504695 - protein, 482 aa, unidentified
MKKRNVFQNQSQEILSLFEKTKDRSKVMCIPIDYAKKDHLAMLCDGNGRIIRKPFSVKNSPEGKDYLVDQVKKSCLHHGISLQHIVFGGEDCGSYTDNFISTLRSENWLVAGVNAHDAKTQRENVQASTDRLDLLGICKMIISCRGNCSPAQSGAYLDLRTLVRQRRKMVNMTTGVKNRIHTFVDQIFPGFLNEKNSGILPFSKCSLLLMEDRFSVHQIIRRKRSTLTKFLTRCAIHQPDNCAKKLQQYAAQVLKPPENHLATLQISLKQQAKLFNCLQESTEQLEKEVAESLAQTQGAFLTSIRGIGIILAAGVCAEIGNPNKQKSLSNLVSYSGIIPRVKQTGGVQGKPQTKKVGKRCNRILKDYVVQSASHIGLHGPEDLMLDYKRRDTQGQHADFGMGRKYLRMAMGLMRTSQTYLPKSLRGKKSNMKGRGQYYLMTWPKLREKWRNVNALDIAFDKDMPLGQWRNMIQELYGIELKL

SEQ ID NO: 504696 - protein, 370 aa, unidentified
MKQYDEAFIGIDTAKNKHAVAIADAGREGEIRYLGEIDSAPATVGRIIRKLAGRYKRLHFCYEAGPTGYGLYRQVRALGHDCIVVAPSLVPKRPGERVKTNRRDAVTLARLLRAGDLTAVWVPDAVHEAVRDLVRARAAASQDLRRKRQQLLSFLLRHGRIYNGRKHWTRAHLRWLAQQQFAHPTQQIVFQDAVDTIEDAATRLRRLDEQVAAIVPSWSMAPVVEAYQAMRGVSFLVAVTFVAEIGDLQRFDNPRQLMAFLGLVPSERSTGERVRRAGLTLAGNKRARRVLVEGAWSYRHQARVSQTLQARLEGLPKAVREIAWKAQIRLCARYRRLTAAGKKRPVVIAAIAREMAAFLWAIAHHVPPAA

SEQ ID NO: 504697 - protein, 387 aa, unidentified
MIYYVGIDISKYKHDFCIISNTGEVIVENSSFENNKKGFQSLLDQLKPYNKSDVQIAFEATGHYSKNLELFLIDQGYSFMKMNPLVIHQFLKARSLRRTKTDKADSLTIANYLMSVPYKPNSDLLYNIFTLKSLCRSREQLIKERSKYQVLLTNELDLTFPELKQFLGNRISATLLFILEKYTNTEHIFLMRDYDSIKNISRGKFSYAKFAKLKELAKNSVGYHDKNTDLLISTYVSIIKTFNDKIDPIEKQISTIIKELNPRMLTIPGLGEISAATILSEYGDISNFSSPNKMLAFAGLEPSIIQSGTIENNGTMVKHGSGHLRYSIMNTAMIILKYSPTFYDYYLKKRSEGKCHRVALSHVCKKLLRVIFTLEKNNINFNPSLLK

SEQ ID NO: 504698 - protein, 346 aa, unidentified
MMIIGCDFHPSWQQVSWLDTETGETGEQKLVHASGDAKSFYARLPRPVLIGMEATGNSQWFIEVVQDLGHEIWIGDAAQIRASYVRKQKTDKRDAAHILKLVVEGRFPRLWTPDREQRDLRQLVLHRHKLVEIRSRVKNELQHLALNRGMQRKAKLWSQAGQKLLRELPLKPWAACRREDLLGLLEMLHQQIGKLDEAVQQAAEEHPQAKLLMTQPGVGPNTALAFVLTMGDVSRFPRGKQVASYLGLIPREESSGGRQKLGAITKQGNQLVRSLLVEAAQIAVRFDPGLRKQYRHRCHQKPKGVAKVATARKLAVRLYWMLRTEKPYPEIVRIESSPRVALVGAS

SEQ ID NO: 504699 - protein, 392 aa, unidentified
MVCVGIDVAKDKHDCFILNSEGEVLADVFTIANNREGFETLMQRIRSCTTPTDKIRVGLEATGHYSYNILGFLLDKGMPTFVLNPLHTNLYRKSLSLRQTKTDRVDARTIASMLMSDVDLKSYTDTAYHNEELKSLTRYRFDKVRERAKLKQSVSRLVVILFPELEKLVPTLHMPSVYAMLSEFPGAKQIAGANLTHFKTVLSDASKGRYNRDKAVEIRDAARRSIGSVMPAKSLELQHTIRLIHELDKEIEEVEEQIRAMMDTIQSPITTIPGIGVRMGAMILAEIGDFSRFDSPDKLLAYAGLSPSTYQSGKLNATGAYAHMEKRGSRYLRYALYNATKYVCLWEPSFAAYLKRKRAEGKHYNVAISHAAKKLVRLIFALEKSSRAFQPV

SEQ ID NO: 504700 - protein, 392 aa, unidentified
MRYAGIDIASEVHVVAIVDETCQVLVKPARFAEDRAGHGRLLELLGESQDLLVAMEATGHYWRNLFATLVTRGYRVALLNPLRTRRFAEEDLERTKTDAVDALQIASFSAQKRPGVTQLPDAATDELREMVRLRDRLVQEFGDHLRDLHRLVDLGFPEFTRYVRSLDSQLAAAILHEYPTARAFEGVSLKRLSKLCYDGRHRVGDELAKALLDAAKGSVGAHHGQAYRVQVRYACEDLDLLRRRLRDIDQDIESKLSAHEVGSLLTTIDGIGTQTAARLIAELGDPARFRDVKALAAYVGVVPATNQSGKRTSNRAGHSHIGHAALRAALWMPTMTAVRKNTWLRRYYEHLRSKGKLPKVALLASMHKLLRAVYSVAKHRKPFVDHFQGVTT

SEQ ID NO: 504701 - protein, 334 aa, unidentified
MKQVTQVGVDVDSEELVCAMQRAEQRQPLATFANTAAGHKKFVRWATKGGHPARVCLEATGIYSLEFALALHQAKNVEVMVVNPRAIKDFGRACMQRAKTDAVDAGGILDYLDRMPFVAWQPPAPEVLELQAINRRIVQLNTELTREKNRRHASEFAGASADAIANDIEVNIHHLERRIERMHDSGLKLVRGVPALATKLAHLVSTKGIAEASAMRLLGELLVLPDDLAAPQWVAHAGLDPRPYDSGTSVHRPRRISKVGNRHLRAALYMPALVAIQHEPNVKAFYDKLIAAGKKPMQAVVAVMRKLLHAIWGMLKHDQDFDGDKFFKIAKENT

SEQ ID NO: 504702 - protein, 341 aa, unidentified
MKHPDMKKSYFLGIDVAKNSCKFALLKANGSCLWSGQFENNSSSIQRWLALLGTRKLDRRKILFGFEATGVYSHALLLHLQQLELAACQLNPAQVKYFGVSVNRRTKSDPADARLIAYFLLERQPVATRTLNPIEHQLKVLVHEREALSIDLVRERNRAEKHALSPFKAPPMLAEQRAERLLKLKTWIKDLDAALKELIDSDPVLCAKAQLLCSIPGIAFCTAAKILSQVAGKEFQSAHQLALYAGLTPKENQSGLLKGKTTLCKIGNAFLRKALFMPATVATRCCQPIRLWAQQIQSRRPELSKLAIRCAVMHKLIRIIFGVLKNQTPFNPNFGSFSHAA

SEQ ID NO: 504703 - protein, 423 aa, unidentified
MEVLYPKCAGLDVHKDTVVACVRLASEQEVVRHVATYGTTTSALLDLAEWLSSHGVTHVAMEATGVYWKPVWHALSGSALPAELTDGEVRDDAFHLVLLNAMHIKKVPGRKTDVSDAEWIGELLAHGLVRGSFVPPTPIQDLRALTRTRKQLTRERVQHVQRIQKTLEDANIKLASVVSDITGKSARAIVDALANGETDPEKLAALVTTKLRASRETVLEVLRGNVRRPHQFLLRLHLDQVAAIERAIESIDAEVGERLEPFRNATDLLVTMPGIGDVVAQSLVSEIGTDMSRFPSASHLVSWAALCPGNDQSAGKHRSRRTRKGPVWIKTMLVQAAWAAVRRRDTYLNALFHRIKRRGGAKKAIVAVASSMLRAAYYMLRDGTPYNDLGPDHFTTVDREKIAKRLLRKLADLGVEVELKLAS

SEQ ID NO: 504704 - protein, 366 aa, unidentified
MCVGLDTHKAKIAVAVAEPGRSGEVRFRGEIANRPEAVRQLLERLAEKHGRLRVCYEAGPCGYGLHRQITALGHDCTVVAPSLIPRKPGDRVKTNRRDALTLARLHRAGELTPVWIPDPTHEAMRDLVRARTAAMEAVRRARQQLQGFLLRHGRVFTGRRAWSPAHRRWLVGLRFEHPAQQVVLQEQLDVIDEAERRRDRLEAQIRELVPGWSLAPVVAALQAMRGVAFLSAVVLAAEVGDFRRFANPRQLMAWLGLVPSEHSSGSTVERGGITKAGNGRARRVLVEGAWSYRFPARVTSPIQARLEGVPDEVRAIAWKAQLRLCARYRRLVAAGKNANLVTAAVAREMAAFAWAIARQVRPAAAA

SEQ ID NO: 504705 - protein, 354 aa, unidentified
MKQQAIQYLALDVHQATVVATLRDDQGKVVMRATVATEAKAILTLVRSAGPRVHVACEEGTQAQWLHDLLIDHAERVIVCNVRGRSETSNKSDRIDADGLSELLRLGGLKSVFHGAPEILTLKELVRNYNALVEDSTRVMQRIKAIFRARAIRTPGVSVYRVSQRKEWLAKLERGAQVRAATLLIQLDVLLELRPKAKAAMIATARRQPGWKILRSIPFFGPVRVAEILAIMRTPFRFRTKRNLWPYAGLAVVTRSSADAEFKNGELRRSKKAPRTRGLNRNHNPILKSVFKGAATAATATPGPLRDCYEASLARGVKDDMARVTLARKIAAVALRLWKKGELWDPTKLTMQAK

SEQ ID NO: 504706 - protein, 341 aa, unidentified
MKNLFIGIDFSKEKLDVAVITAVGLSETARRECYEFKNSVSGFRQLVKWVERNSNGIATSSWLFSGENTGDYSKPLCNFLYGKGYDIWLENAKSIKDASGIRRLKSDRADALMIAEYAMRNYDKAFMYEPLSASLSQLRELFLYRQMVIRHRCSFQVRRGEKRLAMEKSPVKTIISQSGRHIVSELNKEIEKIDKRIAELIDSEEELKEIYHIVTSVPGIGCQNAVCLMVYTDNFRRFNYDARKIACYYGIAPFGKNSGASVHTDPHVHYLANRQIKAMLTQAALAAINHNPVLSQYYLRLVERGKKKQVAMNNVKNKLIHLVTAMVRNRQVFSPEYKISA

SEQ ID NO: 504707 - protein, 375 aa, unidentified
MGQRIMVGCDLHDRSILLRVARGREAARTVGVRNTAEGRRAMIENLKAAAATDAGQVILAYEASGQGFGLYDELTAAGIEAHVLAPTKLVRSPKQRRNKTDIRDANAMLDLLRAHVLAGNELPDVWVPDFATRDARELVRTRIDAATKITRLKTQVQCLLKRNRLERPQAVGVGWTAAFRRWLADLAKGDGDATRATARPGMRAALGSLLRQLAFCEQETKQLDLELVGLAHSPRYARAVAALVGLPGVGVLTALVFLTELGDPTRFANRRALGSYLGLAPTCFESGEVNDRKGHITSQGPSRVRRALCQAAWAYMRLDAGVDADAYARIVERNPKHKKIAVVAVMRRLAVKMWHRACDVWPQNGEQRSPLAASA

SEQ ID NO: 504708 - protein, 286 aa, unidentified
MTDDTIGIDISKATLDIHRLSDGKTMSFSNCPAGFKALSRFCAKTAVARVVYEATGAYHSGLERALGAHLPLVKVNPLQARRFAQAQGLRAKTDAVDAKMLADMGNAFALEPDEPAAEIQHDLKELRSFRSGLIKDRTGIMSRMKTQTLSITRRQSKARLAQVDKQIAEINAEIERLINSSDTLAHSMKILRSIPGVGAICAATILIEMPEIGSMDRKQVASLTGLAPMTRQSGQWRGKSFIQGGRKIVRDALYMPALVAMRHNPDFKAKYQALIKADRNWVTKGA

SEQ ID NO: 504709 - protein, 410 aa, unidentified
MEIVREYVSGLDVHKKSVVAAVITPQGRRVKTFSTTTRALLELVDWLKAEGVRHVAMESTGIYWRPIFNLLEQTEMEVLVVNAGHMKQVPGRKTDVKDAEWIAELLQYGLLKGSFVPHRGQRELRDLLRYRRTLIEQRADEVKRVQKLLEGANIKLANVAADVLGVSGRAMLEGLIEGQRGTAELAHLARGRMKSKQRQLEEALEGSFGPHQRWMLRHHLDLIDFHDGKLKELDAEVAERMRPFLAALNHIDAIPGLGQQTAQEIVGEIGTDMSQFPTDRQIASWAKLSPGSNESGGKKRPGRTGKGGPIRHIMIRAALNVSRNPNSYYGAMYRRLCKRGSKERALVAVAHALLVAIYHMLRDGTVHQDLGANYFDERRREQSARNAVRHLQRLGFRVTIEKEPGQRPAA

SEQ ID NO: 504710 - protein, 398 aa, unidentified
MGLQVLYAPEGHERKEIRTFATTTTSLVALADWLASQQVSHVAMESTGVLWRPVFNILEGQFEVILVNAQHMRAVPGHKTDVKDSEWLADLLRHGLLKASFIPPKPIRDLRDLVRYRKSLVQERNREINRLQKVLETANIKLSSVASDVMGKSGRAMLTAMLAGESSAEVLAAMAKGRLRSKLELLREALEGRVEDTHRTLLRHLLDHLACLEEQIAQLEGQIEQHLVPYEQQLTTILQIPGIGRTVAASILGEIGVDMACFPSDRHISSWAGVAPGNKQSGGKRLKAGSTKGNTHLRAVLSEAVWAISHTHDNYLSAQYHRLARRIGKKRAIVAVSHSLLIIIYHLLRDEQQYQDLGPHFFEQLDHERVRSSAVRRLEALGYHVMLEERNEQQEVSG

SEQ ID NO: 504711 - protein, 352 aa, unidentified
MAATAQSAIAVIGIDIGKNSFHVVGLDGRGAIVLRQKWSRGQVEARFANMSPCLIGMEACVGAHHLSRKLKALGHDARLMPARYVRPYSKGQKNDFRDAEAIAEAVQRPTMKFVVTKTADQLDLQALHRVRERLVSQRTGIINQIRAFLLERGIAVRQGQRFLRVELPRILATPPDVLSPRMVRVIEGLASDWHRLDERIEGLSTEIEELAKRDAGCERLMSIPGIGPIISSAMVAAIGTGDSFSKGRDFAAWLGLVPRQISTGDRTILGKISKRGNRYLRVLFVQAAWVVLVKVKPTKWQGHGLRPWIEAAKKRLHHNVLAIALANKLARIAWSVLAHGRAFETNKLLAAA

SEQ ID NO: 504712 - protein, 313 aa, unidentified
MSQNTMTTIYTGLDIAKLNLQLHLAGRVHDLPNTATGHYRLLKLLAAQPGAHVVCEATGGYERDVVAALHEAKVPVSVLNPARVRHFARTTGQRAKTDDIDAAVLSAYGQALQPKPTAPRTEQEQQLAELIHRRVQVLEILVAQRQQAERLTVPALRRQAQSLIRRLERDLEQIEEQLQALRPQATRLDERVQKLEAITGVGTITALGVLAELPELGTLNRRQAAALAGLVPHPRESGQWHGRRSIGGGRAPVRRALYMAALVAAHSNRQLKEFYQRLRAAGKPAKVALTAVMRKLIVLMNHILKYPNFALQN

SEQ ID NO: 504713 - protein, 417 aa, unidentified
MNDSEHWKQHRAYGALDWASEKHSVIIVDQAGKVIEDFEIEQSALGWKKFREKLQPYGSIPFAIETSQGAAVEQLLEAGMIVYPLNPKSAQAYRERKAPSGVKDDRLDAWSFADALRVDGQDWKALRPEEPLIKELRLLCRDEVSLIEQRTAFISQLRHALAEYYPAALEAFEDWTSVSAWMFLQRFPSPELLALAGKRQWQKFLHSRRLWGSDQGPRRMEIFAHATELSGSPPTVKAKSLLALSLVKMLFVIEKQLAVYRQRIEELFARHPDHDLFGSLPGAGPKIAPRLLSEIGDDRERFDGDARILQCYGGTAPVTKRSGKYRHCHQRWACDKHLRHAIYLFAEKSLSRCVWAQTYYQHHRQKDRSHANALRRLGHRWLKIIHKMWMDRTLYDPELHHRNQLQHGSWIFQLKEC

SEQ ID NO: 504714 - protein, 348 aa, unidentified
MTGSSVAQQIIVGVDTHKDVHVAAAIDAHGRLLGHRSVATSETGCSDLHQWALSLAPRVRYGVEGTGSYGAGLARFLQAQGSSVVEIRGPNRKLRRDRGKSDTIDAEAAARAVLAGTSDITPKAGDDWVEQLRILRIARRSAIQARTQTINQMYAVVVGAPADLRDQLHGLSRHQLITQAARFRVGHVDDVRTVVRWTLRLLAQRHQALTAEIAAIDGVVSPLIRSHAGALLELRGVGPEVAGALLVVAGDNPQRLRSEASFAALCGVTPLPASSGKTQRHRLNRGGDRQGNTALWRIAFTRMNCDPRTRAYVSRRTSEGLSKREILRCLKRYIAREVFQVLPRPALT

SEQ ID NO: 504715 - protein, 337 aa, unidentified
MNKTEPNLVACGVEVSQKTLLVDLEGHGQREFPNQPSGQREMVKWLCSVRGAVRVCLEATGLYGLDAALALDDAGLPVMVANPRAVRHFAQAAMQRSKTDQRDAAVLREFARRMEFEPWRRLSTTALHLLAVARRFRAVVQMQTAEKNRLHAAGISRALPAMLRREVERSVARLEQDRKRLLCMARELVQQDPVLARRHALLLSVCGIGEASALALLAELHPVGQEATARQWVAYAGLDPREHTSGSSVAQKPRISAKGNSNLRRALYMPAVVAARREPHLKAFYERLLGRGKSKRQAQVAVMRKLLHGIFGMFKHDQPFDGSKLFCEQPKWEVVCA

SEQ ID NO: 504716 - protein, 334 aa, unidentified
MLIVGCDIGSENHYIRAIDVRGRELSRGAFEFSNTSEGFENAKAWVLALAAKHDKKQIVLGLEPTDHYWFALAAWMISNGISVVQVNPYAVKQSKEIEDNSQLKDDRKDPKLIANLVKDGNYGMPYLPEKVYADMRRLSMFRDQLTEDRIRNINRLHKELKIYFPEYMDAFGKIDGAFTLEVLKVSAIPSDITALGAEGIKNIWHNEKLRARGYSRANEIVSYAEKSVGLTDGIDAGREAVKWYAEQILKLVACSSGKHKGQTKISHRGRKRLRYWLFQAAKSAVSHADEFKQLHEYYTTRTNNPLKKMQSLVVIACKILRVIYTILKTGTTYY

SEQ ID NO: 504717 - protein, 416 aa, unidentified
MDAMRVCCAGLDVHQAMVVACIVKGPLESKSKVEIREFSTVLSGLLALQDWLSEEGCTDVAMESTGVYWKPINNVLESTCDITLGNARHIKNLPGRKTDINDARWIAELHRSGLIRKSFVAPQAIRELRDLTRYRKKLKGTETSERNRILKILEDANIKISTYMTDVFGVSGRLMLNALINGEVIEAAHLAELAKGRLRIKIPELTQALNGRVTKHHRNIIKKSLDHVIFLEQQIAEIESDMEQYFAPYQNEIKLLDTIPGVGLHVARVILAEIGPDMSVFPSEAHISSWAGLSPGNNVSAGKKKSTRTPKGNEALTTALLEAAWAASKSRTFLGSKFWSMVGRKGKKKAATAIAHKILVIAYHILETGEAYNELGADFLEKRRSISTEELMVRRLTKLGYNIAGIPENRVQAKLA

SEQ ID NO: 504718 - protein, 358 aa, unidentified
MSRYSTVKERTNTQSTSVATYAGIDYAKRFSYITIGDKEGNILLQQQVFNNTHDLEKFFEQFPKLIVAIEACRGYEWLVDWLRERKHTVHVGNVYAIKQIAQTRCKTDKIDSRILMELLSKDFLPTTYQPTVKERNYRELVRWRAQLVRSQTKYKLRVHALLDKENKGISYPFSTAGRASLEQVTLSGQKQKILTESLEVIDFLEKQIHEQEMKIRKLAKSNPDVYRIKSIPGFDVLTAMVFVAEVGDVTRFRNAEQLAAFTGLVPRVYASGGKYNTGRITKTGPRLLRWMLVQSAWAAIRCCPVLRSKYASIMKRRGKKVAIIAIARMLAEIAYHVWIEKTPFDETRLGAGLVRAAV

SEQ ID NO: 504719 - protein, 379 aa, unidentified
MTSMHQAAAAVNSLSAGSTSRVVIGGIDTHKELHVVAVIDTAENVLATHSFSTTRAGYRALIRWVRCFGDVRRIGVEGTGSYGAGITRHLTEAGVEVLEVDRPDRSDRRRKGKDDDLDAISAARAAMHGRRTSTPKSKDGAVESLRVLRVTRNTAVRARRNALQLLRMTIVSAPEELRDQVRNLTRMQLIRTCAAWRPDLTNAADPASATRIALKSLARRILELGDEIATLDELIKPIVTSLAPQLLARVGIGIEIAGQLLVTAGDNRHRMRSEAGFAMLCGVAPLPASSGMTQRHRLINRGGDRQANSALHLAVISRIRMDERTQAYLARKTSEGHSKLEIIRCLKRYLAREIYYLLKPTKPTKPTKPKTPRTLTNTA

SEQ ID NO: 504720 - protein, 325 aa, unidentified
MHYIGIDISKAKLDCCWLRDVDKSKFKTKVFKNVSTDYKALIAWLKGQTKSEASEILIVMEATGVYHENLAYYLYEQGFQVCVVNPARTKEFASSLGNTHKTDTKDSEALALYCQRMRPELWQPEPPEARELKALIARLEALEMDLNRETNRLEKADFSCSSERVIESLHLMIERLREEKDRLEQDIDDHIDQHPQLKKDRELMESIPGVGPVVSRLMLYVLHCRSFTDAGQVAAYLGLVPRIQQSGQWKGRSRLSKQGPAKIRAKLYMAAVSCLQHNPDIRHQFKRLVEKGKSKMQALCAGMRKLVQICFGVVKHQSEYHPQSA

SEQ ID NO: 504721 - protein, 400 aa, unidentified
MISVGIDISKGKSTVCLLKPYGEIVCKPFEVQHTEKDLEDLANLLQKLDGEIKIVMEATGIYHLPILTFLLEKGFFVSVINPLMMKRFSRDNSLRGAKNDRLDSVMIANYGIEKWYKLKKYEVNDRIYAELRLLGRQYYRFMQTHVKHVQELTHLLDYTAPGLKAMFNSWNEHSNRDKLSDFVERFWHFDLITSLSREEFVEQYLLWAKEKKYHQSRSKAEKVYDLASNGIPTLSSHTPSTQMMIQEAINVLRIVNNSLYYILSRMKELAKSLPEYATVRSMGGVGDSLAPRLIAEIGNVKRLRNGHALVALAGIDPPPYESGQFVGTHRRISKRGSPILRKIGFEVMRVLKSHKEPEDNAVYNYILKKEAEGKNKKLSKIAGLNKFLRIYYVRVMEVYQ

SEQ ID NO: 504722 - protein, 430 aa, unidentified
MLETKEKLLGSLTAKPVPARLFRDEKNGKLYRSFYAGMGEYFAVDSEGLEGLEGLDTSAGPLQILNDSVSFENLSQHSKKGACTMKFYTKQHQFYCGIDLHADAMYVCVLDSVGEIVVHKNIPTTPKAFLRLIKPYRERLVVGCECMFSWYWLADLCAAEEIDFVLGHALYMRAIHGGKAKNDKIDSHKIAVLLRGGSFPLAYAYPHKMRATRDLLRRRNHLARKKAELLAHIQNTATQYNLPPLGRIAKPSERDEVPKLFSDPIVRAMVEVDLSVIEHYESLLDTLERHLEKIAVGHDPVNLALLKSIPGVGRILSLVMMYEIEDISRFPRVQDFASYCRLVKPSKESNGKAYGHSGKRIGNAHLRWAFGEAVVLMLKGNKPAQAMVQKLASKYGKGKALAILSHRLGRAVYYMLKNQVPFNQELFLRT

SEQ ID NO: 504723 - protein, 385 aa, unidentified
MAPIRMPEAVIGLDVGKSSHWACVATRDGEVLLSAPVANREDDLDSLFGRFPDALVVVDQSRNIGALALARARAAGMSAAYLPGLAAHGAARLFAGDAKTDERDAMVIAKTALGIPDALLPVGDPGPTIAAARALAAQRNFLTCENTRNKNRLRSILLESCPAFEALVDLSDGPQLRLMASLGGAWSVADAGPRRAAALTRGAARSKIEALVRSTTSSTRPDASVAAAEDRAVKLLARRISENSAEIEAITAEISALLEGDDTYRCLLTVPGIGPKTASELAISIDIEDFPSHDRLASYCGLAPRNRQSGTSISSVTASRQGNKRLKNLLIFSCNCLTRTEGRWGDYYTRCRERGMSHGKALKALARKRLKVIYAVMRDRVPYAA

SEQ ID NO: 504724 - protein, 344 aa, unidentified
MSEVSIIGLDISKHVFHAHGVDGRGRAMFSKRISRGKLLDFFATQPRCTVALEACGGAHHWARQLAQLGHEVRLIPPAYVKPFVRRQKNDAIDAEAICEAAQRPSMRFVAVKSEVQQAAGLVFRTRDLLVRQRTQLINAIRGHLTEYGWIAPKGPSHVAMLADLIDEEEMANSLPGAARAMFRVMLELLTGLSSKIADLDKEIARRAREDEVSRRLMTVPGIGPISATAIAALAPPAETFAKGRDFAAWLGLTPLQRSTGGKQKLGATSKMGERTLRRLLIIGSSAVVKQASKRGAPRGSWLEQMLARKPRMLVTVALANKMARIVWALLVKQETYRAPVAARA

SEQ ID NO: 504725 - protein, 383 aa, unidentified
MTEEQVIIGMDPHKSSNTIAVLTRDETMLTRRRFENSDDGFVEMLQAVTDYPDRVWAVEGANGMGRSVAQRLVAFDETVVDVPAKLATRVRVYSTGHGTKTDAADAVAIARAAIHSPHLRRVLPDDATVAMKLLSDRRKELVGLRTQAMCRLHRLLRELIPGGAPTAISAETAFGLLNDLKPDDPANEMRLEIAIDHIEDVMRLDRKIDDYTRRIVIEVKASNTTLTRIYGVGPLNAALILGEVGDVSRFPSRDHFASYTGTAPIAASSGDHHRHRLNRAGNRTLNHAMHIAAIVQIRYDTPGRSYYLRKVAEGKSKKEAIRCVKRRISDAVWRQLQIDRSDDRTQDDAWPRRASTRGGVPHYRSPDTPRANGRPMQPKPVSV

SEQ ID NO: 504726 - protein, 364 aa, unidentified
MQLYIGLDVHSKKTVYCCQDQDGKVLKRGSVPTSVKGFEQLIAQAQLPMGTIIGLETGTQSNWVSRLLAGMGMSPVVIEAREVRAKARRIGQKSDGRDAFEICDGLRCGIYRSLVYVPDPEVQRLRTILSRRRHFVNKATGQINAAKFLLRSVGLSDQARTLTSEAAWEKLLSNPTLSELRRYLEMHARMWILCTELVAILDLELRQALGPFKEPVALLTSVPGVGPITAATFVAVLGTPHRFPDSSRLASYIGLVPSSYDSGETIRRGRITKRGSSELRTMLCEAAHHTSKPTHPLNPYFRRVCAKSGYRKAVVCVARRLSGILYQMWRNNEVFDETKLNVVRSVKVKQRTCYYELRQQVANL

SEQ ID NO: 504727 - protein, 422 aa, unidentified
MISFAKRERAPRAAACVGVDAGKFAHTLVVRPTGQPDSRPLSFPTTRVGFEQAVAFIHQPVPGAQTATVLVGIEFAGNYGFTLAHYLRELGFAVVSVLPAHTKRWKDVAHNQPLKTDAKDAGTITDLLAQGHFVSFPFLEPAYAALRYLVTGRERLAVLRRGAITQLRALLQVVFPEYETLFPLVSQRTAVTLLRAFPSPPDLLAAPKAKVVRVLRAGSRGHLGAELYERLVAAARSSLGLPGAQVRLRQEIVLTLDRLALFEQQIRALEVELVAALEAVPETPYLLSIPKVAAVTAAVFLGSIGDPRAYDAGAQILRVAGLSLVERSSGVLHGTKRISKRGRPLLRAAAYLFAVRSITHGGLFRADYEALCARNGGQKLKAVVAVMRSGLQLMYSIARDRRRFTVEPPPRRTRPTLEVTPA

SEQ ID NO: 504728 - protein, 386 aa, unidentified
MQVTFGIDVSKSTSTVCELIGESKNELTITNDRPGFIQLLKELSAFSKHPQIIFEATGVYSRRLQAFLEDYDYDYVILNPLKAKKEMDMGLRHNKTDKTDAYHLALIQRLHHHPVKKLQSQTYKQLNSLSRFYDQLTSDLVMAKNRLHQALQSTFPEIETLFCSAKGKNYWQILLHYPHCDLVRKNDKKQIINWLMQLKGVGFKHAQKTADKLITLAYKAYPVVSCDSVEVEQVQYYAHRLLSLSEHREKIIERMVQLAKSLPNHDLENLESIPGFAQTTAVRVLAELGDLRRFSNPNKINAFIGIDPGRYQSGEMDSNLSITKHGNAVARKLLYRAIGQIDNASKTNPCHIADYYESKKLSSQTKGFKKIAIASIHKLRPIVKLS

SEQ ID NO: 504729 - protein, 382 aa, unidentified
MGKRGVARSSVLVTEALAGNVVGSDPHKRTVTTTVLDGRGGVLGTAHHKVSGDGHRAMEAWVRSFGPVVRWGVEGAASWGRHTAMFLCARGYDVRDVCPNRTHERGRARQQGKSDALDAERIARETLAHPLLPLAFKRSRAGEAGADVDHELLTLWHGARRSVLKSRQHLVNEAEFLFDALPETLRRRLPDTTAVRPRLAAAARLTRRKTLDPATTLRLALLREAHAAIVALDGKEREVTRQLRVLVRASGSTLGQLCGLSTRSVAELLVEVGDPRRFTEGGFARFNGTAPLPASTAEGPDEPVRHRWNPGGNRRVNAVLHRMAVTQLRCEPRAQAIFAAARRRGHSKKEARRILKRHLSDVIYRRMIRDQAVLEEPAAGAA

SEQ ID NO: 504730 - protein, 406 aa, unidentified
MEKKEKRYIGLDVHKHYLVALGVDTDLNVVLPMRRVELSNLESWMKKNLTKQDEVVLEMTTNTWQLYDELSEHADTVTVVHPPHVALITRSQVMTDKIAASILARLLAKGLLVGIWVPPQEVRELRGLVAQRQKMTRLATQAKNRLHAVLQRHHLKAPAGNPFAKTNNGWWQALTLGKLEKMNMQSDLETLQFAEQQEVRVEKEMTLIAAEDEKIGRLLQISGFGVITAVTVLAAIGDIARFIEPKKLVGYAGLGARVHDSGLTTRTGKITKAGRRDLRVALVEAAHVAANNHPHWKAELVRLQPRLGYNKAIVAIARKLLITVWYVLQGKSDKYVEPKAVAQKMLKFAYSVGKTNRAGQTAAQFARERLDRLEMGKELINIPWGAKKPIPLPPSKLKGESAVPNK

SEQ ID NO: 504731 - protein, 459 aa, unidentified
MKAFTKFVGLDTHQDTIAVAVSEASGGSARYYGEIANTPKAIAKLVKTLTAKGAVVSFCYEAGPCGYGIYRQLTELGQACMVVAPSLIPTKPGDRVKTDRRDSESLSRLHRAGELTPVWVPAPEQEAMRDLTRAREDMKGLERITKQRLNAFLLRHGRIYDRQKCRWTQAHGRWLEGLKFEHMVQQIVFQEYVDALKQATARVAGLEKEMAKAVQDWSLAPVVEALMALRGVKLITAMTVMAELGDLTRFDTPQQLMAYLGLVPREYSSGHTRRRGGITKTGNGHVRRVLVEAAWGYRFPARKTAHLQRRAEQTSEAVQAIAWKAQKRLCGRYRHLLAAGKLKVQACTAVARELAGFIWAIACEVMNTPQMRPRDAVNPQPCISTMQRTITRQSLGQGTGGRWENPRPFYEALKTLRRPSMLERGSSTTKRGQAVPTRVYQSDPPSLIAARALCQGLTD

SEQ ID NO: 504732 - protein, 339 aa, unidentified
MKNTKYFIGLDVHKEKTSYCVRDRLGNILTEAEAATLYSELEPRLKPYLTASMIGLEASTSYYTLYQNFLRNNYHIKVANTIQLRQLIAKNDKLDAQRLSEMFRLGTFPCSYIPEEKIQHLRNMVKMRHALMQEKVRCNNRIQAFLDRNGVVMPPVKAFCKKWKHVLMQYIGSGKASMELRYEYDHYVYLEKKNEQADQEIIGYTKTYWPQEYNLLRSITGFGTLFPCYIIAFVHPIERFLSNRKLRRYAGVIPVAKESGDTTSKGRIPKTSSNALLRWVLVQAANTIGKTNTTLGRYYRRKKNQKKKTGIAKIAVASTLVDIIYKVLTTKKPYKSTAC

SEQ ID NO: 504733 - protein, 449 aa, unidentified
MVQTKRPRSRREMPAVHPDAAAIDVGATMHVVAVPPDRDPEPVRTFGTFTADLHRLADWLRACRIKSVVMESTGVYWIPIFEILEQKGFDVQLVNARDAKHVPGRKTDVSDAEWLQRLHEHGLLRGSFQPKGEVKALRSYLRQRERLLDSAATYIQHMQKALTQMNVQLHHVVSDITGVTGMRIVRAIVAGERDAATLAAFRDSRCKEPVETIREALIGNYREEHVFALTQALELYDIHQKKVAECDKRIETVLEQLKATRPTPAKPLPAPRHKTKQSNAPNFAARDALYAVLGIDLTQIHGLGPYLALKLVGECGTDLSAWPSAKHFTSWLSLAPRNKISGGKILSSATRRRLAAVTVGRTETALGAFFRRLSARIGKAKAITATARKIAVLFYNALRHGMKYTDPGAAYYEERYRQRVLSNLQRRAKAFGYVLQAAAPQAPQAVGVS

SEQ ID NO: 504734 - protein, 365 aa, unidentified
MKKSITAATASKRNFDGKLTIGLDLGDRWSWYCVLDERGEVVGEQKLSTTPEALRALFGAMPRSRVALETGMHSPWVSRLVSGLGHETIVAHARNVRLIGESRRKDDRLDARTLARLARIDPQLLSPVKHRSRQAQADLMVIRARASLVRARTALVNAARGLTKSYGERLRGCNPRNMDLEKAQALSPELQAVLGPLLQALESLSERIAEYNRQIETIAQQSYPQTALLKQVKGVGTLIALTYMLTLEDPHRFRKSRDAGCYAGLQPGRRNSGQSEPQMHISKEGDPYLRTLLVQGAQHILGPFGVDSDLRRWGLKLAERGGKNGKKRAIIATARKLAVLLHRLWVSGEVYEPLRNTNRTMLAAA

SEQ ID NO: 504735 - protein, 416 aa, unidentified
MNAVGIDVSSRKSTVAVLRPLGEVVCLPFDVTHDIAGLASLVEKLKALDGETRVVMEHTGRYYEAVEKALHEAGLFVCAVNPLLIKEYGANSLRRVKTDKADAVKIARYALDNWADLRDFTPMDAIRYDLKTLNRQFQLASKQRTASANNLIALLEQSFPGIRKCFDSPVRSDGTQKWVDFAHSFWHVDCVRKQPFAAFCERYRKWCKRHAYFFKLSNAEEVYALAKHAVVLTPKSKVVKVLVQEAANQLSSISRSVEVYRAEMDRLAAMLPEYPVVMAMYGVGKSYGPQLMAEIGDVRRFERKQALVAFAGIDPMPNQSGDKNVRSNKSSKRGSPYLRKTLFNVIRTYLQCAPQDEPVFQFLNRKRAEGKPFYVYMLAAANKFLRRYYAKLRDYFASLDTLQPVAPIPTILKATL

SEQ ID NO: 504736 - protein, 438 aa, unidentified
MDSTSSKVRITSGKSPADSIAKEIPCMKDLLEISCGLDVHKEKIVACILTGPLGKPTHSEIREFTTLIPDMVALRDWIVSHDCHHVAMESTGIYWMPIYEILEDAFAGDITLLVVNARHMKNVPGKKTDMRDSEWISTLLRAGLLNGSFIPEKRIREFRDLNRYRKSVIRDITSQKNRVEKFLQSSGFRLSSFISDIFGASGRNIILRLIEHGRINRAALDSCLKTKTRNRIDEILMSVNGTLSEHQKGFLKILMNHYDSLKEHLGEVEAALMEDMAPFALQVGQLSSIYGISTTASCAIIAEIGIDMEPFKTAEHICSWAGLCPGNNESAGKRKSTSVTKGNPYIKSMLCEIAWVIAGKRNTYLSAWYWRIKQKKGAKKAIVALARKLLVIIYTMLKQGTLFDESCFEARRKSCEQKQLSRYIRELEKRGYHVEAQV

SEQ ID NO: 504737 - protein, 354 aa, unidentified
MPSKVTKPYTSAQPKLMSIGIDIGKDVFHIVGFDHNGKVVLRRKFRRLELDAVFEKLPRCVVGMEACLSAHFVSRRLRALGFEPRIIPAIYVKPFLKGQKNDYNDAEAIAEAALRPNLKLVKEKTQEQLDLQACHRVRSRLVSRRTATINQIRAFLIEHGIAIRTGANSLRRSLPEILLQRADELSPRMRVLIEELHGDWLRLDARIEALNEEIEEISRQEKSCQNLMTIPGVGPLISTATVAAIGNGEAFERGRDFGAWLGLVPRQYSTGGKPILGRISKRGSKYLRTLFIQAANVILMRPQNWPRYSFGAWLVTAATRLHRNKLATALANKLARIAWSVLRYNERFDDAQTV

SEQ ID NO: 504738 - protein, 485 aa, unidentified
MILFRRFPRSDRLGRSRITELKLDKDMPKKSSNKAKSQRSRERALLQKVHLNAAGIDIGADAHWVAVPEDRDANPVRSFGVFTRDLILLCEWLKRCQVETIVMESTGVYWIPLYQMLERKGFEVRLVNAHHVKNVPGRKTDVKDCQWLQQLHTFGMLGGSFRPQAQMCVVRSYLRLRDTLSKDCNSLVQRMQKALTEMNVQLHRVISDITGVTGMSILRAIIAGERDCLKLAQLRHPQIKSSALDIAKALEGDYCQEHLFALQTALELYDSYLLKIMACDRHVQEALSTFEPKTSAPAPELDRMRSAEKRQEALRRHHLEQMTGADLTKLPGLDLLAVERILSEIGLDMSRWPSEKHFCAWLNVAPNHRISGGQILSSKPRKNANRAAAALRLAAQSAMQSKSAIGAFIRRIKSRLGAPTAINAGAHKLARLVYRMLKFGKAYVETGQEAYEKFFKERTLRNLQRKAHQLGFQVTPITTPTVPVS

SEQ ID NO: 504739 - protein, 323 aa, unidentified
MQGKTPPERSAVTRVYVGIDVCKDWLDVYLHPIGQKFRVTNAPEGLKAIKRRIAAMPVALVVMEATGKYHRQAHRTLHAAGFAVAVVNPLRARLFAEAIGQLDKTDPLDARLLAILGESLEPRALAPAAQSLEELQELVRARSAAIADRVALSNQLKESQTAFLKTQLARRLKEIDKHIGRLDIEIQRCVGADAALKRRYDLLLTIPGVGPVAALALVVGLPELGSCSGKAASLLAGLAPLAHESGQKTGERHIKGGRAMVRTGIYWAAVTASQYNPQLSQTYKRLKAAGKKGKVALTALMRKLVILANTLITEDRPWRPFHA

SEQ ID NO: 504740 - protein, 373 aa, unidentified
MKEFSKYVGLDVHKDTIAVSIADAGRSKARYYGTIAHTRTAVSSLLKKINPNGEVLELCYEAGPCGYGLHRQLLASGHECQVVAPTLIPQRASDKVKTDRRDSLRLAELLRAGELTPVWVPDEKQEAIRDLVRTRDDFKTSQRQVRQQLLAFMLRHSLSWTGGKKNWTLGFWNWLEAIQMPDAHQQFALKEYIDSVRYFNVRIQSIEKQMLAAKNGWALEPIVDGLMAMRGIKLVAAMGVVSELGDLSRFSRPSQLMAYLGLVPSEHSSGDSRRQGGITKSGNGHVRRLLIESGWCYRYAARKSREIELRAQKTSPEVQAIAWKAQRRLCARYRALSERGMSSCKVVTAVARELSGFIWAVVEQVRHEQATAA

SEQ ID NO: 504741 - protein, 409 aa, unidentified
MNKVDIAPFEVFCGIDVGKSLNHIVALDRYGDKPLINRKVPQEEAEIRAALEEAGDFGLALVIVDQFGAFGRLVVGVAKSMDIPVAHMSPRRFRQVAETYGEDKFDEKDAFILADASRTTPRNIEFVGNRAESMAEIKVLSSRRDDIVEERTRCYNRLHDFIHQVSPPLEELFSKRKLHNDLEIRLIARYGGPIGFRRAGRARASTWAAELKYHCVDGPKKVEQVFDVLDRQTVMLPGAAVIEEQIRSIASRIIELLAEEKRLNLMIEQRAKMIPEVDLLQSIPGVGPVYAALIAVEIGDIGRFRDSNHLASYAGVAPRKEESGTSVHKRRKRKGGNRRLKNALMQSSQRSVQCDSLARAYYERKRAEGKKYLQALRALARHRVTVIFAMLNEGTFYEPPVEVDENGRG

SEQ ID NO: 504742 - protein, 322 aa, unidentified
MAMLSFCGIDVSKDRLDVMVLPEQQCSSVRNDVVGWSELIERLRGFSIAAIGLEASGGYERGVMRALLAAGMSVRQINPFKLRQFAKASGVLAKNDRLDARMIASFVAIMPTHPAQRRSPAVEQLAEMVTVRRQLSDAKISVENASRMLENAMLQRLSRHRIARLAADIAAIDERLVEIVVSDAALAHRYRLLTSMPGVGAVLACSLIAFLPELGQLSRTKIAALVGVAPYDFDSGKLKGMRCIWGGRASVRSVLYMAALSASNWNPTLKAFHDRLAATGKKPKVVIVAVMRKMITILNAMVRDGIVWADRHSDRQSVPTAR

SEQ ID NO: 504743 - protein, 355 aa, unidentified
MESVKYVGLDVHRDTISVVVLEESGKTVMQTILATHAAALLDFVGGLRGSVHVTLEEGTHSVWLHDLLVRRVARVVVCDPRQNALLKAGNKSDKIDARKLAELLRAELLSPVYHGETSTVTLKHLCRSYAALTEDTTRVMGRIKALYRSQAISSAGQKPFGRRHRGQWLAQLTQEGMRRRAERLYEELDALQSLRREARRELIVESRKHDAVKLLCTVPFLGPIRAAVLVGRVQTPHRFRTKRPFWAYCGLALETRSSADYHFQEGQLVRAKKPVFIRGLNVNHNHDLKNLFKSAATTASAMPGPFHVFYENLLIKGMQPAMARLTLARKIAAIALCVWKKGEPFNAEHLKPQAA

SEQ ID NO: 504744 - protein, 340 aa, unidentified
MKKLCIGVDVSKKTLDVAYWDDQKQEAVFLGKYANTHTGFHTIREKIEERRKATSAELVHVTMEPSGGYEQPFAHFVDQQDGWDGSLPNPVHPKRWAEAIGKRAKTDSQDARTLAHYCFVRNPPVWKPLPAEVEQLEHLLDRLDNLEDMLSREKNRLGSVQYHVKSHEAVYDDLRESITSLEDRIEKIQGIINDHLDKHPHLEEQRKILLSVPGVGVKSVLYILITMNRWGAFTHGEGDANGIVALLGLDPKTHESGTSIHKRGRISRQGDRSQRSRLYMCALGGVRGNNPLRAFYERLVGRGKPKKLALVAAARKIVVWCWAVFRSNIPFDAARFDHSQ

SEQ ID NO: 504745 - protein, 476 aa, unidentified
MARTAGLNRKQRKALARQLRSDDPGLEVMHPHAAGIDVGNSAHYVAVRPDRDPDSVRRFECFTADLHRLADWLQRCGVTSVAMQSTGVYWIPLYEILDARGFEVYLVNARHTRNLPGRKSDVQESQWLLKLHTYGLLRNSFHPPADIRVVRTFWRQRGDHVQAVSTCIQRMQKALTQMNIQLANVISDLSGWTGQRIVRAILAGERDPVKLAALRHPGIHATPETIAKSLEGTWQPDLLFVLQQEVAMYDAYQQRIAECDQQLEQHLKGFADKAADTAADGEPSPTPPQRQLRSGPKRRRKAGSHAPQFDLGRELHRITGVDLTRIDGIDVGVAQTLISEVGLDMTRWKTEAHFASWLGLCPDNRISGDRVLRRGTRHVVNRAATALRLAATTLLRSQSYLGAQYRRLRTKLGAPKAITAMAHKLARLVYRMLTWGQEYVDKGLQYYEDRHRDQQVQLLKKRAAKLGLQIVEPEAA

SEQ ID NO: 504746 - protein, 416 aa, unidentified
MNAAGIDVSSRKSTVAVLRPFGEVVRVPFEVNHSAEGLASLVQQLKAIEGETRVVMEHTGRYYEAVANVLHEAGFFVSAVNPLLIKEYGGNSLRRVKTDKADAVKIARYALDNWADLRDYTPMDRIRYDLKTLNRQFHLASKQKTATSNNLIALLEQSFPGVRKCFDSPVRSDGTQKWVDFAHDFWHADCVRKHSLAAFTERYRKWCKRHGYHFRQGTAQQVYDLAKSVVVLVPKSDLTKVLVQEAANQLTTISKSVETYRAEMDHLASQLPEYPVVMGMYGVGDSLGPQLMAEIGDVRRFERKQSLVAFAGVDPMPNQSGEKNVRSNKSSKRGSPYLRKALFNVMICYLQKAPADEPVFQFLDRKRAEGKPYYVYMTAGANKFLRRYYGKVMEYLSTLEDLPPVDMDSTGLPKHP

SEQ ID NO: 504747 - protein, 459 aa, unidentified
MGRKQSQGSTWEGLKVIHPNAAGLDIGSEEIWAAVPPERTAEPVRKFGTFTPDLNALADWLTACGVDTVAMESTGVYWIPVYEILEARGFEVYVVNARHVKNVPGRKSDIQDCQWLQGLHGVGLLRGSFRPAEEIAALRAYLRHRAGLIEHRAAHIQHMQKALAQMNVQLTQAVKDITGVTGLAIIRAIVAGERDPKQLATLRQPGVKKTEAEIVKALTGNYRPEHLFALQQALAVYDFYTEQLAACDTEIERQFANLKPISDDLPPLPPSEKRDSHSKNGPSYDARSYLYGLTGVDLVAISGLNESTVQTIISEVGPDLKAFPTEKHFCSWLGLAPHNDISGGKRLRSRTLKTNNRAGQAFRMAAQSVAKSPESAFGAFYRRMKARLGGKQAIVATAHKIARAFYHMLKHRTPFHDLGGEEYERRAREREIKNLQQRAAKLGLAVVETPATPALAGSF

SEQ ID NO: 504748 - protein, 408 aa, unidentified
MGRAAEVVAPSSSMRTDGGCPVAQVNDLSRSLTAFDPISTLVVVVEMSKASWLVSSVVPGVERQPLKKLEPDATALLRLIERWRNEAVRAGRSISRIALAYEAGRDGFWLARWLIARGIEAHVIHSASVAVSRERKRAKTDRLDAAMLMRVLLGWLRGERGHCGMVAIPTMEEEDARRPSRERESLVDERSRITNRMKSALARLGIRGFKPHLRKAPERLAGLRTAEGTGLPANIIEEFRRDMARLALVREQISSIEKTRAERLKRAPDTGPHAMVRLLARVIGIGIETADMLVREILSRKLRDRRAVARYAGLTGSPDESGLKRREKGLAKAGNARVRRGLIQLAWRFLMFQKDSALAQWYRTRTEGTSGARKTTMIVALARKLLIALWRLVTTGEVPDGVELRPAV

SEQ ID NO: 504749 - protein, 341 aa, unidentified
MTIAILGIDLAKNVFAIHGVDNVGKAVLIKPRVMRDQLAPLIAQLPPCLIGMEACSGAHYWARLFQQHGHTVKLMAPKLVAPYRMSGKQGKNDAADAAAICEAVTRPNMRFVPLKDEHQQAALCLHRTRQGFIEERTAAYNRVRGFLSEFGIVLPQSPEKLRSHIATRMDALPGWASRCIRDLLEHIDGIEARLDEYDRAIGELARQDERSRRLMQLRGIGPTSASALLATLGAAHDFKNGRQVAAWLGLTPSQYSSGGKARLGGITKTGDAYVRTLLVSGARAVMSNLRDKQDRFSRWIRSLVERRGYWRAAIAIAAKNARMAWAVLKYGDAFTQETCNA

SEQ ID NO: 504750 - protein, 408 aa, unidentified
MTVVGIDVSKGKSMVAVMKPGGELVAAPYKVRHSDIEMSHFALDVLCMEPDTRVVMEATGRYHEPVAALLHSEGIFVSILNPLLIKQSGAGSLRKVKSDPKDALKIAKYGLDNWSTLREYTPMEAIRQQLKLCARQCDLYNKNIVMLTNNLISLSDKTFPRVNELFSSPEKADGHLKWVDFYRSFWHCDCINRMSPDAFEERYKKWCKRKGYHFSTDAADALYAASCGSYTTLPRDNNAKLLVTVAADQLIALRENQSKLEAEMLNLCKQLPEYETVMAMYGVGKSTGPHLMAELGDVRRFPHRSSIVAFAGVDPGVVGSGKMQLSSVATSKRGSPQLRKALFQVVSAYVKRKPENEAVYQFYAKKRDEGKPYYVCTTAAANKFLRIYYARVKECLNAAESATQAEEG

SEQ ID NO: 504751 - protein, 367 aa, unidentified
MSKHTSKKNSLPATDLSACTTVAVDLAKSVFQVAGEDQLGKVIYEKRLKSREAFSTFLRQLPPGIPVLMETGPGAQAWARMLLEQGNQPRILPARLVAKHRSGPKNDRNDVLAILRAGRDEHIHPVPVKTVAGLEMQALHRVRRRYVREHTAMGNQMRGLLLEHGFSIPQGKAAIDRNVTQLLEASSQSIPALLHELIAELLGEWKHMAERIEVMTGRLERAVREDETAKRLMTVRGVGPIFSSAVIAKQTEPERFANARDFAAYFGTVPEQYSSGNTIRLGKMAKRGDAYIRSLAIQGAHAVLRQLNPNSEHPDDRRLQRWLGRHGQKGAAVRLANRNLRIIWVLLQNQDTYRRQPTECQEAAMGQ

SEQ ID NO: 504752 - protein, 343 aa, unidentified
MQTITTIGLDIAKSVFQVHGVDAIGLVVIRRQLKRRSVMTFFQKLPSCLVGIEACASSHHWSRELQALGHTVRLMPPAYVKPYVKRQKNDMADAEAICEAVTRANMRFVPTKTPEQQSCLMLHRTRHMFIRQQTAVINSIRAHLAEFGIVAPVGRKGVTELLRIVADPSDKRVSEVARACLAALGSQLLSLKQQIVEFDRMILAWHRSNQTSKRLHYIPGVGPMLATALVASVADPSTFRSARNFSAWIGLVPKQHSSGGKDRLGSISKQGDRYLRSLFVAGALAVIRYAKIHGTGHRPWLTALLARKPTKVAAIALANKIARMAWAMMAKGERYKEPIALAR

SEQ ID NO: 504753 - protein, 368 aa, unidentified
MTMIIGCDYHPGFQQIAYVDQQTGEYGERRLNHREEAVRFYRSLVGRGVCVGVEATGNDRWFRKLLSEAGHELLVGDASAIHAAAPREQRTDKRDARHILRLLVENRFPAVWQPPAGNEEQRQLLLHRCRLVRMRTRISNQLDSIAKSEGLTGSRRWSSRRRQQIEALPLTGWYAERRADLLRLLDALELRIKPLDKAVEAAAEQNSEARLLMTHPGVGPVTSLAYVLVLGDWRRFPRGKQVGSYLGLIPSEASSGKRQQQMGHITKQGNTLLRWLLVEAAVTAQRHDANWHRQYVRLSVTKHHGVAKVAIAHKLAVRLYSTPASKRPLAGGPGWMLRSGQDYGQIMERGSHARQSECPVGRSKGPIE

SEQ ID NO: 504754 - protein, 408 aa, unidentified
MKQNVIFGIDVSSKSSTVCVVMDRIKQGATFTITNDSFGYQKLYDHLNQYLITPLVVLEATGVYSLSLQAFLEDYHIKYLRLNPLKAKKLMDNNLRHNKTDKVDAYRLALIQFNAPQRLQKPQSREYHELQNASRYYEELTKAVVVNKNQLHRNLQSTFPQIERILSNPTGTIYWDIVSMFPHAKSVLNLNETQVMQKLLSLHGIGHQRAQTLTATLYRYARQAYPYDRQDGITVRAIERNISNLISLNDERTQVIDYMEKLAKKVNARALTIYLSIPGIALTTAVRLIAELGDLRRFDTSAQIDAFVGIDPGRYQSGEKDSHLGITKHGNHIARKILYHSITQMESVKAVQPCHITDYYDKKKQSSHSRGYKKIAIASMHKLIRTLFALITHNQLYDYNIATKNQRL

SEQ ID NO: 504755 - protein, 500 aa, unidentified
MKVIRNPKDFRIVYSRACGIDVHKNFIVCTACIPGSKPDQWKFITRRFSTFYKELEECADWLSKLDCQNVCMESTGQYYIPVHDVLEKKLSNVRVVNPKWVKAVKGNKDDKKDSKWICQLFRFGMTKSSFIPGEEIRTLRGETRYRYKVISMRTSEMNRYQNALTVGGFKVDAVFSDVFGKSAQAIINLVLSGKEYTDKDILSLVHKNCKSSPEKILEAVNGIRMNDTQKKRLIIIKNHLDYLTDEIGEINKQIDCLVKEIPGMEAAIDHSCMVPGIDKNLAVIIMSEIGTDMSPWPSQYNLVSWAGLAPGDNQSAGKKKSVKISRAGVYLKPALVEAAHAAVKDKEHPYYAIKYNTIKKRRGQKRAIIAIARKLLIAIYHMLLTGEKWNPTDLANVETPTDKRRKYIKKNLSNSFSQLENAGMLPEEIINYLKGQFLDLEVSAESEDDSDSSDNDSSKGTEASADSAETNNSESPTEQSALDSDSQTDLTLVKDKSAAS

SEQ ID NO: 504756 - protein, 366 aa, unidentified
MKKISTVAIEGIQIFKQNQLTIGLDLGDRTSHYCILNEAGEVILEQELPTTPKGIEKVFSRIPRSRIALETGTHSPWVSRQLTQLGHEVIVAHARKVRLIGESSRKDDRLDARTLARLARIDPALLGPVRHRSAKAQIHLTVIRARAALVSTRTALVNAARGLTKSYGARLPQCGTEQMNREITKELKPELREALNPLLREIESLNERIAEYDTRIEQIAKEIYPEVARLKQVKGVGPLIALTYVLTLDDPHRFRRSRDVGCFVGLRPGRRNSGMSEPQLHISKEGDRYLRTLLVQGAHYILGPFGQDSDLRRWGLKLSERGGRNAKKRAVVAVARKLAVLLHKLWVSEEIYEPLRNNRQAMARVA

SEQ ID NO: 504757 - protein, 347 aa, unidentified
MRFYTKQHRNYCGIDLHTNKMYVCIINQDGETVFHRNMKAEPETFLRAIKLFRDDLVVSAECMFAWYWLADLCEQENIPFILGHALYMRAIHGGKSKNDRIDSHKIAALLKGGLMPMAYVYPRKMRATRDLMRRRNHFMRKRAELFAHIQNTASQYNLADPLGRIAVPKNREGVIERFDLPCVQKSIRANLAMIETYDMVIAELERHTIKSARNHDPVAYALLKTIPGVGRIIALNLLYEIENIKRFPRVQDFVSYCRLVKCAKESNGKKCGSSGKKIGNAHLRWAFSEASQLFLKCNEPGKKYLQKITNKHGKGKALSILAHKLGRAVYYVLKNQKAFDLNKFLNA

SEQ ID NO: 504758 - protein, 339 aa, unidentified
MKFTPVGIDIAKQVFQVHYVDESTGEVVNRPLRRSAFLQHFVNRSACLIGMEACSGAQHWARELTKLGHQVRLMPGRFVKAFNIGNKNDAADARAIWLAVQQPGKAVAVKSEAQQAVLALHRMREQLVRFRTMQSNGLRGLLTEYGEVMGRSRAALDKAIPDVLARLSDRLPAMLIESLREQYGRLAQLDEQIAQIERRLQQWMRGDANAQAIAQIPGVGLLTATAAVACMGDAGAFRSGREFAAWVGLVPRQTGSGGKVNLHGISKRGDTYLRTLLIHGARSVMQHAKDPGPWVEQLRQRRPNNVATVALANKMARTIWALLAHGRAYQSGHVSVKPA

SEQ ID NO: 504759 - protein, 374 aa, unidentified
MWIAEDLGAAPQADGEYEVRGHGLKHQKEKRSMDHFAGLDVSVKETSVCIVDDTGKIVREVKIASEPEALLAVLSNPDYHFKRIGLEAGPLSQWLYSALTEADLPVICVETRHMQAVLKAQINKTDRNDARGIAQMMRVGLYRPVHVKTLRSQKLRMLLTHRKLLQSKAIAIENDLRGTLRNFGLKVGIAGKVKFEARIKELVERFPDLAVLVEPLLVVRRVLREQLGILHRRLLVIVRDDDVCRRLMTVPGVGPVVALTYRATVDVPVRFRKSKAVGAVFGLTPSKYQSGEIDRTGAISRCGDDMMRMMLYEAAQSMFHSTKWSWLKAWAMKVARHRGMKKAIVALARRLAVIMHRIWVDGTEFRWTKEVAAT

SEQ ID NO: 504760 - protein, 343 aa, unidentified
MTRYAGVDVSLETSSICIVDGAGTIVRELKAESEPGALAAALTATELPFSRVGLEAGPMSQWLHAGLAEAGLPVVLVETRRLRAATKTMPVKTDRIDARAIAQVVRTGWFRAVHVKSELSQETRALLAARKLLVAKLRDVDNGVRGLLRGFGLKVGTVGERAFPRRARGLAHSRPELAAVVEPLLQVREALLAGRERLHRLVLAAVRDEPTCRRLMTVPGVGPVTALTFCSAVDDPARFGRSSALGAHFGLTPRRHQSGETDRVGHVSKQGDGLARQALYEAANVLLTRTSRWSALKAWGMSVARRAGMRRAKVAVARKLAVVLHRTWRDGTEFRRGRETAAA

SEQ ID NO: 504761 - protein, 372 aa, unidentified
MLYAGLDLSRKRLDVEVRDGDGAVVAVTAVSPDADGLRTLVERLERFGRVRAAIESMNGARFVHDELELLGWQVEIADAQKTKGLAPLGCKTDKIDAGVLAELCRLALVPAIWLPDPAVRGERERARFRLHLVRHRVALKNRIHATLIAFGKPCPVSDLFGVGGRRLLAQLALPEPWSHTVEASLRLVDQLDQQISECERDLRRRGADHPYVGLLTTMPGVGWVLGYTIAAEIGTITRFSSPTKLCGYTGLCPRVYQSGSVDRRGPLAKNGPRYLRWALIEAAQHAARSVYYQPLYERTKTRLGRNRGSKIARVTVARKLAEASWHMLTRNQPFAPAGATSVLTASRSSYELRYRSDARHPTHSPTKGAIER

SEQ ID NO: 504762 - protein, 362 aa, unidentified
MLQQKNELDFNGQNIYVGIDVHLKSWTVTILTETQPHKTFSQPPKPEVLFGYLEKHFPNGSYHSAYEAGFSGFWAHYRLMSLGINNIVINPADVPTTQKEQYHKNDPVDSRKIAKSLRSGLLTPIHILGNETMEDRSLVRTRSTLVKDMTRFKVRIKSFLFFFGINYPEYFENTRTHWSRNFMQWLKEIKLETWSGRAALDMLIREAENQRQLLLEIDKKIRVLCRSDRYKQNVELLQTVPGIGITNAVVFITQIENVERFRTIDELASYVGLVPTSHSSGEKENKGEMTFRGQKILKSMLVESAWVAVRIDTALSLSYNTYIKRMQPNKAIIRIARKLLNRMYYTLKNKRPYQMGIVGQNL

SEQ ID NO: 504763 - protein, 391 aa, unidentified
MIYVGIDVAKDTHDCFIVSSEGEVLHDVFTIPNNMGGFNNLFSMISSASGDLGKVKVGLEATGHYSYNLLGFLLNKGLAPFVINPLHTNLYRKSLSLRKTKTDKVDARTIAVMLMSDVSLKSYTDSAYHNEELKSLTRYRFDKVKERAKLKSSISRLVNILFPELEKIVPSLHIVSVYTLLGEFPGAHQIAEAHMTRLKNLLNDASRGHYDKDKAVEFRVAARNSIGSRMPAKSLELKHTIRLIRALDTEINEIEAEIKIIMDKIASPILTIPGISYRMGAMIIAEIGDFSRFDSPDKILAYAGLSPSTYQSGQLTSSYARMEKRGSRYLRYALFNAARFVCHWDDNFATYLAKKRSEGKHFNVAISHATKKLVRLIFALEKSQQPYLRAI

SEQ ID NO: 504764 - protein, 312 aa, unidentified
MVKHLPLFVGVDVAKDQLDIAYSDSTTAQCVPYDTKHLKRLIADLAARAPELVLLEATGGLERTLVYALEAAGLPYRVANPRLVRDFARATGRLAKTDRIDARVLVDYAQKLRPEARLLPEPERRVLREFVLRRQQLLEMKTQEENRLRTAPKPVLPSIRAMLRTLDKEIKKLEQQTDDFLDQHPTLIAETDLLQTVKGVGPVLSRTLCGLLPELGRANAQEIAALVGVAPFNCDSGHFRGKRSCWSGRAPVRRTLYMAATIAVRCNPKLKAFYQRLRDAGKPFKVAITAVMRKLLVILNAMMRDFYAAQAA

SEQ ID NO: 504765 - protein, 425 aa, unidentified
MEILFPRCAGVDIHKRTVVACRIVLTDDGEWLRETRSYGTTSEELLRLADWLAAGGCTHVGLESTGEFWKPVFNLLESSFEVWLLNAQHIQAVPGRKTDVRDAEWIADLLRHGLVRPSFIPPRPQRELRELTRHRTNFVRERATLVNRVQKVLEGTNLKLASVVSNVVGASGRAILAALLGGETDVVILADLAKGKLRKKRDQLERALVGHIAPHQCFLLTELLAQIDGLDETIARFDDAIARQCAASEQEAIIQLLDTIPGVGRAMAELLVAEVGADMTRFPTPGHLAAWAGVAPGNNESAGRQRSGRTRKGNAWLKTALVQAAHGAARMKGTALAAKYKRVAARRGAKRAIMAVAHRLLIIAYHVIDRREPYRELGADYLERRHAPATVDRLVRRLQQLGVAVTTTDSGSAVPPVGAAFATSP

SEQ ID NO: 504766 - protein, 338 aa, unidentified
MKYCGLDLGRKSSHFCIVDEERHVVLEGKVSNRPKTLKTKFGKLEKMKIVVEASNKSFWMADQLKAMGHEAVVVDPGRTKAIGAARIKHDRLDARILAQLCQAGLLAEVDQPDQQVRISRMVFTARDSLVRSRTRLVNTVRSMADSEGVEIPHCSTRRFVEAVCVVVDELPAGMDELLDPLCLAIEELNKQIEICDQKIRKEAEQDELICLLQTCPGVGPIVAAGFAQAIRDPKRFPNGRAVGAYLGLVPSLYASGKMSMKGRITKCGNRHVRWLLTIAANAMLLSKEDSALRRWAMTLKERVGPKKAKVALARKLSMVLWAMWRDNRPYEARLAAAA

SEQ ID NO: 504767 - protein, 432 aa, unidentified
MGSEVHWICAPKVDGSGREVKKSGATTPELERLAKWLKERQVESIAMESTGVYWIAPFEVLDRYGFEILLVDTRELARVPGRKKSDKVDCQWIQRLHSCGLLKGSFRPAEAICMLRTLVRDRGRLVAASADWLRRMQKSLDQMNVRVHRAVRDIDGVTGMAIIRAIVKGERDAGRLAKLRHFRCHKSEEEIAEQLSGHWREDHLFSLQESLKMYDAVQERIAAYDREILRKLAEMERDDCHGQEAPKLKNVNKGQAIQSRGEENLRQALYRMSGVDATAIDAIGVGTVQVVLSEYGPDLSRFPTEKQFVQHVTLAPHKPTSAGKVVNKKKRGSASTRVAEALRMAATSLQHSPTALGAYYRQMARRKGGSVAIFATARKLATLIYRLLRFGQPYVDEGAEAYEKRYRESRIKHLTATAKDLGYELTPKACNA

SEQ ID NO: 504768 - protein, 343 aa, unidentified
MNEVTTIGIDLAKNVFQVHGVDAAGETMVRKQLRRSQVVPFFRKQPPCLVGMEACATSHHWAREIMALGHEVKLMPPRYVKPYVKRNKNDAADAEAICEAVTRPTMRFVAVKSAERQGVLMVHRTRDLLVRQRTMLVNALRAHMAEFGVVARVGLPQVSKLLAVIADGTDHRIPALARSCLEGLARQLLSLEHEINGAEKRIHTWHLANDDSRRLETTPGIGPITASALASSVTDPHIFRSGRMMSAWIGLVPRQNSTGGKERMGRISKQGDQYLRWLLVAGAMTVIRHAKRRGTTDPWLANLIATKPTKVAAVALANKNARIAWALLCHGGTYRRPASATAV

SEQ ID NO: 504769 - protein, 382 aa, unidentified
MDVVHPRCCGLDVHKQTVVACILLASPSGPPQKLVRTFGTLTDELLALGDWLTSESITHVALEATGSYWKAVWNLLEGRFELLLVNTQHIKAVPGRKTDVKDAEWIADLLRHGLLKPSFVPDRPQRELRELTRYRTSLIQERAAEVNRLQKVLEGANLKIGDVATDVLGRSARQMLEAIVGGATEADAATLAQLARGRLREKIPHLERALAGRVAPHQRFLLAQQLAHIDFLDETIERVSSQIAERLCPFDESLANLDAIPGVGRRTAEILLAEIGTDMTRFPSPAQLASWAGMCPGHAESAGKRHSGKTRKGEPSTTPRADRSGTRRRPLQEHLPGCSVPSTRGTPGRQAGGRCRGPLDPQHRLAPAPARTPVPRPGRQLL

SEQ ID NO: 504770 - protein, 428 aa, unidentified
MSESIAAAALQAVAAYIGIDWADQKHDVVLRSASQPNKVEHRIIEHKLEALMEWVGQLQQRFGGQGKILVCLEQSRGALIYHLMGYEFFELYPVNPLQLARYRETFSPGGAKDDRADAELLCELLYCHRDRLRAWKADSELTRKLVFFTEGRREAVDQRARLSQAIKSQLKVYFPLALELLNNDTTTALAADLLLRWSSLEALQKQSAHTLRKFFYGHNCRGEAKMLERLQLVQEAQPLTQDAAVIEPAALRVQMLACQLKHLLPDIARYDKKIAELFAVHPDRFLFENLPGAGLALAPRLAVAFGSDPNRWESAQEIATLLGIAPTRRASGKKTGKKASVHFRQACPKFHRQSFHEFAGCSIRYCPWADAHYQTQRARGKGHHTAVRSVAFKWIRICFACWKQRIPYDPQRYLQALQRRGSPLADAC

SEQ ID NO: 504771 - protein, 340 aa, unidentified
MKITTFGLDLAKRVFQLHWVEAETGEVKRRQLKREQIVKFFAQRSASMVAMEACGSAHYWARKLMGLGHEVRLIAPKFVRPFVRSNKTDAADAQAIWEAAQRPERRFVAVKSEQQQAVLMLHRMREQLVKMRTMQINQLRGLLYEFGVSLPAGRQKGMAEVAPALAQLEETLPALVLEALQAQRARIDTLTQDIEEIERKLSAWRRQDEAARRLMQIPGVGVLTATAAVATIGEAKVFRSGREFAAFLGLVPRQSGTGGRVKLLGISKRGDVYLRKLLIHGARSVISHAKERDPWLEGLLARRPLNAVVVALANKMARTLWALLAYGRCYEKRRYAEGLA

SEQ ID NO: 504772 - protein, 353 aa, unidentified
MLAELVHHVIGVDPDRDWITLAVVDAHTTGVTAHDRFPATAVGYAEAVEFVDGHSVDTERAWAIEGTASYGRGLSVALSRLGEWVIEFDRPTRKTKDGAKSDHLDAVRAARETLGRDRLSEPRAHQGAREAIRVHAVTRAGAVRARTAAINELKAMIVSADEELRGSLRGLRTSQQVARCARFRERASMSIEGRGTRLSMRALARRIEHLNDEIDDHDRALKTLLDDTAPQLLTERGIGYITAAAFYLAWSHPGRCRSEAAFARLGGTSPVEATSGQKQTCHRLNRGGDRQLNRALYLVAVTRRRCDPATRAYIARRAADGISERFAIRCLKRFIARRVWRLLEHPESALDKT

SEQ ID NO: 504773 - protein, 399 aa, unidentified
MTPDDIDVWVGLDVGKSAHHAHALDHDGNTLYDKPLKQDEKAIRTMLGKLSKHGRVLLVVDQPNTIGSLPLTVARNTGIAVAYLPGTAMRRTAQLLPGDAKTDRRDAHVIAWAALKLPETLRDAGPDDETLAALKLLAGHDEDLAHESTRHVNRLRSLLLQTHPAFERALKGERITRDATLALLERYGGPMGVKRAGIEDVKDWAKSNGLRAGRIIDDMFKAIGEQTVTVPGTLMAETIIPSIAHDIKTIRDRRREVGRQVEKLLEDHPLLTVPASMPGIGVRTASNILLGIGGDIANFKSSAHLAAYAGISPVTGQSGTSIKGERPSRRGNKRLKNALWQTAFVASTKHPPSVAYYKRKREQGKHHNAAIICLARRRCDVIYSMLKNGVLYQEPALVA

SEQ ID NO: 504774 - protein, 345 aa, unidentified
MQLTTVSVDLAKTVFQLHAIDQQGKTALRKRLKREQVVPFFANLEPCLVGMEACGGAHYWARKLQALGHTVKLMAPQFVKPYVKSNKNDVADAEAICEAVTRPNMRFVPIKTVEQQAILAVHCARQGFVKARTAQANSIRGLLGEFGVVLPQGIRHIVERLPDILEDHENALPGSLRQLMQRLMEHFKELDRQVVELEREIQQWHRSNEDSCRLAEIPGVGPLTATALVASVGDAKNFSNGRQMAAWLGLVPRQHSSGGKPTLLGISKRGDGYLRTLLIHGARSMVRVVESKTDPSADWLKGLLARRHTNVAVVAQANKTARIAWALLAHGTKFRPDYTPDVTVA

SEQ ID NO: 504775 - protein, 317 aa, unidentified
MPQSERIVGIDVSKRQVEACLRARQERLSQPSTPAGRRAMIAWLRQHDVTVAVMEASGGYERDWAAALRGAGIAVRIVDPKRVRYFAKSAGRLAKNDPIDAEMIAWFAETFATAAAPAHDPEREAVDRLMTVRALLVRLESQIGQLGEHRQPPLVERAGRAIAGVIVRQRKRLETAIAARIARQADLAERHRIIQSVPGFGPCCAAGIIAWLPELGQIGGKPATALVGLAPYDDDSGGHHGERHIKGGRREIRDLLYMAALAAIRRNPVIKAHYRQLRARGKKFKVALVACMRKLVVILNTMLMRGQMWNPPAAAVA

SEQ ID NO: 504776 - protein, 341 aa, unidentified
MGEVSTIGLDIAKPVFQVHGVDEAGSVVIRKRVSRAKMLEYFGGLPRCLVGIEACPSAHHWGRELQTLGHQVRLIPPSYVKAYLKRSKNDANDAAAICEAVTRPSMRFVPIKTKEQQSVLMLHRTRQLLVRQRTMISNALRGHLAELGIVSAKGHNGTAELLRIIADRRVSPAVCGILEVLARQYGAIGIEIASIDKNIMVLHRACEASRRLAEIPGIGPISATALVAEIGDWNAFGSGRSLAAWIGLVPKQHSTGGKERLGRISKQGNRYLRWLLVVGAMAVIRYARKHGTGKRPWLGRLMERRPTKVAAVALANKIARMAWAIMVRNERYKEPKLLLAV

SEQ ID NO: 504777 - protein, 341 aa, unidentified
MEKRYVGVDLHRKVFSCCVRLESGRQFLTEWRLEQLPQFVKKLRSSDEVAVEVTGNTRLFYEAVSPHVARVVVVDPHQFRVISQSVKKTDANDARNLALYLAKGLLPEVRMKEKQPAQVASLTQTRDRLVKLRTALKNKVNNLLSARGIELKKEELSSEKGLTRALTMDVEELTQLELQVIVEQIRSLNQSIAKLEEVIDREGKKLKGHRNLTSIKGIGSLGASILLSVIGDVRDFPDEGRLASYFGIVPRIHNSNETERSGGITKRGSKLGRTALVQCALIAKRYSPYLASYYEQIRSRRGTGRAIIALARKFLGIIYRTLKNHWVFQDFPHFVLEKSTN

SEQ ID NO: 504778 - protein, 461 aa, unidentified
MGRARAKRIPAKTVEDEEYELRHERTCGIDIAKDKADIAVRLPPEREGGRRRTRIWTLPSVFAAITELGAELVDVGVELVVLEATSDYWRSWFYLLEAMGLNVRLVNPSHAKQLAGRPKTDKLDCQWLARLAEMGLLRASFVPPPAVRALRDLTRTRLHFTRDQTREWQRLEKLLEGALIRLSSAVGKMAGNKSALKILQAIVDGERDPGALAALAHGNVKAGRDGVRAHLEGMMPAPHHIELIRIHLGLIKTLEREAGRIDDLIREHFDTMEDAWGVTADGVPSPDPGPDAALLTAAQRLAEIPGVSLELAIGIIAELGLDMSRFPTSGHLVSWAGLSPVSQQSGRQSRKAKKGKGDAYLKGYCTAASLAASSTGTFLGERYRRLARRIGGAKAQVAVARSILVIVWHLLADPAARYTDLGPDWHLRKTDRSRRTRSHVQQLRALGYDVTLTPADQTTAA

SEQ ID NO: 504779 - protein, 387 aa, unidentified
MPQPNDLSRSRASFEQDATIVAVIEMSQSSWLIAGTVPGIERQPLKKIVPDAVALLRLLQRWRDEATRGGRCVARIAVAFEAGRDGFWLARWLMRHEIETHVIHPTSVAVSREHRRAKTDRLDTAMLMRVFLGWLRGERGHCGMVAVPSLEEEDARRPSRERENLVGERTRIVNRMKAALARLGIRGFKPELRKAAQQLESLHTPEESPIPPNTLDELRRDLARLAILRGQIIAIEQTRLERLEQAPHTGANAMIRLLASVIGVGIETADMLVREALSRGLRDRRAVARYAGLTGSPDESGTRRHEKGLAKSGNARVRRGMIQLAWRFLMFQRDSVLAQWFRARTEGVKGARKTTMIVALARKLLIALWRMVTTGEVPQGVVLRQPT

SEQ ID NO: 504780 - protein, 312 aa, unidentified
MTDQIFVGVDVAKDWLDIHHASHGATRINNSHAAVRSFAARCAKEGAWVVFEASGGYDHQLRDALESAQVRFSRINPRQARDFARAMGVIGKTDRVDARMLAELGARLTPAPTQPLPPERRALQAQATRRRQLVEMRKQEATRLQQTADPVARADIRGVIAMFDRRIAKIEARMTDLVTADPELAAIERRLRTAPGVGPVVAATLIAELPELGQIDRRSIAALAGLAPIARDSGRRSGPRSIGGGRPIVRTILYLAALQASRRSPQFIHFRERLQAAGKSVKTAIIATARKLVVTLNAMLASGTDYRPTAVV

SEQ ID NO: 504781 - protein, 440 aa, unidentified
MENEDSISIVHPNAAGIDVGSRQFFVAAGEKKFRVFTTFTEDCNAIKDYLLSQGITTVAMESTGVYWVVLYDVLEDAGIEVFLVNGRETRNLPGRKSDAADCQWIRQLHSFGLLRKSFIPNGNTRKLRSYLRLRQDHIRAAATQVHLMQKAFTQMNIRLTEQLNDITGASGLKIIMAILNGERNAEVLTDLCHTTILKTKKELVIKSLEGHYSEEHLFALRQSFETWNFYNKLVLECDKEVEKLLKEMTKGKDDIKVAVRRKPIRYHAPAIEDLHQPLLKLTDGKDPIGIAGITDYSFLQLVSEVGTDMTPWPTEKHFASWLKMSPLKASSGKMSRKVVLKRHNKAGQIFRNLAQGILTSKHLALGVFGRRIRSRRGPSVAIKAIARKIACYYYRVLKHGTEFVEKGIQAYEKQQNEQHKKYIEKMAIKFNLQLVPIQAE

SEQ ID NO: 504782 - protein, 346 aa, unidentified
MTYFAGLDVSLREISVCVIDSDGRIKARGTMPADPMAVAGWFKNRSLCPKVIVHESGQLSIWLQRGFLELGLPAVCIDARRAHKSLSGRINKSDASDAEGLAQLARTGWFTPVYIRSIEADRVRTLVAARERMIRLRKDLEGHVRGVLKTFGIRMAGVTKGGLRQNFRDQLAAAGEKDPILRTLADSFIDIHAQLCGKTAKLEKDLKAKAASHPVAKRLMTIPGVGPLVSLSFIALIEDPGRFARSSDVGAFLGLTPKRFQSGEIDWSGRISKQGDRAMRTLLVDAAATLIQNVKRFSALKSWSVRLAGRKGFRKAAVATARKIAVLMLTLWKNGTEFKPKMETNA

SEQ ID NO: 504783 - protein, 363 aa, unidentified
MKKVSKSQPAMKTTNDKPELTVGLDLGDRYSRYCLLNEDREVVEQGRIQSTEAAFRRHFEGAPRQRIALECGTHSPWVSRLLKSLGHQVMVANARKIPALTGSESKNDRNDAELLARFAAHDPKLLSPVQHRSPERQQDLNLIQVRSTLVRARTMMANALRGLVKSAGSRLPGCSTESLPVRAKDSVPPALAAAAAPLINQIAQLNQQIGALDRQIENLARKYSEIALLRTAPGVGPIVAAAYVLTLDRPDAASNRSAGAFLGLRPSQSQSGETDPQRRISKAGDTYLRSLLVQSAQYILGRFGPDSALRRWGLKLASTGGKRGKKRAIVAVARKLAVLLHSMWRNGQNFTPFPQPQTATAAA

SEQ ID NO: 504784 - protein, 445 aa, unidentified
MNANDTAELRSHWPGEPKDFTARGKVSTPSRYRGGSAASSARVDTEVGSTDGSSRAVGSEARALMQIQSWERKKAQLVKEVSKPKPAVQLPAMEDLPVLSHIILLAKYVGIDYHKRTITFTFGDKDGKVLEQVTLQNQSQLIAQFFEQFGKLECAIESCRGYEWLVQMLQEMGHTVHVADSRSVKLIACSRCKTDKIDSRILMELLAKGFLPTTYIPSAREREYRELLRHRSSLVRTATRSKLRVHALLDKENKGIRFPFSGQGRKQLEQVELFEHRREILEHELAIIDFAEERAHLQDLRIRRMASHEPDVARLRTIPGFDVLMATAFLAEIGDVGRFRNADQVAAYVGLVPRVYSSGGTRRCGRITKTGSKFMRWMLVQAAWAAIKASSNLRLRFASIGRRRGQKVAIVAIARKLATIAFRVLRDKSEYKEEMLDAGLARAAF

SEQ ID NO: 504785 - protein, 314 aa, unidentified
MRYLGIDVAKDILCASFGSGAVSFPNTSTGIQSFILHQQLHHDPVEALCESTGDYHLLLCKEFLAAQIPLRLSNPLLTKRAIRSTVRNKKTDTSDAELLASMAQQHVGTLVTVDTIQQVKKTTLRLQQQLVGMAADLKRMQHALKQKAQVMDVTKLQLVLSNLTASIEEQTDKLMEEATKQQNRQEEILDSIPGCGKALAAIISAEAGDVRRFDAAKQLKAYVGIDPVIRQSGNACFRGRITKRGNRFLRKALFLAACIARIHDPELKVYYEKKRAEGKSYRHVIVIIIRKLCERIFSLIKHDRLYVKRTPLTI

SEQ ID NO: 504786 - protein, 386 aa, unidentified
MNYIGFDISKYKHDCFIATKTINHQFSFENSKSGFNELLSYFKPLSKTEMIIGLEATGHYGENLKSFLTLHGYSFMEINPFLMKKFSEAQSLRKTKTDKKDAQMISSYMRTVDYKAYHHQSYHISALKSLTRLRFKLISMRTKHYNMMTKVLDVIFPEYKPFMREQGYSETSLYILKHFSSPIRISKLRDTHYEALRKRSMGKFRYPKFVKLKNLALNTIGVTQDHQLFKLTTSIRYVEMINKDIDKTEEQIISLMKQFPTKIETIKGIGVISAATIISEYGDIKLFSNPAEMLSYAGLDSSIKQSGTMATTGKLVKRGSKYLRATLVNISMMVMIYNPIFYDYYTKKKLEGKHHRVALIHLAKKLIRIIHHLETTDEDFDSKKLK

SEQ ID NO: 504787 - protein, 366 aa, unidentified
MNYRVYCGVDFHARQQTICCLKTETGVITTHELKHRDKAALKAFYAELGGPTLVALEASGYSPWFESLLEELGHQVWLGDAAEIRRCARRRQKNDRRDAELILDLLIHDEFPRVHRPTAGSREILRMLRYRHKLVKMRTSIKNSLHCLAIQSGLSRQAQLFSRAGLQQLQTVSMSPVMQQQRQQWLSLMEPLNQRIDEAENWLKQQAKGDPRISRLRTYPGIGLLTALGLVHTLEPISRFPNQRKVTAYVGFDPREHSSAEKKRYLGISKAGSRLLRFLMVEAGHTTVRYDQDLKRFYRRLYQRHGKAKAKVAVARKLLVRSYILLRDEIDYAEFQRRAVAARLAPTNTRPNMPEVLIGQPASLEQ

SEQ ID NO: 504788 - protein, 357 aa, unidentified
MQRNKLSFKGQNIYVGIDVHLKTWHVTTVTESGYKYSFAQHSDARELFDRLNRKFPDAHFLSAYEAGFCGFSAHYALTELGFENIVVHAADIPTTGKEKAMKTDAVDSEKIAWALKRGELTGIYVKDKQYMDDTNLVRLRQRFVADLSRQKNRTKHLLYTQGVTFPERFSKNRTHWSRNFMSWLREEVELLSGEKRSLVLLCDQVENTRRAILAVTREIRRLSTSDKYKENYGLLSSVPGFGLIMSMSMLTELDNDVTRFPNERTFVSMLGLIPTCHDSGEKKAVGEKTNRGSKQLGPLIVEASWVAIQRDKGMGAYYSNCCQSMKPHKAIIKVARKLACRAYAVLKTKTKYKYEQS

SEQ ID NO: 504789 - protein, 339 aa, unidentified
MEMVTLGADSHKATHTLVAVDGAARQLGYRTFAANTAGHLEALAWAAQWSERRWAMEDCRHVSRRLEHDLLGAGETVVRVPPKLMAGARSSARTRGKSDPIDALAVARAAVREPGLPPATMDGPSRELRLLVDHREDLVNERTRIQNRLRWHLHELNPGGAAVGSLSRKKGVDLLDEELAHHHGLVADLARDHAASIRSLNSRIDALEHEILARTRTVAPSLLALPGCGYLTAAKLLGEVGGAARFKSRAAFAMHNGTAPIPVWSGRADRFRLNRGGNRKLNTALHTIALTQLRLEGPGKHYIAKRVSLGNTKREAIRALRRRISDEVYRRMLLDESSD

SEQ ID NO: 504790 - protein, 348 aa, unidentified
MGYFVGLDVSVKETSVCVVDDAGKVILEQKVPTEPADIIALLTSLGVSFCRIGIEAGPLSQWLFNALTEAALPVICVETRHMKALLTAQQINKTDRNDARGIAQMMRVGLFKPVHVKTLVAQEQRMLLTSRKLLQRKLLDLECDLRGTLRNFGLKVGVVSGGRYEARIRELVTDFPRLTAIVGPLLNVRRVMRQQLAVLHKMLLDTVRDDAVCRLLMTAPGVGAVVALTYRATVDQPQRFVHSRAVGAHVGLTPKRYQSGETDYDGGVSKCGDPLLRTMLYEAAQVLLVHSGKWSWLKAWGVRVAQRRGMRRAIVAVARRLAVVLHRMWVDGSEFRCSKNSTPVSAAA

SEQ ID NO: 504791 - protein, 390 aa, unidentified
MKEGKELLVQNVGVDVSKDTLDVVLATMNYGREIKIKGSRKFPNTVQGFREFVKWLEAKRTKPCELRVLMEATGIYYEQFAWYLHEREYAVSVVLPTKAKRYLQAIGNKSKNDKIDAKGLSRMGLEQNLSPWRPLSKNIYRLRLLTRQLEDFNNQRTVFLNQLHALSHSAYPVKEVEKNLNKLIRELEKGIANINTAIEKLIKDDEKLANRVDKILKIKGVGIKTIAVLLAETNGFETFENQGQLVSYSGYDIIENQSGKHNGKTKMSKKGNAHIRRAMHLPAFGVVRYNQGTFNNLYNRLIAKGKTKMQAYVAVQRKLLVLIWALWKKDQEYDQNYHLSTQKYSGNDEPKPFFSLGSVGDTKKVGPVSTGPTVDELPCNESPEALFSLM

SEQ ID NO: 504792 - protein, 325 aa, unidentified
MEKVFIGVDVSKLTLDFYVKSNSSQQHYRINNSVKAIKKLLKPFQNNENTIIAMENTGRYNFALYEFLAVNNFSVFVVNPLHLKRSIGLLRGKNDKIDAQRICLFIEKNHMDLESWNPSSIDIQKISLLNTERRHRVKLKSGLLRQTQDLKLLKNIADKEIIKLNQQLIKTIEKQIKVIEDKILELIFSNDELKEQFNRMISIPGVGKVLATLMIIKTKGFSEVKSARKMACFAGVVPFEHRSGSSIYYKPRISTMADKELKKVLHLAALSTIRLKNDMAAYFNRKVNEGKNKMSVLNAVRNKIIHRIYAVVKNKSVYENCLVVS

SEQ ID NO: 504793 - protein, 390 aa, unidentified
MIYVGIDIAKDKHDCYIVTSDGVLISDNLRITNTLEGFNTLYSIISSNCQVANDVRIGLESTGHYGINLENFLRTKGYQLTVFNPLAVASFRKSQTLRKTKTDKVDAKFIATLLFNSDQTLTALVSDEIRELKSLTRHRYRLIGQCTKLKVSVSRLLTILFPELGTLIWSIHQKSSYAMLLEFPSAHAISNCHLTKLTNLLSKTSKGKYGKDKAIALKNLASKSIGINSGGTSFELQQTIRIINYYLDEISILDKKIKELLIQMKTPLISIPGISYTLASIILSEIGDITRFQTPAKLLAFAGLEPSVYQSGKFQATGTSMVKRGSTYLRWAIIQAARLVAMRDPTFKLYQEKKKNEGKHHYVAISHTSKKLLRVIFHLLKNNINFIPQN

SEQ ID NO: 504794 - protein, 509 aa, unidentified
MSNREEKRCRFRNEQKELHLLVNARRQAEHQACVVGLSPERILYVPLDIGKNVNWSRADTASGRMVMAPQEFSTTQEGYLLWRQQLRNNLNSGQFDLVILGNEPTGIYHEAWTRQILTDFAAELSRETGPRLRYRLLNPYQVKLERTKLVLRSRKSDQIDLLAMTNLLRQGQGNPAVLPNAEVAALNQSVALSYQALRKLKACRIDLCREFDRIWPGAIVNVERFRRAHPDMPVPTPIVQTKPLERITVRLLLEHASSPYEVRQLGIEGIIALFHQHDVSCGLRTAQRIVDCANQALPAPRALVEVYQQGLRQLCQDEQHWLARQAQHEAQLTRLVQETPARFLLSIKGISPTFAAYYLSLVGAPSFFDWADQVWAYIGFDPIQSQSGDSNPTQRLCISRRGDPFYRNVLTWMACLVAGHHPAFGLTFIQAEQRGLGLWGAAIHTAHKLNRTCFRLLLDQRPYNDTTHPDDFARWRTFWLAHRQHRKSPKTTLAPAAWRPTPVVTEPSI

SEQ ID NO: 504795 - protein, 349 aa, unidentified
MKTLQFTEKTAYQGESIYVGIDVHKKNWGICILGDYLERKVYSQPPQPEVLVNYLHTHFPGASYYSAYEAGFNGFWIDRELQRYGINNVVVNPSDIPTTDKNDKRDARKIAKGLRHGNLRRIYVPHQYILEDRLLLRGRQKLLADIKRCKCRIKSQLHFFGIKIPEALDKPYWSRSFRHWLQTKLFEGSAQVLLTAQLEELESIERQKKNIEKQIIALAKGKYNQFVSLLRSIPGIGILAAMTLITELVNMEVLRRQIRCIAFWGLVPNVYVSGETEIVRGMTERHNAFLKPILIQAAWRAAKLDPSLMLTYNQLCRRMKPNKAIIRIAKKLSNRIRYVWKNQISYQNL

SEQ ID NO: 504796 - protein, 352 aa, unidentified
MSKASTYRIGFDIAKGVFQVHGVKNEAGEAVAIKRRLKRGAVEAFFAKLPPSLIGMEACGSAHYWARLAQTYGHEVRLMPPAYVKAYVKRNKTDAHDAAAICEAVARPSMRFVAVKSEADQATLTLHRMRASFVAKRTAAANQLRAALAEFGIVARVGKAGFNELLHLIESEAESLARLPRALRLVLTELALQWQHCEATVRRMDVEIAAGTKASERARRLTAVPGIGPVGASAIDALLPDPQLFRSGRDFAAWIGLTPRDDSSGRTVRRGSITKKGDGYLRRILILGATSYLARVRRGQTKGASAWTLRMSSHPKRKLAAVALANKTARIAWAMLARNQDYRAPAAVPQAA

SEQ ID NO: 504797 - protein, 400 aa, unidentified
MLSIGIDVSKGKSTVCGMKPGGEIVYAPFEVQHTREGMSELVSLLRSSGEEVRAVLESTGSYHCPVVAALLENGIFVSVVNSLRMKRFCSQSIRKVKTDRIDAMQIALYGLAYWQELQPTKLPEDTYRELQLLARQYYQMTSMLIKAKVDFNALCDQVLPGMQELMSDHAGRHKLSDFVLRYCHTTHILEMGETRFRKDYCKWAEKKGYRNCERMAALIFATAQNGIPVLPNAPSTQIVITEAIRVLHTVEASRDAILTQMQALAKTLPEYSLVREMPCIGDTLAPRLIAEIGDVRRFHSKRALIAYAGIDAPPYQSGKFCANNRHISKRGNRYLRKTGYEVMQSYVMHKPANDPIFTFIEKKRGEGKSGKLAMVAGLNKFLRVYYGKVTELYRSLPAIE

SEQ ID NO: 504798 - protein, 393 aa, unidentified
MFYIGIDIAKKAHEVCFLDANGDVLDGNSFKIPNTASGVEKLQKMFDKYGLTPDNSVAGMEATGHYWMVLYSWITEKGFDVKVINPIVTDAYRNMLIRKTKNDRIDAQVVARVLMLGEYQESPIADEDIISLRQFCRFRLWQIQTCSDLKRKVITLLDQVFPEYEELFSDVFGLTSKEILKSYTSPEEIASINTRKLTNLLEKASRGRFGKEKAMEIKAVAVNSIGIQFAVDAFSFQIRQIIEQIEFVEEQLASLDQQIEAYMEKLSSPITSIPGIGPVYGAVILAEIGNINRFPSGKQLVSYSGIDASVHESGEFAGTRSHISKRGSPYLRRAIWGAAFIASWSDPELSAYYQRLRARGKHHYVAVGAVARKLCYIIYAVLSENRPFEKRSV

SEQ ID NO: 504799 - protein, 457 aa, unidentified
MSQTKPSRRSRELSPVHPAAAAIDIGATVHVAAVGSNRDKEPVRTFRTFTADLHRLADWFSECGIKTVAMESTGVYWIPVFEILEQRGFEVMVVNARDAKHVPGRKTDVCDAQWLQRLHEYGLLRASFRPQAEMAALRAYLRQRERLLDYAAAHIQHMQKALMQMNLQLHHVVSDITGATGMSIIRAIVAGERDPNVLASQRDRRCHASEETVCQALIGNYREEHIFALTQAVELYDVYQTKMLICDMQIEAILKRLKKNAAPPKSKLPPARPRARQSNEPAFDVREALHAILGVDLTQINGLGPSLALKLVGECGTNLTAWPSAKHFTSWLGLAPHNKISGGKVLSSKTRRTRNRAASLLRLVASSVGRTDTALGAFYRRLSARVGKAKAITATARKIAVLFYNTLRHGMSYVDPGANYYEDRYQKRVLNNLQRRARSLGFILLKVEPDTAQVGVS

SEQ ID NO: 504800 - protein, 400 aa, unidentified
MDDIDDVGVFLGLDVGKSAHHGHGLTPAGKKVFDKQLPNSEPKLRAVFDKLAAKFGTVLVIVDQPASIGALPLTVARDAGCKVAYLPGLSMRRIADLYPGEAKTDAKDAAVIADAARTMPHTLRSLELTDEITAELTVLVGFDQDLAAEATRTSNRIRGLLTQFHPSLERVLGPRLDHPAVTWLLERYGSPASLRKAGRRRLVEVIRPKAPRMAQRLIDEVFDALDEQTVVVPGTGTLDIVIPSLARSLTAVHEQRRALETQIGQLLEAHPLSKVLTSLPGVGVRTAAALLVTVGDGTSFPTAAHLASYAGLAPTTKSSGTSIHGEHAPRGGNRQLKRAMFLSAFAALHDPASRSYYDRCRARGKTHTQALLRLARQRINVLFAMLRDGAFYEPRAPRLA

SEQ ID NO: 504801 - protein, 469 aa, unidentified
METKKTTRKTKNERFVNMPVLNPHAAGIDIGDTLHAVAVPEGRDEQSVRTFGAMTCDLIELVEWLKKCNIETVAMESTGVYWKPLYALLIHNGFEVYLVNAQHVRNVTGRKTDQSDAQWLQQLHSCGLLKSCYLPDAEQESLRALVRYRKVILYDCNRYVLRIQKALELMNIKIHTVLANMMCKSGIAIIEKIIAGERKAENFLPLIDKRVRARKDVIVKSLEGNWLQEHLYLLEENYKCYQFMQQRIACCEKEILQQLEKYEANLNEGIIAPKDTAPRPEITDRFIKRKMEKPHPTLNTMPYLEKIFGVNVLAIYGLSDVGGLEILAETGTDLSKWPTEKHFVSWLNLCPNNKISGGKVISSKLMKKKTNMASQAFRAAANGVQKSDHWLGNYFRRMKAKGGQRYAIVATANKIATIYYKMVRNKQEFRPIDLQQYQEKYRQAKILYLEKRLKKLKRRSCFCLNKRIK

SEQ ID NO: 504802 - protein, 379 aa, unidentified
MSSNVCHQIIYLAIELSSSSWVIAYRLPANDKAKVHRLEGGDGAGLLAFIASLRHRLDPSDDASTLDASTLVVSCFEAGRDGFWLHRLLSAHGVISHVVEPTSILVTRGARRAKTDRLDAFGLLRVLAAKFAGDPDACRIVVVPTVEEADAKRPHREREFLVQERVRIENRIAALLATQGIRGRPSLRSWDADMRALRTGDGHPLLTHLVAELNRLRRRLSLTLEMIRELDAVREQALEAQHDSASRTVKALCTIRGIGVNFASVLTREVFYRTFDNRRQIASYLGLAPTPFQSGGMDRDRRINRAGNSRARKTLVQLAWLWLRYQPESSLAAWFRDRVGSLQGRTRRVAIVALARKLLIAIWRFVTLGLAPEGAIIAA

SEQ ID NO: 504803 - protein, 400 aa, unidentified
MRTVFGIDVSKASSEVAILVNGERVYGYTMPNDIIGFSRLLEDLKTVSNPEIIFEATGVYSRRLQAFLEEKSYDYTRLNPLEAKKQLDGLRVRKTDKIDAEKLASSQFVLNRKPTYVQEEVYQNLHDLSRFYQNLTEDIVKTKNRLHKVLQVAFPEIENLLSTPTGEQYWNLVSIFPTKHWVLELSEVELKEAIRNSTSKRISENRVGNLTKKLVGLAKQSYSAISKTSPMVEEVKYDAQELIRLTNRREQVLQQLIVLAEPLPEYEVLLSIPGIAETTATSIIGELGDIRRFKSANQINAFIGIDLKHYESGDFLGQEHITKRGNPYARKILYKCIHNIASASHTNPCHIADFYEKRKRQSQTTSTKPHTIASIHRLIRTMYYLIMHNKLYDYTLAQSH

SEQ ID NO: 504804 - protein, 440 aa, unidentified
MPKVTVFETVYEQAAGIDIGAAKIFVSVDGIEVVSFDTFTSGYYQCAEYLQSKGIRHVAMEATGVYWVALYAMLESCGLKVCLVNPKETKQVKGRKTDVKDCQWIQKLFSSGILRQSFIPETNYLEVRQLVRERLDIIEMGSVYVNKMQKCLELMNIKLTEVISQVQGSSGIKMIRAILAGNRDKEYLLSLCDKRIIARKGESVIKALEGNYNDTFLFMLEQNLHLWEIHQHQLSVIDNRISELLQKMCATKEPVVVHSKPKPVRHHAPKIAGLHGMLIQLYGVNASSISGINDYTLLRLLGETGADMSRFATAKHFASWCGLSPKQHQSGKMNKRVKGPRCNQAGQLFKEIAQSLLNSKYIAIGAFIRKLKTRKDSAIAIKAGARKLALAYYNALTKGTDYVEQGIKQYEDQIRQREKASLYKLAKKYNMQITEKQTAA

SEQ ID NO: 504805 - protein, 388 aa, unidentified
MIYVGIDIAKLNHFAAAISSDCEILIEPFQFSNDYDGFYLLLSHLAPLDQNSIIIGLESTAHYGDNLVRFLISKDFKVCVLNPIQTSSMRKNNVRKTKTDKVDTFVIAKTLIMQDSLRFMSLEDLDYIELKELGRFRQKLVKQRTRLKIQLTSYVDQVFPELQYFFKSGLHQNSVYALLKEAPTPNAIASMHLTHLAHILEVASHGHFDKQKARDLRVLAQKSVGVSDSSLSIQITHTIQQIELLDSQLLHTELEMANLVTCLHSVLMTIPGIGFVNGGMILGEIGDIHRFSEPKKLLAFAGLDPTVYQSGNFQAHRTRMSKRGSKVLRYALMNAAHNVVKNNATFKAYYDAKRAEGRSHYNALGHCAGKLVRVIWKMLTDEVEFNLE

SEQ ID NO: 504806 - protein, 428 aa, unidentified
MIPAVIERCAGIDVHKKFVMVCVLIGPADSNPTPQIRRFSTFNAELERLRKWLLELQCNRVAMESTGPYWKPVFNVLEEAGIEMVLANPQQVKNLRGHKTDPKDAHWLAHLFRHGMIRPSYIPPKPIRELRDLTRRRKQLVRNGAMERNRVQKLLEEANVKLGSVLSDVFGASGQDMVEALMKGEATAEQIAQLAQRRARKKIPEIQKSIEGHRLNQTHRDLMQQCMTHLAFLEEQIEEIDQQIQNKIRSYGLSEAYELLQTVPGMQAEAAATVLAEVGADVQAFPSAAKLSSWAGVCPGNNESAGKRKSSHTTKGNPYLREVLLECAWASSRKKNSQMQHRYRRLLGRRGKKRAAVAVAHALVQAVYYVLSTRKPFVDTAESPRSPGQVRRLVRHHTRRLRKLDCWTRRTKSENKGNSMAQNQQTSG

SEQ ID NO: 504807 - protein, 416 aa, unidentified
MKDLLEVCCGLDVHKEMIAACLLSGSLGTEPKEEVREFSTLLSGLEEMREWLKANNCRDIAMESTGVYWFPIYNVLEAGAEEDFKFNITVANPYHMKNVPGKKTDIKDSRWIAGLLRAGLLEPSYIPPREIRELRDWTRYRRTLVQEMTGHKNRIEKQLQACGFKLSTVLTDIFGKTGMALIRKLCEAGSIEPEEILNLLHGTARKKLDVIRQAVNGRMDGHDRAFLSMLVRNYEQSLKEIEDVEREIYACAQKYEPSIALLETIPGISGMTAITMISELGTDLSMFPTSGHLCSWAGVVPGDNESAGKKKSNRLKKGNPYVKCVICQCAWAATRARKNYLREWFYRLSKRRGMKKAVIALGHKLLVIVYNILTTGEAYDESRFAEVQKRVDESKKMKLIAQARKYGLVLTDARGT

SEQ ID NO: 504808 - protein, 447 aa, unidentified
MLSFEDSAIRVAACSERADRRKTLEEKEVEKPIRAWIGIDWADEKHDVSVYDVASGKQEALVIRQTPEALQEWLGQLRAKYEGGYVAVVLEQGRGGLLNALMGCEFLVLYIINPKSLSSFREAFYGSGATSDPVDAELMRDMVRQNPSRFRAWRPDDVLTRSLRLLTEGRRDLVNQSTALTNQLTALLKGYYPQALRWVGTLDSGWACDFLEQWPTLQSLQSSSRRQILRFYEKHPRASVDLEQQLKQFQEARALTQDEAVLEASALMVQALVSQLRPLLASIAEFDRKIAAIFRRHPDRPIFESFPGAGAALAPRLTAAFGTDRDRFQAATEMQELSGIAPVTEKSGKKSFVHWRYACPKFVRQTFQEFADHSRRWRKWAKAHYELLRQRGKSHNAAVRALAYKWIRILFRCWKDRQPYRDEVYTKSLFKHGSPLASLLAESVEKP

SEQ ID NO: 504809 - protein, 385 aa, unidentified
MTGQYRVPAFIPRDYEIFAGLDVDKQSIAVTFADHKKLVRSLRLPYSSEQLVSYVRKHFPAQRVAFVYEAGPTGFGLYDDLVAEGHPCLVVAPSMVPRAPGQRVKTNRLDSKKLSEGLRGGQLHSIHVPSAVYRDLRHLVQLRDTHVRQMTATKCRIKSLLLYQGMAFPAENGRWSARALGELKLMPCSRAVRFKLDQLIRTLQFHFQSAATVQKEIRRFCQNDPELRQSISLLTSIPGIGWIVASHLVARLGDWREINNVRQIGGFLGLVSSEHSTGDHQDRGAITRAGDSRLRNKLIQSAWVAIGKDPQLRAFYRRIHQRHPIKVAARKAIVAVARKLTTRIYAVLKEQRPYEFRVDSSAAPLTAEETAGPRERLDMAQSEQP

SEQ ID NO: 504810 - protein, 321 aa, unidentified
MHIFILGIDVAKAKLDCALRLPNGKIRSKSIENNHQGFKVLMQWLAKHEAINIHVCMEATGVYWEGVAEYLAAQSMMVSVLNPSQIKAFGVSRMVRTKTDKVDAQLIAEFCFERKPEPWQAPSPAEQALRAMVLRLEALQNMRTQEINRLEVAREAVKAGIESHIAWLDQEIKALSKLIQDHIDNDPDLNSKRNLLDSVPGLGERSIAVLLSFYANTDRFGNARKAVAFAGLDPRHHESGSSVKAKPRMSKVGHAFLRKALYMPAMVTLYRTAWGKTFRARLAASGKPPMLIIGAMMRKLIHVAFGVLKSQKSFDSSLHIT

SEQ ID NO: 504811 - protein, 450 aa, unidentified
MNKGVKKTGKGKKEISFQLVHPMAAGIDVSVSEMVVAIPEGLAEESVRAFGTMTCDLRELCNWLKECEIETVAMESTGVYWQPLFYMLLSAGFDVCLVNAAHVKNVSGRKTDESDAQWIQKLHSCGLLSGSYLPEDVQRSIRCLTRTRRSYTEEQNKHLNRIQKELESMNIKFHTIINSIAGVSGMAVLQAILDGERNPENFLVHIDRRVKASREEIVKSLEGNWDPTHLFLLAIHVASYKECQKTIEELDKELEKKLVLLEAKVNHGEVKSLRDLQKRRHKNSPQAQIEQQLKNIHGVNVLSIYGMGMISALEILAETGIDLSKWQTENHFVSWLNLCPNNKRSGGKELSSKVPRRRANPASQAFKSAANALQRSQHWLGDYFRRMKSRGGNKYAILATANKLAKIYYRMIQEKEEFKPINLQEYRTKFNQDKIAYLERKLQLLKNQAA

SEQ ID NO: 504812 - protein, 394 aa, unidentified
MIYAGVDIAKMDHVIGAVDERGAEMCRPMPFKNTEAGLERAVAWLEGLAESPSDVVVGMEATGHYWMACYSFLVARGYSVAVINPMQVKAVRKLKGLDKVKNDRVDAGLIAEALRIGQYDETRLATDEVASLRSLSRYLQSLRGMVAELKTQCICLMDAHFPEYAGIFSDMFGAGSRAVLSKSPLPFELARRRGDSLARDIAEASRRGGRSAGYAAEIKAAARSSIGVRLGQEAASFQVKSLIRQIEFAESECAKVEARVRALLDEVEPLVLTIPGVSYVTGAQIVSEIGDASRFRNAPALVSYAGLNSSVSQSGQFDSGGGPITKHGSPYLRRALWLAANRARQCDPGLRAFYEKKRAEGKPHRVAVTAVARKLCHIVFAVMRDQAPYDPGRE

SEQ ID NO: 504813 - protein, 414 aa, unidentified
MLFVGDDWAEDHHDVELMDAAWRRLAAARLPEGVAGITRLHEMIGAHLGEDAGAGEDAGAGEVAIGIETDRGPWVSALVAAGYTVYAVNPLQAARYRERHGVSGAKSDKADAHTLADMVRTDAHQLRPVAADSPQAEAIKVVARAHKTLIWERTRHTLRLRYVLREYFPAALEAFDDLAAPDTLELLAKAPDPASAAKLNRSQIRAALKHARRRDIDMKTTRIQAALRSQQLGRAPVITAAYAATTRSIAAVLATLTEQISTLRGQVETHFGRHPDAEIILSQPGTGVLLGARVLAEFGDAPGRYADAKARKNYAGTSPITRQSGKRKITHARFVHNDRLVDALMSQAQSALLASPGARAYYDKQRARGLDHHAALRQLANRLVGILHGCLKTRTLYDEATAWSHHNQDQRTAA

SEQ ID NO: 504814 - protein, 443 aa, unidentified
MASNLFKIVRFRCGGIDVHKNLVVCAASETDFKTYETTFYTSQYTCFNDDLDKMCKWFEEHGVKEVAMESTGKYWIPVTNKLEEHHIKFTLVHPKYVKAASGQKNDKADARFICSMFAYDMAGLGSVILPKVFRENRDLARRYWKLGYCVSSEKCRLQNCMTMSNLSLDSVFTDPFGKSAQAVMQELLSNRAVDDQKILSLVHGRCKNKDKLLDAIHGSNITPDQHFKMADITQHLNELEEHRDAVFSEILVRLEPYMDSIILLTSIPGIQLTSAVLIVSEIGTDMSFWKTGRQLSAWAGLTPNNDQSHNKKKSTRITKAGTYLKPLMVQCALAAIKCKGDKGYFAIKYCRIKKRRGHKKAIVAIARMMMISIYHVLKDHIEFKPSDYDELINPKPKKAKEFSESDAINLLKSHGYDVSLLHKTTITDRTIPSPAATATSTAA

SEQ ID NO: 504815 - protein, 332 aa, unidentified
MDLIHIGIDISKKTLDLSIYGRERRDSGFLHVTNDKKGFSKILSWVKGLKIQLSQVWFCMEHTGEYGYALALFFDEHGIAYSMVSGADIKGANPSKKGKNDKQDAAMIARYAHEKRDSLAPSHLNIRPLYELRCLLNERRMYVRQRAQWKAQRSERRLFSTKHRDSRVNRAIKTLSATIREIEEEIRSVIAVNEDIRRNFELIMSIPGIGLINAVNFIVATANFSTFNNARRYASHICVAPFAVVSGTSINKGTHTSKIGRHDLKTELRTTVLAVLKADSEMRKYFDRRKADGKKYNVIANNIMFKLICRVFAVVRRGTGFVETHKYLQKKE

SEQ ID NO: 504816 - protein, 370 aa, unidentified
MQDIIFVGVDVHKATVSVAVAESGRGGEVRAIGTFANNSGEITKLAERLGKGGRHLHVCYEAGPCGYGLHRQLTGLGHDCIVVAPSLIPMKAGDRVKTDRRDAVMLAKLHRAGELTAVWVPDDAHEAMRDLVRARATARRVLSKARQHIQGFLLRHGRVYSGKKGWTRMYRRWLAQVRFDHPAQQIVLQDYINAVVDAEERVKRLTGQIEALVPQWSMAPVVQAFQAMRGVALITAVTVAAEVGDFSRFSNPRQLMAYLGLVPSEHSSGSKVRRGGITKAGSILARTALVEGAWTYRLQARVSNTLKGRIESLPKPVRDIAWKAQVRLCARYRRLSAAGKLRTVVTTAIAREMVGFLWAIAREVQVSAKA

SEQ ID NO: 504817 - protein, 356 aa, unidentified
MELHTLGIDLGKTTFHVVGLNKRGEVVMRKKFSRIQLLRFTANLKVGLIGMESCGGAHFLGRSLREQGHEVRLIPAQYVKPFVKTNKNDFIDAEAIAEAVSRPTMRFVPIKSDDQLDLQSLHRVRERWVMRRTAVVNQIRSVLLERGIILRKGRKFVDQELPRILENGELRLSGALRMLLAQLKIELDQLARRITEMDRIIQQTAREHEGCKRMQAIPGVGPVTATAIVAAIGNGCAFGKGRDFAAWIGLVPRQYSTGGKQKLLGISKRGNPYLRTLFVQGARAVLQKRMHQLPGLRCWLERLSSRKHGNVAVVALANKLARMAWAVLAKNEPYQPDVSVSAAPLPGGIRYEFSEA

SEQ ID NO: 504818 - protein, 394 aa, unidentified
MCQHYQTEASMTKHNILFIGLDTHKTFTEVAYIKDQRGAKSIHLGKMLSNKAAFKKLARQLQSKYPDATLHFVYEAGPCGYWIYRLLTSLNHCCYVIAPSLIPKKPGERIKTDKRDSLKLAKLLKSEDLTPIYVPEPEDEAVRDLSRSRETAMKDLKDAKYQLKALLLRNNINSKVKDNWSLQHLRWLAELVLPHPCQQIVLQEAVSTITERLRRLKRLDNELTHQVKSWRYYPVVKAVQAMRGVRLLVATGVIAELGDLTRFDHPRKLMSYLGLVPSEHSSGSKRHLGAITKCGNSRARRLLVEGAHSYKHNANISKEMQLRQEGLSKEIIDMAWQAQLRLCRRYNRLMHKGKHRNVVVTAIAREMIAYIWAISREVVLPVIDVKLRLARMPA

SEQ ID NO: 504819 - protein, 367 aa, unidentified
MSSIAHRGFVHLGMDVSKDSIAVAVLSPDRDTAEVDKIFHDAESVRRLVKRLGKPKEIWACYEAGPTGYDLQRLLTSMGVRCDVVAPSLIPKGSGDRVKTDRRDARRLAGLHRAGELTPIAIPTPAQEGVRDLCRTRGDMVQDLTRSRNRLSGFLLRHSVVWRGGSPWTERHGRWLTTLSFDDPAIATTYSHYRATVKLRDTALESVEADLVPWCEKDPFGHQVQRLAAYRGVTRIGALCLAAEVFDWRRFPKARPFMSFTGLVPGENSTGLTQRRGSITRAGNAHLRGQLCEAAWAYQHSPNVGVGIRERQQGVPPETVARSWAAQVRLSKRFRQLAAHKNVRSVVAAAIARELAGFLWAEMVAEA

SEQ ID NO: 504820 - protein, 346 aa, unidentified
MAQVTTVGIDTSKHVFHIHGVDARGHDVLTKRLSRQKVLPFMTQLPSCLIGMEASGGTHYWAREFCKLGHTVKLMPPQFVKPYIQRQKNDPNDAAGICEAASRPRIRGVAVKSVAQQDLQALHRIRERQMTARTALVNQLRGLLAEYGIVIPKGVAKVRHRLPVLLAESESGLTATAREWLATLQTELHALDERIGGTDQHLERLLAANDACQRLLQLPGIGPLTATALVAAVGDAKDFKNGRQFAAWLGLVPRQHSTGGKPTLLGITKRGNRSLRALLIHGARSVLRVVDCKTDARSRWLRGVKARRGANCASVAQANKTARVAWALLARGERYRPSAQVRSAGA

SEQ ID NO: 504821 - protein, 334 aa, unidentified
MSSVTVFVGLDYHQAFVQVCVMNQAGAILGNRRCDNIASSIVEYVRAYGDHVIAAIEACCGAAALADELIAAGWKVSLAHAGYVSKIKQSPDKTDWSDARLVADLIRIGYLPNVWLPPAWLRQLRHVVRYRQQLAQERRTAKLRVTALLRTHRIEFHGSRWTKCWVAAVRDCRGLGTEGQWVVGQLLDQIDFLQKQLDITEARLRELTIKDAFVQKLLGYAGVGLITAVMLRAELGDVSRFRSGKQLSRFCGISPRNASSGLKQADAGLIRAGNPQLRTVLIEAAHRLQRCDPRWAELGLQLRARGKPGSVVAAAVANRWVRWLYHQLAEIQAV

SEQ ID NO: 504822 - protein, 402 aa, unidentified
MPMLSIGIDVSKGKSTVCGMKPGGEIVYTPFEIQHTREGMSELVSLLHNSGEEVRAVLESTGSYHCPVVAALLENGIFVSVVNSLRMKRFCSQSIRKVKTDQIDAMQIALYGLAYWQELQPTKLPEDTYRELQLLARQYYQMTSLLIKAKVDFNAICDQVLPGMQELMNDHAGRHKLSDFVLRYRHTTHILEMGETRFRKDYCKWAEKKGYRNCERMAALIFATAQNGIPVLPNAPSTQIVITEAIRVLHTVEASRDAILTQMQALAKTLPEYSLVREMPCIGDTLAPRLIAEIGDVRRFHSKRALIAYAGIDAPPYQSGKFCANNRHISKRGNRYLRKTGYEVMQSYVMHKPANDPIFTFIEKKRGEGKSGKLAMVAGLNKFLRIYYGKVTELYRSLPAIE

SEQ ID NO: 504823 - protein, 347 aa, unidentified
MSITMIGLDTAKAVFQVHAVDAAGQMVTRRKLRRNELIAFFEKQAACTVVMEACGAAHHWARVLTGLGHDVKLIAPEAVRPFVKKGKKNDAADAAAICEAASRPGVRFVPIKSPEQQGILALHSARTLLVKQQTMLANAIRGMAAEFGLTVPLGMGKLGELMALVDADEAVPERGRQALSALFDQCSALDESIETFEAEIVAHARHDDTARRLATIPGIGPITASLIAATVADIGVFQSARHFAAWLGLVPRQHSTGGKIRLGRITKTGNREIRRLLVLGATSMVYRAPQWNSAAGVWTRAILERRPVRLVTVALANKMARIAWALMTRSEVYHAKGRVAIAAEAVA

SEQ ID NO: 504824 - protein, 415 aa, unidentified
MKVNSHKHYAAIIGLDWADKKHDVCIMPSDTEQFEYSQFAHTPESIKDWSIALHQRFSGQKIAICLELKSGPIVYALLQYPWFDLYPVAPSTLAKYREAFSSSGAKDDPSDAYLMVDFTLRHSDKLRLISSDNEETRILTRFVEQRRLLVSEKVRLTHRISRALKDYYPQALDWFSDIDSVIFCDFIKRWPTLKKVRRAHESTLIEFFHQHHVRYQSRIDKRLEGIKNAIPLTEDNAVIEPSENYVLCLIKILRDMLSILHEYDQKIAERFKRHPDHEIFQSFPGAGPVLAPRLLTAMGSKRGRFASSDELVRQIGVAPVVKRSGQSTWIHWRYNCPKFVRQTFVEWANQSIHYSYWARIYYEQQEAKGKARQTILRSLAYKWARIVYRCWKNHEPYNEARYLMALKDKGSPLVA

SEQ ID NO: 504825 - protein, 405 aa, unidentified
MNAVGIDVSKGKSTVTIRRPGDVVLMPPCDIPHTQSAINALIEQIKTLDGETKACMEHTGRYYEPVANWLSDAGIFVSAVNPILIRDFADDSLRAPKTDKADSKKIARYALDRWAKLKQYGSMDKTRNQLKTMNRQFGFYMDQKTAMKNNLISLLDQTYPGANDFFDSPARSDGSQKWVDFVYTYWHADCVRSKSLQAFTEHYQKWCKRNRYNFSASKAEKIYQSSSNLIAVFPKDDSTKTLIQQAVTMLNTASQTVESLRIKMDQTASTLPEYPSVMAMNGVGPSLGPQLMAEIGDVTRFTHRGALTAFAGVDPGKNDSGKHNQKSVPTSKKGSPSLRKTLFQIMDGLIKRSPVDDPVYAFMDKKRSEGKPYYVYMTAGANKFLRIYYGRVREYLASLEESKES

SEQ ID NO: 504826 - protein, 406 aa, unidentified
MTAVMIGIDPHKGSHTAVAISATEEPLGDLRVRAGAAQAGALVAWAAGWPERTWAVEGAGGLGHLLAQQLVAAGERVLDVPPKLAARVRLLQAGDTNKNDPNDALSVAVAALRSKARRQVAAEDHAAVLKVWSKRHRDLARSRNQVACRLHAVLCDLLPGGVSKEITAAHAARILEQITPSGAVAAARRELAGQFLEDLRRIDAQLRDTRKTLAAAVRASGTTLTEVFGFGPVNTGTVIGDVTDVTRFPTRDHFASYNGTAPVEVSSGNRKIYRLSLRGNRRINHALHMAAITQIRHRHSDGRAYYDRKIAEGKTHKEALRCLKRRISDAVFARLQADARHATATAAPKSPGGQPGSDSDSSAAGSHPAHQLFGQATPEPSTTLRPATPARRTSPKPASRNTRRSP

SEQ ID NO: 504827 - protein, 405 aa, unidentified
MSAGLRVNSNLSGVSSHKPVLYLALELSWSKWKLAFASAPAERPRRREVEARNLSGLLGEIAAAKQKLGLSADCAVVSCYEAGRDGFWIHRWLETQGVRNVIVDSSSIEVNRRARRAKSDGLDAAKLLSMLFRHAGGEEVWSVVRVPTEEEEHARQLHRELQSLGQESTRHVNRIKGLLASIGLALEVDKNFPKILKETRQWNGKPVPEELRDRLLRDFERLQVINRQIRALNQQRNKTLRTKDSPVLRKVQQLLGLRGIGVNSAWLFVHEFFGWRDIQNRRQLGSLSGLAPTPYSSGDLRHEQGISKAGNRRMRWMAVEIAWWWLHFQPHSALSKWYERRFAKGNSRQRRVGIVALARKLLVALWKYLKTGELPEGAGLADWQAKTRTSISSLDLSPVKRRQAS

SEQ ID NO: 504828 - protein, 319 aa, unidentified
MDNLSHGRVIGIDVSRDWLDLYCLPDGHRGRAPNTPAGHAVVVALARDRDAIVCFESTGGQEWRLWAALEVEGVIARQVPPAQVKAFAQSCGTRAKTDRIDAELIARFFAFRPEAGRSLPAEKLRLLRALTSKRAQLVEMRKRLLAQIRAHQKLGTAAMFEDVDTELKQRIDSLIKELEDRISQAIASDERLSETAGVLRSIPGIGPVASTMLIAEMPEIGTITGEQAAALTGLAPVAHDSGTLRGKRAIAGGRRALRHVMFQAALVAAHHNPSLRSFADRLRKAGKPHKVIITAVARKLVTIANALCKNRQKWAVPTT

SEQ ID NO: 504829 - protein, 450 aa, unidentified
MNEFIKKKHYVGVDISNATLDLALMKKNGFGEFRTDNSLKGFSLVPKWIREQGLELDDCAFCMEHTGTYGLLFCAWLAQQGILFCVESGLHIKRSLGMTRGKNDKVDAKRIADYAFTHRAKLKPYRMPSPLLVKIKQLLTYREQMVRMRTLLKNSLKSHKRYLPVIGMDGIIVQIEAQIEQQDVIIMGIKQQITDIIKSDVELNRNHTLISSVKGIGVIIGAFMLVSTNNFTSFDNGRKYACYAGIAPFEFSSGTSIRGKTRTSKFGNKTIKTLLNNGANSAIRYDEQMRKYYQRKREQGKDHKVIVNAICCKLVNRMFAVVKRQTPYVEVYGQNFVQLFVFLLEFAKEKRIMKREFVQFRCSIYEKKLLKVQAKKSGLSISEYCSRAAFGDRIIERLSEDQIEAYKLLVQYQNNFKRIGNMFRKRNPKLADEVTQLAKEIREHLLNFKI

SEQ ID NO: 504830 - protein, 328 aa, unidentified
MEQVNIIGLDLAKRTFQLHGARGDGSVAFRKKLSREKVLAFLAGQPRCVVAMEACGSAHHWGRAIRDVGHEVRLIPPRYVKPFVKRQKNDAADAEAIAEAASRPTMRFVAVKTEEQQARAMLFRTRDLLVRQRTQLINALRGHLSEHGVVAPQGTTNITVLAQAIENLERSMPILIIELARIYIDQIEKLSEKIVELEKAIAGEAARGAITRRLLTIPGVGPITALAIETFAPPMEAFKRSRDFAAWLGLVPRQHSTGGKQLLGKISKMGQRDIRRLLITGAMVVVRWACQKEAREGTWLHRILARKPRKLVAIALANKMARSLGDAD

SEQ ID NO: 504831 - protein, 424 aa, unidentified
MKSQVAKKAQKDQKPSKKASGKATPGKWDEMNRKQRREMMRKMQSEDLSLEVVHPHAAGIDIGNESHYVAVPPSRDPQPVRCFGCTTAELKKMAEWLTQCGIRTVAMQSTGVYWIAVYDILEEAGMEVYLVNARETKNLPGRKTDVQEGQWLMKLHTYGLLRNSFRPSQEIRTLRTYWRQRHDLVRSTGRHIQRMQKALTQMNIQLANVISDISGVTGQTILKAILDGQRDPRELAAYRDCRVEASEEEIAQALEGNWQEDQLFVLRQEQAGYEFCQKQITECDQQLAQYLARLEDRTQGATLPEETRKGRRKKKKGNPQFNLRQELFRMTGTDLTQIDGIDVMTAMTVVSEVGWDMSKWKTENHFVSWLKLSPDNSRCRSNERGYASKSLLNLCMFSSTQVSNVCMSANSCRHRVMWARLLGV

SEQ ID NO: 504832 - protein, 348 aa, unidentified
MVVLGIDAHKRTHTVVAVDEAGRRLGVRVTQATSTVAHLELVRWAAGFGGDRRWAVEDCRHLSRRLEADLLAAGEGIVRVPPKLMAHARDSARTYGKSDPIDALAVARAALREPDLPTARLDGPDRELRLLVDHREDLVAERTRALCRLRWHLHELDPEWDPAPRSLVSRKNLEAVAARLAGLAGLVASIATEITIRVTGLTTRINELEREISTRVRQLAPSLLALPGVAALTAAKIVAETAGPARFKSKDAYARHNGTAPLPVWSGNRVRHRLARTGNRQLNCAIHRVAVTQKRIHPDAQAYLQRRLSAGNTPAEALRALKRRLSDVIYRTLLADTTATTAALSQAA

SEQ ID NO: 504833 - protein, 343 aa, unidentified
MKLSRVGVDLAKNVYQLHGVDRSGKTVWKRRLKRHQWLKVLLDKAGPECEIGMEACAGAHHWGRELQSRGYSVKLIPPQFVKPYVKSNKNDAKDAEAICEAMSRPNMRFVTVKRVEQQDIQATHRIRAELITQRTAKANQIRGLVAEYGLVAPKQLSSLRAAIPCWLEDAENGLTGDFRTLLQGVWEDLRLLDERVGEMDQVIRRLAENNEDCVRLQQLRGIGPMISTAMIATVGDARQYHKSRQMAAAIGITPKQHSSGDRDRLLGISKRGDVYLRTLMIHGARAVVARATHKDDRLSRWVTNIAKQKHPNVAAVALANKTARMAWAMLRHETDYDPDFAIR

SEQ ID NO: 504834 - protein, 410 aa, unidentified
MKRIRDRVGGLDVHRDTVMACARVVEAGEVFEEVEQFSTTSVGVGRLGAWLVARGVSTVAMEATGVYWKPVYYGLEGLFEELWVCNAMHVKNVPGRKTDIADAVWLADVVAHGMVRASFVPPPPIRELRELTRYRKTQVDARVKEIQRLEKVFQDASIKITSVASTVWSASARDITEALIAGEHDPEVLADLARGRMRPKIPELTEALTGHWGPHHSVVARQIVDHITFLDTSIEQLSVAIGDRLGPFSGLIRLMDEVPGVNEIVAEIVIAETGADMTVFPTSAQCASWAGLAPGNHESAGKRKPTGTTNGNVWLRRALLEAARTASRTKGTYFNAQYHRIARRRGDKKAVVAVAHSILVVLWHIMATGEPYRDLGADYFDRRRDPERETTRLIRQLEALGHTVTLEPAA

SEQ ID NO: 504835 - protein, 409 aa, unidentified
MDQLIERCCGLDVHRDTVVACVRGPGPNGRRQHEVRTFGTTAVELLALRDWLEAHAVTDVAMESTGVYWKPVFYVLEEAFTCLLVNAAHIKQVPGRKTDVKDCMWIAQCLEHGLLRGSFVPPAPIRELRDLTRHRKVLIQERTRAANRLHKLLEDAGIKLASVATNILGVSGRAMLEALVHGTTDPAVLADLARGKLRRKLPALRQALAGRFRPHHAFLVGQLLAHVDYLDEAITTMSEEVEGRLAPFAAQLTQLDTIPGINTRTAEVIIAELGVDMSCFPSDRHLASWAGICPGNNESAGKHQSGKTRKGNRWLRMTLIEAAGAAIRTKDSALGARYRRVMRHRGHKKAVVAVAHAMLRAVYHLLAEGTTYREPGADYYDRHHTHRVTRRAIQLLERQGYRVVLEPAA

SEQ ID NO: 504836 - protein, 342 aa, unidentified
MNIHTIGIDLGKTSFHLVGLSERGEVVVRKRFSRAQLLRFTANRKVHVIGMESCGGAHFLGRALQEQGHEVRLIPAQYVKPYVKTNKSDYIDAEAIAEAVGRPTMRFVPIKSDDQLDLQSLHRVRERWVSRRTAVINQIRSLLLERGITVRKGRRYIEAALPGILEDADAKLSGALRLLLAQLKLELDQMAKRLEEADALIEQTALENEACRRLVKIPGLGPVTATAVIAAIGNGAAFRKGREFAAWMGVVPREHSTGGKQKLLGISKRGNRYLRKLFVQCARAVLQQKAKQTPGLRAWLEKLTARTHRHVAGVALANKLARMAWAVLATGEAYRAPLAAAA

SEQ ID NO: 504837 - protein, 386 aa, unidentified
MQASTIDTPTAGQFGTIFVAIELSQKSWLVTLHSPDRNRMSRHSLASGDHAGLLALIGRERDRVSRTTGGIPAVVSCYEAGYDGFWLHRLLLAAGITNYVFDPASIAVDQRARRVKTDRIDGERMLRTLMAYLRGEPRVVRIVRAPTAEQEDARRASRERGRLIKEQTAHTSRIKALLRLLGMAVGNPRRRDWLNWLAAQRDWQGQAVPPRMLSEIRHEHARLMLVRERLEALAQASAQADPAPAVVQMTERSELLLRLKCLGPAFATTLTSEVFYKDFRNRREVASYFGLTPSPWQSGGIDRDQGISKAGNPRARCAAIELAWLWLRHQPDSKLTLEYRERTLDAGKRIKRVAIVALARKLVVALWRYLTTGLVPEGAVLKAVRV

SEQ ID NO: 504838 - protein, 431 aa, unidentified
MKGGDLMKNDILSTLFVGIDVSSKTNVLCALDFQGNKLLNLKVLNNQPGAETILNNIIGCLDSNNLKYAVIALESTSFYSTHIANFLASNEILLAYKPLVYCLNPKTIANYRKSFVDMDKTDPLDAYIIADFARCGRITSKPWRGAQFLALQRLTRHRLHLIEGVTREKAYMVSNIYLKFSELAVLDKDERPFSNTYGVTCAAILTEYLSLDDITYSSVEDLVEFIRQKGKNHFNDPEKTVKILKKAANDSYRLDKVLYEPLNVAITSSFNVVKALENEIKIIDKAIAKNIRGINPIEYQSLISIPGIGPVFAGGILAEIGTITSFSSHDALAKYAGLTWRINQSGNYSSDDTRMTKTGNKYLRYYLIEAANSVKNRIPEYKEFYYKKHGEVTTHQHKRALALTSRKFVRLVFGLLTKNQIYSSSKVGEIQ

SEQ ID NO: 504839 - protein, 419 aa, unidentified
MLTAQWFVGIDWASDAHEVCVLDREGRVCERRQVKHTAIALQAFVDALRARAQGDPATVAIGIEVPRGALVELLVERGFAVYAINPKQLDRFRDRFTAAGAKDDRRDALVVGDSLRTDPQAFRQVRLDQPLIIQLREWSRVDEDLGVELTRLTNQLRDLVYRSAPGLLALCPAADEPWFWALLRDAPTPADQQRLSQRRLERLLRTHRIRRLEAGQVHEVLQHAGVYTAPGVVEAVAAHLQLLLPRVDLIAAQRRDAERHLERLLDALETEGIPAGDQREHADVAIVRSMPGIGTRVAARMLAEAPQPLVDRAYHVLRATMGIAPVTKQSGRRRTVSMRYACNVRLRNAGYHWARTGAQKDPASRAYYATLRARGHSHGRALRSVADRLLRVLMTLLTRGQVFDPNHGQHSPVPVAAGA

SEQ ID NO: 504840 - protein, 319 aa, unidentified
MSEMVLGIDVAKKKLDVCLMMDNKVLVKRFDNNTKGIKLLQGWLASLKIERVHACLEATGAYSESVAEYLHEHGHRVSMVNPLRINAFAKTDLKRNKTDSSDARMIAEFCRLKDPEDWYPLPPEIKQLQALTRRIEVLERILASEQNRLELAPDAVKPSLKRVIADLRKEIERVQQLIKDHIDNNPDIKQQSELLQTIPGIGEKTARLLLGEIEFRQFDSARALAAYAGVTPQKFQSGSSLDRTRLSKLGNGRIRKALYFPAIVAVQYNQVVKQFARRLSESGKTPMQVICAAMRKLLHIAFGVIKHNRPFDPNQALRI

SEQ ID NO: 504841 - protein, 335 aa, unidentified
MCSQYPSIYVMAETYIPLGIDISKASFHVALLKGKKQSKYQQFTNDEEGFTKLCQWLEQQGIDRVHGCLEATSIYGHALALHLYQQGHRASIVNPMRIKGYAKSQLTRTKTDRADAKLIAQFCRDLKPAPWQPSEADVMILQAYTRRLGALEQMLTQEKNRLKISPDELKEDIEAHLAFLKEQVKTVKKRLLKHIQSHNNLKEQHSLLTTIIGIGDDTAARVLAEIGAIEHFDSARQLAAFAGLTPQEHESGTSVKGKTRLCKIGNRRLRKALYFPALVLLQRCPQAQAFRERLLAAGKCKMQVVGALMHKLIRVIYGVLKSGKPFNPDKLLPAT

SEQ ID NO: 504842 - protein, 363 aa, unidentified
MPMKKPAQHFIAEVPRSITKVGMTIGIDLGDVWSHYCTLNEDGEVVDRGRFRTTPSGIERWFTDLPKVRIAMEAGTHSIWVSEQLQEMGHEVIVANVRELRAISHSDRKSDTVDAEKIARYARLDPKILRPISHRTVAQQEALTLIRARNLIVRLRTAAVNSVRGLAKPCGYRLPASSTLCFAKRCVAVLPPGLAQALGPVLEQIAEMTKKIKQYDRTIKRLTETEYPETQALIQVYGVGQLTALTYVLTLGSKERFERSRDVGCYLGLRPKRSQSGDHDPQLGITKAGNIYLRSLLVECANHVLGPHGRDSTLRQWGLHLASRGGKQSRNRAIVAVARKLAVLLHRIWVTQEPYIPFYAVAA

SEQ ID NO: 504843 - protein, 410 aa, unidentified
MSEDYEWFVGIDWGSREHQVSVVGPDRIVRQERKVPHTGADIAALAHWLVSLASGRGAPLAVALEVPRGALVDALLAQGLHVYALNPKQLDRFRDRYTVAGAKDDRRDARVLAGSLVTDRGAFRRLDPEDGRVIQLREITRLEADVDDELRRLSNRLREQLYRLAPGLLTLCAGADEPWLWALLERAPTPAAGARLTRGTVAHLLAAHRIKRFTAEELLTVLRAPPLTVAPGVLEATQEHLALLLPRLRLGHEQQRRCAARSEQLLDDLAQTQEHRDVAILRSLPGVGRKVSATMLAEASRLLAARDYHALRCHVGCAPVTKESGRRRLVAMRHACNPRLRNTLHYWAQTAVQHDLVGAALYARLRARGCSHGRALRGVGDRLLAVLVAMLRSQTLYDPTRRRAAREIAT

SEQ ID NO: 504844 - protein, 344 aa, unidentified
MSVYVGIDVHRKRSQVAVIDAEGEVLANRNVPNGVEPILKVIGGLPPGTPAALEAAFGTGWLVELLEDYGFDPHLVHPLRCKAIASARLKNDKVDAAILGQLLRADLLPEAWIAPPPVRQLRALLRHRVQLVRLRTLLRNRIHAVLADHGHDRPAGCWSGPGRAWMASLQLPAVSREVVDDDLALIDALETVIGRLDWEIHQRARSDPRVKVLTQLPGVGPFTALVILAEVGDVSRFGSARKLASWAGLTPTVRGSDRVAHYGHISKQGSVWLRWVLCEAAQTAKRSPQFAAGYQAIATRRGKKIATTAVARKLLTRAWHLLTDAEHAAATQPAAASAPQTGTR

SEQ ID NO: 504845 - protein, 391 aa, unidentified
MIFIGIDAAKDKHDCFIVSLDGGVLCDVFTISNTLDGFNDLLSKIKSVSKDLSKTKVGLEATGHYSYNLLGFLLDNGLPTYVLNPLHTNLYRKSLSLRKTKTDKVDARIIASMLMSCVDLKPYTRTLYHNEELKSLTRYRFSKVSERAKLKTSVSRLITILFPELEKLVSVVHCISIYALLSEFPSAKHIANANLTRLTNLLYSASKGHYNRGTAIRIREAARNSIGSVMPAKSLELKHTIKLVSELDDEISEIEAAIKQIVDSLGTTILTIPGIGYATASPILAQLGDFFKFETPDKILAFAGMSPSTYQSGQLTNCYAHMEKRGSKYLRFALYNATKYVCKWDSNFAAYLAKKRSEGKHYNVAISHAAKKLVRLIFALEKSRLPYMPVA

SEQ ID NO: 504846 - protein, 372 aa, unidentified
MESATGCGKTLYMAMELSASKWGLAFSNEEKVRQITVTAGDQAGLLVQIKRAKEKLGLPENAPVVCCYEAGRDGFWIHRFLEREGMRNHVVDAAGIEVNRRKRRVKTDRLDAESLVRMLIRYEKGERTLWRVAKVPSEAEEDERRLHREIQRLKKERTSHCNRMRGLLVLQGVRLGRRTVIGLAVDRLRTWDGKELPAALREELLRECERLRVLEDQIKELEKTQQQRVKTPQTDSDRVAGKLSQLRGVGPVSSWILSKEFFGWRTFHNRRAVGALAGLTGTPYASGSSERDQGISKAGNVRVRWVMIELSWRWLQFQPGSALSKWFRERFGRGNGRMRRIGIVALARKLLVALGKYLDPGEIPEGAVLKAA

SEQ ID NO: 504847 - protein, 392 aa, unidentified
MYIVGIDIGKNHHEASIVSPEGKQIGRSLRFATTHKGADSLMRFIFKNIGNSPCVFGMEATGHYWYPIYSFLKAKGYTIYVINPIQSDSLRKMYIRQTKNDSIDSFLIAEVIRFGQFGTTSMADENILAMRQLCRYRDSVISSRTEIKLRIGTIMEQIFPEYEKQFSSLWVSTSMGILEKYLTPENIENAPIDELFEIIKDKSHNRLTRAKAISIKEAAADTFGIKIAQDAFSFQLKQLIDRMNFLDKQIEALDCQILEYYEKFDCYLHTIPGIGMIAAATILAEIGDINRFKSSSALVAFAGIDPTVRQSGEFSSTHNHMSKRGSPYLRHAIFLAATTCPFHNSPLNAYYKKKREQGKHHLTATGAVARKLTTVIYAVLRDGKPYEPKSFC

SEQ ID NO: 504848 - protein, 349 aa, unidentified
MIESKLTVIKYFIGIDVSKATFNYCLRYAGEHVLNGKVANNVESIKEFVLMLKEVSGFKLGYAIFGMEVTGVYGLILIDTLTKMKAKVVVEPSMRIKNSLGIIRGKNDKLHAARIARYLIKNLQELKLWVPHRTIIDELSSLSTLRERMVKVGVIITTPLNEDINFVNPAISLTNINLCNPSIIQIEHLIKNIDIKIKALYTNDDRCDRLMKIMLSVMGIGEVTALQILIHTNEFKTITTARTFASYCGVAPFEHDSGTSLKKRARVSPLANKRIKSLLHNGVRTCIGHDPSIKAYYRRRVDVDKKNKMSVMNAIKFKLICRVFACVRVDRFYEKGYVSLKPVNNKIAN

SEQ ID NO: 504849 - protein, 365 aa, unidentified
MTVIGIDAHKDWHTLVAVDEVGRRIKELTVEARAAGHRRIMTWLEGFEDVTVAVEDCRHLTRRLEADLLEAGHRVVRVHTRLMAGMRRSSRERGKSDPIDAEAVARVALREEGLPTAELPGASRDIKLLSDHRRTLVARRTAMQSKARWFLHEIDPELEIPSRALRRYHLLDELIEYLEPVEGAVAEIARDLLVDIRELTVRINTLECRLSRLVRASHPSLVAVPGMGTLGAAMIIGETAGIARFRSRDAYARFNGTAPIPVWSGNKVRVRLSRGGNRTINTALHMAALTQIRMGAEGAAYYDKLITAGKTRKEALRLLRRRLSDRVYAAQRADVVPAAQAFADPVPMGSSTMQDPASSVMLMAA

SEQ ID NO: 504850 - protein, 417 aa, unidentified
MSLNIVGALFFVGIDWAAASHAVCVLDAAGRPVAAFTVEHSAAGLAELIRRLARLGDPEQMPVSIERPDGRLVDALLEAGYPVVPVKPNAIKTWRESETGSGAKSDAGDAEAIADYLRCRAHRLTVAAPYSAETKALRTVVRSRDDLVDMRVAATNQLSALLDAHWPGAKAIFADVESPIALEFLTRYPTARHAQHLGAKRIAAFCAKHGYSGRRTGEQLLARLRAAPAGVLDETMCEAVRDAATALVTVLKALNAALKDLGRSVVAHLGEHPDAEIFTSLPRSGQINAAQMLAEWGDCRQAYDGPESIAALAGATPVTNQSGKHRAVHFRWACNKRFRQAITTFADNSRHDSAWAATVYADARARGHDHPHAVRVLARAWIRVIWRCWIDQVPYDPARHGNAARLVQPDQPKQFAA

SEQ ID NO: 504851 - protein, 451 aa, unidentified
MKKNTIASAIPKHLEHINLWAAGIDIGSTSHFVAVPEGCADKTVREFKTFTTGLNELADWLKQCGIKTVAMESTGVYWIPIFELLEERGFDVKLVDSRQTKNVSGRKSDVLDCQWIQQLHTYGLLNAAFRPAGDVCELRAYVRQRSMLIESASRHIHQMQKALTQMNIQLHHVIKDITGETGMKIIREIVAGEKDPTVLAKNRHPRCKSSIEDIKAALTGNYRAEHLFCLKQSLELYDIFQEKIQACDHSIEDKMAKFVTDPRAIDITENALNPNKKQTNKNSPNFNLGKELHRLAGVDLLAIPGVNTVTALQILSEIGFDMTRWRNAKQFASWLGLCPGNKISGGKILSSKTKSSNNRAAATLRMAASTLYRSPTGLGAYLRRLKSRKGPMKAITATAHKLAKIIYNMLRYGAEYMETGQAYYEEQYRDRKIKNLKKQAIELGLHLVEIS

SEQ ID NO: 504852 - protein, 350 aa, unidentified
MYFAGLDAHLKYVTVAVLDRLGALVLETTVPTREPERVLAVLAPFRPLEVVVETCPFWPWLYDLLVPAGIRFHLAHAKRLRAIATAPQKNDRVDARLLARMLLSGLIPEAYPRPGDQRELLRLLRHRTTLVRARTRLAGRIHSQLHQQRLMLPREQLLRQATRGWLRETAWPRLTAEQQAIVTTHLELIDHLTPLIQALERRIAAAADANPTATLLATIPGIGPYRSLLLAAELSPLTRFPRVEHLASYAGLAPVTRSSGGHTRHGSIPQGANRWVRGALVSAIPSHVRSAPHSPVSHAYAQLTARLGWRVARVAAARKLLRIVYIMLRRGEAWRSEQVAGADVRDEVHV

SEQ ID NO: 504853 - protein, 407 aa, unidentified
MEVLYPRCAGLDVHAKTVVACVRLASGATVTYEHRTVSTNTRGLLELADWLTAHGVTHVAMEATGVYWKPVWHVLEEHVTLVLANAMHIRNIPGRKSDKNDATWIADLLALGLIRSSFVPPAPVQELRDLTRTRKQLVREIARHTQRLQKTLEDANVKLTEVISDILGTSGRAILTALVAGETDPARLANLTSGRLKATRAELTEALHGRVTAHHRFMLQLHLTQIAALDTAVADVEARIREALVPFRAAVSLLTTMPGVSETAAAVIVAEIGDDMSKFPSAGHLLSWAGLCPRLDESTGKRRSTRTRHGAPWLKTTLVQIAWPAARKKHGYFQAQFVRLKTRRGPKKAIVAVAASMLTDVYYMLRDGTEFHDLGDQYFAHHDKARLTNRLLKRLRDLGVEVEVKAA

SEQ ID NO: 504854 - protein, 404 aa, unidentified
MDLLHERCAGLDVHPRSVSACARLCSQGRVTHEVRTFGTSTRALTELRDWLTSLGVTHVAMESTGVYWKPVWHVLEGHFELVLANAMHVRNIPGRKSDVKDAVWIADLLAHGLLRGSFVPPERVQELRDLTRTRKQLVREMTRHTQRIQKTLEDANVKLTQVVSSVVGKSGRAILRALIAGETDVSRLVELTSNRLKASPEQLADALRGRVTDHHRFMLKMHLDQLEHIESAVRDLEARADQLPFRAAIDLLTTIPGVSDIAARVIVAEIGEDMARFPTAAHLISWAGLCPRLDESAGKRRSNRTRRGDTWLKTVLVQVARSAANKRNSYPRAQYLRLKTRRGPNKAILAVAASLLTAAYHMLKYGVEYRDLGPNHYEQDKERQAKHLVRRLNRLGFQVSLEAA

SEQ ID NO: 504855 - protein, 366 aa, unidentified
MENHSIVWVGMDTDAKKNHVALYRGWELEPAVEWEAGMDAKGIKQLIERLKKETGEVRCVYEAGPSGYPLCRKLRQAGMVCDVIAPSLTPRKPGDRVKTNRRDARNLGRLYRAGELTVIDIPNEAQEAVRDLTRAREDVREDCTRRQHRLSRFLLRHGYIYQEGDKWTLKHWAWIRKICFEDSNLKTVLEESIRAVEQSQEQLKTYDARIEENAQKPEYEKKVARYKTVRGIQTITAMTIVAEGGDLKRYATAPQFMGSTGLVPSEYSTGDRERRGRITKTGNAHLRRVLVEAAWHYRHRSIPGASVKKRRKGQPASIVTIAERADQRLCRKFRKLVDRYNKKPVIAAVAVARELAGFIWAIGQQE

SEQ ID NO: 504856 - protein, 311 aa, unidentified
MAKVYVGIDVSKERLDVAVRPLDDSRSFSNSDEGIAALVEFVRDASPEAIVLESTGGFEVATAAALAAGSLPVVVINPRQVRDFARATGKLAKTDRLDAAVLAHFAEAVRPEIRPLADRVQRRLADLVSRRRQLVDMLVSEKNRLCMAADCVKADVRAHVAWLEKRLRRIDDELQTEIESRPTLKIKDDLLRTVPGVGPTLAKTLLANLPELGELDRKEIAALAGVAPLNRDSGDYRGTRRVWGGRREVRTVLYMATVAAVRCNPTIRRFWQRLKEAGKPGRVALVACMRKFLTILNAVLRSGHFWAPNNF

SEQ ID NO: 504857 - protein, 325 aa, unidentified
MEYVGIDVAKDQLQVCVLTPGRPQRRFENRENGWRALTKWLKTWGEVWVALEATGTYGDGVSDWLYQAGQRVSVVNPARIHAYAQSQLKRHKTDAVDAELIADFCRTQQPPLWTAPSAAERELRALVRHRDDLKGLRQAEKNRLEAQPPSATVVSHLHALVELLERQIAEAEAQIRHHIDRHPDLKAQHDLLTSIPGIGDQTSFQLLAELGDLRRFTDVRQVVALVGLNPQQRQSGRSVHYTAGIARMGRSSLRAALYLPAVVAKRHNPRLRAFADRLAAQGLAPKAVIVAVMRKLLHLAYGVIHSNRPFDPQYGQTAAASAATA

SEQ ID NO: 504858 - protein, 376 aa, unidentified
MTNVAQMNETGKNIFCPIDLHQNKMMVGIATDRGRPAFKEYDTDWLGGVERLVARLHLLRERNPGAEVWVAYEASGCGFRLADLMEEQGFRVAVLAPTNLPVTPRSRTNKTDKKDVVRILEVLRGHVLAGNRLPEVWIPPQELRDDREVVRRRLAVAEQLADVKNKILGLLRRYGLPRPENMANNWTKKHVRWLHSVVTELEWGAGRALASLLRELEFYWGECEAVEREVNALAGHDRYRTRVAALTSFKGVAPLTAMVFLTELGDLDRFPNRRALGNYLGLTPRSWESGEQTDRKGRISKQGPSRVRKVLNQAAWSLVRWDPAWKARYESLVESSKRKKKAKGKRKAIVAVMRLLGIALWRTALETGPAPAMAAA

SEQ ID NO: 504859 - protein, 343 aa, unidentified
MEQYVGLDVSLRQTAVCVVDQSGKIIREVMIPSDPEAIATFIRANTSNVVRIGLESGPTSTWLWTELDRMGLPVICIDARHAKAALKMQINKSDRNDAAGIARIMQTGWYREVRVKDLDSHAIKALLVGRALLVKIKRDLENQIRGLLKNIGLVIGRAKMNTFAARAKELIEDKPTLAAVVEPLLKAREVIEQQVADLDRKVMRLARSDDQVRRFMTTPGIGPITALSYLATIDDPTRFGKSRNVGAYVGLTTRRYASGEIDWTGRISKCGDKLLRSYLFEAANVLLTRVAKWSTLKAWGMRIAKRNGIRKAKVAVARKLAVILHRMWIDGTEFQWSSKEAAA

SEQ ID NO: 504860 - protein, 341 aa, unidentified
MAIVAGFDVHRAQITFDAVDTETGEVTRGRIDSTPAAVTRWTARFAGREIDVAVEACTGWLFVCDALAAAGATPHLAEPVETSALRGRKRRAKTDREDARWLRELLADGRLPEAWIPPEHVRQWRSRARMRHTLIDERTAWMQRIQATLFHHGIGGTPDKLRTREGREFLAGLQLPQDARERIHVALGMVDAIDAQIAPLERELRQLARRQTGCKALMRLYGMGELTSLVTLCELGDVTRLSASRKAVRMAGIDIGVHRSDRRARVGKLTRQGSPQLRWALYEAALSACRPSSPDYADYLALKARGLSHTRASLTIARKLARRSYHVLRELGPAALEPLAT

SEQ ID NO: 504861 - protein, 343 aa, unidentified
MNEAITIGVDLAKNVFQVHGVDAEGGVVFRRQLRRSQVLGFFKKQAPCLVGMEACATSHHWAREIAALGHEVRLMPPRYVKPYVKRNKNDAADAAAICEAVTRPTMRFVAAKTAEQQSVLMLHRTRELMVRQRTMLVNAIRAHMAEFGIVVRVGLPQVEALLAVIDDEADDRLPPLARTCLSGLAAQFMSLQVEIGVAEQRIHAWHRASEVSQRLETIPGIGPITATALAASITDPSVFKSGRELAAWIGLVPRQSSTGGKDRLGRISKQGDHYLRWLLVAGAMTVIRHAKRRGTANLWLAGLIANKPTKVAAVALANKIARVAWVLMRDGGTYRKPVAAAAA

SEQ ID NO: 504862 - protein, 315 aa, unidentified
MTSPVFVGVDVAKEQLDVAVRPSGDRWREVNDEAGITTLVTRLQPLAPALIVCEATGGFERAAIAALAAAGLPIVVANPRQVRDFARATGQLAKTDELDAGILALFAERVRPTPRPLPDAAAQLLDAVLTRRRQLLEMLVAEKNRLGFAPKPLHRGIQAHIRWLERQLDEVTKELAGLIEASPVWRAKDDLLQSVPGVGPIVSYTLLGELPELGTLSHKQIAALVGVAPLARDSGTLRGKRLVWGGRASVRTALFMAALCGRRWNPALKRFYERLKAAGKPTKVALIACARKLLTILNAMVRDQSRWASHVQYSC

SEQ ID NO: 504863 - protein, 331 aa, unidentified
MDEVRRFVGIDVAKAALDVFIGSDAKAFTVANDEVGIRDLVGQLVPADFVILEATGGLETPVASALAAAGIAVAIVNPRQVRDFARATGRLAKTDRLDAEVLARFGEAVRPEARPLANEQAQALEALVTRRRQLVEMLTAEKNRRARAPKVLHRSIDEHIRWLEKRLSTFDDELGELIRNTPLWRERDELLRSVPGVGKVLSSTLLAQLPELGMLNRKQIAALAGLAPFNRDSGRMRGSRCIWGGRAQVRRVLYMATVAGVRCNPTIRTFYLRLRANGKHAKPALTACMRKFLVILNAMLHNKTHWQTPALVPTITPLSPLMGAVSEYGCC

SEQ ID NO: 504864 - protein, 347 aa, unidentified
MNHYVGLDVSLEETAICVVDGTGRIVEEARAAREPEALIAALREIDLPLERVGLEACSLTAWLHDELHSAGLPAVCIETRHANAAMKTMPNKTDRNDARALAQIMRTGWYRQVHVKSRQCRLWRSLLVARRTVLNEMRSIENVVRAVLREGGLKLGTPSRAAFAERVRDLMAEDASVKPLVDPLLTILVTMLDQFARLTKQVLDIVRREKVCRRLMSVPGVGPITALAFRATIDRPDRFRRSRDVGAHLGLTPARYQSGETDVSGRISRCGDELARTALYEAAHTLLVRSRKWSSLRAWGMKVAKTRGMARARVAVARKLAVILHRMWSDETEFRFGRNPAAALAAA

SEQ ID NO: 504865 - protein, 412 aa, unidentified
MEAIIEKCCGLDVHQATVVASVLVGSGETRVRQQVRKFRTVGRELRALRDWLTELGITHVGMESTGVYWVPVFRALEGGFELIVGNAQHMKNVPGRKTDVKDSEWIAHLVRCGLIRPSFVPPPPIRELRELTRYRRSLMNDQARIRNRVQKLLETASIKLASVASDVFGLSGRAMLRALVDGETDATILAQLAKGTLRRKIPALVEALEGNFEAHHRFLLGFQLDRLEEIERAMTSLDEHIDRKLEPYQAELELLTKIPGFSRVTAASFIAETGGDMSVFPTAGHLAAWTGIAPGNNETGGKRRHASTRKGNVHLVTTMTQAALGATRKKGSYYKDKYWRLKARCGAKRAMVAIGHKLLIAAYEVLAHRQPFVDLGDQYLTRRSQTDVTRKLVRRLESLGFDVALTPREVKQ

SEQ ID NO: 504866 - protein, 350 aa, unidentified
MIIGCDYHPSDQQIAFVDQETGECSERRLNHSEGEAEKFYRDLQQRGVSVRVGMEATGHARWFERLMAELGFELWIGDPAEIKTRRVRKQKTDRQDAQLLLKLLLEDRFPRVWVPSPENRDLRQLLWHRHRLVQMRTRIMNQLQAVAMNEGIRRKKALWSKSGRVQLESFSLAPWSSRRRQDLLELLDRLNPTIDQLSAAIAQEAEKRPEVRRLMTHPGVGPLTALAFVLIIGSPERFRCGKQIGSYVGLIPCEDSSAGHQRLGHISKQGNSSLRFLLVEAAQIAVRHDPDWRRRFLHLAVRRERRIAKVAMARKLAVRLYWMWRKGWDYQQVLHFSSHAGQPVKAHGVQ

SEQ ID NO: 504867 - protein, 454 aa, unidentified
MCLEDRPVLEPNAAGIDIGAREIFVAVPPGRDAHPVRACATFTEDLEQLADWLVACGVTTVAMESTGVYWIPLYDILESRNLKVCLVNARHMKNVPGRRTDWHECQWLQYLHSVGLLRGAFRPEADVTAVRTIMRHRTELVQMSSQHVLHMHKALTQMNLQIHHVIDDITGLTGLAIVDAILAGQRDPVELAKLRNWRIKADEETMRKSFVGNWRDEHLFTLRQSRELYRTYQQQMVKCDQQIEKLVGGFEPRVDPEEKPLPPDRKRYRGAKKRAKKNGQPDTGFNLRTEAYKLFGVDVTQIPGLETMALPLFGEVGRDMSKWPTADHFASWQGLCPDNDISGGRVLWKGTRKVRNRAGQMFRQAAYSLHHSLTPMGDYLRRMKTRLGPAAATTATAHKIAVIFYTMVKNQVEYDETIWATRDVKRQQRIEARLKRQANQLGYQLVRLEEKPAA

SEQ ID NO: 504868 - protein, 371 aa, unidentified
MEKNSTTKFIGLDVHSKTISVAIADEVRKGEVRHYGTIENTFGAIDKVIKKLTVTGTELKFIYEAGPCGFALYRYLTGNGFKCIITAPGLIPKRSGVRIKNDRRDALTLARLYRAGELIGIYVPEPEDEAIRDLARARDDARVAERKAKQRLNSFLLRNNLIYPGKTKWNRTYFDWLGLVGMKYPAQKIALQEYIEAVHECNGRVKRLSEQISLAVEEWRMAPMVKALQALRGVSLICATVTVAELGDLSRFNKPKELMAYLGLVPSEHSSGESIRRGHITKTGNKHARRVLVEGAWTYKHHARVTRPLIKRQRDLPKNICQISWKAQLRLCARYRRMMARKKPMQVVVIAIARELAAFMWAIAQEVKAAA

SEQ ID NO: 504869 - protein, 422 aa, unidentified
MMRRSTLNKDNNSGNRKRNSKPGQSGNAGQRETKDVLAELVERLREKLNPKVVAKSPATERPRSALKPNLDRLTVGVDLGDRLSNYCILDLEGETLGEGQLRTTQEDLAEFFQSLHKARVVVEVGTHSAWTQDVIAGCGHEVVVANPRLMEGSKRRKRKNDRIDANKLARLGRVDPQSLYPMEHRSTEVRQDLILLRARDALVAVRTELINTTRGLVKSMGQRLGKCSSRSFAGRAEEELPIAIRESLLPLVQIADALNDCIKEYDGKIDELANQKYGHTKLLRQIKGVGPITALAYVLTLEKAERFAKSRDVGPYLGLAPKQEDSGESQPQLGISKAGDRMVRKLLVGSAQYILGPFGPDTDLRRYGLRLCERGGKNAKKRAVVAVARKLAVLLHRLWVTGEVYEPLRNHLSLASVTTAAA

SEQ ID NO: 504870 - protein, 374 aa, unidentified
MSAKGITWVGLDAHKQSIHVAMLLPGRDEPIAWQEPNEENAVRRLARRLTREAPGEVRSCYEAGPLGYALQRELESQGVICEVVAPSLIPLKPGERIKTDWRDARKLAELLRAGLLTEVQAPNEADEALRDLCRGRDSVRQDLMRARHRMSKFLLRRGYRYRDTQRHWGVRHMNWLRPQTFEPAAAQAIFDHYLLTVDHLDERLRQLDARLGVFGDQEPYREPVAWLRCFRGIDTVTAVSLVAELHDFRRFRSARGLMAYLGLVPSERSSGEQRRQGSITRAGNHYVRRLLVEAAWHHRHRPVLSQPLRRRREGQPADIIAIADRAQERLHARFMRMTRRGIHYNKTIVAMARELVGYLWATLSRRAADAPPAA

SEQ ID NO: 504871 - protein, 339 aa, unidentified
MQLYAAIDLHSKSSFLAIIDEEGKKVFKEKLDNNPKVILRALSPHKKDIVGIVVESTYNWYWLVDALMAEGYKAHLANPSAIQKYSGLKHSDDKHDAFWLAEMLRLNILPEGYIYPREQRPIRDLLRKRGHLVRLRTSVILSLQNIITRNCGVKLITNDIKALKEDRVSPMLEGNEDLALAGSVSKETIDFMTLQIRRIESVVEGKIELKKPYFYLQTMPGIGKILALTIMLETGPIERFENVGNYSSYCRKVSSKWTSNEKVKGKGNKKNGNKYLAWAYSEAAEGARRYDLMAKEYYNRKKQKSNFMVAHAALAHKLTRAAYYIMRDQVSFDSNRLFA

SEQ ID NO: 504872 - protein, 418 aa, unidentified
MMAEEIAWFVGIDWASQSHQVCLVDARGECLGERAVAHGGAGIEELCDWLIARTGATPEVIGVAIEMTQGPVVEALLERGFCVYGINPKQLDRFRDRFTVAGAKDDRRDAHVLGDSLRTDRHAFRRLSNDEPVIVKLREWSRMADELQQERARLASRMREQLWRYYPQMLELADDFAADWFLDLWNQAPTPAKAVRLRETTIERFVKAHRLRRWPASEVLRILKQKPLSVAPGVVEAASDHIRTLTVRIRLVNQQLKAAHRKLDELCAELIPSEENEPGQRCEQRDVVILRSMPGLGRIILAVLLAEVWQPLRRRDYHALRSLSGVAPVTRRSGKTSVVVRRYACNKRLANALYHWARLATQHDALSRRRYAALRQRGHSHGRALRTVADRLLSVTCTLLEQQTLFDPTYEVRDAAGA

SEQ ID NO: 504873 - protein, 412 aa, unidentified
MQVMYVRCAGLDVHKKTVSGCVSVCEAEGVKWQKTRVFGTCTEDLLMLAEWLKECGVTHVAMEATSVYWRPIWAVLEGQFEQMLVNPQHIKAVPGRKTDTKDCEWIADLLQHGLLKGSFVPPTPIQDLRDLTRYRAELRQSQNRVANRIQKLLEQANLKLSSVVSNTLGVSGRLMLEAIISGCEDPQQLAQLARGRLKEKIPQLKQALQGRVRQHHRFLLAEYLDEWDALDRRIRRVEAEIDTCIRPFELVVTLWQTLPGVDRVTACSLVAELGVDMKQFPSAQHLASWAALCPGNHESAGKRKSGKTREGNKWLRRTLCQAAWAAARTKDCYLSAQFKRLAARRGMKRAVMAVAHSMLVIGYHVLSTGQSYRELGGNYLEQINKYQLQRHFIKRLQRLGLQVTVEPITAAA

SEQ ID NO: 504874 - protein, 343 aa, unidentified
MTVIIGVDPHKASHTAVAIGHDESELGRTRVRATRKQVPQLLAWAQPLGARRWAIESAGGLGYLLAQQLVDAGEIVLDVPATLASRIRVLGTGHSDKNDPNDALSVAIAALRTPTLRKVRPADHAEVLRLLAKRNIDIGNHRTRVVCRLHNAVMELAPGGIAKELYASDAVALLDRIEPATPVEQARHDLAVELLADVQRLDAQLKESHRRIRVAVKASGTTLTNLFGVGPIIACYLIGYTGDVGRFTSRDQFAAYNGTAPVERSSGGRVVHRLSQRGNRRLNHALHLAAVCQIRQPHSDGRAYFDRKLTEGKTKKEALRSLKRQISNAVYRQLLSDANHTTP

SEQ ID NO: 504875 - protein, 406 aa, unidentified
MEITPIYRRVIGLDVHQAKISACAVIEQVDGTLTVEHREFGGFKRDRRNLAAWAREVGPEVVVMESTGIYWKSPYAALEAVGIDAWVVNARHVKTVPGRKTDIADAQWLATLARAGLLRQSFVPPAEIRHLRLIARQRQKLGGMLASEKNRLHKLLADAGIRLNVLVSDIHGQAGRAMVKALIAGQPITEVLDLAGRLRASREQLFEALQPEELSGPHLFVLNEVMAHIEELEARMARFDQALIQGLSSWRPQLILLQTIPGIDLMGAAMLLVEIGADMTTFGRAAKLASWVGICPGNNESAGKRKSGKTRKGNAWVRRLLCEFAQAAARSRCALKDKFATLSLRKGHKKSIVALAHKILRVLFAMLKSNTPYRDRVVDYEALSVQRNAPRWIKMLVKHGFIPAAT

SEQ ID NO: 504876 - protein, 343 aa, unidentified
MKRITVGLDLAKSIFHVVGINEHGKQLFRKRLRRAQVTAWFAQQPPCRVGIEACSGAHYWARSLQTLGHEAKLVAPQHVKAFARGQKNDYNDATAIAEAVNHGSIHFVPIKSAAQLDLQALQRLRSRLIRERTGLSNQLRGLLAEHGIVLPRSLRVLHQRLPDLLEDADNGLSGRFRRLLNLGWQHFLQVEAQVTELNRELAHAVQQDEACQRLLTIPGFGPVVASGFSVAVGDGGDFRRGRDVSAALGLVPRQHSTGGKPKLLGISKRGNGVLRSHLIQGARSVLMQAKGKPDALSQWALKVRAERGFNKATVALANKLARIGWAVLHQQSTYQPRHHPQAV

SEQ ID NO: 504877 - protein, 452 aa, unidentified
MEQGNKGLSRGDRNRNARLAALRAMVPRDHAILGIDLAQSRQAAVLADHDSRVIARWRPRCSPWKLGELLERALRKALAAGFAGITVACEPTGHRWMVIAQLAAERGIPMVCVQPLVVARAREAEDYTRGKSDDRDAVLIARLASQLHCYLPEQAGQEWARLRHLGVRRSRLIESATACRQQLRDLLEVAWPAVLAAAADPMESATWLACLQAALARCDGDLAAVRALGQDAFTAQARAELGAFGARRVCRRIAAGVYAALGDGAGVAAQRPGALERAFRVLGDWSVTRAELGDVSARMLQSLDAMGLLEVAGSIPGVSAVHVAAILAEAGDPSRFATSRAMVKHAGLAPCENSSGNHAGETGISRRGRPALRLAAWRAVWGALRHNRVYAARHAELTGRAKDPLTDQQARAAIAAALIRQIHAIITRRVPWDADIAAGRRRPGQEVTAQAA

SEQ ID NO: 504878 - protein, 409 aa, unidentified
MSNVIMIGCDLHEDTLMLKIAVGLETPETRLWKNTARDRQRMVADLQRRAKKAGIPRVVFVYEASCAGYGLYDQLTEAGFEAYVLAPTKIPSSTRQKKEKTDEKDALILLNLVRAFVLAGNPLPAVWIPDAQTRDDRELVRTRLDTSNKIGLLKNQVKSMLKRNQVRRPAGLGKSWTRSYRAWLLASLVQPLNPAESPLNTGTRQALASLVRQLDFLEKEQERLDRAVSSLVDTPRYLEAVREVTRLSGVGTLTALVFLTEMGDLGRFANRREVAAYLGLAPSCFESGRSNDRKGHITRQGSPRVRRVLCQAAWTSVRRDPLEKATYTRIKEKNPKKKKIAVVAAMRRLAVRMWHAGQRGRDQQTTLPGDLPTTRRPSPQVEVGFSEVGTGCPKGVAKSLGKGQTASRG

SEQ ID NO: 504879 - protein, 356 aa, unidentified
MSKIKQLDFAGQTIFCGIDVHKNSWQVNVRDDQFELENYSQDPSEELLLKHLQKRYPGANFQVAYEAGFSGFGLQRSLKSSGISCMVVNPADVPLTDKDKKRKSDRIDARKICRHLSHNTLRPIYVPSLRMEHARALVRQRTKLVSDQTRCKSRIWGFLMVHGLKLKMDKPNEYWSRRFVESLKTLAGLTPLLRQSLDVKLEEYLFIRKLVGNMTKQIRTLSTQRSFAPLQSLIQGIPGIGLLNSMVIITELQDMKRFKTLDRLCSYAGIVPDTSSSADRTTVKGITHRSNDYLRKALVESSWVIIRKDMAMLHLYKKYCRRMVPNKAIIKIARHLLSRIRYVWTNRIEYEIGLVG

SEQ ID NO: 504880 - protein, 340 aa, unidentified
MEAIAVIGIDLAKSVFQVHGVDAQGQVVVRKRLSRTKLLPFFTKLPHCLIGMETCASANYWARELMVLGHEVRLIPPQYVKPYVKRSKNDASDAEAICEAVTRPTMRFVGVKSTEQQSVLVLHRTRLILTRQRTQTSNAIRAHLAEFGIVAPVGRQGLDRLIAVVGDEEDARLPMPARRCLAMLVEQHRLILAHLLDADRAIRAHSRASEIGRRLQEIPGVGPLVASALVATVPDPHVFRTGRGLSAWLGLVPRQHSSGGKERLGGITKAGDTYLRKMLFVGAMAVIRHAERYGTRRPWLTKLLSRRSPRVAAVALANKIGRTAWALMTSGERYREPVVA

SEQ ID NO: 504881 - protein, 382 aa, unidentified
MRFYTQQHPFYCGIDLHARTMYLCILDQAGETLLHRNMPATPEALLKAIAPYREQIVLAAECMFTWYWLADLCADHGIPFVLGHALSMKAIHGGKAKNDKIDAHKIAVLLRGGMLPQASVSPAEMRATRDLLRRRMHLARKRGALLAHVHNTNSQYHLPAIGTKIASKANRDGVAERFADPAVQKSIEVDLALSTYYDELLRDVERTIVTTAKHHDAQTLYLLQTVPGIGKILRLVLLYEIHDLARFPRVQDFASSCRLGKCARESAGKRSGTSGSKIGNAHRKWAFSEAAVLCLRDNPAAQKLLARFEKKHGKGKALTILAHQLARAVYDMWQRQTAFALDTCLHGEGRGVGALNAELDSHGMHLLRHARYGVHHCVAARS

SEQ ID NO: 504882 - protein, 405 aa, unidentified
MRFIGLDVHLDFCEVAICETGRVRSGGRVPTSPQGLAILADSLGPDDQVALEATGNALAIARRLEPHVARVVVATRTELRAITEAKVKTDRRDARTLARLLAAGLLGGCWLPDEQTRALRRRLARRAQLVRQRTGCKNEVHAVLMRTLKGRPPMSDAFGRGGRVWLAELELPVDERETVDGCLRQIDFLDAEIAILERGIAEHALGSAAIKRLMTVPGVSLMTATTFIAAVGDVRRFHEPRKLVSYLGLDPKVRQSGIGAARHGRISKQGASQVRQMLAEAAFVAVSTAGPMRAFYERVRARRGSQIAIVAVARKLAVLFWHLLTREQDYAFQRPSLTRKKIRGLELRAGAPRHPGRRDLPTKNSYSQRTERARERELSEQAEVAYRRLVTDWKATGSSKAAAVT

SEQ ID NO: 504883 - protein, 316 aa, unidentified
MVGIDVASVHVDVACVGATLPAELTHVSNDAEGHSALADALAKLQPGLVLMEATGGYEAALACALQAAGLRVAVINPRMARDFARAMQRLAKTDRIDAATLAEFAAVLAQRPDCERFVRPLSEPEQQDLAALVTRRRQLVAMQLSERQRLRLARPVTRPSIEALLEAIARQIDEVDAEMVSHVEQHHAVMAKLLQSVAGIGRIAAATLIAELPELGRLNRRQICALVGVAPFANDSGSSRGRRRITGGRFEVRRALYMATLTATRFNPAIRAFYERLVAAGKLKKVALIACMRKLITHLNAITRDHLNAQIPPLTA

SEQ ID NO: 504884 - protein, 353 aa, unidentified
MKPRTEFNLSSPVVVGVDIGKEVFHLVGFTADGKIAFRRRIRRLGLKDAFGKLPPCIVAMEACLSAHFVSRTLRALGHEPRIIPAIYVKPFVKGQKNDYNDAEAIAEAALRPNLRFVQEKSQDQLDLQACHRVRSRLVSRRTATINQIRAFLIEQGIAVRTGPRALRKSLFPILENRKDEISPRMAKLIRDLYDDWCCLDERIETVTGEIEILSRSEAKCRQLMSVPGVGPLISTAMVAAIGSGEAFARGRDFAAWLGLVPRQYSTGGRSILGRISKRGSKYLRTLLIQAAKVLLMRPHNWARYSFGPWLTSASERLHRNKLAVALANKLARITWSVLRNDKAFDTRLEVAAI

SEQ ID NO: 504885 - protein, 341 aa, unidentified
MKNKSFIGIDISKNVIDASIFCEGTPIKDFPHAVFNNSHKGFGEMCTWLKKNHVVLSNSLFGMEFTGSYSMELEKFLNARKYQFCMLSTHVVKHYPMGPKDKSDKIDSAKIADFLYRYDGTECVKPYKMPDKTMQRLKALTKERKFLVEQRTCFMNRRQLCTTKEAAQLYDGYIKEFSHDIENIELKMQNLLETDDSLSTTYKNLLTIPGIGFVNAMNVIVITRNFTAFETARQYASYIGVAPHFHTSGTSVKWRPRPSARCDGQAKADLSMAASVAVQCDAELQSFYNRKLGGKQDSDTKRKALNAIKFKLVLRMFAIGKQNREWEPLDSKSSNEKLAIS

SEQ ID NO: 504886 - protein, 606 aa, unidentified
MLLRILYPARTFLAGRGKTNIFRLFASAEAWKWRFRRPFLSEWSAFSRSEMLGAAVEADFGRDYATASSLERLTEPSLDEAPADEAGGDLVEGGEDVGAPLVSNGEAAEAGKPGQGTLDDPTVSAQALAVLDAAAGDARNDGPPSQRPPAEGEIIALVGVQLGWASSWATRALPDRRHGIDDFLQQLAVMPVGWRNPHGQRDAVGINEDVALGTRLATVRRVRPGRFAPLVSCEAVRMEPGRHAGYGRPGWSTPMPPRRKGRQKACGRPAFLEVRTVAWARQPVPQGRKTRMTQIHAFGGVDVGKACLDAAVFPGGARWHGGNHPEGRQELIAWFGAHDVRIVGLEATGGYERPLRNELRAAGASVHVLDPARVRHFAKAVGQRAKTDAIDAAMIAEFTAQLHSLPPQPVEPEREAVADLVRTRRLLVDKRADIEKALVRLPDEARALVYPAVEALRVAIADLDAQIAQRVQAHSGLAQSVQVLASAPGVGPITAVAVATLLPELGRISGRQAAALLGVAPYPDDSGQRHGKRRIAGGRSDVRRVLYMAALQATTGRSKGVLARFYSQMVARGKPPKVALTACMRKLIVRLNAMLAHNQPWKEAPT

SEQ ID NO: 504887 - protein, 351 aa, unidentified
MDRYIGLDVHMQSCTMAVMGPTGRRLREEIVPTNGRELVEAIRKVNGRRHLCMEEGTQSEWLYELLQPQVEELVVTAPQENRGQKSDSRDAWARAEELRVGSIETKVFKPAGRYTELREAMRGYRLIVQDTTRVKNRLKAIFRSRGVWGMEDAAYDPSKREKWLAKLGPSQRRLAELVSQELDGLGPLAQQAKERLQAESKKHSIVRRLATVPGLGPIRAAQVVATVVTPERFRTKRQFWSYCGLGIMMRTSADWVREGGRWVRAPVTQTRGLTRKRNPVLKSVFKGAALTVVQMTDHPLKRAYERLLKAGSKPNLAQVTIARRIAAIVLAMWKHQEDYDPAKQELPPQTP

SEQ ID NO: 504888 - protein, 344 aa, unidentified
MATYYIGADVHSNNTELAIEQRGQIVARYSVPTTIPAISTVLNSLQGKKIFAMEEGPMAGWLFRNLNEIVNKFVISEPRRNKLITCEGDKDDKIDSGKLAVLLRGNYLKEVYHTNDDHRAHLKHWINLYHDRVRDAVRCINKIRACCRMHGVRIPRKVIRNHVHRHQWLSGLDNPVLKAQLHMLWIGYDATKEQAELAKKQFRSYARKYPIIKSWCKLPGIRIIRAATIFAYLDTPLRFKKRSRLHKYCGVGLVRMTSGKDKKGRPRPPRLKLPWAVNRRLKNAVIGAATTAIEHRDNAFRDYYERMISNGINPTNAKHSVARKMVSTMSAMWKNGSEYDEKLL

SEQ ID NO: 504889 - protein, 331 aa, unidentified
MNRQNFCYFIGIDISKKFFDVAIIENDRTASYVFENTKKGTNAFIRLLKNQKISLDNTLICMEHTGVYGKLIITKLVEKQAHFCVEMPIKITKSIGLHRGKNDRVDAKRIAFYASKNYRELELYKPIAEVLEKMKILLKIRKKLVNTRADINKYPNELERFSPEIGKLARKNLKRINKNLEDEIKRIEAEIKKLILSDDKLNKTVGLVTSVTGIGQITALHLTVFTNFFTRYDNPKQLACYSGVVPFEYTSGSSIHRKSRIHPMANRTLKKHLHMSALAAINHDPDIRAYFLRKVEEGKNKMLIVNNVRNKLVHRVCAVIKRQQPYVKNIA

SEQ ID NO: 504890 - protein, 346 aa, unidentified
MAVMIGVDPHKGSHTAVAVGPAEEPLGRLRVGACGAQADKLLAWAAAWPERAWAVEGAAGLGHLLAQQLVAAGEAVLDVQPKLAARVRLLEAGNTNKNDANDARSVAVAALRSAARRKVRPDGHAAVLKVWSKRYRDLGRARTQVACRLHALLCDLVPGGFGREITASQAAGLLARITPADPAARARCELAAEFLADLRRIDAQMSDAKKKLTTAVRASGTTLTSLFGVGPIIADTVIGDVRHVSRFPDRDHFAAYNGTAPIEVSSGHRKIYRLSRRGNRRLNHAIHMAAVTQVSQRHSDGRAYYERNRAEGKTPKEALRSLKRRVSDAVFAQLQADARRAATRPR

SEQ ID NO: 504891 - protein, 446 aa, unidentified
MYYTRCQLTTDPNKTHRRYSQLNTNQKQRIMQVSEKTLIIGVDIAKVNHVARAQDFRGIELGKRLLFKNTRDGLDRLVQWIRNLQDQHSKENVILGLEPTGHYWLPLAEFLHREGIKFVLVNPYHVKKSKELDDNSPTKTDIKDARVIAQLVKDGRYSEPNLLTGTHADLRVAMVQRERLSKELIRVKGRVINWLDRFFPEYPQVFKKWDGKASIATLKQFPVPEDILKLEPEAIVTKWKEDVKRAVGIKRAKLLIEQARSSIGLTSGLTAARYELQQLLEQHELFFRQMEKMMVYIEGLVIQIPGSKEMKTIPGVGWVTVAGFLAEVGDLTGYDHPQQIIKLAGLNLKENSSGKHKGTSTITKRGRPQLRALLFRCVLPLVAKNPEFQRIHRYLTTRQINPLKKKQSLIALCGRLIRILFTLGTKRISYNPEKVLSPVHVEQLAA

SEQ ID NO: 504892 - protein, 422 aa, unidentified
MLAESHDEEQIIARVAALDIGKAELVCCVRVPAPGGGQRRLQDVTTHSTMTKALTELANRLVELGVERVVMEATSSYWKPVFYLLEAHGLDPWLVNARDVKHLPGRPKTDVLDAVWLCKVAERQMLRPSFVPPWPIRRLRDLTRYRTDLVAARTAEKNRVEKLLEDACIKLSVVASDIFGVSGRAMLAALVAGERDPKVLAQLARARMRAKIDRLEQAFDGHFADHHRFLLARMLSRIEALDEDIAAVDAQIEAQLAPFAQAAARLDEIPGIGPVAAAAIVAEIGVDMSRFPTAGHLCSWAKFAPGINSSAGKTKGSASSGHGNPYLARVLGEAAVGTSKTNTFLAARYRRIARRRGQPRAVVAVGRSILVIVWHVLRDPDARYQDLGADHYTRHVHPSAKKRSHIRQLEALGYTVTLTPAA

SEQ ID NO: 504893 - protein, 357 aa, unidentified
MLALGDSAPRKGTDAMTFVGCDLHTRMQQVAVLDTRTGEVSEHQLAHDGSAIEEFYAALPGPVTIGIESTGYATWFHALMQRLGHTVLVGDAAKIRAMVVRKTKTDRRDALHILDLLRHDRFPTVWVPDPATRDLRALLTHRMRLVRIRTMVKNGLHAIALNYRLARGSKLLRQTSLAQLQALALPPHTAQRRDQSLELLAGLTAQIRELDDAITTAALAHPDGPRLITHPGVGALTALATIVVLGPVARFHDSKHVVSYVGLAPALNASADKYHLGHITKQGSPLLRFALGQAAAHAARMDADLKRTYFTLVHRRGRPKAKVAVARKLLVRLFIMLRDQIDYDEFRRRGRTAPAAA

SEQ ID NO: 504894 - protein, 402 aa, unidentified
MYNAVGIDVSKGKSTVAVLQPAGVIIRKPFNVNHTSSELDELAKYIGSLEGETRVVLECTGRYHEPAVKTLSEAGLFVSAVNPHLIKNFGNNSIRKVKSDPADAKKIARYTLDNWIELRQYSSMDNTRTQLKTLNSQFSFFMKQKVAAKANLIALLDNTYPGVNKLFDSPVRDDGSEKWVDYAYSFWHVDCVRKIGLKTFTERYQAFCKKHHYNFQPAKPAELFLASKDLIAVFPKEASYKLLIQQSIQQLNLASSHVEELRSKMNELASTLPEYTTVMGMYGVGKTFGPQLIAEIGDISNFSHREALTAFAGVDPGVDQSGTHNSKSNKASKCGSNRLRKTLFQIMSTLLQTAPEDDKVYQFLVKKRAEGKPYYVYMTAGANKFLRIYYGKVKECIRNLEQ

SEQ ID NO: 504895 - protein, 428 aa, unidentified
MNCNTQNAKIASITEKTLIVGIDVGSETHYARAFDWRNYEYSKKPLEFSNTEAGFLTFKAWVEDIAEKHGKTAVIPGMEPTGHYWFALGKFLQDNGMKPVHVNPHHVKKSKELDDNNPNKNDRKDPKTIAALVNEGRFSYPYIPTGIYAEIRSLSNLRFQTQEELTRIKNRIARWFSIYFPEYKDVYGDLKAVSGRMVLKVAPLPEDIRKLGAEGVNRIWRDAKLRGAGMKRAKTLVSAAEHSVGSKEAPEAARIELKNLLNDMDVYASRLEELLKGIEEKLKEIPYVDKLMEIKGIGLVTVGGFIAEVGDIGRFDNPKQLQKLAGYAIVANDSGKHNGESRISYRGRKRLRYVLYEAAISLIGKNAEFREIHEYYRTRNANPLKKMQSVVAVACKILRIFYTILTKGVDYDAEKLMSDIRRPQMQAA

SEQ ID NO: 504896 - protein, 439 aa, unidentified
MGKVAVTPGARGHPKTCSQHNPRKEVNPLSRTLFVGIDLGSEDNVVCVMDPAGDDLARFTVSNDLPGTERLVEKTLDLVRATGSDTASIGMEATNLYWWHLHQALYDDPGLKAIEATVTVINPKVIDGFKRLYPDMAKTDKIDARVIADCLRFGRVKPSPPPDLRFAPLQRLTRYRYHLVHTLTNEKNRALSLIFLKFSTYAKGCPFSNVFGKASQAVLENLTPDEIVQRPLPELVYLIAQNGNNRLKDVDHMAQILKNISQRAYRLHPKMRDAVDTALAMSLETVRFLEAQECKLNIVIARDLQAIPQTLDTVPGIGPVYTAGTIAEVGDVHRFPDDDALAKFAGLTWRNHQSSKFAAQDLPLTRSGNFYLRYYLVQAANSVRVQEPEFAAFYQRKYNEASHHHHKRALVLTARKLVRLVFALLSKGQVYRERRLRSS

SEQ ID NO: 504897 - protein, 465 aa, unidentified
MAKAQKSRTRRQAKQQDRAKLKPQDCTLGLSIVHPKAAGIDVGNDEHWVAIPPALDCEPVRSFGCFTQDLQDMADWLVERGVDTVAMQSTGVYWIPLYDILSERGIRVFLVNPADTKNLPGRKTDIQECQWLLKMHVYGLLKNSFRPAEEILVMRAYWRQREQHISDASRCIQRMQKALTQMNVQLANVISDISGQTGQAIISAILHGERDPKKLARLRDPRIKASEEVVARSLEGNWRPEVLFILRQEQDSYVMFQKKIEECDRQLDRHYLTLESKADPSRLGPVPRNKRPHGNVPEGFDLRDELYRITGVDLTAIDGINILTAQTVIAEVGCDMTRFDTEGHFASYLGLTPRNKISGGKVIGREKQKPKNRAGQALQQAAGTLLRSDTYLGAQYRRFRTKMGAPKARKAMANKLARIIYRMLKFGEAYVDKGKEYYEQKYRSQQINFLSKKALELGMRLMPAA

SEQ ID NO: 504898 - protein, 436 aa, unidentified
MEEAEDEPLFADRVAGIDIGKKEIMVTIRVPSDSRPGGRQQETRSFGTIRSQLLAMADWLRSWQVTKAGMEATGDYWKPVYFLLEREGFDCDLYHAGQVRALPGRPKTDKLDSVWLAKITERGSLRSSFVPPEEIRRLRACTRYRRHLTQARTAEKQRAEKLLEDAHLKLSSVISDIHGASGRDMLNAIIAGQRDPKVLAQLARRRMRRKITELEQALDCSFVSDEHVFILQMMLATIDSLTARIDEVTAKIEVLCEPYEHQIGQLCTTPGTNVITAQDIIGEIGVDMTVFPTAGHLASWGRWAPQVRASGGKRKGKNATGQGNPYFGAAVGEAAVNAGRTQTFLGAKYRRLCKHMPKKKAQVATGRSVITIWHALLSDPGATYTDLGTDYYERRMNIRRQVRSHARAIERHGYKVTIEPLSPDPETGELPATIAS

SEQ ID NO: 504899 - protein, 317 aa, unidentified
MQEIQVFVGVDVAKAELVVAVHGQTDSRTVPNQAQAISAWLRELPDGAVLAMESTGRYHQMLASLAHAAGMHVFVLNARDVHFYAKALGARAKTDRIDAHVIARYVAEQHERLHRWIEPCAVLQQVHDLLGQRWAVVNKRTALRQSLQGCDGAIAPEVQALEAGFAALLRAMDARIVALLEQDARVQERQRLLQSIVGVGPQSSALLASLLERVPFVSADALVAYSGLDPRACDSGSSRGRRRLSKRGQPALRHQMYMAAMSACHTSTFKGTYEALRARGLKTTEALVVLARKLLRIAFAVWRSGRPFDPQRFAPAG

SEQ ID NO: 504900 - protein, 330 aa, unidentified
MGTTTYGLDVAKRVFQMYWIDARTGEAINRQFRRDEIIRFLARRPPGRVALEASGSGHWWARKINSLGHEAVLLHAKFIRPFVQTNKTDAADARAIWTAVHQPQMRLVAPKTEEQQAVLAQHRMRALLIKFRTMQVNQLRGLLYEFGVTFRGGRQAGLKETVPAAMFVCLQDQLRRIDGVQQDIEQLEARIGVWHKQEAACRAIAAVPGIGTLTASALIATIGDARTFKSGRELSSFLGLVPRQNGTAGKVRLGSISKRGDPYLRTLLIHGARSVIYHTRAPTKWQRDIQSRRPPNVVAVALANKMARTAWAILAHDRPYRTDYGCARAA

SEQ ID NO: 504901 - protein, 401 aa, unidentified
MKRLSGGIDVGSESHHIIILDEEDNFLYNQKVSHQLSEFAESIKLFKQIEKQEGGKLSFALEGKNGYSAPLDKILLNQGFTLYNVDNFKLKRFREAFAGEWRDDERDALMLSKMLKLKEHINSPREKAFIKIEKPSLVTESLKLLSRHQQTLIDEKVRLTNRLGKKLLEVCPQILKLGKLKNKKIIAVLAKYPDFSKYKRITLCSLLKIRGIGKKGAFFLLKRLNNIEYMPGLTDIYQTIILSYAQRILELQKEIEDLDKKLDEIGEESKEVKHLKTIPGVAIKLASRLIGEIEDIDRFPSEKQLAVYCGVACVDNNSGKVTKAHAVYKANKICKHTLITMAGGSIRFSFQCRDYYLKKRAEGKSHNHTLRCLARQLIRVIYKMLTEDRDYMVRKELRKVA

SEQ ID NO: 504902 - protein, 359 aa, unidentified
MQSKYTQVQFAGQDVYAGIDVALKAWKVAIFLEQAFHKRLSAPADPEGLVRYLKRTFPGASYHTAYEAGYFGFWIHEALVRLGVHSMVVNPADVPTSDKERRTKTNRVDAFKLGRSLANGELRGVYVPERIALEDRTLVRMRSSFVRKQTRCKCQIKALLRFYNVQHSDDLIDRYWSRAYIQWLESLTLEHDSGTFSLRVLLKELLALRGTIAELTKQIHALAREDRYGARVLLLHSVSGISLMAAITFLSEIVSLDRFKNLDRLASYVGLVPGEHSTGETEQDTGLTPRRNVALRYMLIECAWIAQREDPVLLKAFNNYCKRMPKNVAIIHIARKLLSRMRFVLKHNQPYVPGVLSNA

SEQ ID NO: 504903 - protein, 341 aa, unidentified
MKTFIRIGVDLAKNFFQIHGIEHEGAPPLTRKLSRGKFLEFFAKIAPCRVGMEACGSAHYWARQLRAVGHEVVLMAPAYTKPYVKRGKNDAVDAAAICEAMSRADMRFVAVKSADQQAVLMLHKARDLLVKQRTMSVNALRGHLSEFGLIAAKGIHRVKDLLAQAFADPDLPEQARQAVQILASHGEALDAKIDELEKKIAKASANNPISRLLDEVPAIGPLIASAMAASVPDPSVFKSGSDFSASLGLTPSQHSSGGKEKLGAITKKGNRYLRKMLVVGCTSVLRVAHKYKGALAEWIAALRARKPERVAAVALANKLARICWAIMSTGESFREEIFARA

SEQ ID NO: 504904 - protein, 345 aa, unidentified
MQSMYYIGLDVHKKTISYCVKDGSGRVHAEGAIPATRLDLDIWMKRLPQPWTAAMEATIFTAWIYDHLKPHAAAVKVAHPLMLRAIAAAKKKNDRIDAHKIADCLRCDFLPECYMASTEIRERRRTLRYRNLLVRQAVQMKNKIAVLLMEAGVSYNKQKLHKVGYFRELLATNQDIDEGLKPLLRLCRETVVRLGKTESALVRSLQRDSLLMERVERLMTIPAVGPITALTWALEVGDVQRFSSIKKAISYCGLCGAENSSANIIKRTPLSKQRNKHLQTILIEAAKMAPRNSPDLAMLYDREKQKGNANRATLAVARKLVAYLVAVDRRQKDFLIVERENRTAA

SEQ ID NO: 504905 - protein, 380 aa, unidentified
MPKSPIEPEICTIHPNAAGIDIGAESHWVSVPPERDSESVREFGCFTGELHAMADWLKQCGVTTVAMESTGVYWIPVFQILETSGFEVFLVNARRVKMVPGRKSDVLDCQWLRQLHSYGLLSASFRPKDAICGLRSYIRHRERLTQSASTHIQRMQKALTEMNLHLNRVISDVTGVTGMAIIRAIVAGERDPQQLAALRDPRTKRSTTEIAAALMGDYRAEQVFILTQELQLYDTYRQQIQLCDQQIEQSLSALDSDNRAEPPLPPRPKGRKPSRHAPEFDLRAHLYRISGVDFTQIDGLESLTVQTILSEVGLDPTRFPTVKHFASWLGLSPGSRISGGKALSTKTRKVINRAAKAFRMAAQSLANSKTALGAFYTLDG

SEQ ID NO: 504906 - protein, 388 aa, unidentified
MPRFKGSAQAAVDYNSTIIGALELSEKKWVLAVQLPGVDRHSRHMLDACGDSLASFVERLKARCTSAGRKIARVILTHEAGRDGFWLARFLTRQGIEVHVMQPSSLPVDRRARRAKTDKIDVEMLLRTLMAWLRGEPRVCSMVPIPSEADEEARRANREREDLTKERRSIVNKIDGILATLGIKGYKALRRDRRGQLNCVRQPGGDPIPQMAKARIARLLDRLELVLKLIDHVESARDDVLKKGAPANESERMIRSLTALRSIGPDIATLLVREAFVRQFRNRRALAGYVGLGGTPFSSGGSEREQGIGKDGNRRVRAAMVELAWTWLRWQPDSALSVWFRARVGAMGGGRIRKIMIVALARKLLVALWRYLKDGVIPEGANVKVAVA

SEQ ID NO: 504907 - protein, 365 aa, unidentified
MLYLGIDQHKRQLTVNLRGEDGLVILKRQVGTEWEKVRAFFADRVEKAQPEGGFLAILEVCGMNPWLLDMLREYGCREIVVVQPTGRSKHKTDRRDAGELSHLLWVHRQQFLEGKHPLGLRRVQPPTAQQADDRQLTALRARLTKKRTAVLNGIHKILRKHNLEQAQPTKGFQTQKVQRWLAELELPAMDRLEMNLLLPQWELLDEQMKVVEAKIAERAAADEQAKLLESIPGIGHYSAVAIASRIGDIERFKRPDSLANYFGLTPGCRNSGEATQRLGSITKEGSKMVRYLLNQAVVRVLRFDGAMRQWFKRIKKRRGSKIARVAVMRRLATIIWHMLKKKEKYRYDSTIKKHQEFEAFEGATP

SEQ ID NO: 504908 - protein, 340 aa, unidentified
MELKVLGIDLSKNLFQLHGVDLAGRAVLRKRLRRDQLVAFISALSPCTIGTEACASAFHWGREFERLGHRVRIISPQFVKPFVRGNKNDGNDAEAICEAMQRPNMRFVPAKTIEQQDIQSLHRCRQRLVNHRTALISQMRGILLDRGIAFGKSASRARRLIPQIIAEPGNGLTVMAREMLASLFEFLQQLDQRIRDFDRRIEAVFQKDAACQRIAKVDGVGPKTATAIVAAVGDAKDFENGRHMSAWLGLVPRHQATGGRTVMGSISKRGDQHLRTLLVHGARAVVRISAGRTDSRSRWVNDLVARRGTNRAIVAVANKNARIIWSLLAKDEDYRPALAA

SEQ ID NO: 504909 - protein, 304 aa, unidentified
MSAFVGIDVCKAWLDVAVLGQPEARRFANSASGFKKLARWLAPLKPVRIVLEATGGYEQAALDGLHETGLPLVRINPRQARDFAKATGQLAKTDALDAWVLARMAAADIGTPYQPKADWQRRLAQWHHRRTHLVQMLTSEKQRLSQLSDPELVTAGKAHVAFLQKQLRMVQSEIAKQLRRPELVPLQTLQGVGPVLQATLACEVPELGQLSGKQVAKLVGVAPLCRDSGTSRGKRVTWGGRARVRTVLYMATLAAIRHEPRLRDFYQQLRARGKASKVAITACMRKLLVILNARVRDSQREAFC

SEQ ID NO: 504910 - protein, 429 aa, unidentified
MNISTSIAEADSKYVWSVGIDWADEKHDISQRCWADGRYQTFQIGADPVSVRTWLEELKELAGPQGRIVVGFEQNRGSLFEMLREQKDWLDLCPLNPLTLSRYRQSFYTSGAKDDPLDSQLIEELLRKHLDRLRLYEPPEPVLRQLDLLCQLRRKAVDSAVGLENQLRSHLKVYYPLAVELHEDLSSTLTLHFLKRWPTLQSLKRAKAQTLRSFYYQHHSRSQSLIEERLQKIARAEAVTEDGTLIDPLVLSVQGLVNQLLAHKASEAAFDKAVQKLALKHPDYEIFNSLPGAGPQMTPRLMVAFGSNRSALTDPSQMQKKSGIAPVLDRSSQSQRIHRRWCRPKFLCQTFHEFAAYSIPHCTWAKAYYEQLMARGKSHHTAVRALAFKWIRIIFRLWQDHTTYDEERYLRDLQKRHSPLSQKIQLQPL

SEQ ID NO: 504911 - protein, 480 aa, unidentified
MAARPQPRPDLKAVPMLKNESLYLGIDIGKSKHVAGFLSKTLLERHSRFEACPALVFENSREGFRLLVERLRELAPLEHCFILMERTGHYHRPLEQYLQELDLPVYVIHVQSRQAGMLKTDKRDALMLANTLYSQLELGVQVPNKLQLVRRVVPPTEAAAQLKGLIRHRYELVRESTQRKNKLTAICDELFPELTRVIKDPNALVALALREQFPTPAALATASFTTLQQIRGGARSLSDAKLLEMQQLASQSIGVKGLIRQRGLVLEQGQLIKELRLLREHVEQLEQEIVTIVEHAREGQILLSVPGYGPVTAATIIAAVGSIYNFPSASALKSYFGWAPVVAQSGSTLDRSRLTRGGTRTMKQIMFLAVLQAIRLRDNEWARLYERLVKAKCPYDERTQSHTGKTRVIGRVAGQMTETIYALLKRDAELLSKVPLGQEPPPPLLYDPEVHRYHRQGHYRPLKSTPPPNVITILHALPSE

SEQ ID NO: 504912 - protein, 401 aa, unidentified
MHDHDRQVTGGVDTHGEVHVAAVIDATGRILATSSFAAALAGYRGLLGWLRRHGRVVGVGVEGTGSYGAGLARCLTGEGVAPTEVNRPDRQRRRRHGKCDTVDAEAAARAALNGDAARTPTASGGPVDSVRVLRVARRSAIKARTQAANQIRDLIVTAPDRLRSRLRGLDTDQRVAVCSRFRTGETTDPGEATKLAVGSLARRHLELSAEIAAQLAALCAAINPALLAAHGVGPEVAATLLAAAGANPARMGSDAAFAALCGVSPVEAFSGKVTRHRLNSGGDPQANNALWRIVVVPMSSDTRTHAYVARRTREGKSKREIIGWLKRHIACEVFRLLTRPATVPLRADLRAKRRRSGLTLADAAQALGTWPTRLSEIERGLAHNAELSRRYELWLQPDQAA

SEQ ID NO: 504913 - protein, 466 aa, unidentified
MTPHKDYCLDPRPPATPTLPQSPVLADALQVCHPHAAGIDIGEAEHWVAVPPGCDPQPVRRFGTFTVDLDALADWLIDCGVTTVAMESTGVYWIPLFELLEARGVQVLLIDPRQAKRAPGRPKTDRLDCKWLQRLHAYGLLAGAFRPEDQVCVLRSYLRHRQMLLTSAAHHIQHMHKALQQMNLKLTQVVSDLTGVTGMAILKAIIAGERDPVTLAKLRNPHCHHDEDDIAKALQGTWRAEHLFALQQAVALYEFYHQQLALCDQQIKSHLETVADKSAGKPLPPKARRHKKTNEPRFDARTPLYRLAGVDLTTIEGIEENTALIILSEIGTDMYRWPSVKHFCSWLGLCPQHQISGGKILSRRVRPGAHRVTVALRLAARSLHHSHSALGAFFRRMKARLGTPKAITATAHKLARLVYSLLQHGSAYVHQGLEAYEAQYRERKVTTMAKQAKALGYTLVPLPAQG

SEQ ID NO: 504914 - protein, 319 aa, unidentified
MNILQKTWIGIDVSKQNLDIYIHPDAITLTVAQNNEGLRKLIKVIKKYKEKMVVLESTGGLENLVVEKLSKALIDVAVLNPRPIRDFAKACGILYKTDKVDAKIIALFGEHMKPRKHVMLDDKTRQLKMLLIRRTQILSMITMETNRLGTADKYIACEIKKHIAWLKNEIKKADQRLKEFVTKNPEIKSEAETMQSMPGIGEKTFLSLKAFLPELGKLNRREIAALSGLAPFNRDSGKFKGRRRIYGGRAAIRKILYMSALTATRCNPVISEFYERLRNKGKEHKVAITACMRKMIVIANNMCKNDSVWNSKKKARITI

SEQ ID NO: 504915 - protein, 403 aa, unidentified
MKEFTPKSIEIESTSLLNIVNAYREQDNYAAYVGLDLHSKTIAVAVAYKGRGKPVSRAEIVNTPKAIRKLVTQLMQEFGGEVILFCYEAGPCGYDVYNQLIALGQACEVVAPTLIPRKPGDRIKTDRRDAIALAKYSRSGELTAVWVPEKEQEAMRDLTRIREDMKATEKIHKQQLGAFLLRHGKTYDRAKKYWTQTYFSWLETVKFDNPTQQIVLQEYILAVKEAQRKEDSLKQQMYQALENWSLRPVVEGLIALRGIDVVTAMTIMAELGDISRFDSPKELMSFLGLVPSEHTSSDKRRLGSITKTGNGHVRRVLVESAWSYRFPARITKHLRQKESKATAAAKAIAWSAQKRLCGRYRKLIEGGKNKNMVCVAIARELVGFIWAMVCEVMSKPHASKCAS

SEQ ID NO: 504916 - protein, 407 aa, unidentified
MTNTCGIDWSERHHDVAIVNQDGAMVARARVSHDITGFGQLVELLAEHAAEPTAIEIAIESDKGLLVAALRAAGFVVFAINPRAVARYRERYGQAGGKSDPGDAVVLANILRTDRHAHRQLPADSDLASAVKAAARQHQEAIWARQQTMSRLRALLHDYYPQALVAFPNLAHRAAGVVLHAAPTPQAAQRLTPRRVVALLKQAGRRNDEGLAERISTTLRAPALRQPGPVEHALGVAAAGLIEIISAMSRAIDALEAELAALFDQHAQAAIITSIPGLGPVLGARVLGELGDDPHRFDDVRGIRSFAGTAPITRASGRSRIVSSRRICNRRLGDACHWWAFAALTKSPGARAHYDRRRAAGDAHNAALRNLANKLLGKLWHCLRHNLRYDETTAWPGRADEPQRSAA

SEQ ID NO: 504917 - protein, 371 aa, unidentified
MYIVGIDIGKNHHEASIVSPEGKQIGPSLRFATTHKGADSLMSFIFKNIGNSPCVFGMEATGHYWYPIYSFLKAKGYTIYVINPIQSDSLRKMYIRQTKNDSIDSFLIAEVIRFGQFGTTSMADENILAMRQLCRYRDSVISSRTEIKLRIGTIMEQIFPEYEKQFSSLWLSTSMGILEKYLTPENIENAPIDELFEIIKDKSHNKLTMKKAISIREAAADTFGIKIAQDAFSFQLKQLIDRMNFLDKQIEALDCQILEYYEKFDCYLHTIPGIGMIAAAAILAEIGDINRFKSSSALVAFAGIDPTVRQSGEFSSTHNHMSKRGSPYLRHAIFLAATTRSFHNSPLNAYYKKKRDQGKHHLTATGAVARL

SEQ ID NO: 504918 - protein, 337 aa, unidentified
MNRNVVGLDIAKQVFHLFMMIDGKAVKRKLKRSELLAFIAQLPPSLIALEACCGSHHWARSFQQLGHEVKLLNARYVKAFVVGNKNDFNDAEAIFTAACQPNKRTVAIKNMEQQDLTMVHGIRQGKVEERTALINQIRGHLAERGIVLPKSANQVRKQLPSILEDAENQLSTLSRSLFAEQYQALVAMDAAIKAVDRQIEALCRQNALSKRLVAIPGIGPLTATLAAADVGDGKGYASSRDYAASLGVVPRQHSSGDRQVLLGISKRGNRRLRTLLIHGARAVLKYCGDKSDPLSRWLQALIERRGFNKAAVALANKNARIIWAMSTREGEYAPKAA

SEQ ID NO: 504919 - protein, 350 aa, unidentified
MTSMTSTRRVVTVGVDTHSDVHHAAVIDEVGRPLADAGFPTTPAGYRQLLAWAGGHGEIAAVGVEGTGAYGAGLARHLRAAGQLVIEVDRPDRKTRRQRGKSDPIDAYAAAAAVLSGAAAGTPKTRDGRVEAIRTLRVARRSAIKGRTQAINQLKALVLTGPAELRQALAGRSTRELLTTCRRLRVTERLTETADPITAAAKLTLRRLARRIAILTDELDELDAELRPLVTLTAPALIDVYGVGTEVAAQLLVTAGDNPDRLRSEAAFAQLCGTAPLPASSGRTIRHRLNRGGDRHANYALHIIALVRLSAHEPTQNYAARRRAEGLSNLEIIRCLKRYIAREIHHVLTA

SEQ ID NO: 504920 - protein, 336 aa, unidentified
MRYIGVDLHTTQVTVCYLKTLDEYSFKQYRLDEIEAFLDSLCAGDELAVEATGNSRWLVGLVKERVRRVVVVNPSGFEVIKRSAKKTDKRDALNLARFLAVDMLPEVRVKSELAEAVQRLVETRNKLVGLKTSLLNKIHALAVSRGWKLKKESLASKKGLTKVMEFDWSAIERIELEIIIAHIQALKESLRRLDEAIGENSQKLEGFENLIRITGIGARSAGVLLSVIGVVEDFSSEDKLASYFGIVPGVSNSNERTSHGRITKRGSKTGRTTLVQCALVATRYSPYLKKFYEQVKGRRGHGKAKIAVARKFLGIIYNTLKNNWVFEDFNNFVLAE

SEQ ID NO: 504921 - protein, 377 aa, unidentified
MKKNIRFIGLDVHGETIAVGVAEPGGEVRSLGLIPNRPESVRKLVKKLGPASSLRACYEAGPCGYVLYWQLTQMGVHCDVVAPTLVPIKSGERVKTDRRDALKLARSDRSGDLTPVWVPDPEHEALRDLVRAREAAKKDQLRARHRLQKLLLRRGLRPPEKMKSWTMRHLAWIKSLRLQPPALEATLLDYLSEVDHAGERIKRLERAIDQAIEAAPAAIRAVIDGLQALRGIARISAATIVAEVGMLSRFPRPKQLMGYTGAVSREHSSGDRIRRGAITKTGNAHLRRILVEAAWSYRYRPTVGRQLRARQAKQSAEVKEISWKAQHRLHYRYARLAGRGKPKQQVVTAVARELAGFIWAVGVQIEKQLAIGEVHAA

SEQ ID NO: 504922 - protein, 357 aa, unidentified
MGQSNRISFKGQNIYVGIDVHLRSWSVTILSETSVLKRMNQGADPDALPRFLASHYPEAEYHSVYEAGFCGFWIHDRLTELGIHNIVVNPADVPTMGREKLRKTDAVDSKNLAVSLRARQLKGIYTPDSEALGIRSLIRLKNSITKDTTRQKNRIKSQLRYLGIEIPAEYLEPHSNWSKRFLNWLKEVDMRTPSGRHSLDILIMQFEALRKQKAEMTRKLRELSHTERFEETLKLLMSVPGIGQTTGLALISEIVDITRFANAEQLAAYVGMIPMCHSSGDHEGVGDITLRKHAILRSNIIEAAWVAIRKDEAMQLCYLNNCKRMVPSKAIVKVARKLVNRIYFVLKRRQPYVNAVA

SEQ ID NO: 504923 - protein, 394 aa, unidentified
MIYVGIDVASTKHDIVILNESGEIFKKAFSIKNDLDGYKKLLSEIGSAKEFFNDLNVRIGLESTGHYSRNILHFLILARFEVMFINPLLTNMDRKASSVRKTKTDTIDAKAICMFLIRNQNDFKPYTLSSYHIDELKTLVRQRKSLKTQINKEMNLLHAYVIQAFPEYYKIFKKINSKASMEVLSRCASLSEFKRVRFETLKELIRKSSQGHRGIREAQMLKELHSSSIGIDSSALCFSIKQTIRRILVIKDQVCDIELEITHHVDESQTTLLSVPGIGYTTGAIILAEIGDIHRFKTDDQLLAYAGLDPSVYQSGNFEGSYKISKRGSSLLRFAIYHVAQAAVKFDPVFKAYYLKKKAEGKRHRVIIGHVTKKMLRVIRSILKNHTTYSLNTH

SEQ ID NO: 504924 - protein, 331 aa, unidentified
MDNSLYFVGADIALKKFDAAIRLDSNRYKHKVFANTPEGFTAFHAWLQGFGSHFHILMEATNVYHEDLADYLLVQGLTVSVINPRCMPNFAKSTNMRSKTDKVDARLLADYAYCNAARLRKYAPLATNYRTLKRLMRQLTHLKKIIAKEQVRIQMMMDALCIEISQEIIARTKALAKELEKKIKELVKEDKVLSRNAQLLQSIPAVGWMSAMYLLSHLGDGSRFRNSKAAATYMGLTPIVKQSGDSLHIVSGISKMGPRDIRDVLYAPAMSYAFGPWKERVYAPFVQRLTANGKAPKEVIVALMRKLVSIAQAVLQHQRPFDSAILVAKAA

SEQ ID NO: 504925 - protein, 343 aa, unidentified
MQTVTTIRFDIAKSVFQVHGVDAGGDVVTRRQLKRRHVLAFFQKLPPCLVGIEACASSHYWSRELQVLGHTVRLMPPAYVKPYVKRQKNDATDAEAICEAVTRANMRFVPTKTPEQQSCLMLHRTRHLFIRQQTAVINSIRAHLAELGIVAPVGRKGVTELLHVVADPNDKRVPEVARACLAALGTQLLSLKQQILEFDRMIMAWHRSNQTSKRLHCIPGVGSMLATALVASVADPRTFRSGRNFSAWIGLVPKQHSSGGKDRLGSISKQGDRYLRGLFVAGALAVIRYAKIHGTKHRPWLTALLARRPTKVAAIALANKIARMAWAMMAKGEHYKQPVALAA

SEQ ID NO: 504926 - protein, 366 aa, unidentified
MKKTSTVRVNGNMIFKGHKLTIGLDLGDRWSNYCVLDEAGEVLLEQKLATTPEAMKQTFERIPRSLMALETGTHSPWVSRLLRELGHEVLVAHAQKVELISKSNRKDDRHDARTLARLARIDPELLGPVRHRSAKAQIHLTVIRARAELVSARTALVNAARGLAKSYGERLPKCGTEQVSRELAAELSADMREVLEPLLKEIESLNERIKEYDARMEKIARESYPQVALLKQVKGVGTQIALTYVLTLDDPHRFRRSRDAGCFLGLRPGRRDSGESQPQMHISKEGDRYLRTMMVQGAHYILGPFGEDSDLRRWGLRLAERGGKNAKKRAVVAVARKLAVLLHRLWVSGEVYEPLRNSHKAMRAVA

SEQ ID NO: 504927 - protein, 342 aa, unidentified
MKLKRIGVDLAKQVFQVHGVDRHEQPIWRRRLPRERWLQAIVETAESGCEIGMESCGGAHHWARQLQARGFRVKLIAPQFVKPYVKSNKNDANDAEAICEAMSRPSMRFVPIKSIEQQDIQAIHRVRAGLTDQRKAKANQIRGLVAEYGLIAPKELSALRRALPCWLEDADNGLTARFRRLLDGLWGDLRALDERVAELDGEMAVLARSEPAMRLQQLRGVGPMIATALVAAVGDATQFTNGRQLAASLGLTPRQHSSGGKERLLGISKRGDAYLRTLMIHGARSAIRTAKTKDDRVSQWALRVAARSHPNVAAVALANKTARMAWAMLRHGSHYQPDRLSA

SEQ ID NO: 504928 - protein, 363 aa, unidentified
MKIMVGIDLHSNNALCGLMDESGQRLLHKKLPCDLAAILQLLKPYQKRIATIAVESTFNWYWLVDGLQDHGYHVVLANPAGMQPYSGMKYTDDISDAYFLAELLRLNLLPTGHIHDRKTRPVRDLLRRRLLLVRQRTMLILSFKSLNERTLGQRVSLARVKAMKVEEAQARFTAPADQLLSGTEITLMGHLTTAISKLEQHLLGVAGKWPTYQRLLELPGIGKILGLTIALETGDAQRFADAGNFASYCRCVKSLRTSNGKKKGENNRKCGNKYLAWAFVEAAHYACRFDDQCRRFYDRKKQQTNPIIATKALACKLAKAAWHVMKEDVPYDATRVFGAAKKTDFGETGREPANGSGPQSQQD

SEQ ID NO: 504929 - protein, 412 aa, unidentified
MQVVHARCCGLDIHKKTVVACVLLTGPNGHVHREVRTFGTMTIDLLALSDWLAACEVTQIAMESTGVYWRPVFNLLEDEHRALVLVNPQHIKAVPGRKTDVKDSEWLADLLRHGLIEPSFIPPAPIRELRELTRHRKALVQQRTQEVNRLQKVLEGANIKLASVATSMLGKSAREMLEALLAGEADVAVVANLARGPMRAKIPQLRQALRGQLQPYHHLLLRQILAHMDFLEAAIAQLEGEIEQRLRPYEQAVQLLQTIPGVKAVAAATLVAELGVDMTQFPSAKHLASWAAVCPGNKQSGGKRLSGKTRRGNAWLKAVLCEVAWANARSQTSYIGAQFRRLTRRRDVYKALIAVAHSLLVIIYHVLKTQRPYHELGPDYFDRLEQAQLERHHVRRLEQLGYTVTLSPQGIS

SEQ ID NO: 504930 - protein, 369 aa, unidentified
MDHRTDVFVGIDVAKARNAIAVADGERGGEMRFVGKVDAATESMRRVVQRIAAKHEHAHFCYEAGPTGYGLYRLITSLGHSCTVVAPSLIPRRAGDRVKTNRRDAVGLAKLLRAGELTPVWVPDESHEAMRDLVRARAAAVETQRVHRQQVSAFMLKHGRIYPRKKSWSMRYLRWLQEQHFDHPAQQIALQELVEAVRIAKERISRIEAAIEEFVPSWSLGPVVRALQALRGVDLIVVVTFVSEIGDMRRFDSPRQLMAYLGLVPSERSTGNTVRHGGITKARNGRVRHMLIESAWTYRHPPRVGKAKLYLVEQAPPAVREIAWKAQSRLSARYRALSTRGKKTTVVCAAVARELVGFMWCIARQAQPG

SEQ ID NO: 504931 - protein, 453 aa, unidentified
MAKKKSKSEGQTRVMRPHAAGVDIGAEEIYVAVPSDHSEEPVRCFSTFTCDLHALADWLQHSGITTVAMESTGVYWIPIFQILESRGFEVFLVNAHYLKSVPGRKSDVSDCQWIQYLHSVGLLQGSFRPPDKICAVRTLWRHRQSLLQMAAEHILHVQKSLGLMNVQIHHVLSDITGLSGLAILDAILAGERDCVKLAQLCHPSVKSPRGKIAQALEDDYRPEHLFVLQQSLSGYRYYQQQITELDREIEHLMKAIGSSEDFQEQMPKRTKRTKYNRQANDPAFDLRRELYRIAGVDLTDIPGVSTLTAQAILTEIGPDVSRFRNASAFASWLGLCPEKRISGGKVLSCKTRKVKSRAALALRLGAHSLCRAKDYFGEFFRRMRAKLGAAQATTATAHKLARVIYHVLRTKTPYNETVFHECDEQARQRTENRLRRRAAEMGFQLVPILTEAS

SEQ ID NO: 504932 - protein, 341 aa, unidentified
MSEVSTIGLDLAKHIFQAHGADTSGKVVFRKRLRREKVLEFFAGQPACVVAMKACSSAHYWARELARLGHIVRLIPPAYVKRFVTGQKNGAADAEAICEAAKRRTMRFVAVKSETAQANAVVFRARALLVRQRTQAINALRGHLGEYGLVVAKGPRHVIKLVEHVEDPRSDVPDAARPVLLTLVEALRFLSERIDLLDREIARRAREDDEVRRLTSIPGVGPITATALAALAPPADTFRRGRDFAAWVGLTPLQHSTGGKQKLGTTSKMGERTLRRLLIIGASSVVRKALRQGTRAESWLGRMLARKPRMLVIVALANKMARIAWAVQAKGGVYRAPAVVA

SEQ ID NO: 504933 - protein, 359 aa, unidentified
MQRKQISFEGQRIFIGIDVHKRNWSVAVSTETGCVRTHSQKASAQTLLDFLKGNYPGADYLAVYEAGFTGFSTYYALTGLGINCLVIHAADVPTSQYESVMKTDKIDAVKLVKALRAGMLKGIYVRPKQSLDDIGIIRARQCILKDQNRYKVRIKHKLMSNGVEIPERFEGPNGTRWSNVFINWLKHDVVLMSETRASLDLLTSQLERMRGAQLEATRELRRLSQTERYKEGHDLLCTIPGIGTVVAMNLLTEICDITRFGNEKRFASWLGLVPTCHSSGEKVSHGEKTFRGNKQLGPALIEASWVAIRNDPGLSASFVRLCRRMKKQEAIVRIARKLANIIFAVLKNKTGYAPYVYNA

SEQ ID NO: 504934 - protein, 349 aa, unidentified
MIRNAPKEATVYGVDLGKNVFHVVGVDDRGAVVQRVKFRRDTMLAFFERASRSIVGMEACPGSQWLARKLQAMGHRVRIVPAQFVKPYIKSQKNDTIDAEAIAEAVTRPTMRFTQVRTPEQVDLQALHRIRDQLVSSRTRLINQARAFCLEYGIAIRQGAGVFRLDLPRVLVDETNDLTPAMSRMLSELFDDVVRVDQRIAGATREIEGLAARDDRARRLMTIPGIGPLAATALLAAIGDGGQFKRARDLAAWLGLVPREYSTGGKTKLLGISKRGNRYVRRLLIHGARSCVTHLDRTRDRLGGWLDALQSRMHVNKVTVALAAKIARTAWAIITKPGALYERRDPAVT

SEQ ID NO: 504935 - protein, 440 aa, unidentified
MAMRKREDAVFPNAAAVDVGASSHWVAVPPHSTDAPVREFGAMTDDLNALADWLLACGVDTVALESTGVYWIPVYEVLESRGLKVWLVDARQVKYVPGRKSDVQDCQWLQKLMSHGLLRAAFRPAAEVCVIRAVARSREVLLTEQASWVQRMQKSLVQMNIQLTEVISDVMGQTGQAIIRDIVAGQRDPERLAQHRHRRIKASEQDIVRALTGNWREEHLFVLGQALAMYDDIARHLRECDTKLQALLAERAAARVDIGKTPRAGSQARAAFDVRQQRANWAGADLTRINGLGLDTAMKILSEIGTDLSRFANVKHFCSWLGLCPATKISGGKVLSARTKRSANRVRQALKMAAMSLSHSDSALGAFYRRLCSRMDKPRANTATAHKLARMVYFMLTRGEAFVDQGQQRYEEQQRERSIAALKRRATALGFQINPLGAAA

SEQ ID NO: 504936 - protein, 319 aa, unidentified
MSKETIPQVYVGIDISKDHLDVCVLPGNQNLTFSNDANGLCQLTECLIKEPSPLIVMEATGGYEALIASTLLTQGLPAAIVNPRRVRDFARAMGRLAKTDSIDAYVLARFAQKMQPEIRSLPREKERFIKELVSRRLQLIDVRTAEKNRLYKSVSPQVKKSIQLIIDTVNQQIREIEKQLDDEIKGDPELHEKDHLIQSVPGVGPQTSRMLLAALPELGRLSGKQIASLVGVAPFNRDSGKMRGKRMVAGGRTSVRNLLYMAALVASRHNKIIKEFYSRLRNSGKKGKVAIVACTRKLVVILNAMLKKKQPFCHLMLDH

SEQ ID NO: 504937 - protein, 349 aa, unidentified
MSQTLNTAIAVTGIDIGKNSFHIVGLDARGSIVLRQRWSRGQVEARFANMPPCLIGMEACVGAHHLSRRLRALGHDARLMPAKYVRPYSKGQKNDFRDAEAIAEAAQRPTMKFVATKTADQLDLQALHRVRERLVSQRTGIINQIRAFLLERGIAVRLGQRFLRAELPGILATPPDVLSPRMVRVIEDLAGDWRRLDERIGGLSSEIEAIAGQDAGCERLMSVPGIGPIISSAMVAAIGAGDAFTKGRDFAAWLGLVPRQMSTGDRTILGRISKRGNRYLRVLFVQAAWVVLIKPKSWQRHGLKPWIEAAKKRLHHNVLAIALANKLARIAWSVLARGRGFEASKLQVA

SEQ ID NO: 504938 - protein, 344 aa, unidentified
MTYYTGIDVSLRSVSICVIDDKGEVRLEAKVAADVDAIVDRLRRFSADVTTVGFEAGTLTQYLTYGLQAAGFEVICLEARQVSLSLAAMRNKTDRNDARGLAQILRTGWYRRVHVKSLHSHQVRALLASRKAILKKCVDLENELRGLLKVFGIRLPSRVGHGSFDAELRETVSSDEMLACALVPLLDARTVLYKTYLKLDNAVKALVRVDPICQRLMSIPGIGPVTALTFKAAVDDPSRFKSSRTVAAHFGLTPRRFQSGELDNPGHISRAGDADVRSTLYIAAHSLLTRNAQWSTLKAWGVRLAKTRGHRRAVIAVARKLAVILHRMWVDGSEFRWGAAETPA

SEQ ID NO: 504939 - protein, 342 aa, unidentified
MKSTTIAVDVAKEVLEVAVSVRPGQVSQQKRLSRAGFVKFCTDQPPATVLLETCGSAHYWARRLQSIGHRVVLLPPHTTRPYVFRNKTDRTDTRGLLEAFRNEDIHPVPVKSVSQQALTALHRLRSTWLATRTARLNTVRGLLREFGCTIPIGAHHVLARTWDLLADADSGLPDALRPGLAAACTEIRDIESRIRVVEDQLKALADQTPAVARLRSTPGVGLLTATALVAFVGDVQRFPSGRHFASYLGLTPRERSSGLVRRLGSISKRGDVYLRMLLIHGARAVLWAARKRTTPDRLRAWALHLEKLRGHNKAAIALANKLARIIWAVWKHDVDFREVTAA

SEQ ID NO: 504940 - protein, 371 aa, unidentified
MKMARRDSPVHPGSRQTEGERGTSRRRDHKPEQLRGPQRARIRRKVGPLIFQEGSNMNGHPCVGIDVSKEQLDVAQEPCGSRQRMANTPTGIDQLVTYLQALQPALVVLEATGGWERAVLRALVAVGVPALAVNPRQIRDFARATGQLAKTDALDAHVLAQFAAAVRPAVRPVPDQATEVLKALLARRRQLIEMLTAERNRLTTTSVSVRRSLTAHVSWLEAQLAEIDTDLDQAIQQHPRWRVQEELLQSVPGIGPVLSRTLLADLPELGTLNRRQIAALVGVAPMNRDSGRLRGRRTIWGGRAPVRAALYMAALVATRFNPLIRVFYQRLRAAGKLPKVALVACMRKLLTILNAMVKQQTRWREPVQVVA

SEQ ID NO: 504941 - protein, 419 aa, unidentified
MNGNKCGWMPLRIHEKGGRRMISVGIDVSKGKSTICILKPYGEIVKSPFDVQHTNSGLESLVQILEGLDEEFRIAMEATGAYHYPILYYLKEKGYFVTLVNPLEMKRYRCQGLRNPKTDRIDAKIIATYVLDYWNSIKDYAVSDESYAELRLLTRQYRKYMDFRVGAMTSLTDILDMTMPGIRTVLIDWNKYSNHDPLSDFSYDFWHYDNVKKFSKEEFVEEYAKWAKEKGFHRSEAKAVALYELAHEEIPTLPSGTPSTKMLVQEAVQLVRKINASLYEILTRMQKLAKEFPEYQTVRNMSGVGDTLAPRLIGEIGDVRRFPNASALIAYAGIDAPPYQSGRFIGTERHISKRGSSNLRKIGFETMTCANVAKKPDDPVYLYMQKKKAEGKPGKVAKIAGMNKFLRIYYARVKELYQE

SEQ ID NO: 504942 - protein, 327 aa, unidentified
MSNATLHIPVLGIDVSRNKFNISLLREGKYRHKAFPNNSQGFEHLSDWLRGLGVKELHACMESTGVYGEELAEYLYDQGFKVSIVNPARIKGFAQSELIRSKTDKVDASLIARFCVAMNPSLWTPDPVEIRELRSLVRRVDALLSMRQQEQNRLEVSNKILKRSIRKLIRYIDKEIEELKGEINRRIDHDPELRDKRKLLESIPGVGEATIHIVLSHFASTEKFRDAKSLTSFLGIAPRHYQSGSSINRRTRMSKVGRSSLRKAFYMPAVVALRYNPVIADLKVKLSSAGKHNMLIIGAAMRKLVHIIYGVLKNKIPFDPGYALKSS

SEQ ID NO: 504943 - protein, 371 aa, unidentified
MNNIRFVGLDVHKQSISVAVADGGRSGSVEYLGEVDNDPGAIGKLCERLRRPGKALSFCYEAGPCGYGILRQIKGLGHRCDVVAPSLIPRKPGDRVKTDRRDATMLARLLRAGELTAVWAPDADHEAMRDLIRLRGVVRQVVTRARQNLQGFLLRHGRKHGRGTAWRMAYRRWLSTLAFEHPAQQIAFQDYVDAVTDGERRLKGVEEQILKLLPAWNLCPVVDALQAIRGIALVTAVVLVAEVGDFTRFANPRQLMAYFGLVPGERSSGETTRRGGITKTGNSHARRALVEGALAYRMKPRVGRHKVDRIEALPKAVRDVAWKAQVRLCARYRQLAARGKTANVVTVAIAREMVGFVWSIACMVQSTPKAA

SEQ ID NO: 504944 - protein, 352 aa, unidentified
MPVKKCQVTGGVDTHGKTHHAAAIDQTGRVLGDHEFAATAAGYRQLLTWLRGFGRLVRVGVEGTGAYGAGLARHLSAAGITVVEVDRPDRKTRRSKGKSDPIDALAAARAALSGQATGVPKTRTGPVEAIRALRVARRGAVKARTAAFNQLHGLLTSAPEQLRQDLCGLTGTGLVQRCAALDTDETRLTDPLQATKAALAAIAARITALTTEIAHADRRLRPAVARTAPTLSRLFGAGPEVAGQLLATAGDNPDRLRSEAALAHLCGAAPIPASSGRTDRHRLNRGGDRAANNALHTIALSRMRYEPRTRAYVERRTKQGLSKKEIMRCLKRYIVREVHTALLADFTTLNTA

SEQ ID NO: 504945 - protein, 437 aa, unidentified
MAATAAVAVVVEGAGVLGVGVDWAEEFHDIALGTAEEGVVEQFRIEHGPAGVARLIGRCLALEPDPAEVRVVLETRHGLLVEALLDAGFTVVPVNPDLVARRRGPARKKDGAEDARICCLLALDRHTSLKQLIPHGEIGGELRAIGRDDERAARDQRRLLNRLRADLQATYPAALLLAGKDLGAPSVLRLLARWPTQPELATATHEELAAFARAGRHGWPEKFAEKVTTALTAPALPTRDYLVRAKAAGIRLAAVQLLALHEARRGWERRMGELLLGGRRTGRDHTAKDPDPGNAFPGGEIYLSFPGLGDRLAARVAGEIGEHVDQFDSPNGLQCYAGRAPVTRRSDKSDFVVARRLAHNRYLGDAVHQWAFCSLTRSAWAREFYDSKIAAGKSHHAALRALGNRWLEILWHCLTKGVPYDEATHQANRQRANRPAA

SEQ ID NO: 504946 - protein, 438 aa, unidentified
MSNKVIFNLDELFISVGIDVGADFSWMSIALPTQQFVGKPYKILHNSIDSLTTAVSKIKEAEELYSLESRIFLESTGIYHYPLFCYLRDKGFNCSVINPIITKNSTNINIRKVHNDRFDSKKAALVGLKPDLKVSLMPSDLALNCRNLCREYYDLMDNRSAYVNKLQGELRMAFPQYLGIFSKVTINTSLTLLETYTSPSAFLKADKQEIIDIIKSTARFGLTYAQNKYNAIIQAATDANQFGYIIDSNIKRIRLYISFIRKYDEEINSILESLHELVDANEDSDFVKQIHLIETFKGAGFLSAVSIMGEIGDFSAFSKPKQLFAYFGLDPAVKQSGKFEGTKVQMSKRGSAIARRVIHTLTLQSISISRNREAKNPVLREYYLKKCDSKPKLVAMGAVSHKVCNMIFAILRDNKPFKIIAPQEHIKQYNSAKCDIAA

SEQ ID NO: 504947 - protein, 432 aa, unidentified
MVRFDTGEGVVLEEDSQDGEIIARVAALDIGKAELVCCVRVPHEGKPGRRLQEVATYSTMTGSLLAMSDHLRSLGVGRVVMEATSDYWKSVFYLLEAQGHEVWLVNAKDVKHLPGRPKTDKLDAVWLCKVAERQMIRPSFVPPPEIRRLRDVSRYRIDLVGVRTAEKQRVEKLLEDAQIKLSVVASDIFGVSGREMMAALVGGQTNPKVLARLARGQLRAKIGALEEAFTGYFTDHHRFLLGKMLARINALDADIAELDAILGELIAPFAPAVDTLDEIPGVGTTAARVIIAEVGVDMSRFPTPAHLASWARFAPGVKQSAGKNKGKGTTGHGNRYLARVLGEAAVSAGKTNTFLGERYRRLARRRGKKRAIVALGRSILVIVWHLLSDPQARFHDLGPDFYDNHIGPERKKRNHIRQLEALGYKVTLEPTA

SEQ ID NO: 504948 - protein, 410 aa, unidentified
MDTIYDRVGALDVHKAQVTACVRVPGASGTREPALAEFATTVVGLMALRDWLAAYRVTHVAMEATGVYWQPVWHILEDDFELTLCNARHVKQVPGRKTDISDAQWLCQLMEAGLLRGSFVPPKPQRQLRTLTRYRKTQIAERQREANRLHKALEDTGIKLDCVATDILGASGRAMLDALVSGTTDPEILADLAKGRLRAKIPALREALQGRFEAHHALVIGAILAHLDFLDEQIARLSDAIEQQLGPFAAGVTLAGSLTGVARRTAEVMVAEIGTNMTVFPTAGHLASWAGRCPGNDQSAGKRRSGRTRKGSKWLGIALEEAALAATRTKGTYLAAQYQRLRPRIGHGRALGAVKHSILIAYWHMFTTGEPYRELGGDYFTRRDPERATKRLVGKLQELGHHVILEPAAA

SEQ ID NO: 504949 - protein, 361 aa, unidentified
MQSTTLIAFDQHAATTVAAVLLAGHRTPALHTLTSDSPTILRFVERLQRQGPIACCYEAGPCGFELQRALSAHGVACDLIAPALIPRRAGDRIKTDRRDAAQLAVLYRAGALTAIHIPTEQEEAARDLLRCREDIRADLLRARHRLSKFLLRHGRRFTGTKTAWSARHHTWLRAQTWSIPALDQTHASYLRAVDETAARLRHVEEDLRTLLDLEPLRPRIQRLRCFRGIDDLTALTIAAELGDARRFSSAPRVMAFVGLVPSEHSSGTKRARGAITKTGNAHLRRVLVEAAWHARHRPFVGHALRRRQQGAPDAIIAQAWTAQQRLYRRYHRLAARGKPSQLVITAVARELTGFVWAALTQ

SEQ ID NO: 504950 - protein, 475 aa, unidentified
MKPKKSKSSLSQAIRPAAKMPVIHPHAAGIDVGSVEHFVCVPQDAVPDGESAVRSFGGFTGHLDKLVEWLQTCGVKTAAMESTGVFWIPLAQKLEDAGIEVVLVNARHLRQVPGRKTDVKDCQWLQQLHSYGLLQGSFRPAQDICSVRSLMRHRQNLTQSCGREVLHMQKALQQMNVHLHHVVSDLDGETGMRILDAILAGERDAGKLVLLRDALCRKSTPEEMVAALQGDWRSEHLFVLRQSLETYRHLLAQMSVCDGEIQAALAKIIIPVVEEPDEPAPPNPPASAKPPKKKRFHQRKAGTGLKQDLSAELARICGVDLTQVTGLNALGVMIILSEIGLDMRRWRDSKAFSSWLGLCPGNKISGGKVLSSRTPHVVNRVSILLRTVAPSVGRSDTWLGSFHRRMRARLGPAGANTATAHKLATLIYHLLKYKEDYIQVDRLLYEVKLHDKRLARLKKQADELGFEMVQKTQTA

SEQ ID NO: 504951 - protein, 309 aa, unidentified
MKEQLVYLGIDIAKSYLDGAIENEKRRFSNDAIGHRQLIQWIKQIPASVQVICEPSGGYERALVRAVVGAQLKISLVPANRVRQFARAAGILAKTDRIDAKLLCAFGKAMQPGTISASQLEQEHLRELESQRRHLTHLLVMEQNRAARMSDLCVCKLNRRLIIQIKKQIEQLDLLIEVQIKASPELSTKAQKLTAISGVGARTAALLLAQMPELGQLNRREVAALVGVAPFNRDSGRMRGKRAIYGGRRSVRHGLYMAALVAARHNPILRGFYLRLRAAGKPAKVALIATMRKLLIVLNSSLKPDLTYA

SEQ ID NO: 504952 - protein, 331 aa, unidentified
MDNSLYFVGADIALKKFDAAIRLDGNRYKHKVFANTPEGFTAFHAWLQGFGSHFHILMEATNVYHEDLADYLLVQGLTVSVINPRCMPNFAKSTNMRSKTDKVDARLLADYAYCNAARLRKYAPLATNYRTLKRLMRQLTHLKKIIAKEQVRIQMMMDALCVEISQEIIAGTKALAKELEKKIKELVKEDKVLSRNAQLLQSIPAVGWMSAMYLLSHLGDGSRFRNSKAAATYMGLTPIVKQSGDSLHIVSGISKMGPRDIRDVLYAPAMSYAFGPWKERVYAPFVQRLTANGKAPKEVIVALMRKLVSIAQAVLQHQRPFDSAILVAKAA

SEQ ID NO: 504953 - protein, 460 aa, unidentified
MTLLEKLGKELPERYYLGVDIGYKEHVAAVIGLETFVRGGERWKRARCLHFPSTQRGLDKFQHYLDHFSSAPQTFLGVCEPTGGCYGATVYQYLLDRAYPTWMIENALTRHMREKIMGGIPKTDETDARVMARICYLHEAIGEEFKLRPLKLAKQEESNLLAMCRDSWKLSQMIVRGKNQFTQLMAVVFPELKTFFTKSVSTISPVTLMAAYPTPADLAAATAEDVKAVLWKVGAYRHAHRVGELRELARHSSGLLPDPGRAWRLGWLTNFLQSNLKAQAELEKQVEARVTQHPGYQWIEAVPYAGPATLGVILAVTGNVNRFSNYRKYVAYTGYFAGLEKSQTIDRTKMSRRGNRNLKRAYFQIAAPLVWFDRGGNQYQTLFESKVVEGRPWYKAMPFVCAALARHIYHCLKYEDPYDVEKAFGASVSSPAPEAAETDLEADLDERFEVMEAHLDPEEG

SEQ ID NO: 504954 - protein, 345 aa, unidentified
MEHYVGLDVSLKLTAICIVDRTGKIEREGVVSSDPEAIAIFIKSHAPHVARVGLETGATATWLWTELNKLGLPVICIDARHAKAALKMQINKSDRNDAVGIARIMQCGWYKEVRVKDLDSHAVKALLASRALLIKIKRDLENQIRGLLKNLGLVIGRAKMNVFAVRAAEMTEDRPELAAAVVPLLSARAAIEQQIADLDRKVMRLARNNAQARRFMTAPGVGPITALCFLATIDDPTRFKRSRSVGAYLGLTTRRYASGEIDWTGRISKWGDKMLRSYLYEAANVMLTRVARWSALKAWGIRVAKRTGLRKAKVAVARKLAVVLHRMWIDGTEFKWSKEAANQPA

SEQ ID NO: 504955 - protein, 401 aa, unidentified
MWYVGLDWADTHHDVEVLDEAGKRVGAQRFAHSHHGLTQLKQFLLSIAAQPEHLACIVETNHGLLITFLLEAGIPVYPVNPKTVQQLRKAAGAKTDQIDAHLLAKLGRFELAELRRLEPDSPTVAELKTLTRDQDALIQTQTRLVNQLTACLKEYYPAALHLFAKVQQHSTLVFLQAYPTPQAAQAAAVAEITATLRTGKHTHPRRAAPKIFEELHRPHLVASEVIVRAKSRLMLSLVKQLLVVIEEIASYDEAISSLFLTHKDHALWRSLPRAGKRLAPRMLAEWGDDRSRYADATSVQTLAGTAPVPFQSGNYAKAHKRFACVKPLRNALYQFAWQSTQQEAWARDYYQRKRAEGKTHSMVVRALANVWVRIIYRMWLNHTCYETAVFELAQRLHAQAA

SEQ ID NO: 504956 - protein, 387 aa, unidentified
MHAADQSLAPTTIGADLCAIFISLELSRSTWLVTSLSPGRGEKMSKHSVSAGDIAGLLARFSELRRKACARTGKSFPIVIIQEAGLDGFWIHRVLLSEGIESHVVDAASIATSRRRRRAKTDRIDGETLLRALLAHKRGEPRVCSMVRAPTPEDEDRRRICRERKVLIMERVQHVNRIKGLLFSQGASGYEPLRRDRRARLEALQTGDGRRLPPHLKAQVCRELDRLELLLQQIKAVEAERDALLNAEQTKASAPPPMLLGVHGVGPEFASVLWSEGLSRHFDNRRQVAAYAGLAPTPWQSGSVHHEQGISQSGNRRLRTMMIQLAWLWLRHQPRSALTLWFKDRMERNGGRRRKTTIVALARKLLVALWKYVSAGVVIEGAMIRAA

SEQ ID NO: 504957 - protein, 417 aa, unidentified
MANPLIVGIDVHSRTNRTCLLDREGEPWGQRFSTANNRPGTQTLIERLVEALQQGQFDSLRVAVEATNWYWFPLYQALSQEPVLARWPQTFYTLNPRVTARYKDSFSDKDKSDDADAYIVADRLRTYSRQELPAPFAPDLRYLGLRFLTRYRYHLVKDLVREKNYCLSLLYLKANEYREAHPFADVFGATSRAVIEEFASLEEVAAMPLAELAIWLDTQARGRFPDPAKVARELQQVAQDSYPLDPQLQQPINFVLTWSFQLVNFLDRQVQRVNTAIADAMRDIPHTLDTIPGFGPVYSAGIIAEIGHAERFDQDEAKVAQYAGLHWRQHQSADFKAQETRLTKRGDAYLRYYFCEAANAVRMRDAEYAAYYQRKHDEVRTHQHKRAVTLTARKLVRLVVRLLTTNQPYQPRRQSSA

SEQ ID NO: 504958 - protein, 347 aa, unidentified
MLVRKVTQHAARGKTRRVPTGVSAEYDHHIALDWSLKIMAIAHMVRRDQSPRVFERPASLKELKTYLGSLKGRVILTFEESGFAHWLYLELLDEVDRIIICDPFKNKLLQHGPKTDKIDARKLCQLLRAELLTEVYHSTSGLYELRLLVSAYDDVVRSGIRLLNQQAALKLTHRDTGKTASFIGGFLTENIDLYRKSKDQYERRFRDSARRNSLVRFQQQLPGIGTIGAVKIVACVVDARRFPYTGKYFSYCGLIKHEKLSGGRSYGRRKPRYSHMLKSVYKTAALAAINGKNPIREYYDHLLVQGVAKHNARHAVARYIARVSLGMLKTETRYEPYRWRNDQNQNI

SEQ ID NO: 504959 - protein, 339 aa, unidentified
MALYAGLDLHSRNAYIGIMDKTFNRVFKKRVPNHLELILQTLDPFRDQIKGFVVESTYNWYWLVDGLMDAGYSSAHLANPSAIKQYEGLKHSDDQHDAFFLAQLLILGILPQGYIYPKKERPVRDLARKRLFLVRHKTAHILSLQSLIQRCCSMKVRANDMRHLTVKELEAWLEEEYLVLSAQANLDSINFLKQKIQGLEKAIRKKVRIDKAFHNLKTVPGIGDILALTIMLEVGDINRFLKVGNFTSYCRCVPSQRLSDGKSKGYGNRKNGNRYLSWAFTEAVHLGRRHNERFRRYYNRKVAQANTSLATKALGNKLARICYYIMRDQVPFREELFCQ

SEQ ID NO: 504960 - protein, 316 aa, unidentified
MTSTRFVGIDISKATFDVAFSADSRAVYSNDPAGFTQFRQALADDDHVVMEATGTYFLKLATFLSAQDITVSVINPAVISYFARMRLVRTKTDRVDADIIREYGCLEALPAWTPTEDVFIELNQLDSHLNGLQGDRNRVIGRLEALQQCAKINAYTLEDLQQQLTDLEVRIKQTEKELVVLTQAHFPELLTLLTSIKGIGQKTAIMFIVLTRGFTRFSSPKHFASFLGLSSFIRQSGTSVRGSGGISKMGNPRMRQLLYMAALTARTRNSACKTFAERLAGNGKPPKVVRIAVANKLIRQAFAVCLKGESYSECYV

SEQ ID NO: 504961 - protein, 377 aa, unidentified
MHSENIAAYIGLDVHKETLAVAIAAPERLGEVRYYGTINNEAQAVRLLFQKLQGLYGNILSCYEAGPCGFGLYHQLTAMNIKCQVIAPSRIPKSPTDRIKNDHRDAISLARLLRAGELTPVWIPDLTHEAMRDLIRARAAAKRDSRVARQRILSMLLRTDKRYAGKHWTGKHRTWLANQSFSQPSQQIAFQHYCQSLEQIEDRILQLDQEISRLLPEWSLCNLVCQLQALKGVGQLTAITLVAELGEFSRFSSPKQLMAFLGLVPGEYSSGNSIRPRGITKVGNSELRRLLYEAAWSYRTPAKVGAWLIYYRPDSVTQYSKDIAWKAQQRLCSRYRSLTAKGKKSQVAITAVARELTGFMWDIALAAQSSFSQQKQN

SEQ ID NO: 504962 - protein, 366 aa, unidentified
MAITHVALDDSKRVIVAGILRADATQPELREIPNEPRQVRRLFERLLREAPVRACYEAGVSGYDLYRQLTALGVDCAVIAPALTPRKPGERVKTDRRDAAKLVRLFRAGELTAIHVPTEAEEGVRDLTRCRDDVRADIIRWRHRVLKLLARHGRVYQAAKNWSQAHWTWIRAQRFDDVALARTLEASLEALEQALRRRADLDRAIEGLASEPRYRDAVGALRCFRGINTLSAMILVAEIVDFERFRRPRALMAYLGLVPSEYSSGDRHRRGALTKAGNTHARRVLVEAAWHYRHRPALGDRLARHTSDQPPAVVAEAWRAQQRLHRRYRHLVGHGKRPTVAVAAVARELAGFIWAAMTQAPRVLAA

SEQ ID NO: 504963 - protein, 422 aa, unidentified
MSYCPVAGIDVSKRFSDMCILSPDNKIFAQEKIYHDETSINRANALLQKAERLFFSKPVIVMESTSHYHLILFQFFSEHGYDVIVVNPLQSNSMKDFSIRKRKTDRVDAFKLAMMYRTKTLRPSQIPQTATRALRQLCRHRAELLNDVSSYKNRLTALLDQTFPGYDKVFSDVGGVTSCAVLVRFPTPTILLVEGESELVEVIAAASKSGYSFAKKKAGLLISAAQKAQTLGIHSCADETLIVCTIQMLRTLSESVLQIEAAIDNLLAQIKEMRNNVSLLQSIPGIGSHSAALLLGEIGDISLFKKPKQLAAYFGLDPTERQSGSFRGTKNKLSKRGSPYARAALHMGVVNSICKRGKDSAANPVLLSYYEKKCKNKPAKVAQAASMHKLVFIIFAVLRDQKPFELKTPEQHAVEQGFVKAA

SEQ ID NO: 504964 - protein, 340 aa, unidentified
MCVYIGLDLSRKRLDWYGCRVDGTRVDAGAVPPDLDGLRQLAHRLGDAEVIAVVETMNGARFVHDQLELAGWDVRIADAQRARALAPLACKTDRIDAQVLAELARRDLVPEVWLPDPRVRGERERARFRLHLVKHRTMLKNRINQTLVAHGLGRPTRHLFGPKGRLALERLPVPEPWHGTLSASLLLIETLDEQIAELERELRALGADHPYVPLLMTAPGIAWILAYTIASEIGDIARFPTARKLIGYTGLCPRVYQSGQTDRRGPLAKNGPNYLRWALIEAAHTAGRTAHYRGLVERMRDRHGRRRGSAIASVEIARRLSEAIWWMLTRNQPFAPAGAL

SEQ ID NO: 504965 - protein, 369 aa, unidentified
MENNNTVVGLDVHKETITIAVLRPDKDRPEPSITFENQPSIIEKKVRELNRRHAPLEFVYEAGPGGVALYRQLTQLGHRCAVIAPAWMPMKPGDRVKTDRKGAEKLSWYWRMKDLKEVRVPTPEEESVRDMLRVREDVLANQLRARQRLLKFLLRQGRVYRDGKHWTQAHREWLRQQKFELEYLTKTYGANYRILAEIDAHLADLNREVEPLAQNEKYKTAVDYLKCLKGVNTLTAMTLLAESGDFRRFKNARSYMRYTGMVSWEDSSGSRVYRGGITKSGNAHIRRVLVQGAWTYQLRSLGSPTMAKRRKGCPAEIIHLARRADEWLHLKFRRMIGRNKRSQVAVVAIARELAGFVWAIGQMIPSDQQ

SEQ ID NO: 504966 - protein, 326 aa, unidentified
MAAVPPADRYVGIDVSKNTLDVYLLPQEQTFTAPNTAAGFTRIIDRLDDEVSTLVVVEATGSYHLQLTIALDAAGMTPAVINPNWIFHHARSQGKRAKTDRGDARQLALYGQQHQLRPRPLLDATGRELASLVARRADLVKIGAMEKARQHTAAGAALTDIEHHIAYIDGRVKVLERSIRAVVAADPFWKRRVAILRSAPGIGPVLSVLLAVRLAELGVLDRRQIASLAGVAPHTQDSGAHRGRRVIGGGRRDVCKGLYQGSVVMRTRNPPMRAHYEQLAARGMEPKPALIACARRMVGILNAMVRDDLLWSETRVGQGAFMTPSP

SEQ ID NO: 504967 - protein, 482 aa, unidentified
MKSKPEEQNKRATNHPTQHHWHEMNRKQRREMMRKMQSEDLSLEVIHPDAAGIDIGNESHYAAVPPSRDSQPVRRFGCTTAELKAMAAWLKQCGIRTVAMQSTGVYWVAVYDILELAGFEVYLVNARDTKNLPGRKSDVQESQWLMKLHTYGLLRNSFRPAQEIRTMRTYWRQRNDLVQSVSRHILRMQKALTQMNLQLANVLSDVSGMTGQAIIKAILAGERDPHKLAAFRDCRVKASEEQIARSLEGNWQEDLLFVLKQEQDGYEFCQKQMAECDRQLAQYLQQREDRSQGATLPEEKRKGRLKKKRANKPQFDLRAELFRITGTDLTRIDSVDVMTAMTVISEAGWDMSKWETEHHFVSWLRLCPENRISGAKVIGKGRLPTNNPISIALKIAASTLRLSKTYLGAQFRRFRTRLGAPIAIKAMAAKLARLVYRMLRYGMKYVDQGAVFYEAQHRHSQIKQLKWKALKLGFRIVQAPAA

SEQ ID NO: 504968 - protein, 369 aa, unidentified
MGKHSEVFVAFDVAKKKHAVAIAEAGRMGEVRFLGDVENAPLPIERTIKRLANRYGRLHVCFEAGPTGYGLHRQVQALGHDCMVVAPALIPKRSGERVKTNRRDAVTLARLHRAGELTGVWAPDAAHEAVRDLVRAREAAADDLRRKHQQLLSFLLRHSRIYRGGGHWTLAHRRWLAGQKFEHAAQQIVFQEGIDTIEDALQRLRRLEKQLAVIVPEWSMAPVVEAYQAMRGASFLVAVTFAAEIGDVRRFDTPRQLMSFLGLVPAESSTGDTIRRKGLTLAGNRRARRALVEAAWTYRYPARVSETLRARLEGLPKPVRDIAWKAQVRLCARYRRLSAMGKKLPIVVAAIAREMAAFLWAIGREVAPA

SEQ ID NO: 504969 - protein, 482 aa, unidentified
MAERKKSTFQRLQDGRLNRKQRKELAQRLAKDDPGLEIVHRDAAGIDIGNASHFVAVPAGRDAEPVQEFGSWTRDLQRMAEWLKKCGIRTVAMQSTGVYWIAAQDVLEQAGLEVCLVNARGTKNLPGRKSDVQECQWLMKLHTYGLLRNSFRLPEQIRAVRTVWRLRDRVVSDAGRTVQQMQKALTKMNVHLANAINDVSGVTGLKIIRAIVSGQRDPRQLAKLRDARVQASEEEIACSLEGNWQSDVLFELEQTLETYDFHQKQLAACNEQLQRYMAALPDREGVPAAEPVAEPREPAGKRRKAKSRRKAKNYPSFDLAAELERKTGVDLTTIDGINVLTAQTIFSELGADLSAFPSEAHFCSWLTLSPKRDVSGGKVIKHVSSPVQNRVALALRMAAQSLFNSDTYLGAKSRQLRARRGGLKAVKAMARYLACLVYRLLTKGQSWVDQGAAHYEKQRKFRDMAALERRAAAMGLQLVPSA

SEQ ID NO: 504970 - protein, 403 aa, unidentified
MHDPTGRYGGVDWATDTHAVCIVDNNGVEVVAFDVAHTSDGLVELCHRLHDARVVRVAIERPDGPVVAALMEDGFEVVVVSSRSVKALRERYHAAGNKSDRSDAYVLADCLRTDGHRWSSLKPDTPATVTLRAHVRARKNLIETRVATCNQLRAHLRVVFPGVVGLFSDLDSAISLRFLERFPSASRAAWLSEKRLGAWLRTNGYSGRKTPAELYARLTTAPHGVIDDGGTRAAVALAYVAVLKTLRAQIDELDRRIAELLDHHPDTHIFTSLPRSGTIRAATLLAEMGDCRDRFPTPETFVSLAGAAPSTRASGRHRVVTFRWAADKKLRDALCDFAGDSWRANPWAETRYRQLRAAGKTHPHATRILARSWAHIIWRCWQDHTAYDPAKHTALQRLTPQAA

SEQ ID NO: 504971 - protein, 442 aa, unidentified
MTRFVGGDLQARFMARVRDVDPRRCLVVPVDVGKWSAMALVADHHGEVLRAPWEFRLDEPGVRGLLSVVAGAVRDVDAVVCRVGVESTGHYHRTLVARLRSSGVEVVELNPAAVKEARSQQLLRRLKSDERDLGAMAELMIRGAGRVPQVGDEAMAAQSAWVAHRRRKVVAHVALSNQVQGHLDLVFPGLGACFDGILRTKAGWVIVRDLADPDRMRRLGPEGLRRFVARRGVVLRRAKAAQLIDAANVALRLPAGERAPIAALLRADVALLEAIGDEIRRSEHELARVLDATPAGVLVSLPGVGVVRASAYGAAIGDPGRFPNAAAAYRASGLVPTEYSSAGRRRGGQHISREGSVELRSAIIELGRGLAGHDDDFGAYRRRLRSSGKRPAVAAVAVGHRAHRLAFAMLRSQEPYDPNRWAAAVADGPVMAKTGGRPTTAT

SEQ ID NO: 504972 - protein, 346 aa, unidentified
MDATTVAVDLAKTVFEVAIANAQWRIVSRQRLNRKQFTRFLAETPATHVVMEACGMAHYWGRVAHQHGHRVTLVPPAYVRPYVRRNKTDRADAEAILEAVRSGEMPSVPVKRVEQQALVALHRVREQWMTTRTARINTLRGILREHGVLLPAGAAASVQAVPRLLEEATTTLPRHLCTVLTSVHAEIRALETRIAELERELRVLAIADPVIGRLMTIPGIGLLTATALVGSVGHIHAFRRARQFASWLGLTPREHSSGTRRHLGGISKRGDVYLRCLLTHGARAVLVAAQRRKAAAQPLTRLHHWAMTVRDRRGHNKATIAVANKLGRTVWAVWYKDVPFAVPDAA

SEQ ID NO: 504973 - protein, 488 aa, unidentified
MKPKQEEKTKQATWGPTQGNGQHMNRKQRREMTRKIQSEDLSLEVVHPDAAGIDIGNESHYVAVPPTRDREPVRRFGCTTAELKEMAAWLKQCAIRTIAMQSTGVYWIAVYDILEEAGFEVYLVNARETKNLPGRKSDVQESQWLMKLHTYGLLRNSFRPSQEVRTMRTYWRQRNDLVRAAGRHIQRIQKAMTQMNIQLANVLSDVSGVTGQAIIKAILAGERDPHELAAFRDRRVKASEEEIARSLEGNWQEDLLFVLKQEQDGYEFCQKQMAECDERLQQYLKQRKDRSAAANLPEEKRKERLRKKKKGNAPRFDLRAELFRLTGTDLTQIDGIDVMTATTILSETGWDMSKWKTEHHFVSWLRLCPDNKISGDKIIGKGRLPTNNRATSALRMAASTLRLSNTYLGAQFRRLRSRLGAPIAIKAMAAKLARLVYRMLRYGMQFVDKGAEFYDPQHRKLQINYLKWKAANLGLQIIEAPAAEAPAA

SEQ ID NO: 504974 - protein, 291 aa, unidentified
MYKSIYAGIDISKKTMDVAVCKEGCMIKEDHLCVENNPQGYRAMMDWLTGMTGGKKDDMLICMEHTGIYSLAFQCLLEEDQVDYTMVSPLHLKKSLGLTRGKNDRIDAFRIADFCYTHRHKLQASHLPPDALQRLKKLMSERDRYVNHKRMLEQTKTDMEQFDSESARSRTLKMLKETVAVIEEIEEEMLTLIQKDETLNRNYVLLTSITGIGLVNAINTMVYTNNFEAFDNARQYACFVGVAPFPHQSGTSVKGRTKVSHMGNKHLKADLTQGAKSAAYWDSEFSNHIST

SEQ ID NO: 504975 - protein, 393 aa, unidentified
MQQRKNAGSEPVNNTESTSSIFISGLPACLNPDPDSRLTSIVKVVRLSSIPFFPKRLKDKSMESFYFIGVDVSKKKLDFCVMFEGEVVHEEKTANHPSAIMALIHHLEENYGIEGSRMLVCAEHTGQYTFPLACACKALECKLWLENPAEIKYSSGVQRGKNDKVDAKRIAIYACRFQDKVQYYERPTEDIERLKQLESERTLYVNDLAKYKGQLNDQKDYMPKDLYERKIKRLQALMEDLEEAIQAITEEMDEVINSCPVLSRQKELLMSIDGVGRVVATNMIIVTEAFTRFEDPRKFNCYAGVAPFSYSSGSSQHSKARVSHRADKVMKRLLHLAAVAVTHRVGGELKMYYERKVAEGKNKMSVINALRAKIVARMFAVIKRNEKYKPILS

SEQ ID NO: 504976 - protein, 343 aa, unidentified
MKDTIYNHYISIDWSIENMAIARMTKKSNKISAIDIPSDISEMQVYLKRLKGSKILMVEETTTSQWLYTELRDYVDRMIICDPHRNKLLNDGPKTDKIDATKLVQLLKAGLIKEVYHSTEKFLYLRRFVSGYEDLVKAGVRLQNQRYSLLRACGKRGFEWAGTKLDSQGEQFVLDSLDRQIEAYLKEKEGYEKEFDRLAKDYPEIRHQKSLPGIGPIHAVKIVARVVTPYRFADKGHYLSYTGLIKLEKVSGGRSYGRKNSRYCRQLKSVYKTSTWAAIGGNNPINDYYEYLIKEKGYPEHNARHKACRQLAILSLGVFKSGKKYQPYRRDHVKGDQEVKSGL

SEQ ID NO: 504977 - protein, 407 aa, unidentified
MGEVDGRSPADEGNGGSVNTGVSSPAWVTLVSGICPDRVVLVWMFEGGLQPTLERGRRRPFFPWPQPSMSFGTVTVVTHDRTVDRSSIARTRQVTVNTIICGVDVSSQWLDARIGRDGRCERFANDTEGIEALAGFCKAEGVTLVVMEATGGYERKPFAQLSGHGVPAAVVHARAVRDFARGMRLLEKTDRIDAGVIAWYAATKGTAPQPLDSQAQQRLEALVTRLRQLTCCRTTHTNQRRLVTDPTVLETFTQVLAVLAGQIRTLEGEISELIEADPLWQKLDQAFRSMKGVADRTVATLMADLPEIGTLSNKAISKLVGLAPLAQDSGNTTGKRSIRGGRAPVRSILFVVAECVRKYDPDFQDFHQRLSKANKAKKVIRVALAHKLLIRLNAKARDARKEFANAT

SEQ ID NO: 504978 - protein, 347 aa, unidentified
MKKIIIGIDISKEKIDASAIDVRNSQLGVLKLDYQAFENRPMGFRRMLVWARHLIKGVTQEEVMFCCETTGGYDRSLCDYLFAKGLDIWRESSLQIKKSSGLRKGKDDKADSLTIAEYAMRHMDKAVYYISPSETVRELKALLLYRRKLEQEKTSKKVRVAELKATAAKSKSVSFILRDAQKSIRALEKSIKECEKQILALYDSDEELKRSYDHLTSIKGISIVNATAMIAYTNNFKNITTSRKLASYYGIAPFREVSGTSVNKKAEVKCYSSSMLRAYLTQAAQWTIKEHGIYREYYLRMSAKGKCYGVILNNVKNKLLHLSVSLIANDMDYEENHEFLRTQRMAQ

SEQ ID NO: 504979 - protein, 427 aa, unidentified
MKEPTIACGIDVHKMFLQVCILSRSGEASQHRFHNTLNGILALKDLVLAEGCEIVAMESTGIYWYRLFLELESDIRTIVANARQIKSIPGRKTDMNDARWIAELALHGLIRPSRIFPRRDREFRDLTRNRETLVRTRTTIKNRIHKILDSAGIRLNLALKDLFGKSGRHLLSGLAEQKDLETTLATIPSPRILRRADQLREILQGSPLSPIQLHLLTTQLHLLEEIEEKIAHLDELILASLEDPQLEAVAICTSVPGISITAATTILAELGDVRDFSTASRLVSWAGLAPSVYQSADTQVCGKITKQGSKSLRWILVQAAQAASRTTGTVFSSFFRRIAYRRGRNKAIVALARKILSILWHLLVNRESYVEPGLKRVRKLPARMTLPKISIDDAVETLLSAGYRIYSPENQKPTGKGVRAERATHPL

SEQ ID NO: 504980 - protein, 329 aa, unidentified
MKSIKPEQKLYCGIDVSGATLDVCYQTEDGSLEWHKCTNNAEGFKEIWQHTGKDYHFVMESTGVYQLPFCFFLEAKKAWYSVVNALQIKRYIQMKLERNKSDKKDAFHICMYGAEHNPACYEMPGQLYFECRALNNAIETITTEITSFKNKLHSLSKLEIDTRVIVTGYKKILRDLQAELKKFEAELYKKLEAWQPAVVKQVRSVVGIGKRATAILVVCTQSFKYTETYQQLISYAGLSPKEYSSGSSIRGKVRICKQGGSLLRHTLYMCALNAKETNGACKELFDRLVAKGKNKKLAVIAVANKLLKQVFGVVKNECLFDRNYYKKIA

SEQ ID NO: 504981 - protein, 442 aa, unidentified
MATLTILERRERFYLGVDVGRRTHTVCALPRSTFETGGARWQHAPTLAVPVSRAGFEKIAALLGRLADDPARDVVAGLEPTGGYYARTVHAYLTSLGLQVHWVKNNAVHDARDAVYGKKTKTDPADARLIARLLYLREAVGQEYAFTAGHDQVGVYATLRLLVNNRWKLRQAQARAGNQLTQILDVVFAELAAVFTKSLTAPAALALLTRYPTPAAVAAAGQDEIYRTVVFEGKAPRKAAQVPRLLELAAGSVGIAAGIDDLIAAETYLVGQLRRLAEEAASIEERIVATVALAPEARVICSFPAAREIRAATILGAMGAPVGAFHSGKALRRHLGWSVEEEKSGTSVHRERLAVSGNRHSRREMRLWTLGLISPRTPWTPFRAYYERLLAPPSGKRPNVALGHLASKMISVLYTCMSRDQAYDEERLAKDMKISLPAARQA

SEQ ID NO: 504982 - protein, 345 aa, unidentified
MTSVATIGLDIAKSVFQVHGVDAAGQVVLRQRLARRRVLAFFEKLAPCLVGIEACSSSHYWARELMARGHEVRLMPAQYVKPYVKRGKNDAADAEAICEAVTRPTMRFVPVKTPEQQSVMMLHRVRLMLNRQRTQLSNSIRAHLSEFGIVAPIGRRGVDQLLAVVANDKDTRVPADARLCLQMLAAQLAVVKEQILENDRRLRASARETELGRRLMEVPGVGPLLASALVATVADPAAFKTGRDLAAWIGLVPKQNSSGGKERLGSISKAGNRYLRQMLVVGAMAVIRYAERHGTRRPWLVQLLQRRTTKVAAVALANKTARIIWALMTSGERYREPAVAGTLAA

SEQ ID NO: 504983 - protein, 430 aa, unidentified
MNYTQNQKIEQVTESTLVLGVDIGSSEHYVRAFDYRGRELTRKVFRFSTDINGFNSFYDWVTQICIKHGKNEAMIGCEPTGHYWYTFYQFVKDYGMKLAFVNPASVKKAKELDDNSPKKTDLKDPKTIAKLVIDGRYSFPYVPEGIYAEIREVTSSRDRIMKELNAASNRIQRWLKIYFPEYLTVYKKFDTTTGMMILEEVPLPTMVTALGADNIIKIWREHKVRGKGASFNRAKTLVDAAHDSVGKSGGQGAVMEIQMLLEDYKVKKQQLEMVTSVMEELIMQIPNAEKMLSVDGVGLVTVAGFISEVGDISRFKNPKQIQKYAGFELVENSSGKHKGRTTISKRGRKKLRKIIYQVVLPLIQSNKEFRSIYDYYRKRIKNPLKGRQAMIAVGCKLIRVFFAIMTKGVVYNGSKMIEDIHRPTQLPQAA

SEQ ID NO: 504984 - protein, 355 aa, unidentified
MESVKYIGLDVHQSTISVAVLNIEGKLMMQSVIATKATAVLDLLQGLRGVLHVTFEEGTYSAWLYDVVVRHVAQVVVCNPRKNALLKSGNKSDQIDARKLAELLRAGMLSPVYHGEQSTRTLQQLVASYTALTEDTGRAMRRIKALYRSQAIACAGKKPLGKRHRGEWLARLTDSGQRRRAEWLYQELDAVQVLRREARHELIAECHKYPAAKLLRTMPFFGPLRAAVLIARVQTPHRFRTKRQFWTYCGLGLETRTSADYVEKDGQIMRRRKPVYIRGLNWNYSHELKNVFKSAATTASAMEGPFRAFYEMRVANGMLPAMARLTLARKMAAIAPILWKKGETFAAEHLKLQAA

SEQ ID NO: 504985 - protein, 371 aa, unidentified
MKKSSMFVGLDIHKSSIEIAIAEAGRDGEVRSYGAIDGTLDALDKVVRKLVSKGSELHFVYEAGPCGYDVYRHLTAQGFDCAVVAPSKIPRQSGNRIKNDRRDAQMLARLHRAGELTAVYVPCVEDEAMRDLTRAREDAKAMERNAKQRILAFLLRHGHCYSGKSPWSRAHFRWISLLKMSHPAQQIVLQESLDTLAECTRRVDRLTEQIQTLSPQWRLFPVTQALQALRGVSLIVATTTIAEIGDLTRFEGPPELMSYLGLVPSEHSSGRTTRRGSITKTGNGHVRRVLVEAAWAYRLPARVSRKLLVRQEGLPQEVCAISWKAQLRLCARYKRFIAKGKSHQLVVTAIARELCAFMWAIANEVHGPVKV

SEQ ID NO: 504986 - protein, 375 aa, unidentified
MDEITRAPIARVGVDLAKQVIQVHAVDASGRRVVARAFKRDQFLAWCTRLPAGCVVAMEACSSAHYWARKLRALGLDARLIAAHFVTPYRMEGKNGKNDATDAAAICEAASRPSMRFVPVKTCEQQGVMSLHRVREGLKEERTACINQIRGVLTEFGLVFGKSPKVLRAVLADVIEDASNELSTMARLVMQRAFEHWRELDEHLRWCDREVGQHVRANPEAKRAAKVIGIGELGASALTAGVGDFRQFKSGHQFGAWLGMVPRQDSSGGKIRLGRITKRGDDYLRTLLIQGAKAAVMSADKRDDPTSRWLAQLTARVGWQKACVAMANKNARILWAVMTREEGFDPNHVSVKPQAKQSARQPVAGPPSAPTAYAA

SEQ ID NO: 504987 - protein, 307 aa, unidentified
MCCVLMVVIAQKKFANTTKGHDELVSWLKGHKIDHAHICIEATGTYMEPVAECLYDAGYIVSVINPALGKAFAQSEGLRNKTDTVDARMLAEFCRQKRPAAWEAPHPLERALRALVVRHQALTDMHTQELNRTETAREVQRPSIDAHLLWLEAELKRLEKQIKDLTDDDPDMKHRRKLLESIPGIGEKTSAVLLAYIGLKDRFAHARQFAAFAGLTPRRYESGSSVRGASRMSKAGHVSLRRALYMPAMVATSKTEWGRAFRDRLAANGKKGKVILGAMMRKLAQVAYGVLKSGVPFDASRHNPVAA

SEQ ID NO: 504988 - protein, 333 aa, unidentified
MKKQTPTEKMPSTTYVGIDVAKATLQVHLNGHQIEFNNNSKGHAKLTKKLAQLTRPHVICEATGGYERPVVAVFHQDKILVSVLNPAHTLAAAKAQGMRAKSDCCDAEALTDYGQRYQPEPTVPVPQELREMTELALWLQQLIDQRAVAKTQAEHHDNAFVRHQHQELLAHYDEQIKTVEKEIKKRIQSQPEFQQRLDCLVEIQGVGFRTALMMLVLMPELGQMNRGGAAALAGLAPWTRDSGTMKGKRCIGGGRAQVRPVLYMSALCASRCNPVLAPFYAALKQRNKPSKLALTALMRKLVIYMNHKLKALATMPPAQETKNATKPKKVLAN

SEQ ID NO: 504989 - protein, 372 aa, unidentified
MSQSTTAYVGLDVHKDSIDIALAETPRESEVRHLGAVGGGVEPVSKALRRLVSRGQRLHIVYEAGPCGFVLQRHFAALGWRCDVVAPSSIPRPPGERVKTDRRDALKLARLARVGELTPVRVPDTADEAVRDLARAREDAVREQRNARHRLKALLLRNGIAYAGRSAWTNAHLRWLAQVKLAHPAQQIAFQEYLHAITEAGARIARHEQALRDALPGWTLAPLVHALQALRGVQLIAAITLVAEIQDFHRFANPRQLMAYLGLVPCEHSSGTRRRQGAITKAGNAPARRMLVEIAHLYRYPARVSPVIARRQAELPTAVTDIAWAAQLRLCARFRRLAARRLPHNKIVVAIARELCGFIWAIALTVAPTLPH

SEQ ID NO: 504990 - protein, 346 aa, unidentified
MEHIGIDVHKNQSQICILTSEGELIEKRIVTERGRFAAVFGSRPGARILIEASTESEWVARCLEALGHEVVVGDPNYSPMYGRRTRRVKTDRRDARALAEACRSGTYRSAHRTSDARRHLRGRLAVREALVRTRARYISLIRALLRREGLRVRSGAAEKFLERLAEVDVPAPLRQEIKPLLTMMGSLGKQIAGAERKMAALARKNGEIRRLCTAPGVGPVTATSLVATLDTADRFRGAHQVEAYLGLVPCERSSGEKQYKGRITKTGNNRTRWLLVEAAWVLLVKAKSVQAQPLQAWAHRIAARRGKRVAVVALARRLAGILYAMMRDGTEFDAGRFVTDRASATA

SEQ ID NO: 504991 - protein, 418 aa, unidentified
MEVLYPRCAGLDVHKATVVAAVRLVAGGKVVREARTFATTTASLLELAAWLAENGCTHVAMEATGVYWRPVWHVLAEGGFVLVLANAAQVKNVPGRKTDVGDATWLAELLAHGLIRASFVPDGPTEELRSLLRTRKQLVRERASHVQRLQKTLESLPRTRSGDANVKLDGVVTDLLGKSGRAMLEALATGEDDPAKLVALAHPRLSATPERLREALRGRVTAHHRFLLRLHLDQVDALDAAVARVDREVEAHLAPFRAAAELLTSIPGIGPLAARVIVAEIGLDMGRFPTAGHLVSWAGLCPRNDESAGKRRSVRLRKGAPWLKTTLVQCAWAASRKRASYLQAQYHRLRARRGPKRAVCAVAASILTAAYHMLKDGTAYRDLGPDHFDRRAKEVQARRLVRRLADLGYAVELAPLTT

SEQ ID NO: 504992 - protein, 339 aa, unidentified
MKVSTLGIDLAKNVFQLHGVGCNGQTVLKKKLTRDKFLPFLMQLEPCLIGMEACASSHHFARVLQQYGHEVKLIPPQYVKPYVKTNKTDAADAEAICEAVARPNMRFVQIKTAEQQAILVLHTERNILIRERTACANSMRAILAEFGIIMPRTLSQLYKKIPEILEEYDNELSPFVRCSVARQLEHLQSVEDQITLIEQELSRWAKTQPACQRVMKVPGVGLMTATYLVASVGNGQQFHSAKQFAAWLGLVPREFSSGGKQRLGRISKRGDRYFRYLLVHGARAVAAVIERHKDNMPWLYRLLNKKAYNVAVVAQANKTARILWSMLVHHTEYRTLSVV

SEQ ID NO: 504993 - protein, 391 aa, unidentified
MICIGIDVAKDKHDCCILDSDGTVRADCFTIPNNMNGFKQLLQTIQGCTKKSDKIKVGLEATGHYSYNILGFLLDNGLPTYVINPLHTNLYRKSLSLRKTKTDRVDARTIATMLLSDVDLKSYTDTAYHNEELKSLTRYRFEKVRERAKLKQSVSRLVTILFPELEQLVPTLHIASVYSLLSEYPGAKQISEVHLTKLINLLTTASKGRYGKDKAIQIRDSAKTSIGSVMPPKSLELKHTIKLIRELTSEIDEIEDSIQKIMDELNPPILSIPGVGIQSAAMILAEIGDFSNFESPDKILAYAGCSPSTYQSGKLTNCYAHMEKRGSRYLRYALYNATKYVCHWNPVFAEYLAKKRAEGKHYNVALSHATKKLVRLIYALQKSGKAYLTAA

SEQ ID NO: 504994 - protein, 358 aa, unidentified
MPMLANVVDAVVGVDTHRDTHHVEIALPTGSPIAACSISNDTRGYAQLLAWIADHTPGPRLVVSIEGTRSYGLGVARALTAAGLAVIECEQPTRNNRRGRGKSDPIDAHLAVLTALRLDVERLPTPRADGDREALRILLSARHDLTVATTAQTNRLRALLRDGDDGDRQLARGALTDTVLAGLARRRPPRDATRAQAVRQAEIRRLALAVRDTGRALKTNRAQLQAIVDELAPGLTDRRGIGAVSAAQVIISFSHPGRCRSEAAFAALAGASPLPASSGRTMRHRLNRGGDRALNRALHTIAMTRMNTCPTTQAYVARRTAQGKTPREIRRCLKRYIARELYRALTSTMTTTGASTRA

SEQ ID NO: 504995 - protein, 453 aa, unidentified
MIKSVGIDLSRSGSHQVNCLDEQAKPCDSFSFDSSLEGLEKLEKHLFSNGSAPTIVFEPTGLAWIPLAVYLRARHPECRLVKARLQKVAALRRYLRSHTKSDRVDGLALAKMPFIDSEQLDEAYLPPAKYHALQRLTRQREHLMKSITIRKNRIGSIINGYLPGLRKAFVDEWSERARVFYRQYLNPFTVVCDGKRALETLLTSVKARGAQAEAQRVYQSCQRLAEFYERAKAAGMINEDFFDDLQEEIACELRLMETEESEVERISVRIEELYLQLHPADHLRTIPGIGVRTAQVFLAVIGDPQRFRSQGAFANYTGVVPGARQSAETEGKGLRMTKAGSAMVKRALFQAGDIGRRYDPQLAHLYYREMVNHGKTHLQAMGAVMSHLGARILAVLREDRPYELRNTHDEPISKKGAMEVIQAEFKVPEETRQARRRRKTNKGRGRRTREAGS

SEQ ID NO: 504996 - protein, 314 aa, unidentified
MSEEAWSGIDVAKAWLDVATSDEPVRRVANDVAGIATLVAQLTAQRPRLIVLEATGGYETAVTAALVAAGLAVAVVNPRQVRDFAKATGQLAKSDALDARVLALFAARVQPTPRPLPDAVAAELAALLARRRQVLEMRTAEQHRRPTLAPRLRPALDAHVVWLSQQLAELDGELDRTLRDSPVWRAKEDLLRSIPGIGPVVARTLLGELPELGCLDRGEVAALAGVAPLNQDSGRRRGKRRTWGGRAPVRAALYMAAVTATRCNPTIRALYTRLRAAGKPAKVALVACMRKLLIIANAILRDATPWSADVALAP

SEQ ID NO: 504997 - protein, 407 aa, unidentified
MERPAPDLQTVDYAASRERPWRRATYKWEPAVKNVRFVGLDVHAETIAVAVAELNGEVRSLGVIPNRAESVGRLMRKLGKPEQLRVCYEAGPTGYVLYWQLAQLGVHCEVVAPTLVPVKSGDRVKTDWRDAEKLARCYRAGDLTSVWVPDAAHEALRDLVRARLAAKRDQLRARHRLGKFLLRQGRRAPEGITSWTGKYLGWVKQQHFEQAAQEATLLDYLHEVEHVAERIMRLERGIDVAVNSMPESLRTVIAGLQCLRGVAKISAVTLVSELGQISRFAHARQLMGYAGMVSREHSSGERIRRGSITKAGNAHLRRIVTEAAWSYRHRPNIGKTLATRQCGSSETVKAIAWRAQHRLHARYRALLARSKTKQKVITALGRELLGFIWAIGVELERAQHQEVRQAA

SEQ ID NO: 504998 - protein, 395 aa, unidentified
MKVNELQVAVDVGAHAHRVAVGDGSGRLLEEFDLEHTAAGFAGFFTRIERLRGKRSAPVAVAMEGFNGWARPLDRQVLEHGWRLYNVNNLKLARYKEIFPAPAKTDAIDARRILELFRLRGDLAVARGVLQEIVAATQEAEQLKRLTRRRRQLVNEKARVLNRMQADLQAVCPGLLAITAEADNLWFLSLLSAREDIRRLAGLHQSSLRALEGVGRAYCAKIQAWQREALFSHEAEWAGPMIVADARRVLALKGEIVALDQLIEPLTEGCESARRLRTIPGFGPTCSGELAGEIGAIERFGSEASLALYLGMAVLDHSSGTHTGTRRPRQVNTRAKAAMMIAVARHMEQVPTSRTYYDKKRAQGKAHNQAVRALGRQLVRVIWSMLKHQRDYELR

SEQ ID NO: 504999 - protein, 372 aa, unidentified
MTSIIYVGMDVHTTNYTLCCYSMEDDLFFAEVQVEPDAKNILKYLARIEKQQSRDCRIVCGYEAGCLGYSLYHQLHAHGIDCVILAPTTMMTKPGKRIKTDRRDARLISKCLAFHTYSPVYIPTEVDDAVKEYIRMRDDANSALARVKQQIIAFCIRHGKIHDGKSYWTNKHLEWLSSLDLGNKILSEVLQEYLIRYYQLREQVDMYDMRINELAQAEPYRQKVEKLGCFRGIAAHTALSFCVEVGDFRRFATAQQFASYLGLVPGECSSGDKQQYTGITKAGNSHLRKLLVETAQVFGRSATKSGKSVALKERQAKCDSLTVAYADKANARLKKKYFKIAMRSKVNIAKTAVAREMACFIWGMMTDNISCA

SEQ ID NO: 505000 - protein, 414 aa, unidentified
MKRQENKACGADIHKRFLMACILSRDGSKVLNRFDMTVEGVLCFASWLKDNNCKKVAVESTGNYWHLVYQVLDDEFEFILGNAFKTRRHSGAKTDKRDAEWLAELCLNNQIEPSMILPKEDRELRALTRARKGYVDFRSKLKARTIQELEACTIKLASELSDVFGKSGRHVLQGLVDGRSADVIVESIPSKKVKKNKEMIKQAIIAGLSPISIFLIKSHIQMIDEVDKKLVQLDAQISRLLKARKRDVEIAMSIPGIGFVSAAAILSEIGDYRNFASGKKLAAFSGLDPSVYESAGKRYNGKITKMGSKYLRRMIIECPHALSRTKAKTQLKRFFLRIMARRGKNIATVALARKMLVVLHHLLINQEMYKDDGLAKPKNVKVSFSEESNYPSLDEMIEVLVGAGYFVKKDSQGG

SEQ ID NO: 505001 - protein, 354 aa, unidentified
MRTYYVGMDVHQATMAIAVLNGAGKVVMQLVIKTGAEMVRGFLKQLHGRVYVAFEEGTQATWLHDLVRPLVTEVVVCDPRHNKLLGAGNKSDRIDAEKLAQLLRNGSLKAVYHNDRGTRELKELVRVYDCLVSDTTRVMNRLKAIYRGRAISYRGHDLYRWEGRAKWLAKLSEPGARQRAELLYQQLAMLKPLRQQAKHLMIKAARQQPAYRYLVTVPLLGPVSVAQIIAIVSTPHRFRTKRQFWTYVGLAVVTISTADHEVVDGALRRRRKASATRGLNRNHNHVLKRVFKQAAVGACQREPFQAAYQARLDQGIAASLARLTIARQLSAITLAVWKSQTEFKSERMNQPATV

SEQ ID NO: 505002 - protein, 386 aa, unidentified
MQIVAALIPAAVDYERTLVLAIEVSNESWVLAAQVPGLPHTKAKRTIKPDAESLMAAIAGYRARAAATGHSVERVITVYEAGWSGFWLARWIMRQGMEAYVIQPSSVPVDRRMRRAKSDGIDAELLLRTLLAWLRGEPRVCSMVPIPDEADEDARRCVRERTELISERVGLTNRIGAVLATLGVSDYNPLLRNRHRRLTELRTGLGEPLPRNAQAKIERLLARLELVLAQIAELERERDAVVEAEASDKASKMIQQLTNLRGIGVQSATVLVREAFVRRFANGKTLGSYAGLASSPYSSGGIDREQGIGKAGNRRVRTVMVELAWLWTRYQPGAAQVRWFRERVGSTGRRARKIMVVALARKLLIALWRFVIDGVMPEGAVTKPSI

SEQ ID NO: 505003 - protein, 405 aa, unidentified
MIFVGIDWSEEQHEVEVMAASGQRLRSLRIAHGVAGLAKLQETILEFASEPSEVVVGVEADHGLLVNALAGSGYQVYPINPLTAARYRDRHSLAGNKSDRRDAVMLANVVRTDRHLLRPLAGDSEAALEIRARARAHLRAIRLRSQLRNQLRSLLLEFYPAVLPLLAADDIRDALAVLAVAPTPMRGRGLSLSQLESTLRRHGRQRNVAARAQAIQAQLRAPHLDLQRPRLIAAHGDEVASLTRVLLQVRQELAQLEAQMAAAFRGHPDAQILRSCTGLADILGARVLGESGDDPTRYADATARRNYSGNPPVTRASGKKREVTRRVARNRRLADATFCWAESAVRHSPGADELYSRLRRRGQAHNQAIRVIANKLVGQLHACLRDRTLYDEQRAWPTELSQRAA

SEQ ID NO: 505004 - protein, 315 aa, unidentified
MTKSLPSVNVGVDVGKSQLDVLLLERDRALTVPNDEPAIASLIRRLRRYRIERIVVEATGRLEQPFVRAALAAGLPVVVVSPLKIRRFADAIGQLAKTDAIDARLIARFAAAVKPLARPVSDANAQIIKDLVVRRRQLVSLRTMEKNRRQVMPLTLKAGIDRIIKTLNAELKNLEQLIDHAVDQHAPSRHRRELLTSMPGIGNSVAATLIGDLPELGSLNRREIASLTGVAPFNRDSGKLRGKRRIRGGRAHSRTALYLSAMVAARFNPDIKRFYERLVSSGKHKKVALTACIRKIVTALNAMLRDNSPWQPAMT

SEQ ID NO: 505005 - protein, 389 aa, unidentified
MKIYVGIDIAKLNHFAAAISSDGEIILEPFKFTNDADGFQLLVSKLESFDKNSIIIGLESTAHYGDNLVRYLVAEFYQVCVLNPIKTCQMRKNNVRKTKTDKVDTFVIAKTLMMQDDLRFITFFDLDMMDLKALGRFRQKTIKQRTRLKIQLTTYVDQVFPEIQYFFKSGLHQNAVYALLKEAPSPKEIASMHMTHLANLLKVNSHGHFTKEQAKELRVLAQKSVGANDSAISIQITQTIQQIELLDSQLEKIEAEMTDIMKFNDSVIMTIPGIGYINGGMILGEIGDIHRFSNPNKLLAFAGLDPSVYQSGNFQAKTTRMSKRGSRILRYALVNAAWNVVRNNATFKAYYDAKRAEGRSHYNALGHCAGKLVRVIWKMLTGEVEFNLE

SEQ ID NO: 505006 - protein, 355 aa, unidentified
MESTKYIGMDVHKETVSIAVMNSAGKLVVESIIETKGATILQFIQGLRGDLHVTFEEGTWAAWLYDLLKPHVTKIVVCDPRRNALLKEGNKGDKVDARKLAELLRAGLLRPVYHGESGLRTLKELSRSYLTISKDLTRVMNRLKALYRGWGISCEGATVYAPHHRSEWLGKITEAGVRRRAEFFYQQLDALQALRQQVRRDLLAESRNHSARKLLRQIPSIGPIRAALLMALIQTPHRFRTKRQLWAYSGLAIETHDSAQYRYVAGQLQRSKKPQQLRGLNQNHNHDLKAIFKGAATKASSGAGPFHDFYEALLTKGMRPSMARLTLARKIAAITLIVWKKGAHFDAEQLKPQAA

SEQ ID NO: 505007 - protein, 347 aa, unidentified
MLIIGCDFHPGFQQVAIFDNRTGEIQEKRLQHRAEAEQFYRSQAGQEVLVGMEACGHYPWFERLLEELDMELWLGDAARVRAAEVRKQKTDRRDAEHLLDLLRQNRFPRIWVPSLEVRDVRQLLVHRHKQVQARTRGKNQLQAMALSCGIQKKRKLWTKAGREELEQLPLLPYAAQRRKRLLEALDSLEVEISELDRRVAGEARQRPEAVRLMTHPGVGPVTALAMVLTLGPAERFGSGRQVGSYFGLIPSEESSGGKQRLGKISKQGSSFLRFLLVEAGQTAARLDPQLKRFYRRLAARKNRSVAKVAVARKLATRLYLMLREDWTYAQLCQSVMQVSPSHSVAGK

SEQ ID NO: 505008 - protein, 343 aa, unidentified
MQTITTIGLDIAKSVFQVHGVDAAGQVAIRRQLRRRNVLAFFEKLPPCLVGIEACASSHHWSRQLEALGHTVRLMPPAYVKPYVKRQKNDMADAEAICEAVARANMRFVPTKTPEQQSCLMLHRTRHLFIRQQTAVINSIRAHLAEFGIVAPVGRKGVTELLHIVADPNDKRVSEVARVCLAALGGQLLSLKQQILEFDRMILAWHRSNQTSKRLQYIPGVGPMLATALVASVADPSTFRSARNFSAWIGLVPKQYSSGGKERLGSISKQGDRYLRSLFVAGALSVIRYAKIHGTGHRPWLAAMLARKPTKVAAIALANKIARMAWAMMAKAERYREPVALAR

SEQ ID NO: 505009 - protein, 369 aa, unidentified
MNTTTFVGLDVHARSIKAVALDAMTGEVRSATFAYDAAAVAEWVRSLDPAAKCVYESGVTGFDLQKRLAALGVDCVVGAVSKMIKPSADRKRKNDRNDAEFLARMLSVGNVVEVWVPDDECEAARDLVRALDDAREDLKRCKQRLSKFLMRHGYAFSETTPTGRRKGNWTAAHWAWIRSISFPEKADGDALAYYVDAVRQAMEDKARLEKLVEAEASKPRWKRRIDSVRCLKGIDVTSAADLVFEAGEFSRFKNARSFAAWLGLTPSEHSSGESVRQGGITKAGNKHLRRVLVESAWHYLGCSPHSKDLAKGQVPDPAARRHAAKGVRRLVERRRAMLERGVHKNKANVATARELACWCWAVGRMVENG

SEQ ID NO: 505010 - protein, 360 aa, unidentified
MLTQRTELDFKGQNIFVGIDVHLKSWTVTILTEELTHKTFTQPASADTLNNYLRRNFPGGTYNSVYEAGFCGFWTHYKLKAMGINNIVTNPADVPTSQKEKLQKDDPTDSRKLARSLRSNDLKAIYVPDPATLEDRSLVRMRATLVKDMTRFKQRIKSFLYFYGINYPPQFEKSGSHWSKRFMKWLNEEVILEHDTGAQALKILVQEAEQQRKLLLEVLRKVRLLSRSEKYAANMALLRTIPGIGPITSISFLVEIENIERFENTDHFAGYVGLTPNRHSSGDKTNDGEMTFRGNKTLKSLLIESSWTAARSDPALILSYHSYVRRMEPNKAVVRIARKVLNRMYYVLKNKTEYVPGVVK

SEQ ID NO: 505011 - protein, 345 aa, unidentified
MSGAYEGRQIVGIDLHRRRSVLVRMTETGERLETVRISNDPEYLRAVMTRAGEAPDVVLEACYGWYWAADTLAELGATVHLAHPLGVKMFSLRRVKNDERDAADLADLWRMGRLPEAWIAPPTCRELRGWVRHRAKLVGLRSNLKCQVHAVLANAGVQVGMSDLFSAGGQDLLARVALTPESRARVDSALRLISGLDFEVELFGKLVANRLRSDRGYLAIQAIPGVGPVLAAVFVAEIGDIGRFARPEQLASWAGLTPKHHESDTTVHRGRITKQGSRLVRWAAVEAVQRMPAHTRLGQIRDQVGERRGRNIGVVAAARELTELVFFGLRDGDVRRLSTPPQPAA

SEQ ID NO: 505012 - protein, 414 aa, unidentified
MTESESFLFFVGVDLGAQQHHLHLIDGSGKSLGKLRIEHGSTGFQQMLAWLAKAGAEPSQTAVALEAPRGPVVDVLMERDYAVFSINPKQLDRFRDRFSVAGAKDDGRDALVGACALRTDRYAFRRLRPDDPRVIRLRELSRAEDSNQQDFRRAANQLWSLLQRYFPALLALCPAADQRWLWSLLERVHALPARAAKLSTAQLQALLRQHRIRRFSADGLAQTLQQPLPLAPGVATALAEQVLLLLPRLRLLHQQLAQMQQRIEKLLEQIGQDNQFSEHLTVQILRSIPGIGRKGTVAVLTEGGTPLAERDYHSLRARCGVAPVTKLSGKTKLISMRRACNYRLREAMFHCANAHMQHDSRARELYLRQRKGGNDHARALRSVGDRLLALIITLLRKQVRYDPSLRTVATNALP

SEQ ID NO: 505013 - protein, 428 aa, unidentified
MTNRQPIPTDALLVALDIAKVRNEVLIEAPNHKRRRRLSVLNTRAEHDRLIETLRAYGKPVICAFEATGNYHRPIAWRLIEAGFDVRLVSSMALARTREALHNGWDKNDPRDAQVILHMLRIGATQRYHDPLRAGINDVQELSKTHEAIAKAKTEIQHRILTHYLPLYFPEIERFRGNSRSDWFFAFLDAFPTPASIMALSKEAFIEAAWDVVGRKVSKERLLADIYETARTSIGLPLPIDAPAIRMFRMVIAEARSLIRQRNEIEDMADAMLRDSADYKALRKVPGIGPVIALTILAEGGDLRRFRHHRQFLKFCGLDLSTQQSGQHRGQTRLSKFGNARLRRTLWIAGQVAIRQRENGFRHKFERYIAKDRDNPDLRRKALTAITAKMARVVHAIIKSGSDYRPFVEGRVPGGRISFCGAVRAPKG

SEQ ID NO: 505014 - protein, 324 aa, unidentified
MIDAVLGIDVSKNTFDTNLGAGTKARSKSFANSPDGWHHLIAWLGEYKIGQVHACLEATGRHGLGIALALHEAGHVVSIVNPAQIRDFARTKLGRNKTDQVDAVHIREYAELFKPRPWTPPSPAMRRLCELQTIRAGTVAGLTEWKNRRGSGITDDLARSLAETTIQHFTSQLEAVDQAIAETIDNDVELSAKRDLLVSINGVGKALAGIVLAELPGPDILGSSAAAAAYAGLNPQQHQSGISVNRPVRISKIGNAVLRTALYMPALSAMRYNPAVAALVDRLKAQGRLKGKQIVIAAMRKLLVLCFGVLKTGKKFDPAMAMGK

SEQ ID NO: 505015 - protein, 363 aa, unidentified
MFTERTSVGLDVHARSVAAAAIDGVTGELVQTKLTPSYEHIRSWIQQLPGTVAVTYEAGPTGFGLHRHLSAAGIRCVVAAPSKLQKPSGDRVKTDAKDAVHLARLLRLDEITAVAIPSADQEAARDLVRAREDCRGDLMRARHRLSKLLLRHGIVYYDGDAWTGKHDVWLRHEALPQLEGRATRLAFDSDYDNVLTIKARRDRLDDAISEMAADSEFTPLVRRLGCLRGVSTLTGFALAVEIGDWHRFTGNTIGSFVGLVPSEYSSGTSRVQGSITKTGNSHVRRLLVEAAWHHRSRYRIGKTLRDRWDLAPAAARARGDEGNRRLHQRWVKFIDRKKKPTIANVAIARELAGWCWSLAVLEE

SEQ ID NO: 505016 - protein, 387 aa, unidentified
MPQPNDLSRSLVALDQDSTLITVVEMSQSSWLVGGMLPGIERQPRKKLEPSPERLLALLHRWRDEAVKAGRNITRIALAFEAGRDGFWLARWLEARGVEAHVIHPSSVAVSREHRRAKTDRLDTALLKRAFLGWLRGERGHCSMARIPTIAEEDAKRPNRERECLVRERTRIVNRIKGTLARLGIRDFRPTLRKSAERLATLHTPEGSLLPPNVSAELQRDLARLGFVVSQIKEIEKARLKRLEQHPETGPHAMVRLLARVVGVGIETADMLVHEVLSRPLGDRKAVARYAGLTGSPDESGAKRREQGLARAGNARVRRGMIQLAWRFLLFQKQSALAQWYRARTGDSRKGTRKTMIVALARKLLIALWRFVTTGETLEGVILRPAG

SEQ ID NO: 505017 - protein, 327 aa, unidentified
MNASSSSMTVSGVGVDISKGHLDVHCLPSGQVEQYANDASGIQQLQTFIAELERPAVVCEASGGDEREMVLTLSAAEMPVSVVNPLRVREFARAMGRLAKTDALEAHCIARFAEVFCPAAVVLASAIEQEIKALVKRREQLVEVLSGEKNRRRQLQGPMADDVDAHLEWLKNRIEQLEQKIKSLAAEHHEWSERQALLPSTKAIGPVISIALLVYLPELGRLNHKEIAALVGVAPFNRDSGRDSGKRRSWGGRAEIRSLLYRATGVAIRYNPPLRAHDQHLREKGKLKKVAIVACMRKLLTCLNAMMRDNAPWHDDKVSAFFQTPDA

SEQ ID NO: 505018 - protein, 349 aa, unidentified
MDYRVYCGVDFHARRQTICCLTTEDGVMSTHELKHQNKAELKEFYAQFSGPVLVGLEASGYSPWFEQLLEELGHEVWLGDATEIRRRARRRQKNDRRDAELILDLLIHNEFPRIHRPTPTSREILRMLRYRHKLVKIRTIIKNSLQALSIQSGLSLRARLFTRTGLEQLRATTMSPMMEYQREQWLAALEPLNQRIAETVNWLEQQAAGDQRIERLRTHPGIGLLTGLGLVHTLAPISRFSNQRKVAAYVGFDPKERSSGEKKRYLGISKAGSRVLRFLLVEAAQTACKGDPELKRFYLRLLHRQGKPKAKIAVARKLLVRSYILLRDEIDYAEFNRRAVAARFAREVA

SEQ ID NO: 505019 - protein, 352 aa, unidentified
MMVVIGVDAHKRTHTLVAVDEAGRKLAEKTVAATPGGHLEAVEWAARWPDRLFAIEDCRHLTRRLEADLLRTGEAAVRVPPHLMAVLRQSGRERGKSDPIDAHAVARAAIREPGLPVVRLDGEARELRLLIDHREDLVHERTRIQCRLRWHLHELFPGLEIPSRALRHQHVIDELQDRLVGVSGRVADIARELLVRCREFTRRANELEAEITRIVRRLAPTLLALPGCGALSAAKIVGEAAGVSRFRSKAAFARWNGTAPIPVWSGNSPRHRLSRGGNRQINAALHRIAVTQLRGVGDAGRRYAEGRMATGSTKTEALRLLRRRLSDDVFRRLRADESVERSVLGVSDLVAA

SEQ ID NO: 505020 - protein, 342 aa, unidentified
MSEQYEGRQYVGMDLHRRRSVLVRMSETGDRLETARIVNDPERLAAVMARAGEAPEVVLEATYGWYWAADALAGLGARVHLAHPLGVKAFSYRRVKNDERDAADLADLLRMGRLPEAWIAPPATRELRELVRHRAKLVHLRSSLRCQVHAVLAGQGVAVPVSDLFGLQGMKLLERAALPCAARTRVDSLLRLIGMFDEEIDSTAKTTAQRLSGQLGYLAVQTIPGIGPILGSVFVAEIGDITRFGGPSPLASWAGLTPKHHESDTTVHRGRITKQGSRLVRWAAVEAVQRAGKHTRIGAYRERVAARRGRNIGVVAAARELIECVYYALRDGTVRRSLSASA

SEQ ID NO: 505021 - protein, 343 aa, unidentified
MKLTRIGVDIAKQVFQLHGTDRSEQTVWRRRVPRERWLQALREVAAPGCEIGMEACGGAHHWARQLQAMGYRVKLIAPQFVKPYVKSNKNDANDAEAICEAMSRPGMRFVTLKSTRQQDIQALHRVRASLMEQRTAKGNQIRGLVAEYGLVAPRELSSLRRAMPCWLEDADNGLSACFRQLLDGLWRDLRGVDDRILELDHSLADLAQADPDARRLQKLRGVGPLVATALIAAVGDAKQFASGRQMAASLGLTPRQHSSGGKDRLLGISKRGDAYVRSLLVHGARSALRTAPAKDDRLSQWVVRLAKRAHPNVASVALANKTARLAWALLHHQCEYQPALAAA

SEQ ID NO: 505022 - protein, 320 aa, unidentified
MTYIGIDVSKDSFVAAYPAKSGYTTKTFKNTSSGVHQFIQSLPAECHCVMEATGNYSMLLLYLLQQANIIVSMENPQKIKHFARAMLSTTKTDDIDAKLIAMYGEKMEPAPYKIPSESIMLLKQKRTVLRQLKKQLTMLLNLQHSLAVLPKQDPTAKVATEKTIKFLRKQISKLEEEITHLSNKEFKRQMDLLTSIRGIGKTLASALIVATGGFAYFSNAKQISRFLGLCPTYQQSGTSVNFKGHINRNGDTYLRSQLYIAAVSSIKFNAACKETFKRLKDKGKSGKVAVIAVANKLIRQAFAVVTNNRPYVDGYVSALP

SEQ ID NO: 505023 - protein, 460 aa, unidentified
MAKRKESAEKVPVLDVLEQINLHAAGLDIGSEEIWVCVPPDRDELSMRVFPTFTVDLHALADWLEACHIETVAMESTGVYWIPVYEILEARGFEVYLVNARHVKNVPGRKTDILDCQWIQQLHTYGLLRASFRPPEEICALRALARHRDNLIRYRSAHIQHMQKALQLMNVKLTQVVSDITGVTGLNIIRAIVAGERDPHQLARFRKSGCKKSEEEIAKALQGNYKLEHLFVLKQALAQYDFYLQQIEECDAQMEAMYAALPPSDSEAPGSPPPKPKGGKRRKNQAHFDLATSLYHTVGIDLTAVDGLDALTVQSIITEIGIEVSAWPTVKHFTSWLCLAPYNDISGGKVLRSRTKKTQNRANLAFRLAAQSLSRSQTALGAFYRRMKAKHGPAKATTATAHKLARIVYFMLKNRTAYIDPGATYYEQQYRDRTIRNLKRRAAALGMELVPLATESATVS

SEQ ID NO: 505024 - protein, 462 aa, unidentified
MLKDHCMTTKLKKSKRKSTKKVLHEARGNAAGIDVGAYEVFVAVPEDRDEENIRSFSTFTEDLQEMARWLKQCRIDTVAMESTGVYWIPVFQILEAYEIEVYLVNARHVKNAPGRKTDVLDCQWLQYLHSVGLLSASFRPSANVVAIRTLLRHRENLIKSAASHIQHIQKSLTQMNLYLHNVISHITGTTGMAIIDAILSGEHDPKVLAKLRDYRIKADEETIAKSLVGDYKEEHLFTLKHSVDLYRYYGALIQECDREIESRLVTFETKREDEPKLNPVKKKTAGTNELTFDVQSHLYKIYGVDLTEIPGISGLGAHTIFTEIGLDIHKFKTVHHFTSWLGLSPNNKVSGGKVLSSKTSFSSNRVAKALRLAANALYNSKSYLGNYFRKMRSRLGAPKAITATAHKLARIVYSMLTNQTPYDESVFAVEELKSQEKLMKKLKNQASALGFTLVEAKTPESA

SEQ ID NO: 505025 - protein, 321 aa, unidentified
MDTVEFAQVVSRGCGLDVHKKTVVATIDGGGLKRSTREFGTFTSSLTDLKNWLLENGITHVAMESTGVYWKPVYNVLEPSGIKVWIVNARHVKNVPGHKTDKKDSAWLCKLLLAGLLKPSYIPPKEQRELRDLTRYRKKLIQDIASNKNRIIRILEDCNVKLSSVLSDTSGVTATKLIEKLCDGKSVTMQDIDAIYHKKLEATKEELWEACNGIINEHHIYLLQTIRNINRQIEKLIDELNQKIKEVLLPYDNALERLREIPGLSRKTVEDLIAEIGLDMEAFPTERHLCSWVGVSPGNNESAGKKKVDEPHMATNKPNQH

SEQ ID NO: 505026 - protein, 396 aa, unidentified
MYTADNPMLVGIDVAKDSFVVALRHDESQTWTFAVDLEGLTQFETFIADLGGFEKQIIFGLEASGPYSQLLLGWLLARHARVSLLNPLQIYRFRKARSLRNTKTDAIDAALIAQYMDQVPEALVQTEATDDLMTLAREYESITVEIARLKNQIRQQVYLLFNEFSSGLTLFSKHMLNLLYDFPSARAIARAERQDLDKVWASGRGRASSLTLDEIVQRAERSISQPSHSRETVLRSKINRLLFLQDEHSSLRDALRQAVYDQDPETYDLLISVPGLGQVTVSLFLAQIRSLDRFAGHKQLTAFAGLDPNTYESGQYIAPGHISKRGSPHLRRVLYQMAQSVQRYSITFHAYYAQLRERGKPFRVAIIACANKLIRVLFALHRTKTPFRDAQAAPIS

SEQ ID NO: 505027 - protein, 359 aa, unidentified
MRMASGSMPQGGTGVTIGVDTHGEIHVVAAFTSDLGRPLGHLEIPTTPAGYRQLLEWARGLGTDLRFGIEGTGSYGAGLARFLSDAGCSVIEVNRPNRQTRHARGKSDPVDAEAAARAVLSGEATGIAKADQDRVGMIRALRVARRSAVKTTTEIVNQMRALIVAAPAELREQLRELSRAPLIAAAAAMRPGPIITPTAAVKLALKGLAQRHQLLTHEIHILDAELGRLTARAARKLYALMGVGTDVAGALLVAAGDNPERLRSEAAFARLCGVAPLPASSGKTTGRHRLSRGGDRQANSALWRIVMVRLAWHQPTKDYMARRTGEGLSKKDVVRCLKRYVAREVYSALVPAVELATAA

SEQ ID NO: 505028 - protein, 344 aa, unidentified
MDHFAGLDVSVKETSVCIVDGIGKIVREVKVASEPEALLAVLKNPAYNFKRLGLEAGPLSQWLFGALAEAELPVICVETRHMQAVLKAQINKTDRNDARGIAQMMRVGLYRPVHVKTIRSQKLRMLLTHRQLLQSKAIAIENDLRATLRNFGLKVGIVGKVRFEARIKELVENLPDLAALVEPLLIVRRVLREQTVILHRRLLAVVRDDEVCRRLMTIPGVGPVVSLTYRATVDAPARFRKSKAVGAVFGLTCSKYQSGEIDRSGRISRCGDEMMRVMLYEAAQSMLRSKKWSWLKAWAMQIARRRGMKKAIVALARRLAVIMHRIWVDGTEFRWTRERAPAAA

SEQ ID NO: 505029 - protein, 317 aa, unidentified
MDCTSHAFVGIDVAKHSLDVCLLPSERTFGVPNDAAGFRRLVRQLPAPESCRVVLEATGGYQRLVVAALVAAGHTVAVVNPRQVRDFARGLGILAKTDRLDARVIARFGQQAQPRSVAIRSEKQAELQELVTRRRQLVELRTAEKNRLETTTTKTVRQSIRRHVDGLDKQIQQLEEAIGKLVQSDQELSTKATLLETVPGVGTVTVTSLLVDLPELGHLNRQQIAALVGVAPFNRDSGKWHGRRAIWGGRSAVRSVLYMAALTARRSNPIIRAFAERLEATGKPFKVVLTACMRKLLVILNTMVQQNIPWNPNLPPT

SEQ ID NO: 505030 - protein, 346 aa, unidentified
MMIIGCDFHPSWQQVSWLDTETGETGEQKLVQALGDAERFYRQLLAPALIGMESTGNCHWLVDLLAELGHELWVGDAAQIRASCVRQQKTDRRDAEHIRMLLQEGRFPRIWMPSSEVRDLRQLLLHRYKLVTIRARVKNELQHLCLNQGVQRKHKLWSQAGQKVLRELPLKPWASRRREDLLGLMVMLDQQIEPLDRAVKEEAQRDKMALLLQTQPGVGAVTALAYVLTMGDVSRFARGKQVASYLGLIPREHSSGGRQKLGAITKQGNRMLRMLLVEAAQIAVRFDPGLRKQYLHRCHQKPKAVAKVAAARKLAVRLYWMLRTQKPYPEVVRIESSPRVPLVGAS

SEQ ID NO: 505031 - protein, 344 aa, unidentified
MSMVRSVIGGVDTHADFHVAAAIDGNGAMLGIESFPADAAGYEELLGWLASFGAVTLVGVEGTGSWGVGLARFLHDQEVETVEVDRPNRQKRRKVGKSDPIDAEAAARAALSGEASVTPKTRNGPVEQMRVLLVARRSARTQRIQTLNQLRHLVFCGPEPIRVRFKDRYKTGLVTEAAKMRPRNGSDPVTFTTNTVIRSLARRIQHLNAEMASIDQMLSELVAATAPSLLELHGVGLDSAATLLVCAGDNPDRLKSEGSWAHLCGVAPLPASTGKTPRHRLNRGGDRQANAALYRIVLTRMSNHPETRRYVTRRRDQGRNTTEVMRSLKRYVARQVFKQLPRIA

SEQ ID NO: 505032 - protein, 445 aa, unidentified
MTRTPEKQRAEELPLSSESRISPANPETREQSSQPVVSVGIDWTDSAHAYALRAPDGTTHAGEFKQTPEAIGTLLESWTRLYPDARIEICIETSRGALINALLESPHVTIYPVNPNALANYRKSFAHGGGKSDPVDAQLILQYLESYPERLRPLRRDEPQTRELATLCEDRRRLVDQRVALANELKALLKVYFPAILLLEPARIHAEFIVRLLLKFPSLEQVQAAGRTKLRKLLFGIGAKAIAEKRLDVLMNATPLTSDAVAIRSCARRVQAICGLLDSLNRSISSYDSEIKKLVKTHADYVVVASLPGASHKTQGRIIAALGDDRSRYANAAAFQAAAGIAPLTSQSGKQRYVSSRWACTKFIKQTFHEYAGLSITKCAWAKAYYDLQLSKGKSTHMARRALAYKWMRVTYRLWQEREAYDDVRYVERLKATGSPIAERLSPAA

SEQ ID NO: 505033 - protein, 369 aa, unidentified
MVGACAGSGTNEQSTFFNPFRQTNMTTFKINKNDHESKLSLQAGIDVGSEELILVVRKNSKPFDPQKFTNTPADRAQLVKKLTKLPGIIVCMEATGIYHFDLAIALYDAGVLLMVVNPKASHNFAKVLMKNSKTDAVDANTLAEYAERMDFVAWTRPSDEKIALRCFSRRINSLTGQKAAAKNHLHALTATQETPKAVLRDAKLAITQLQKRIDRLTAEALVLIAKYPELTRILQLLIGIKGIAETSAIALMGELLLLPPDLSHREWVKFAGLDPKAFDSGKSIHKKTRVSKAGNRYIRAALYMPALSAHQHDPHVRAYFQHLVVTNGKEKMQALCAVMRKLLQAIHGMLKYDKPFDNTRFYAIPASAG

SEQ ID NO: 505034 - protein, 350 aa, unidentified
MTTNILKQVAGIDIAQKELVVTLGKMDEQTDIELFAYKTFPNNVKGFKSLTEWVSKVGVTQVQCRFVMEATGVYHESLAYFLFDSGYEVSILLPNKISNYVKTLDIKTITDKTASQAIARFGLERKLDLWKKPLKVFKDMRQLTRERGQLIVERTILKNQLHAEQAEAMPNYSSINRVNERIALLDKQEKAILVELATIIKQEKKLTDQVKNITSIPGVGKITAVIVLAETNGFELIRNKKQLVSYAGLDIKEKLSGTSVKGKPKISKKGNKHLRHAMHLPALSAIQHNERFKAIFVRLVSKHGIKMKAAVAIHRKLLELIYIIWKTNKPFDKNYMQTTIPFDQQPGETN

SEQ ID NO: 505035 - protein, 345 aa, unidentified
MEQDMKQKVNNVGIDLAKNVFHLVGTDTRGTILWRKRLARNALMPFMAQLPPVTIGMEACGGSHYWARQFRQQGHDVKLMAPQFVKPYVKSNKNDMRDAEAIAEAVTRPTMRFVPIKEVDQQDIQALHRIRARLMKERTALINEMRGLLGEYGIVLPKGVTQLRKGLLGKLEEEQAKLTPLSEEVFHRLFNELVKLEEQIAYYDAKLKAMATSHPECLRLLTIPGIGPLSATALVAAMRDASAFKNGRQFAAWLGLVPRQHSTGGQTNLLGISKRGDSYLRKLLIHGARATLRWADLKTDRRSQWIRELIARRGSNRAAVAVANKNARIVWALLSRGGVYQEAAD

SEQ ID NO: 505036 - protein, 334 aa, unidentified
MKKRYFMGIDVAKATFDFCLLSSTESCLWRGQFSNDAHGIARFLAQLPAPSRKPAQIHFALEATGVYGKALVAALHQAGLAVSVLNPAQVKYFAFSVLRRTKNDTVDAEIIARFCRERKPLATRPLRPIEEQLKVLVHERESRVGEQTRERNRAKKDPFQIALPTLISRQRRQRLQQLDKEIAQLDAAIDSLIASDESLSNQSQLLCSIPGIAAVTAAKLLSELAGKEFQSARQLAAYAGLTPAEFRSGYFLYGKTHLSKIGNAFLRKALYLPAAVARRWCKPLKPWIAILESRKLHDLAIRGAIMRKLLHIAFGVLKHQKPFNPLLVFIPKTV

SEQ ID NO: 505037 - protein, 353 aa, unidentified
MQKIYIGVDFHARQQTICYLTTDSGELLRHQLKHQDKAAVRAFYAQFSGDVIVGLEASGYSPWFERLLEELGCEVWLGHATEIRRRARWRHKNDRRDAELILELMLHDEFPRLYLPPLQSREVLRMLRYRQKLIKIRTIGKNSLQALALQAGLAKGPHLFSKAGLQQLRQASMSAAMQWQREQWLQLLEPLEARLLETRLWLKQQSHADQRISRVRTHPGIGLLTALCLVHSLEPVSRFANTRKVTAYAGLDPLERSSAERQRFLGISKGGSRVLRFLLVEAAHTAIRKDAELRRFYQRLAERHGRPKAKVAVSRKLLIRAYIMLRDEIDYAEFQRRAVAARLARQSSRPPCL

SEQ ID NO: 505038 - protein, 368 aa, unidentified
MSNYVTAIGLDVHARSIKACALNPMTGEVERASFGYDPASVAEWALGFESPKAVYESGVTGFHLCRALRALGLDCAVGAVSKMQRPAADRGRKTDRRDAEFLARLLATRNVVEVWVPDERTEAARDLSRALADARGDLQRAKQRMSKFLLRHGHVFDEPTPTGGRRGNWTRAYWRWADAIEFVEPDDAAAYEHYRDCVRRCEEARDALARRVAESAGRPEWKPAVDALRCVKGVDVATAFLLACEMGDPARFPSAPSFASWCGLAPSEHSSGETSSRGGITRAGNAHVRRALVESARHVPMSSRDPKPLAPGQEVAPAVRRHATKCNRRLIERREAMAAAGKRPCVANCATAREMACWVWAIARMATS

SEQ ID NO: 505039 - protein, 431 aa, unidentified
MEEVDEQELHVERVAALDLGKAALEACVRVPHESRPGRRLQEVRGYATTTTSLLALADWLHSWGVTRVVMESTSAYWKGVFYLLEAEGFDCWLVNAREVKNVPGRPKTDKADAVWLAKVAERAMCRPSLVQPRPIRQLRDLTRYRRSLIQDRTREMQRVEKLLEDAQIKLSSVASDLFGVSGRAMLEALIGGQRDPKVLAQLARRRLRVKIAALEEALRGFFTDHHAVILRMMLDNIDRLSEQIAALDATIEEAIAPFAAQVAQLDEVTGVGVTAAQELIAEVGVDMGRFPSAAHLVSWAKFCPQVHESAGRKKPKGRGKGNPWLAGTLGNIVATAARTDSFLGARYRRIAKRRGKQKAMVAVGNSVLVIVYHLLSDSEARFTDLGAEHYEARIDKQRRARNLAAQLQAVTGQRIVIRDGKAVIVEPTEAA

SEQ ID NO: 505040 - protein, 309 aa, unidentified
MAKLTTPITLGIDVAKDTLAIYHWNEDRLETIDNDPGAIKTYLDGLHGPVQLALEPSSDYYFAMADVALARGLAVYLVNARQLAHYRHAVDLRHKSDPHDAWLLARYLCHEAEQLRPLQLRDRRARRLWGLITRRGTIVQARQRLKQSMAGTDFSIKALLTQFQSVLARLEHQIQSLIRQLGWWGDYRHCLSIPGVGPANAAALVAAYHRGTFSSSDTFVAYLGLDIRLRGSGCFKGKSKLTKHGEPELRRLLYCAARPALCYPRFAQYHLRMLDKGHSKTAARVALARKLARIAFTLINRDEDFRETS

SEQ ID NO: 505041 - protein, 408 aa, unidentified
MEVIHERCAGLDVHKETVVGCLRVRERGQVRREVRRWSTTTAELLKLGDWLRQAGCTHVAMEATGVYWKPVWHMLEGEFELLLANPAHIRNVPGRKSDVNDATWIADLLAHGLIRASLVPPGPIQELRDLTRTRKQLMREIAQHKQRIQKVLEDANVKLASVVSDVFGESGRRMLKALSAGQTDAWQLAALRDGRLSASRETLAVALQGKVTAHHRFLLSQHLRMIDYLEQTIRDFEGQIEVVIAPFRAAVACLVTIPGISATAAHVIIAEIGVDMSRFATVAHLRSWAGLCPQLNESAGKIMSRRLRHGAPWLKTVLVQCAWAATRNKHNYLYAQFVRLRARRGPQKAIIAVAASILSIAYYLLRNQVPYRDLGALYFIRADQERIAQRLARRIKDLGYKIQIRKAA

SEQ ID NO: 505042 - protein, 375 aa, unidentified
MTMVTDPAAVQQVLSVTGGVDTHADVHVAAVIDAVGRELGHREFATTPVGYAALLAWLGSLGPLELVGVEGTGMYGAGLTRVLQAAGVTVVEVDRPDRKARRFQGKSDPIDAFAAARAALSGRASGTPKTRTGTVEMIRTLRVARSGAVKAKAVTWNQLKALIKTAPDELRERLRGLDGAALLDNCAGLRAARGPAPEHGPHAKRRRPGVLVDPSAACKRSLSVLARRIRALEAEVADLDDDLEPLITATAPTLLAMYGVGLDVAGQLLATAGDNPDRLRSEAAFAHLCGAAPIPASSGKTTRHRLNRGGDRHANHALWRIAMTRLRYDPETRAYRDRRAKEQKTNKDIMRCLKRYIAREVHQALLVDLTAPSAA

SEQ ID NO: 505043 - protein, 416 aa, unidentified
MTESDRIFVGVDWGSDAHQVWVTDAAGTVMGERTVDHTGTAIAALVDWIVGLAEGNASAAAVALEVPRGPIVDAFLERGCQVFAINPKQLDRFRDRFSVAGAKDDARDAEVLSSAVRTDRRAFRHVTAEDPLTVQVREYSRQDTELGEDLRRLANRLRDHLLRTWPELLRLVPAADEPWFWALLKRAPSPVEGRRVRPAQVRQLLRAHRIRRLTAEALLTVLRAPSVSLAPGVREGVRVRILDLVDQLPVLARQRRAAERRLAATLEAMTQGPDGESVREHADVTILQSLPGIGTRIAATMLAEAADALRDRDYHALRQLAGAAPVTKRSGKSCVVIMRYACNHHLQTALYHWARGCMQRDPLSRAHYAQLRRAGHGDARALRGVADRMLTVLIAALKTHTPYDATRRRPRAAAGA

SEQ ID NO: 505044 - protein, 351 aa, unidentified
MVVLGADVHKRTHTFVAVDERGREVGEKVVPATTEGHLAALAWAKTTFGEDLLWGIEDCRNLSARLERDLLSAGQKVVRVAPKLMAHERAGARTRGKSDPIDALAVARAVLRHPDLPIAAHDEASRELKLLVDRREDLVGQRTATINRLLGRIHELDPTQAPKKGSLDRAKTQTTLAAWLATQDGLLAELATDELGDIIRLTLAIKALDTRISDAVHAVSPQLLALPGCGELTAAKLVGETAGITRFKSEAAFACHSGTAPIPVWSGNTAGRVRLSRAGNRQLNAALHRIALTQIRLVDSPGHAYYRMRLADGDSTKEALRCLKRRLARVVYNRLHADEQTRHHTGQTTAA

SEQ ID NO: 505045 - protein, 427 aa, unidentified
MNDSMYKPTLCVGADVHLDEIVLRAVDKALGHEVLERFRVTNNLPGAHLAATAIAQTAMDLGYARIEIGWESTGMLWIPFHRYLSTEPLLQPFELELVCFNPKLVAKFKDGLVLRSPKNDDRDAFDVAARLRFGELPVSYVPGDYWQGLRRLTRYRYRLSKALSQEKNRFQSYAYLKCSDWKRVKPFSDLFGATSIALLTEFTVAEVHEMTHDQLVDLITRRGRGRFHDPTATARAVRQTRRTSYPVDPQLDEMLTAALAAGWDHIRYLKRAMKRLDNLIARYIDLVPNPIITIKGLGAVITAGILAEIVDVLRFPEEKHLAQFMGLTWRKSSSGAFVSQNTRLTKVGNVYLRYYFILGANLLRQYNLEYKAYYWRKYQEVSKYQHKRALVLTARKLVRLVHALLTKNEPYVRPQMTVNDQEEDRLQ

SEQ ID NO: 505046 - protein, 355 aa, unidentified
MNTQTTARPKIFIGLDIHKKSWTVSIQTDLFFHKTYSMPSVSEDLYQYVEKTFPAHEVHLVYEAGCCGFSAARYFLNLGWNVLVVNPSDVKTGDKERYQKTDALDSKNLSNQLKAGVLKGIYIPTEEHEQFTTLARHRTQVTKKLRQSKSHIKSMLLYHGIKVPDQFDNSNWSIDFVTWLEQLKFSTSCGDLALQGKIRMYKFIKTEYLETANRMRAYCRKNKKKDYYLLKSIPGIGGFLASVILAECGDLRRFNNEKQFSSYIGLVPGIYNSGGTEKCLGITPRSRSQLRSYLVEAAWVAIRKDIEMQNYYRKHHGKNVKSVIVKVAHKMARRILSVIKTEVAYRINRNTIAAI

SEQ ID NO: 505047 - protein, 402 aa, unidentified
MTDNQKRYVGLDVHKHYVMVGAVNADQEMVLPPRKVSLTEFEGWAKKYLRPTDEVVLEATTNAWYLYDLLEPLVGRVLVCHPPQVKLIAAAFVKTDKKDTMTLAKLLAVGMIPAVWVPPVHVRELRALINHRHRLIAQQTRLKNQLQSLLHRHHLVPPGGKLFGAANRSWWLGLSLNPSEKLRLRQDLTLLDQLSPLISEVEEELNRLSLAEPWADQMPYLLQLPGIGLITAMTILGAIGQIERFPAAKKLVGYAGLGAKVHSSGQTHRTGGITKQGRRELRRVLIEAAWTAVRYDQHWQEQFERLAYRIGREKAIVAIARKLLVIIWHVLTAKVADRRAEPQQVARYFIRWGRQLRVKTTLGLKASEFARQHLDRLKLGQELERVPYGTVTYCLPPSTTAT

SEQ ID NO: 505048 - protein, 368 aa, unidentified
MLLPRQRSKLAKGAKDKEHAMPQNPSSSMAVIGIDIGKNSFHIVGLDGRGAIVLRQKWSRGQVEARLVNMPPCLIGMEACVGAHHLSRKLKAFGHDARLMPAKYVRPYSKGQKNDFRDAEAIAEAVQRPTMKFVATKTADQLDLQALHRVRERLVSQRTGIINQIRAFLLERGVAVRQGLRFLRAELPRILAAPLDVLSPRMVRVIEGLAEDWRRLDERVDHLSGEITALARQDVGCERLMSVPGIGPIISSAMVAAIGTGDAFSKGRDFAAWLGLVPKQISTGDRTILGKISKRGNRYLRVLFVQAAWVVLIKPKSWERHGLKPWLEAAKKRLHRNVLAIALANKLARIAWSVLANDRVFEARLQAA

SEQ ID NO: 505049 - protein, 341 aa, unidentified
MGDITTIGLDLAKNVFQVHAVDVAGSVVLRKRLRRGQVLAFFAELPPCLIGLEACATAHHWARELIALGHETRLMPPSYVKAYVKRNKHDVADAEAICEAVRRPSMRFVPLKTAEQQSALMMHRARDLLIRQRTMLVNALRGHLAEFGLVEAQGLHKVARLIAIVMDEMDARVPDIARQVLKVIVSQIEDIQTRIAGLETQVLAWHKSNPVSQRLATIPGIGPIIATAIAATVADPSTFRSGREFAAWLGLVPRQNSTGGKARLGGISKRGGSYLRRLLVNSAHTVLLCSKVAKTDPWLTSLLSRKPRLVVAVALANKTARMAWAIMSRPDSTDTQRSQHD

SEQ ID NO: 505050 - protein, 444 aa, unidentified
MLPILYRRVAGLDVHKKSVVATRMQVSEEDRAVRETETFGTTTPDLLRLHDWLLEWDTDRVAMESTGDYWKPVYNVLEDTFQLLVVNAKHVKHVPGRKTDVKDAEWLAELMMHGLLKASFIPPRPQRALRDLTRYRTTLVQERTRLVNRVQKLLEGANIKLSSVATDIMGVSARAMLVEIAAGQTDPVLMAELARGQLRAKIPELEKALTGIVLPHHRFLLVKQLAHIDFLDEQVEEISVEIGRQLEAMSRPSGGSEPDTAQGTEDGSITGEGKPPLTWLEAVALLDTIPGVNQRTAEMMLAEMGLDMSRFPTAGHLATWAGLAPGNNESGGKRYSGRTPKGNGALTTTMVVAAWTAVRSKDTFLKARYHRLAARRGKKRAIVAVAHSMLVSAWHMLTYQQPYRELGGNYFDERKKETMVSYLLRRLEKLTGGSVSIAIQPAAA

SEQ ID NO: 505051 - protein, 285 aa, unidentified
MFPVGIDVSKETLDLCMLYDGMKGRVKTRNIRNDSSAVAHLLRWLRLQHCGPEDVHVVMEATGVYHERLATALHDAGFYVSLANPHRSREFARGMGIMTKTDKVDAYMLACYALLKKPHRWEPPAADIRHLSALLRRRDVILADAVREENRLEKYQSNETPADVVSSCIRMAQLLREEVRSIERQVKAHIQASPDLKRDYALLTSIKSVGPQLGMHMLVVLRSHHFESADQAGAFLGVVPVEKRSGTSVRERPRMSKIGPPQLRAKLYMSALCGKIHNKRMRNIY

SEQ ID NO: 505052 - protein, 368 aa, unidentified
MGQKSSKLYIGLDVHKESIDIAVAEEGGEVRHYGQIAGDTNALARTVRKLESSGRRLVFIYEAGPCGFGIYRGLIMRGHVCWVVAPSNTPRRVRDRIKTDRRDSVKLAGLARAGELTPIYVPDVCDEAMRDLVRAREDAVVMQRQARQRLAALLLRNDVRYPGKTAWTAAHRRWIADVRLPQPAQRLAFEEYVQAVEEATVRVERLSGYIAQEVAQWRWQPVVHALQACRGIQLIHAVRIVAELGDLSRFNHPRQLMSYLGLIPSEDSSGERRRQGSITKAGNGSARRALVEAAWAYQYMAKVSGLIARRQEKVPKAALDIAWKAQVRLCARFRRLAARGVSRNKIVVAIARELAGFVWAIGQQVKPV

SEQ ID NO: 505053 - protein, 369 aa, unidentified
MNHTTSIGLDVHARSIAAAALDPLTGEVVTKTFAYSPGEVASWALGFDSPKAVYESGVTGFHLCRELNALGLECAVGASSKMQRPPADVKRKNDLSDAQFLARLLATHNVTEVFVPDAETEAARDLVRAHADARADLTRTRQRLNLFLMRHGHVFCEKGPTGAPVGSWTKAHWAWIRQISFPDEADEEALAFYIAQVRHMEGQKRELEKFIRAHAREPRWRGRVDALRCLKGIEEITAFALVAEAGVFSRFDSARAFSTWAGLVPSEHSSGPRRRTGGITKTGNSNVRRLLVEASWHYARATAARKPAPSPDVPLRIENHAAKAVKRLVARRREMSARGKRPSVANCATARELACWCWAIGRMAEGADA

SEQ ID NO: 505054 - protein, 347 aa, unidentified
MRFYTQSHRYYCGIDLHARWMYLCILDPEGEVLLHRNLRAGPEAFLKAVEPYRQDLVVAVECIFSWYWLADLCAQHGIEFVLGHALYMKAIHGGKAKNDRIDSQKIAVLLRGGMIPVAYVYPPEMRSTRDLLRRRTYLMRKRAELLVHVQNTNSQYNLPEIGKKIAYRANRSGVAQRFSDPAVQTSIAADLSLIDFYDTLLNQLELFITSQAKQQNHHSFYLLRSVPGIGKILALTLLYEIHDISRFERVQEFVSYCRLVKCSRQSAGKNYGFSGKKIGNVHLKWAFSEAAVLFLRHNPEGQKLLARLERKHGKAKALTILAHKLARAVYFILRREKAFDLTQFLAA

SEQ ID NO: 505055 - protein, 357 aa, unidentified
MAKCIKAGIGIRAIGLDLADVWSDWVGLDERGDRVECERVKTTESELRKVFGAMAPTTIALEVGTHSRWVSRVLGSLGHTVVVANARKVALIHRNKRKNNRIDAEFLARLVRADKALLFPIQHRDEPSQADLSVLRARDLLVRARTKLINHVRGASKAFGTRLAKCSAPAFVSRCSHQVPATLLTALNPILKQLAEMTAAIKGFDREISAMVKRHPEATTLMQITGVGELTALAYVLTVEDPARIIRSRSAGAYFGLVPGSDDSGEKHEQQRITKEGDRFCRRLLVSAAQYILGPHVKVDSDLRRHGLAIASRGGKNAKKRAVVAVARKLAVVMHRLWVTSEVYVPLFNASRQSIAA

SEQ ID NO: 505056 - protein, 344 aa, unidentified
MRIASVGIDLGKTTFHLVALGERNKVLIRKKFSRSQLLAYTAKLTSSLIGLEACAGAHFIGAALREQGHQVRLIPAQFLKPYRKSNKNDFLDAEAIADAVTKENMRFAQIKTQEQLDIQAMHRVRDRLVQRRTSVINEIRGFLLERGITFPVGPIHLQKNLVAVIEDAEQNLSPCMRWLLERLRHEWKQLDSDIRAVTDEIERTGDANALCRRLRRIPGFGPLVSSATVAAISNGAAFRRGRDFAAWVGVVPRQHSTGGKQKLLGISKRGNVYLRRMLIHGARAVLLRVKYDTGGFGQWVHRLTQRAPRNKVIVAIANKLARIAWAVLSSGDEYRHQPLPGAAA

SEQ ID NO: 505057 - protein, 457 aa, unidentified
MKRSSAATALDTLTCIHPNAAGLDIGSREIWVSVPTDRDAEPVRRFSTFTPDLKQLVAWLTACRIDTVALESTGVYWIPVFELLETAGLKAELVEPRQLKRVPGRKSDYLDCQWLQKLHSLGLLTASFRPDTEMRTLRTYLRHRAELLQHRAPHILHMQKALQHMNLQLHHVLTDLTGVTGLKILRAIMAGERDPLKLAQLRNPACKSSTETIVQALTGTWQAEQLFALRQALELYDFYTQKVAECDGVLEKQYAAMKPRWEGEVPVDLPALKPNSHSKNQPSLQTRRELYRLTGVDLVAVHGLSASLAQTILSETGTDMTKWPTEKHFCSWLGLAPHNDISGGKILRSRVLPTDNRAGQAFRQAAASVIRSQCAFGAYYRRKKAQMGPLPALVATAHKIARTVYYLLKHGVQYEDIGAEAYNQKHAERELAYLKKKAAKLGFTLVEHQPALMMSPA

SEQ ID NO: 505058 - protein, 338 aa, unidentified
MKKIVIGIDISKKKLDWCVMVDKEIAGFHDTANRMDDIYNKFAEVLEYGKIDIGEVLVCAEYTGKYIYPLVLACHKCRVDLWLESGYNIKCEARKERGKDDRTDARRIAEYGRKNQDDARIYRLPAESIATLRGLLSERAMYCSQRAAHKGQLRDMRGFMSPEAYTARAVRQLSLIKELDRLIEEVDNSMAEIVASDPELLRQQQLLLSVPGIGMVCAAALIAVTAGFSLFDNGRELCCFAGLAPFAYTSGTSIRSKRRVSCRADHQLKALLHMCALVAATRMKSGRFAEYYQRKTAEGKNKMSVLNAVRAKLMLTAFAVVRDNTPYDKNFKINLAES

SEQ ID NO: 505059 - protein, 406 aa, unidentified
MKAALRRVGIDWGSESHQVCRIDGAEEAKQRSFEHTSEGLKALVAFVVEGEIPRDQIAVAIEVNHGAVVEALLAKGLRVYSINPKLLDRLRDRFSMAGAKDDRRDAFVLASCVESDAHAFRKIELGNEENTRLQAATRLREDLKSDRRANANRLWNELREYRPALLTLCPGADEPWLWVLIEKAPSPAEGAKLTIARIGAILKKHRIRRLTAEEVRTALRGDVLSLRSVYIESHVACALVLIARLKLAQAQISNIEKQIKTALAERVKSEQAERRDLTILLSLPGFGSITVATALGESGDAFERRDYNALRSICGAAPVTKQSGGSRYVVMRQVCQPRLRVALHLSALQAIRIDPKLGDLYARARARGQTVGRALRNIVDRLLFLAVQLLKKNQLYDLQLRQLATT

SEQ ID NO: 505060 - protein, 393 aa, unidentified
MRLAIGVDVAKDMHWVTALTEHGDVVLDRRVANTPDEVTALAAELGALGGEHTVGIDVVGGIASLVTAVLLDAGERVVHVPGLAVNRARQGTTGGEAKSDPRDARVIAEQVRTRRDLRPIDAESETLIELRLLVGRRRDLVVEQTRRLARLHDLLVTIHPGLERRLDLTTKGALYLLTRYVTPAELRRAGRARLVSFLRTCPHLQRLEALAAAALEAAHEQRLALPGEAVAATLCRELASDALRTRERLGTLDQQLTELLARHPDGTLILSLPGMGVTLACEFLVEAGSLARFASPDALAAAAGLAPVLRQSGKVRFLRRPLGGNKNLKRVLYQSAFCSLQHPVSRAFYDRKRREGKRHHQALIALARRRVNVLWAMLRDRHPYQVRPAGQAA

SEQ ID NO: 505061 - protein, 375 aa, unidentified
MKEKVRFLGLDVHAETIAVAVAEPDGEVRSLGTIANREESIRKLIKKLGAPEHLRACYEAGPTGYVLYWQLTQLGVECAVVAPTLVPIKAGDRVKTDRRDALKLARSHRSNDLTAVWVPDPDSEALRDLVRTREAAKQDQLRARHRLSKFLLRMGRRPAVGVKAWTEPYMAWVRQVRFERPTQQATLQDYLHEVDHMAARVKRLEQAITEVVKLASPQVQEVVKGLQTLRGIAEISAVTIVAELGNIARFDTPRQLMGYSGAVPSEDSSGKRKRQGSITKTGNAHLTRIVVEAAWSYRHRAAIGPRLRKRQEGVSEPIKEIAWKAQVRLSKRYARLAAAGKNQRKIVTAVGRELLGFIWAIGVKAERSVPQQIAA

SEQ ID NO: 505062 - protein, 334 aa, unidentified
MKQVNQIGVDVDSEELVCAMQCAQQRLPLARFANTASGHKKFIRWATKGRHPVRVCLEATGIYSLEFALALHQAMNVEVMVVNPRAIKDFIRACMQRAKTDAVDAGGILDYLERMPFVAWQPPAPEILELQAINRRIDQLHTELTREKNRRHATEFAGASADAIAHDIEVNIHHLERRLERMQESGLRLVRRVPALAAKLAHLVSAKGIGEASAMRILAELLVLPDDLAAPQWVAHAGLDPRPYESGTSIHRPRRISKVGNSRLRAALYMPALVAIQHEPNVKAFYDKLVAAGKKPMQAVVAVMRKLLHAIWGMLKHDQDFDGNKFFKLTEKTA

SEQ ID NO: 505063 - protein, 446 aa, unidentified
MKKDNNSGKKSEPTSKRTKSRGPVQRDTKEVLAELVGKLKEKLDPKKVAATSAGEKHQRGELRPNLDRLTVGVDLGDQGSHYCILDLEGETLAEGQLRTTAEDLATFFQELNAARVVVEVGTHSAWVQEVISGCGHEVLVANPRLMDGSKRRKRKNDRIDANKLARLGRVDPESLYPIQHRSREVRQDLVRLRARDALVAVRTEIINTTRGLVKSMGARLPKCSSRSFAHKGEEAVAVEMREALLPLVRLAATLSADIKEYDKKIETLGREKYGHTALLRQVKGVGPITALAYVLTVENPQRFVKSRDVGPYLGWVPKQEDSGESQPQLGISKAGDTMVRKLLVGSAQYILGRFGPDTDLRRNGLRLCERGGKNAKKRAAVAVARKLAVLLHRLWVSGEVYEPLRPKARGQSPRDLLWRAGAKLMKGEPESIQEVWQTTTSTALFG

SEQ ID NO: 505064 - protein, 309 aa, unidentified
MTLWIGVDVAKATLAVCLWPQAKHFSFTNTAEGHAQLLALLHGQPVGNVLLEATGGYERALLRALQTAGHPATRINPRRARAFAEAMGKTAKTDPIDAALLARMAELVHAPSPALEPEREALRDLVQRREQLIQQRDDERRRRHQAHLPQVRDDLIEHIDHLRQRIRRIDQAIVQTQRQLDDDLSRRLLAIDGIGEVTTASVLAYLPELGRLDRRQIAALAGLAPYNVDSGQHAGKRRIRGGRAPIRRVLYMATWSVIRTQPDFKARYARLLLRGKCAKVAVTACMRVLLTRLNAIARDRVDWRTPIVE

SEQ ID NO: 505065 - protein, 417 aa, unidentified
MMSEATWFAGIDWASRKHQICLLDAAGRIVGEREFAHSGAGLAELCDWLVASSGAEAGAVAVAIEVSHGPVVETLLERGFLVYAVNPKQLDRFRDRFTVAGAKDDRRDAQVLGDSLRTDPHCFRRLGLDDPLVIELRAWSRLADELQQERTRLTNRMREQLWRYYPQALQLTDDLAADWFLAFWQFAPTPDKARRLRESTLARLLKQHGVRRLKAPEARRLLRQPPLLVAPGTAAAAGAHLRSLVARLRLVNRQLREARDNLDSLCLEFADAEPATPGQQNEPRDVAILRSLPGIGRINLATLLAEAPEPLKRRDYHALRTLSGVAPVTRRSGKHTLVLRRLACHRRLSDAVYHWARVAIQHDPKSRHRYAALRHRGHSHGRALRGVGDRLLAVACAMLTNRTLFDPTRYAVQPAAA

SEQ ID NO: 505066 - protein, 357 aa, unidentified
MKSQDGKYVGIDCGKKSLEVVRINTENLLERRQFGTTENGINSLLKWLTLNDIVGLEAGSQSFRIAKSILNKGIQVIVLNPGDLATIYQSLKKTDKEDSLKIARLIQRYPKEELPVVPIPTDEEEDNRRLCTEHENWTKQLTQGKNRLHSLFTQAGLTHITKKHLRTKTSREASVTLLPDRYKKEAERILKVLDLVALNLKLIEEEIKEALKKNQSYVQTIMSMPGIGIITSLAIMSYMGDCKRFSSAKQAAYYSGLVPRVDISGDTVRYGRIVSRGCHAIRRVIVQAAWSLVRCQHGGKIKEFYERLYVKKGTKKSIIATSRKMIEVLYTMIRTGNLFDSMPEEALNRKLAQYGLM

SEQ ID NO: 505067 - protein, 374 aa, unidentified
MADYSEVFVGIDTSKLRNAVAVAEGGRNGEVRYLGEIDNTEAATSKLVKKLAARHRRLTFCYEAGPTGYGLHRLIKTLGHECVVVAPSLIPKKPGDRVKTNRRDALNLAKLLRAGELTAVWVPDARHEAMRDLVRAREAAVDDLKSKRQQVLSLLLRLGRHFTGKRTWTRAHMNWLVSQKLAHREQRIAFEEMLLAVRQANERVIRLERAIAAAVPDWSLAEVVPALMALRGLDLISATIFLAEIGDLSRFASPRQLMAYLGLVPGEESTGDRVWRGGITKAGNHRARRILVECSWSYRHPPRVGKKKLAKVEAAPPAVQEIAWKAQARLTARYRALARRGKRPTLVVTAIARELSGFIWAVSRAVGAPATPAK

SEQ ID NO: 505068 - protein, 419 aa, unidentified
MVQERRPTVKKNNNRSTEKKLVTVIQSNATINPKQKISMQILRQIEHTGLTVAQKNTKPAKERTPVSFYVGMDLGDKKSNYCFMDQEAEIRAEGAIATTAEEFKTCFSAIPRSCIALEVGTHSPWISALLEELGHEVYVANPRKMESIQKSSRKNDKEDARKLARLVRSDPELLYPIRHRGLAAREDLILLRARDAAVSARTKLINCVRGLVKSIGSRLPKCSAESFYDHAEKALPESIRESLFPLVQQIAALTAAIKEYDKAISKKASKQYQETMLLRQVNGVGPITSLAFVLTLEKPERFHKSREVGPYLGLVPKQNDSGEISKQLRITKTGDVMVRRLLVGSAQYILGPFGKDCDLRRFGLKLANRGGKNAKKRAITAVARKLGILLHRLWVTAEEYEPLRNTQLQEKALAAVVNL

SEQ ID NO: 505069 - protein, 411 aa, unidentified
MLNTVQWLAGIDLGAEKHRLCVLDANGKIVQQKWVEHSGSALAEMVDCLRQITGDAPELLAVGIEVPRGTVVETLVENRFQVFSINPKQLDRFRDRYTAGGAKDDSRDAYVLADSLRTDRHCFRSVRLDEPTLLHLRELSRLEDSLEEDLGRTCNQLWQQLHRYFPELLQLCSGANELWLWDLLEMAPLPAQAAKLSAGRLRQILGQRRIRRFDAERLRTILAAKPVSLAPGAAEAASEHVLILLPRLRLLHEQYERVRQRVAKLLEELGTAGEADGQSGEHRDVTILLSLPGVGRKVAATMLSEAGQALADRDYHGLRCQAGAAPITRQSGKKKVVGMRYACSQRLRNAVYYWALNSISRDEKSKRTYEEMRARGKSHGRALRGIADRWLDVLIAMLRHRTLFDPLRRVA

SEQ ID NO: 505070 - protein, 400 aa, unidentified
MKRVAGLDVHKDTIFACVKKGKYQSDVKEFGTTTSELEELFHWLQGERVAKVAMESTSTYWIPVWRALEQEFKLYLVNPYFIKQMPGRKTDVKDAQWIATLLDKNMLKSSVVPEKQIRVLRGYLRRYAQLQGQLTRCYQSMERHLSLCNIKIASLTSKIGSKTVLNVVQEIIAGQTAPEELIKVVHGRVVNSKGQQTVMKALTGIIEGHDEFMLGQIFEDYQHIERQCKELLAQAEKIADDYYQKEIDLLQTIPGIKKLSAVIVFAEIGGEVNMFKTAQNLTGWCGLSPKNDESAGKIKSNRIGKGNKYLRRILVQVAWAASRTKDCYLKDKFEKLSIRKGSKKALIAIARKQLVIIWNVLNKMEEYKEPEIILTEKQLASKKAYYTKKLEQLKANEKVG

SEQ ID NO: 505071 - protein, 354 aa, unidentified
MKSQTTATPKLFIGMDIHKKSWSVHMRTDLFDHKGFSMPPEADKLVDYVQAHFADHEVAITYEAGCCGFSAARYFSNIGWEVKVVNASDVPRSDKQFYQKTDRLDCRNLCKQLQKDQLHGIYIPMEGEEQLRSLLRQRNQVVKQLRKSKTHIKALLLFHGIKVPDEFDNPNWSKDFISWLKNIQWSHSTGASSLQSKLRILELLHHEYLQTSNELRAYCRKYHNKDYYLLRSIPGIGGLLAAAILAELGDIRRFNNEKEFSNYIGLVPGIRQSSETSNKQGITPRCKSLLRSYLIEAAWIAIRTDPQIQAYYRKHAGKNPKSVIVKVAHKMCKRILSVIKNETPYQISYNKAEQ

SEQ ID NO: 505072 - protein, 425 aa, unidentified
MTRPQLTPPAGVLVAIDVAKARNEVLIEVPGSGRRRRLSVLNTRAEHDRLITLLSDLGQPVTCGFEATGNYHRPIAWRLLQAGFAVRLISSVALARTREALHNGWDKNDPKDAQVMLHMIRIGASQVYQDPLVAGINDVQELSKTHDAVSKAKTEVLHRILSHYLPLYFPEIDRFRHNSRSDWFFAFLDRFPTPASITALSKEAFIVAAWDVVGRKVAKAQVLGDIYETARSSIGLPVSPDAPAVSMFRLVIGEARGLIRQRDAIEVAADTLLSDSADYKLLRRIPGIGPINALTILAEAGDLRRFGHHRQFLKFCGLDLATQQSGTFRGQTKLSKYGNARLRRTLWLAGQVAIRQRENGFRDKFERYIARDRHNADLRRKALTAITAKMARVVHAVIKAGDDYRPFVEGPVPGGRTPLSRAVRA

SEQ ID NO: 505073 - protein, 449 aa, unidentified
MPTVRTNAGGIDIGATEIYVAVPPDRAALPVRKFGTFTEELHTLADWLAQCGVTTVAMESTGVYWIPLFQILEDRGIEVCLVNARHVKNVPGRKTDVQDCQWLQFLHAVGLLRASFRPPKEICAVRTVRRHRDNLVRFASQHVQHIQKALTQMNLQLHNVISDITGVTGLAILDAILAGQRNPKTLAQLKDHRIKASARTIEKSLVGDYRPEHLFTLQQSLAGWRFLQTQIHECDAQIHRQLAAFAAKADPTKPLPPAPASRKKPRGNALRFDARTELYRICGVDLTAVPGLDAQLVHTVVSEVGVELQPRFPSVHHFTSWLGLCPDNRITGGKVLSAHTRKVVTPAATAFRLAAQSAGQSHSSLGDYHRRMRARLGPPKAITATAHKIARIVYAMLTTRTPYNETICAKNDAQILEQRTHRLKNQARKLGYQLIPIPPLTEQTQSLVS

SEQ ID NO: 505074 - protein, 457 aa, unidentified
MQNYYMGIDVSKGYADFVILDAKKKIVEPNFQLDDTFAGYCKLFEILDRFFNSHPESTLYAALESTGGYENNWLHSLNSFQGMLTIKSARLNPLGVHANSRAALRRVVTDKTSAQDVANYMISHPEKVSYQQEDSLSSLRRQWTFVSLLTKQKTQILNQFESLLYNANPELIAYCKSGVPAWLLKLVKRYPTANKLAKATVTSVAKIPYVSIRRATELIDGAKKSIASATDEVTGKMMMAMVENIIRMDETIRDQTRQMAEHYKVPEIDLLKTFTGISDASAIGLMLEIQTIKRFPSAKKLASFFGLHPVFKTSGDGTTRARMSKQGRKQPRKILFMVALVSLTANPHIAKIYEEHTKKGMKKMAAIGLCMHKILRIIYGMLKNNQAYDPKIDQHNRENSMSRKGANCVKTIHRRYQTFDSKAPISKRQSNKRKEWEKSQGDNVTQCGIGIPIPPAG

SEQ ID NO: 505075 - protein, 343 aa, unidentified
MQITTIGLDLAKSWFQVHGVHASGKVAVRRKLKRSDVVNFFKSLPPCLVGIEACATAHYWARELIALGHEVKLMPPTYVKAYVKRNKNDAADAEAICEAVTRPSMRFVPVKDADQQSILMLHRVRSLLIRQRTMLVNALRAHMAEFGIIAPQGLRHVEDLAKVIAHQGERLPAFASSILQLVLDQLNETNSRIREIEARLAKWHRESPVSQLLATIPGVGIMGASAIAATVADPSLFKSGREFAAWLGMTPRQNSSGGKERLGRTSKRGDKYIRSLLIAGAVAVLRHARNRPTRDGEWVRGLLARKPTKVAAVALANKTARIVWAVMVRGDGYKAKEVLGQPA

SEQ ID NO: 505076 - protein, 439 aa, unidentified
MVKFVGGTAQAGYVDQVRGIDPAKCLVVPVDVGKRSAVALVANHHGEVVADPVEFELTMSGTTQLLNVVKEAESKTQAESVRIGVEAAGHFHRALCWELDHRGLDVVELNPHSVKLARGQVGAMRLKTDVRDCFAMVELLTRGQGWPFHRHADIIVAQQLWTARRRRVLEASKRQRNQVHAIADLACPGLIDCFRSGLDAPTLRMLLSTAADPNVLAQMTADKMVAHAAGHGRRMLRPKAREVIIAAADAQCVSPAQRATAQEILVRELAALEVLYEELAVCDHALAGLIDNTPAAVLCSIPGVGILTASYYGAAIGDPHRFANAGAAYRYSGLSPSSNDSAGRFGKPSISREGSVALRHAILTLGQGLSMHHPDFAAYKKRLIAHGKKPLVAAVAVGHRAHRLAFSMMRNQQLFDDKQWAASVAKGRLVTTTEVIETT

SEQ ID NO: 505077 - protein, 468 aa, unidentified
MTPRKRQRLSPEPLRVTNPHAAGIDVHANVHWVAVSPADAPAPLADHPANLPAHVRYFGACTADLIAIADWLAQCGVTTIAMESTGIYWIPLFELLESRGFEVFLVDPRQSRHAPGRPKSDVLDCQWLQRLHSYGLLTASFRPADQVVVLRSYLRQRQMLIRYAGQHVQHMQKALEQMNVKLAEVVSDITGVTGMAIMAGILGGQRDPLQLAKLRHDYCKRTEAEIARALYGNWRAEHLFALKQALTLYEFYRQQLQECDVQLQAHLGIFPDRSKGKPRPKRQRRYGQRSGKRTNEPAFDLGTALYQMSGVDLTVLEAIDVTTALVILSEVGSDVSRFPTVKQFTSWLGLSPQHQGSAGKIRSRRVPRGANRAGRALRMAVQGCYHAKHALGAFYRRVQARAGAPKAIVATARKLAERVYRLLKYGAEYVRQEIEVYEAAYRARVVKGLARRAAEMGYRLEPAMAAGT

SEQ ID NO: 505078 - protein, 346 aa, unidentified
MIIVGCDFHPAWQQVAWVDTETGETAERKLEHSNGEARGFYASLSAAALIGVEATGNCQWFLDLMTELGHQVWVGDAAQIRASYVRKQKTDKRDAAHVLKLLLEDRFPRIWVPNREERDLRQLLLHRHKLVEMRTRVKNELQHLALNHGVRKQRKLWSEAGQELLRSLALQPWAGQRRDDLFQLLAMLQRHIGLLDQAVKEKSQLDKMAQLLKTQPGVGPITSLAFVLTIGDVSRFQNGKQIASYLGLIPREHSSAGKQRLGGISKQGNRMLRMLLVEAAQTAVRSDPEFRKQYLHRCHSKPKAVAKVAAARKLAVRLYWMLRTQTPYPEIVRIESSPRVPLVGAS

SEQ ID NO: 505079 - protein, 338 aa, unidentified
MKAATIGLDIAKQVFQVHGADKSGKVVFRRKLKRSEVARFFVELEPCLVGMEASGSAHYWARVLSASGHTVKLMAPQFVKPYVKSNKNDANDAEAICEAVTRPNMRFVPQKSVQQQDLQCQHRVRSRLVACRTQLVNQIRGLLAEYGIVLPQHVGQLRSGLPAVLEDAQNQLTGVGRQLFHGLYEELAQLDEKIRAADRQIQLAFQDHEDCQRIGAVEGIGPLTATAIVAAISNGRAFANGRQFAAWLGLVPRQNSSGGKTRLMGISKRGDPYLRTLLIHGARSVVYRAKNKTDKRSLWIVDKQQRLGTTKACVAVANKNARIAWSLIARDQVYRPAA

SEQ ID NO: 505080 - protein, 342 aa, unidentified
MLYVGIDVAKNKHDVTALNVPGKTVLKPLTFSNNKAGFELLDLSLRQLNQDCLIALEDTGHYAFNLLNFLHEQGYKVYTYTPLLIKEFAKSLSLRKTKTDKKDAHGIALKLLSDPNREQFQHDNRQVELKILARHIHRLKRKQSDWKVQYTRCLDIIFPELDKIVGKHSEYTYQLLTCYPNPQKRLEAGFNKLIEIKRLTASKIQDILSVAPRSIGTTSSAREFEIIENIKHYKRLIDKAETCVNDLMAEFNSVITTVTGIGGRLGAVILAEIRNIHAFDNPAQLQVFAGLDSSIYQSGQIDLAGRMVKQGSPHLRWALIQAAKACARFSPAFKAYLKTKLE

SEQ ID NO: 505081 - protein, 355 aa, unidentified
MNDAKYIGLDVHQATISVVVLDSTDRLVMESIIETKAATILQLLHGLSGSLHVTFEEGTCAAWLHDLLKPHVTKVLVCDPRKNALLKAGNKNDRIDARKLADLLRSGLLSPVYHGEKGVRVLKELARSYLALTRDTTRVMNRLKALYRSWAIPCAGQRVYAPRDRSEWLAKITEAGVRRRAEIYYQQLDALRSLREHVRRDLLAEGRKHSAMKLLRQIPSIGPIRAVLLIALMQTPHRFRTKRQLWAYCGLALKTSTSGEYRIVEGQLKRSRKFLAIRGLNANHNHDLKNIFKGAATRAAAVPGPFQEFHAALVARGMKPTMAHLTLARKIAAITLIVWKKGVGFDAEHLKQQAA

SEQ ID NO: 505082 - protein, 344 aa, unidentified
MGEVSTIGLDIAKSVFQVHGVDSSGAVVIRKRVSRLKLLEFFTALPPCLIGIEACPSAHHWGRELQALGHTVRLMPPSYVKAYLKRSKNDANDAAAICEAVTRPSMRFVPIKTKEQQTALMLHRARQLLVRQRTMLSNALRGHLAELGIVSAKGRNGIGELLRIIANGADNRIAPATRAILDVMARQYSAIGAEIRSIDKSILAWHRSCEASRRLEEIPGIGPIVATALVAEVGNWKEFRSGRNLAAWIGLVPKQHTTGGKNKLGSITKQGNRYLRWLLVAGAMAVIRYAQKHGTERRPWLGRLMERRPTMVAAVALANKIARMAWAVMVRGEKYREPKLLAAA

SEQ ID NO: 505083 - protein, 392 aa, unidentified
MVCVGIDVAKDKHDCFILSLEGEVLADVFTIANNRDGFEMLLRTIRSCTSPTDNIKVGLEATGHYSYNILGFLLENGLHTFLINPLHTNLYRKSLSLRQTKTDRIDARTIASMLMSDVDLKSYTDTAYHNEELKSLTRYRFDIVQERAKLKQSVSRLVSILFPELETLVPSLHLASVYAMLSEFPSAKQIADSHLTHFKAVLSDSSKGHYDREKAIEIREAARRSIGSAMPAKSMELQHTIRLIHELDMEIDEIEIAIMAIIDKMAPPILTIPGMGYRMGAMILAEIGDFSRFDSPDKLLAYAGLSPSTYESGKLKASGTYAHMEKRGSRYLRYALYNATKYVCHWEPTFKAYLAKKRAEGKHYNIAISHAAKKLVRLIFALQTSGKTFRSA

SEQ ID NO: 505084 - protein, 365 aa, unidentified
MKHVTTYVGIDAHKKDLFIAMLIGHEATPVTWTVPNEPNAVRRFVRRLERDAPGPVRACYEAGPCGYVLQRQITTPRVSCHVIAPALVPRKPGERIKTNRRDARKLAELLRANVLTEVRPPTPEEEAVRDLCRARDDAREDLQRCRHRLGKFLLRRGLHYTGRNWTRAHRQWTDSLVWTHAAERVLLEDYQLAIDHVEARLIELDRRLVEIAEAAPYREPVGWLRCFRGIDTLTAMLVLAELHDFRRFKSPRALMAYLGLVPGEDSTGEKHRRGRITRTGNALVRRLLIETAWHYQHRPSVGAALMRRRKGQPGRVIAIADRAQQRLCRRFRRLAEQHKPAPKIAVAVARELAGFLWAALQAPAA

SEQ ID NO: 505085 - protein, 338 aa, unidentified
MEWTVAIGVDTHKDVHVAVALDGLGAQLDSREVETTAAGYRSVLSWALELGAPVFAVEGAGSDGAGLVRFLERAGVPVWECERPRRQERRRGKSDLIDASLAARRIVSGEGLSIPRGGGRREDLRLLLLERRSAVRARTAALNQLSSLLVTAPEQVRARLRALSGERLAAAAARLRPGSDAITAVLRRLGRRVARLSQEIAEVERGLAALLAELAPDLLEECGVGPVCGAQLLVSSGDPSRITSEASFAALADTSPVEASSGQQRRHRLNRGGDRQLNWALHIIALARIHHHPETAAYHQRLLAAGKTAREARRCVKRALARYFYRRLHEMPRLALTT

SEQ ID NO: 505086 - protein, 358 aa, unidentified
MKYVGIDVHKKMCQAAILDEDGTLLDELRFPNDTDGIEEFAVKLTTLHDEVKAVVESTGNLWIPIHDRLEERGVDVALSNPSKTRLIAEAKVKTDKVDARTLAGLLRADMLFTCYVPGEELRSRRELLRHRLNLVKNRTEVKNRVHGLLDKHGLRMPGATPFSRDNIEWLRGLSLGFMDDAILRSDLAVLEAVDAQVTLIEEKIAVLAAEDRRVRLLMTMTGVGYFTAMLVVSEVGDVGRFRGDKEFASWMGLVPSVHQSGERTKIGGVSGPCNKRLRWALVESAQTAVRHDSRLGGMYERVSRRRGAGCAVVAVAHEMARIMYFMLVREEPYRGENRGLTERKLKNMGKKALDGLRN

SEQ ID NO: 505087 - protein, 410 aa, unidentified
MERVIERCCGLDVHKKTVVACVRVPGRTSAREQQVRTFGTTTAELLALRDWLGGYGVTHVAMESTGVYWKPIFYVLEDAFTCVLANAAQIAQVPGRKTDVKDCAWIAQLLEHGLVRGSFVPPAPIRELRDLTRYRAALIGEHTRETNRLQKVLEDAGIKLASVASDVLGVSGRAMLDALTQGTHDPDVLADLARGALRRKLPALRQALTGRFRPHHAFLVSQVLAHLDYLDEVIEALSTHLDEVMAPFAEEVSRLDTIPGVNKRTAEILIAEIGVDMSVFPTAGHLASWAGLCPGNNESAGKHRSGKIRKGNRWLRGALIQAALAGGTRATKGAFAARYRRVMRHRGHKKAVVAVAHAMLVAAYHLLARHTTYQEPGADYYERRHAERVRQRAVQLLERQGYRVILEPAA

SEQ ID NO: 505088 - protein, 384 aa, unidentified
MKNKISTLFVGVDTHKETHTLIGTNIVCEQLCGLTFKNNLDGFIKALERINKTAKKNNFTPLVGLEDSAGNGRAFASFLDNNNIPVKTINPVLVVKNRQYETHPEKSDSQDALGVAKVLVQRTDRLPNYRVTDNSNFAKDIKILVKDREEAVCEQTKLKNKLHWALQQVWGIEYKTVYQKDIFGKRALKFWLKHPSTRDFRKSTKPLMEKPDWIRNIDVNDLPAVSDVQRSQIRRLVSKLKIIKEEISELNGQLESLVNEHAAYMTSYPGCGIVTAAGLIAYINDINRFESESKLAKYSGIAPRKYESGNRKKDKTSMRGNANLRRLFKTISLAQIGRRGNQKAKEYFRKKIQEGKTRKQALKCLMRQNVKIMFCVIKEQRPYY

SEQ ID NO: 505089 - protein, 400 aa, unidentified
MHYLGIDWANDKHDLCLLANDGRILSQFVVTHDLAGFATLQDHLKTLPDVRINIERSDGLLVDWLVQQGYDLYITPPHILAHRRPTRVKDDKGDAYLLAYLLRLNDRDCRPYSIQSHTVVHLRQLVRAYDHALKEQRRLSNQLVYSLRQYYPAALNLFTRIYTLIALAFLERYPTPQAAQALSREELEQFLRGQRYAYPQRIDTIYRQLQTPMPLAAVQDGHVEYVKLLIPLLRMVFHHKNALIRQIQTLFRSHPEANWWLRFPGMTGPLTPARMLAWIGDDRSRFPTAEALQAIAGTAPVTRRSGKSKAVEFRTSCSHTLRAAVDDLARQSMRHSGWARAYFQQQLDKGHSVPRAYRALGNRWLKIIWTLWQSGEVYDELKHVANRSRKGAAVPLAQAV

SEQ ID NO: 505090 - protein, 342 aa, unidentified
MEHYAGIDVSLECSSVCVVDANGKIVREAKVASEPQALIAWVGSLGFGLERIGLEAGPLSQWLFAGMKGASLAVELLETRHVRKAFEAMPVKSDRNDARGIAQLMRLGWFRPVHCKSMSAQETRSLLTARKLVQSKLHDVENSLRGILRGFGLKVGKTTGQKFAGRIEELVAGHPHLQTIAKALLAVRAVLRTEFAAFEKQTRRMVRSDMQARLLTSVPAVGPIVALSYASAIDDPARFKSSKQAGAHFGLTPKKHQSGETDYAGRISKIGDAAVRTALYEAANVMLTKPVKGCSQLKSWAMRIKNRAGMNKAKVALARRLAVIMHRMLADGTSFNAAAAAA

SEQ ID NO: 505091 - protein, 316 aa, unidentified
MKSSPLFVGIDVAKATLDVALRPRDQTWQVIYEDAEVEALVDQLTELSPTLIVVEATGGLETALVAALAAAKLPVVVINPRLVRDFAKATGRLAKTDRIDAQVLAHYGEAIRPSLRPLPDADTQQLRAVVTRRRQLVDMITAEQSRLSSAPARVRDSIVHHMSWLHQQLASLDDDLDEMLKASSLWHDRDAILQSTPGVGPVLSRTLLAHVPELGELNRKEIAALIGVAPFNRDSGIWRGRRMIWGGRAHVRAVLYMSTLVATRHNPVIREFYERLLAAGKEKKVALTACMRKLLTILNAMVKHQQRWQPSVVKNG

SEQ ID NO: 505092 - protein, 338 aa, unidentified
MLFSGIDLHKRTVAIHTLDADGATVRTANLPTQRRALTAYFGALPGPHRAVVECTGMWYWLRDLLVPQGIDLRLGHAKYLKAISYAKVKTDAVDAATLAQLLRVDLIPEAHMISPAQRETRDLLRARLLLVSRTLRCQRSVGALLEKYNVATPADLPELPQLQATLHAEQHALLTTQIRRLEHQLRDRVLPTPDVQRLVWIPGIGAMVAYTLVLEIDDIRRFPTVRQFHSYCRLVPGADDSAGTRKHKRSRDGNRYLKLAFHHAAVRAAQYVPEIQTEYRRLIRRKGKAIARALIAKELGSIVYHVLTRQEAFNGCFRGLKLTRTKPRRWPRLASPPA

SEQ ID NO: 505093 - protein, 343 aa, unidentified
MAIVILGIDLGKNICSLVGVNEDGAVVLRRRMRRQTVLTFAAKLPSCVVAMEACCGAHHLGRLLTAQGHTVKLMSPEYVRPYVKAQKNDDRDAEGIAEAASRPTMRFVDLKSQEQLDLQSLHRVRSRLVGVRRTLLNQLRAILLERGHIFPQGRRKFEAAIDTLVADPACEISSRIRQLVIDIRSEWQALDSRIEALNGEFVAIARHDETARRLVTIPGVGVLNATALVAAVGNGAAFRRGRDLGAWLGLVPKQHTTGGKPKLLGISKRGNKYLRMLFIHGARAAMPSLSASQSPLGEWLRGLLARTHRNIAIVALANKLARIAWATLRRKTSFDLRHLAVAG

SEQ ID NO: 505094 - protein, 310 aa, unidentified
MTAVGIDVGKAALDVAVEGVSGVVRFANTRIGIGKVLRYLHTLDEVRIVVEATGGYEDALLEACCDAGLWVSRINPRQARDFARATGELAKTDAIDARLLCLLSRLFAERLRRFEAPAPWQRQLRDWLRRRGQVVTTLQAHKQQTALTSPAVRKLMARTLAALTRELAAIDRAMQALRNAHVTPALCSAKGLGPIFQATSLALLPELGTLTRQQIAKLVGVAPMNRDSGQLHGKRRIRGGRAPVRVALYMATLSAVRWDPTLRAHYQQLRARGKLGKVALVACMRKLLTIVNARRRDELRKEVEGLVIAA

SEQ ID NO: 505095 - protein, 416 aa, unidentified
MKIVRPICCGMDVHKNIIVATIGITNKKTRITEYIQETFSTLNPDLLNLKQWLINHKCFDACMESTGKYWIPIFNILEDEINIYLTHPKYVKAIKGKKTDKKDSKWICDLFKHDLIKFSFIPPKEIRALREISRYRYKLVGMRSSERNRYQNCMTVSNIGIGSVFSDPFGKSAQAIMKEVLESDIIEDEKILKCVHGLCKNKDKILDSIKHCNIETDQRFKMNESMTHMEELQVHINNCEIEMMKRAAPMFDQFMHITQLPGISTLSAILIISEIGVDMKQFESDKQLTCWAGLAPANNESANKKKSVRISKAGQYLKPLLVQCALGAIKDKEGYFGIKYSRIKKRRGHKKAIIAIARMMLVSIYHMILTGETFNPSDYESFRNPNPPIKQQVLTEESAIEFLKKSGFDVSKLTKP

SEQ ID NO: 505096 - protein, 342 aa, unidentified
MSTNAATYVGLDVHKKSITYCIKKQDGRVIDEGSIQATRDAMTEWLDEIDSPWIGAMEATLFTGWIYDFLIEHAEELKVAHPQMLKAIGASKKKSDKIDAAMIADLLRVNLLPECWMAPKDLRDLRRVLRFRNLIVREIVRMKNRIAGILMETGTEYESGKLHGKQYFAELMESLEEMPSEVTDLLGLSREVLEFMNSVQSTVRRMLMRNEELKKRVELLRSIPGVGEVTALTWALEIGDPHRFRQIKNVVSYCGLCSAQNSSAGKNKRGPISKKRNKHIQRVVIEVAKLAPRHNPQLAEVYERECGKGHKNRATICVARKIVAYLLAVDKSGKRFETSASN

SEQ ID NO: 505097 - protein, 332 aa, unidentified
MFNCIGIDVSKSTLNVHISKNSQNLQIDNNLQSVKKLHAKLKKIYKKEIEEIVFIFEPTGSYSELLRKFCADKQIKCFIINPKQFSNYAKALGEEVKDDDIDARVLSQAIVLVKDGQVKVPHYNADVEQIKELMSFYKFTTKQTSQLRNHLESLESKEGDSFAIKELNKSIKLSKEKEKKIITKVQEMIDANPTYKKAYENITSITGIGQIGGIALLHLFIKYPEANQRQITSLVGLNPIYKKSGTSLQSLYKISKSGSIFYRGSLFMGVMTAVRYDENFKAFYARLKANGKHTTQAQIAVMRKMIIVAHSLYKNNKKYIKLSNNIELEAMN

SEQ ID NO: 505098 - protein, 347 aa, unidentified
MRFYTTQHPFYCGIDLHARTMYMCILDQAGEIRLHRNMPATPEALLKAIAPYRAQIVLAAACMFTWYWLADLCAEHGIPFILGHALYMKAIHGGKAKNDKIDAHKIAVLLRGGMLPQAYVYPAEMRATRDLLRRRMHLARKRGALLAHVQNTNSQYNLPAIGKKIAYKANRDGVAERFADPAVQKSIEVDLALIGYYDDLLRDVELSIVKTAKHHDANTLYLLQTVPGIGKILSLVLLYEIHDIERFPRVQDFASYCRLVKCARESAGKRSGTSGNKIGNAHLKWAFSEAAVLFLRDNPAAQKFLARLEHKHSKGKALTILAHKLARAIYYMLKRQTAFDLDTFLRG

SEQ ID NO: 505099 - protein, 472 aa, unidentified
MNVNGKRKKNQVVTANIFEQQELLKKAEVIRENLTASTWRELETNGKFDKNEKLSFISDDMLILGCDVGSEIHYLRAIDTRGRELSKSAFSFSNESEGFQSAKEWAVKIAAEHNKNQIVLGLEPTGHYWFCLATWMISNGISVVQVNPYAVKQTKEVEDNSQMKDDRKDPKLIANLVKDGNFGMPYLPEKLYAELRRLSMFRDQLNEDRIRTINRMHREMKIYFPEYKDALGKVDGAFSLELLKQAPFPEDLTALGEDGIGQIWHDAKLRGRGYSRAGAILRYAKTSVGIKDGAAAGKTAVKWFVQKIMELDVELAVIEEQINQKCQEIPHAGNILEISGIGENTLSGILAEMGDISRFDDVKEIQKLSGLGLVACSSGKHKGETKISHRGRKRLRYWLFQAAKSAVAHSEEFKELHVYYTTRKQNPLKKMQSVIAVACKVLRIFYTILTKGVTYDGAKMMQDIKRPQMLAA

SEQ ID NO: 505100 - protein, 410 aa, unidentified
MIKENYIYVGIDLHKETHTAVMIDCYNQKLGEITFPNRPADFPKLVAKVKKCNTDGKTIVFGLENAYGYGRPLAVWLIDKGYFVKDVNTAISHRQAKHRGAMYRKSDSDDAEAIALATLNMLDKLPDACPNDAYWSLGQLVHRRDNIMKQRTRLVNQLHEQLCIAYPSYKSFFNDISRPTALYFWEHYPSKKYLKGKSVEDLRAELVPVSHNKCSTKTCEKILDAVASDKVKNNAYQDARDMVTLSIVSDLQHYDSQLAEVDKMLEQMYKMLGCTLTTIPGVNVITAVKILAEIGDIKRFSNANKLAQFAGIAPLHLSSSGKGKDLATKQGNRRLQATIYFLAIQMVQISSKGTPRNPVVRAYYEKRKAEGKTSQQALICISRRLISVIYGMLKNGTEYRMPVVENAGEK

SEQ ID NO: 505101 - protein, 346 aa, unidentified
MKILALDLGKYKTVGCAYESESGAHQFKRVCTTPAGLAKMVQEVKPDRVVIEVCSMAGWVCDLLWGLGITVQVANTSDDAWRWRKVKQKDDRRDALKAARLSAVNQVREVYMPANEVRQWRALITYRQQVIRRRTKIKNHIRDLLLREGQILRRGSGCWSEAGLKQLEEQAQPFSACGPAELWRGELQLELEQLREIQRQLATVTAQLDKLGAGDARVQLLRTVPGVGPRLAEAIVALLDQPQRFRKASQVSGYIGMVPKRLDSGETERHGHITRQGSRLVRSLLVEVAWAGLRHNAWVRQTYQRLSGGKKGRKKIAIVAVGRKLLVKCWAMLRDNRAWDWQPQIT

SEQ ID NO: 505102 - protein, 347 aa, unidentified
MRKINTIGVDLAKNVIQVSVVTGSNRELTNKSLTRKKFAEFLARQKPSLVAFEACGTAHYWGRFAQRHGHEAKIIPAKMVAPYRQGHKTDANDAFAVAEAARRPDIKQAPLKSVEQQGMQSIQRSRELLVQNRVGLSNHVRGLLLEFGLVTPQGWAALHRRIPEILEDGENELPDMYRPTLHMLWRRLCELRDDIQQLDTEIKTLVRQHAACKELLALEGIGPIGAVLLFATLGSGEAFANGRQFSAYLGLTPKQHSSAGKVKLIGISKKAANKRLRAVLIQGARAYVYRLKEPKSFKDRWLKELIERAGTGKAAVALANKNVRTAWAMLTHGESYEKHYQHEQLAA

SEQ ID NO: 505103 - protein, 317 aa, unidentified
MTESVKVNVGIDVSKDFLDVHVGDVALRRVPNRSSGLSVLKRILSRYTVSLVLLESSGGYENLAVTYLQSLGYDVCVINPRQARDFARSMGRLAKTDKIDAQMLCRLADVIDASPERDRFVKPLTDERRQRLVSMVRRRRQLCDLMIAERNRRSRTDDYGSESIGTVLDFLTDEVARIDRDIAAHVGSCFSDISSLLQSFTGIGPVTASTLLGELPELGKLNRRQITALVGVAPFNRDSGYMRGRRRISGGRSGVRNVLFMAALSAVRFNPVLKAFFARLVAAGKPKKVALVACMRRMVCILNAMLRDGSRFEVAVG

SEQ ID NO: 505104 - protein, 428 aa, unidentified
MDQVNRNRLEEFRQLRKEVRHSGEHLIVGIDIAKDRHHAFFGTATGKTLLRRLVFSNNHEGFRRLLDHAEALGAQHGLKKVVYGMEPTANYHKPLGEYLIGLGRTVVLVSGVTVKRNRESLDGRWDKHDVKDSANVADLISQGKCLYYEYPSAELRGLRGLLSLKRRLKKQEQGYRVRIRNHLIAQYYPEMDRDYEQLGAEGLSVVRWCLPASEIAQLDVEPFIERVTSRRIRREKRRRLEAVWEKARESIGCEAVPGLEHEAKVMVEGLRQIREMIKETEDKIQDLCEQFPEYRYVLTIPGFGPDVSAKVLGAIGDPDRFQNGKQVLKMGGLDLSADRSGKDSDRAIPEISKRGKADLRYALYQAALVATTSNKGFMRYYTRKLQGRVKEKGIQTKMRVKLSAKMLLIAWTLMKKKEAFNPAYLDTE

SEQ ID NO: 505105 - protein, 416 aa, unidentified
MHVVYPYCCGLDVHKRSITACVLLYEPGGKGQREMRRFGTMTRDLLELADWLQSQPVTHVAMESTGVYWKPVWNILAGQFAVVLVNAQHSKAVPGRKPDTTDCQWIAELLQHGLVRGSFVPPTPIRQLRDLTRMRASLRQDHTAVANRLQKILEDANIKLAAVASDWLGVSGRAILAQLLAGEEDAERLAELSRGRLRSKLPAMQLALEGRMTEHHRWRLRVLHEQLVFVEAQITKLEAKIQDQLSDYQKAIALCPTIPGIEEVAAANLLAEIGVNMEQFPSAQHLASWAGICPGNNESAGKRLSGKPRKGSAWLRRSLCQAAWAASHTKETYLAARFQRLAARKGKKRAIVAVAHTILVSLYDMLKNKQPYRELGADFLDRRNTENIKRYLLKRLERLGLQVTVRSSENAAALLA

SEQ ID NO: 505106 - protein, 395 aa, unidentified
MYYLGIDIGKNNHEAGLIREDGSHVGKSLRFANAREGFQQLLLFLEQSLPEREAFCIGMEATGHYWLALYSFLREQGFALHVINPIQSDSLRNFHIRKQKTDAVDCFLVAEVIRFGSFSETHLADEDIMALRNLARFRESLKDSCADYKRQVVTVLDQVFPEYAALFSNVFGESSKAFLKTYGTPEQVVDVNTKSLAALLRKTSRGRHGTDKARELKSLAARSVGLTLCSDAFAFQIRILIEQIEFTEKQIDEIDKKIARQLRKFSSVILTVPGVGPATGAVILGEIGDISRFSNPKKLVAFAGIDPTSFQSGNYVGQHNRLSKKGSPYLRRAVWMSALIAVRCDPVFKAFYEKKRGEGKAHGTALGAVSRKLLYTIYAVLKANKPYEVRRQGIE

SEQ ID NO: 505107 - protein, 428 aa, unidentified
MNKIELSRVSAFRQLKKEIQGSGTHLIVGIDVAKERHHAFLGTSAGKTLLKKLVFDNTLAGFSELLARTESVKAQNALSQIVFGLEPTSNYHKPLGRYLISKGCQVVLVSGKALKNNRELLNERWDKHDTKDAANIADLISRGKCFYYDTPSQEIEQIRDLLSLRARLKKEEHSLNLRIRNNLLAKHFPELDSFYKACERQTLAIVQWCVNPRKIAAMPFDRFFKLVAPNATGIAQKLRLQKIHRLAQESIGCPVGSAVEFQAALLVEKIKQVRVQISEVEKQVHQLCAQFPEYEHLLSIPGFGPYVASKVLAAIADPWRFETAKKVIKIAGYDLCAERSGKRSDQAVPVISKKGNSQLRYALYQAAMVASLRHRLFVSYFAKMLRGREREQGIRTKMRVKLAAKLLVIAWTIMKRREPFNPQYLSLQ

SEQ ID NO: 505108 - protein, 352 aa, unidentified
MAKNDFDDLMSVGVDIGKDVFHLVGFNKEGQLVLRKKIKRMALIATFEDLPRCIIGMEACLSAHFVSRTLRKMGFEPRIIPAIYVKPFNKGQKNDYNDAEAIAEAALRPNLKTVTEKTQEQLDLQALHRVRSRLVSRRTATMNQIRAFLIEQGITVRKSVAALRTSLQAILDNRSDEISLRMRKLILGLQQDWIWTDKRIEMTTSEIKSVSESEASCQRLMTIPGIGPIISTAVVAAVGTGEAYDRGRDFAAWLGLVPRQYSTGGRTILGRITKRGSRYLRMLFVQAAQVIMMRPKNWHKFSFGAWLEAAATRMQHNKLGVALANKLARIAWSVLNSGKDFDWKEKEFATAI

SEQ ID NO: 505109 - protein, 339 aa, unidentified
MNAVGIDVSKGKSMVAIMRPFGEIVSAPFEIKHTASDINSLVKLINSVEGESRIVMEHTGRYYEVLAHQLSEANLFVSAINPKLIKDFDNDSLRKIKSDKADAVKIARYALDKWQNLKQYSVMDELRNQLKTMNRQFGFYMKHKTAMKNNLIGILDQTYPGVNTYFDSPARNHGSQKWVDFASTYWHVDCVRKMSQNAFIDHYQNWCKRKKYNFSQSKAEEIYGKAKDLVPVLPKDDITKLIIKQAVNQLNSAAATVESLRTLMNETASQLPEYPVVMAMKGVGASLGPQLMAEIGDVSRFTHKGAITAFAGVDPGVNESGSYEQKSVPTSKRGSSDRS

SEQ ID NO: 505110 - protein, 357 aa, unidentified
MEYGAIDLHKKESQIRIVTESGEIIDQRILTTRDRFTHVFWGRPRMRILIEASTESEWVAQHLEELGHEVVIADPNYSAMYGHRSRRIKTDRRDVAALTEACHQGTYRLTHRRSARQHEVQCRLNVRKEITQARTRAISVARAITRSAGLRIPSGKAETFATRLFGLELSPAMKATLSPLRNIIDVCDDELAAADEKFEAMVAGDPMVKRLTTLPGIGPITATAFVAALDTVSRFERVGQVTSYLGLVPHEYSSGEKQRRGRIVRSAHPHLQSLLVQAAWRLSRSKDPRTESFRTWAQAVARRRGKKVAMVALARRLARTLFAMWRDEADYQPRRIGTRSAQPVADASAKTGAGAPM

SEQ ID NO: 505111 - protein, 426 aa, unidentified
MAELIPLAAVIGIDWADQHHDVALQESGTAPVERQRLPHTPEAIGEWMAALRKRFANRPVGIAVETSRGPLIHALLDHDFVVLYPVNPRSLKRFRETFAPSGAKDDVPDADLLREMLVKHRDRLRAWVPEDVETRALRRLVESRRRTVDLRTKLTQQLIAALKEYFPQALGWAGEDLSSGLACDFLLTWPTLDAVQRARPKTVQAFYTAHNCRRPERIAQRLEAIQHATPLTHDPAIIETSVLVVQMLAQQLKTLAASLERFDTEIARRFAAHEDAALFRSLPGSGAALAPRLLVVFGTDRARFRQAADVQQYAGIAPVLERSGNTRHVHWRWAAPTFVRQTCHEFANQSIRWSPWARAYYALQRSRGKGHHAAVRALAFKWIRIIWRCWQERCPYDEAHYTRALFRHNTPLTTRLAIDRDVSQAA

SEQ ID NO: 505112 - protein, 339 aa, unidentified
MKKVFIGIDISKDTLDVCFIESLSENKLFEFRVQNKKSGIKSILEKATKLGYSGSDAWFCFEHTGTYGYLLAYLLDQKDLCYSVVPGVEIKRSIGLARGSNDKVDACRIALYACRNHKKLVQTKFPSETILKIKSYLACRNHLVKISTQLKNSLHSYKLASEVINNQVVITEITRQLDSVKSSIRNLESELKKLLRMDESVYKNYKLINSVVGVGPIIAAHMVVCTANFQSFPDARKFNCYAGIAPFSKNSGTSIHTKSKVNNMANKQIKKLLSNGANSAVQNDPELRTYYIRKLNQGKHHNSIMNAVCCKIVARMFAVVSRQTEFVHLYSHSCNTHAC

SEQ ID NO: 505113 - protein, 367 aa, unidentified
MLTSIALTYIGLDVHKDTISVALLRPGDSVPDQEQIANRPEEIRRLVRRWGEPDDVRVCYEAGPCGYELQRLLGSLGVDCTVIAPALVPRKPGERIKTDRRDARKLCRLFRAGELTAVRVPPPDEEAVRDLLRLREDLGEDILRARHRLSKFLLRHGRTFDRKSWTQAHLRWVREQSFSVALLERLRDEHLAAIEMRILQRDQIERELLRIAAAEPYAQAVRRLSALRGVKELTALTVTVEVGDFRRFGSAREFMGFTGLVPSEHSSGERRHLGAITKTGNSHLRRVLVEAAWSYQRQPARNVRHRPRLQDQPAPVLAFALAVEQRLHERYWRMVNRHKLSTVAAVAVARELAGAVWALMRLEPAVS

SEQ ID NO: 505114 - protein, 402 aa, unidentified
MLIGWDWAAATHDVTVMDATGALVERFALDHDERGISEALARLARHGRPEDLPVAIEATGSLVIDRLLEAGHPVVPIHPNAFHATRPRWGASKAKSDPGDSFKLADYLRTEGHRLRRLRPLDQATCELQALVRMRQDHVGARVAATNQLRSLLDRHWAGAVGIFARLDSEIALAFVEDYPTPASAERLGEARMAMFCRRHSYCGRRSPTELLERLRSAPQARSPIGEETIAELVRAQVRLVRVLLDTIADLDRAIGATLLVHPKAHLFAAMPRIGEINLAQVIAEVGPILDRALDVEHACAEIGAAPVTKASGKGRAVTFRWAVNTNARHALGIYADNSRHASPWAAKAYAEARRRGKRHPHAVRILMRSWVRVMWVCWRSDTPYDPSLHGAERRLKEAAVA

SEQ ID NO: 505115 - protein, 342 aa, unidentified
MYFIGLDVHKKTISYCVKDAAGQVHREGKIGSTRRELDCWIKTLPQPRTIAMEATIFTGWIYDHLLPHAEKVKVAHPLMLRAIAAAKKKNDKIDAGKIADCLRCDFLPECHMVSTEIRDRRRILRYRHLLVRQMVQMKNRVSGLLMETGVEHNKQRLHKVGYFHELLSTNQEVHPCIRPLLKISRETIERCQKTEYALVSSLQRDPMLAERIKRLRTIPGVGPITALTWALEIGDVSRFRTIKQAISYCGLCGEEKSSADKMMRTPLSKQRNKHIQHVLIEAAKLAPRQSYELALVHEKEMQKGNRNRATLAVARKMVVYLLAVDRQQRDFVPAEERRAGAA

SEQ ID NO: 505116 - protein, 371 aa, unidentified
MTAFFAGLDWASQSHAVCIIDDHGNVRERVDIAHSAAGLTQLQRSLVRDERPPIAIERPSGIVVDTLLDAGFTVIPIHPNAVKATRPRYRSHGAKSDASDAYLLADLLRTDGHRFAPLPAQSDDIRALRALVRGRDDVVAARTQPANQLRSLLASFWPGAAEVFADVDSPIALAFVERYPTPESAHRLGPKRMAAFCAQHAYSGRRSAQDLLARLQQAPAGVCAEMEMEAKGELARSLARALSQLVEQIRLLSSRIEHHVESLDDGRIVMSFPRAGRICAAQILAELGSVRERFANEARLAAEAGIGPVTYPSGKSRTVTFRCACNHRLRAALTCLADNSRHASAWAAHVYNRARARGCDHPHAVRGLARA

SEQ ID NO: 505117 - protein, 379 aa, unidentified
MGKGIRFVGLDVHKETITAAVAGPDGSVVQMGKIPNQPEAVRRLIKRLGPVEKLRVCYEAGPCGYVLYWQLTGFNVHCEVVAPSRIPHEPGDRVKTDRRDARKLAMMYRAGLLTAVWVPDAAHEALRDLVRAREAAKKDELRARHRLGKFLLRSGRRAPEGVQAWGKAHRRWLDGVSFERPEQEVVFLDYRHEVDHAVERVGRLERAVDEAVERVPAWQRAVIDGLQALRGVSKVTAVTVFSEVGELSRFDRPRLLMGYTGMISREESSGKRIKRGPITRTGNAHLRRVLIQAAWAYCRRPKISPALKKRQVGVSEEVKEISWKAQHRLNGRYRHLISKGKLPQKAITAVARELVGFIWDIGVRVEDQVRRQKQGHAAA

SEQ ID NO: 505118 - protein, 361 aa, unidentified
MSESMALVGLDVHQAQTVAAVLDPSTGELRVNRLRGGPASVVPVFLEELDRPVAAVYEAGPTGFALARVAGERGLDIRVVAPGSIPRAPGDRVKTDRRDAKRLVRLFAAGELSFAFVPSEADERFRDLVRCLEDARKDLMRSRHRLSKFLLRRGERFPCKAWTQPHEQWLCKLRFEDAPSQATFVDYLCAVQALVARRRALIGVLEQAVPESSHAQTVARLRCFRGIDTLTAAGLCAEVGDFHRFSKPALLSGFLGVVPSEYSSDEKRTQGQITKAGPPHARRLLVEAAHHYRHRPAVGLHLRARQAEQDPRVVQIAWRCQRRLHERWTHLHSRRGKRTGTVAIACAREPAAFCWEAATLD

SEQ ID NO: 505119 - protein, 500 aa, unidentified
MKLLYRRCAGLDVHKKSVSVCVRIRVRGQKEAEIEEAVFGTFTQDLERLRDWLRQHKVKQVAMESTGVYWIPIWNILEPVRWGFQLLLVNPQTVRALRGCKTDRIDARRIAEFLQYGLLRGSFVPPAPIRQLRDLTRMRVHLQGDRNRVINRMGRLLETVNIKLGSVASNIVGKSGRAMLQALAAGENRPQDLADLARGHLRAKKPDLVLALEGRMSEHTRWLLGRLLQELQWLDGRVTELDARLTEQMLPHADLVKRLCTIPGVDRLTAGVLIAELGLDMQQFPTAGQAASWAGLCPGNAESAGKRFSGRTRKGDRYLRRILVQNAWAVAHQKDCFLTALFYRIAYRRGLKKAAMAVAHRILIIAYHVIRDGSEYRESGGDYFDRLHPERTAQRLANRLTRIGFDVVLTPRHTQPPTTALDNPQPVQKRRGRPCQCAARGIPCQHGIPPKSRETQTRSEAEQPPQTQCRNCAKWGIACIHARPRQRHGHLPATGPQSTA

SEQ ID NO: 505120 - protein, 428 aa, unidentified
MKYNTQNAKIKSITEKTLIVGIDVGSETHFARAFDWRNYEYSKKPLEFSNTEAGFMTLKAWMADLAEKYGKNVVIPGMEPTGHYWFNLGAYLQDNGMKPVHVNPHHVKKSKELDDNNPNKNDRKDPKTIAALVNEGRFSYPYIPTGIYAEIRSLSNLRLQTQEEITRIKNRIARWFSIYFPEIKDVYRNPDSVSGLMILKEAPLPQDIVKLGVDGINKIWRDAKLRAAGLKRAKTLVTAAEHSIGSQEAPDSARIELKNLLNDYEIYKNREEDLMSVIEEKLSEIPHIDKLLEIKGVGLKTVSGFVAEVGDITRFDDPKQLQKLAGYAIVECSSGKHKGESHISYRGRKRLRYVLYEAAISLIARNEEFKEVHRYYRTRKENPLKKMQSVIAVACKVLRIFYTILTKGVTYDGAKMMQDIKRPQMLAA

SEQ ID NO: 505121 - protein, 345 aa, unidentified
MQLQTVGIDLGKTVFHLVGLNERGEVVVRKKFSRKQLLHFTANLKVKLIGMEACGGSHFLGRALREQGHEVRLMPAQYVKPYVKTNKSDYIDAEAIAEAVGRPKMRFVPIKSDDQLDLQSLHRVRERWVARRTAVINQIRGLLLERGITVRQGRRHIDAALPGILEDASAKLSGTLRALLAQLRLELDHLQMRIDEADAVINKAAGENEACRRLVAIPGIGPVTATAIIAAISNGAAFKKGRGFSAWLGIVPGEHTTGGKQKLLGISKRGNSYLRRLLVQGARAVLQQRAKQSSGLSAWLAQLTTRVHSNVAAVALANKLARMAWAVLAKNEPYRPPMLVGAATA

SEQ ID NO: 505122 - protein, 357 aa, unidentified
MKKRLNADMANVNGKTVNVGIDAHKQSWHVTALIDGVVVSAVTIKPSYSVLQKLLAQFKGAKIRIAYEAGPAGFNLYDNLTADGIECIVVPPSLLPVESGNRVKTDKRDSRKLAQYLEKNLLKRVYVLTKQERAHRQFLRTRRQLSNHRTDVMRQIKSLLLFHGIPLPGVNAGFWTPTFLASLRAVETEEYLSRSLNTLIDLYEYLTQQVKQLTKEVRGLARTEKYEKRVKLLKTIPGVGMLSAMEILTELQDVSRFPTADQLAAYLGLTPSQYSSGQMVRMGRITHMGNHRLRMRMVECSWILIKKDSELHKIYEAIKKRRGGKRAIIAISRKLIIRIRRILLDGVSYRTECRTTA

SEQ ID NO: 505123 - protein, 361 aa, unidentified
MRLYTHSHRFYCGIDLHARSLHLCILDKDGAVVFDQNLAARPEALLKAIAPFRDDLVLGAECMYAWYWVADLCSREQIPFVLGHALYMKLIYGAKAKNDQIDAGKIARLLRGGNFPLAYVYPKGMRETRDLLRRRTYLVRERSALFTHLQILNGQYNLPPFPKKLSFAANREELQIADRFADPSVQQSAAVDLAVIDVLDEQIGKIELYLTRTAKVDDVQTYHRLQTVPGIGKVLALVLLYEIHDIHRFAGEGPFLSYARLVRPGHESAGKVVGSGGQKIGNAHLRWAFGEAACLFLRASERAKKWKEKQLKKRAENRVLAVLAARLARAVYHLWRKEEAFDETRFWQGQGVSGPTQGKGR

SEQ ID NO: 505124 - protein, 411 aa, unidentified
MQVLHSCCCGLDVHKRFVVACLIRCDEEDKPHKELRRFDTLTPELLHLVDWLQEAKCSHVALESTGVYWRPIFNLMEGLFEIVLVNAQHMKAVPGRKTDTKDAEWIADLLQHGLLKASFIPPQPQRDLRDLTRYRSSLKQERTQHVNRVHKLLEETNIKLSSIFGDMMCKTGRAILHAMARGEENPEVLADLSLFWAPHKREALVPALQGCMRAHHRFLLHELLAMIETLERAIDRLDREIDERLAEHKETLERLDEITGVSQRVLETLFAEVGWELDAFPDAAHLASWVGICPGQKESGGKQMSGRTRKGNRYAKTILVQAAHAAGKTKNTYLGAQYRRLSKGRGIKRAAVAVGHSILVIYYHMLTTSQHYEEKGADYFLQHDQQEKQRRLVKQLERLGYTVNLTPQHAV

SEQ ID NO: 505125 - protein, 392 aa, unidentified
MAQRKPKSSRSKPTLPPQLAAVNLHAAGIDIGAEAHWVAVPPSDDLQPVRCFGACTADLEALADWLATCGITTIALESTGVYWIPLFELLETRGFAVLLVDPQQVQKIKGRPKSDRHDCQWIQRLHTFGLLAGAFRPADQICVLRSYLRQRAMLLTSAAQHIQHMQKALTQMNLKLQHVVSDITGVTGLAILRAILAGERDPAKLAQLRDYRCKHDEATIARALLEPLHRISGVDLTQIEGIDETTSLVILSEIGLDMSRWPTVKHFTSWLGLCPHHRVSGGKVLSRRTKPCANRAATALRLAAACLHHSQSALGAFFRRMKARLGTPKAITATAHKLARLVYSMLKHGTAYVRQGMEEYEQQYRDRMVQNMTRRAKALGYTLVKATEGTPV

SEQ ID NO: 505126 - protein, 443 aa, unidentified
MMQGCQPHHSPYQGGLQMNCTQNYKIDQVTEQTLVVGIDIAKRTHYACFVDDRGRVLRKSFPIFQSKEGFQQLYKAIQGAMQAFGKSEVIVAVEPTGHYWLNLAYFLEEHGIPLVMVNPAHVCRSKELDDNLPTKHDAKDALVIARLAKDGRFLVPRLLHEIEADLRVGSTLKEKLRKEQTAVKNAIVRWTDRYFPEFWTVFRDLGKTALSVLEWTPLPADMAGRTAEELIEVYRQSEGLKCPQKAKIQALINAAKDSIGVTEGTTMARFEIAALVRRYRQLEAEIAALDAELKALVQTTMEYQWLKTVDGLGDATIIDLLAEIGSFAHYRDPRQLVKLAGLTLKENSSGQRKGQKHISKRGRKRLRSVLFRAVIPLIRHNEAFRELHEYYTTRPVNPLTGKQSIVALCRKLLNVLFAICTKKQAFDAERMKQDVLSQVQRAA

SEQ ID NO: 505127 - protein, 350 aa, unidentified
MTKLMAGIDLHSNNLMIGLVDETGKRLKHQKLDCNLQEVLQFLKPLKTRLESLAVESTFNWYWLVDGLRAQSYPVCLANPAQIEQYSGLKHADDKDDAYFLAELQRLNILPTGYIYDPVLRPVRDLLRRRMGLVHQRTSLMLSFKSLYTRTTGQAMTLSELKALDVAKTQALYEHPANQLISCLQKKHIDLLTESIERIEGAVLKCAKELPLYAPLQTLPGVGRILGLTVTMEVGDIGRFKTPGDFASYCRTVDSKRLSNGKKKGDNNQKCGNKYLAWAFVEAANFARRYDKACRRWYDRKAGKTSTVLATKALACKLAKAAWYVMAQGVAYDAKRMFPELASQESNEVN

SEQ ID NO: 505128 - protein, 344 aa, unidentified
MQIASIGIDLGKTTFHLVALGERNKVLARKKFSRAQLLAYTAKIPSALIGIEACAGSHFMGAKLREQGHEVRLIPAQFVKPYRKSNKNDFKDAEAIAEAVRKENMRFVPIKTQEQLDIQGMHRVRDRLVQRRTALINEIRGFLLDRGITFAADPKHLRKNLPAVIEDAEQNLTPRLRWLLDRMWQEWKQLELDIETMSDELERISEENELCRRLRKIPGFGPLVSTATVAAIGNGAAFRCGRDFAAWVGVVPRQYSTGGKQKLLGISKRGNRYLRRMLIHGARAVLFRVKYDTGGFGEWFRRLAQRAPRNKVVVAIANKLARMAWAVLSSGKEYQYQRPQATAA

SEQ ID NO: 505129 - protein, 350 aa, unidentified
MKTTAKAVPVTIGLDIAKNFFQVHAVDGSGQVVLRRKLSRGEVLGFFEAQPKVLVGIEACGTGHYWAREIAALGHEVRLLPPTYVKAYVKRGKTDAADAEAICEAVTRPNMHVVPIKTPEQQAALMMHRARELLVGQRTALVNALRGHLAELGIVTAKGIHRVADLLAELVGVENTKIPPLARASLRCLAAQIEAVETQIDELEALIIEWHKGNEASQRLAKIPGVGPITASAVVATINDASHFTSARHLSAALGLTPRQNSSGGKARQGGISKAGNTYLRRLLFIGAIAVIRSKRAQEAGSWLARLLERRPAKVVAIALANKTARVIWAMLRSGEAYRATTRAATAAPA

SEQ ID NO: 505130 - protein, 343 aa, unidentified
MGEVITLGLDIAKSVFQVHGVDHTGTVVMRRRIGRSKVLEFFAGLSPCLVGIEACPSAHYWSRELQALGHTVKLMPPSYVKAYLKRSKNDANDAAAICEAVTRPSMRFVPIKTQEQQTGLMLHRTRQLLVRQRTMLSNAIRGHMAELGIISAKGRNGTAELLQIIGNVADDRIPPVARFCLDLLAHQYLTLNAEVSSIDKRIHAWHRSCEASRRLEGIPGIGPIVATAMVAEIGDWGAFRSGRSLAAWIGLVPKQHSTGGKERLGSITKQGNRYLRWLLVAGAMAVIRYARAHGTNRAWLTRIMDRRPAKVAAVALANKIARMAWAIMVRGERYREPKLPLAA

SEQ ID NO: 505131 - protein, 361 aa, unidentified
MNTTTVAVNLAKTVFQLAVADASWRVIQTHRLTRSQFERWFVNREVGLVIMEACGSAHHWARWLNGLGIEVKLLPAAYVRAYVRRNKTDAADACALLEAARCADIVPVRVKSLEQQSLQGLHRIRSLWMSTRTSRINALRGFCREFGLTVPPGARTGIEAMSRTLADPNSAIPALIRGPMRLLVEEILVLETRIAQLERELAELARHSPACTTLLTIPGIGLLTATALVAATGGEVTHFKDARHFASGFGLTPQEHSSGASRTLGRISKRGDRYLRMLLTHGARSVLRAASVTRQAGRPLDGLRAWAPAVQGRSNHNKAACALANKLTRICYATLRDAAPYGQPSSRPQRKLTRTAYALAA

SEQ ID NO: 505132 - protein, 371 aa, unidentified
MREHSTDTVWVGMDVHQDSITAAILYGDHPEPRIERLPGDLNAVRRMFRRLSGHGTPRSCYEASGAGYVLQRCLEHDGFHCEVIAPSLVPRKPGDRRKTDRLDAAHLVQHYRAGNLVPVTVPSAEQEEIRQLVRTRLAVQSHVVRLKHRIVRVLATHGYRHTGTRSNWTKAHRVWLRKLHRELDGPLRTILAFHLEHLEYLEAQKHALEREIDIYARSAPFREKVAALCCFRGVKTLTAMTLLTELGDIKRFARATGLMAFAGLVPSERSSGNVQRRGSITKSGSQELRRVLVEAAWHYRKRAGADLILQRRRMGQNPQVVAIAVKAQHRLQRTFWKIAARKHSCTAVTATARELCGFIWSALWAIELQEA

SEQ ID NO: 505133 - protein, 421 aa, unidentified
MRAIGLDVHRDFCEVAISEAGEVRSAGRVAARPDALELFAQSLTSDDQVVLEVTGNAWEIARIIEGHVKRVIVVSPSDTGIRQARAKTDRLDARTLAKLLAAGSLDSVWMPDERTRVMRRRLARRSQLVAARTRAKNEVHAILMRRLKGRPEVSDLFGKQGRAWLAELELPVEERETLDSGLRQIDFLDGEVALVERAIAHDALNWPDARRLMTVPGVNLIVAVTFLATVGDIHRFPDRRKLVAYLGLDPKVRQSGDAPAAHGHISKQGSSQARHALVEASWSAVRTPGPLHAFYQRIRARRGHQVAICAAARKLACMFWAMLWRQQDYAFGQPSMTARKIRRLEITAGAPRRQNSRGVWAAAIAMREAERDLARQAEQAYAQTVCDRQAAGAIKTGASATPGRASQQPSKGKAARQTTSP

SEQ ID NO: 505134 - protein, 422 aa, unidentified
MISFPRRERAQQAAAVVGVDAGKFSHTLVIRPKGQPDSKPFSFPTTRQGFEAAVAFLRQQAPGAALSKILVGIEFAGNYGFTFAHFLAQLGTSVVSVLPAHTKRWKDVAHNQPLKTDAKDAGTITDLLAQGHFVTFPFLAPAYADLRYLVAARERLSLLRRGAMTQLRSLLQVVFPEFEAIFPLLTKKTPVSVLRAFPTPEDLLRASKAKVLRVLHTASRGHLGAETYEQLITVAKATLGLPGAQGRLRQEISLVLERLALFEAQINALEAAMVDALLGVPETPFLLSIPKIAPVTAAVFLGSIGDPQAYESGQQILRLAGLSLVERSSGILRGTKRISKRGRPLLRQAAYMFAVRSITKDGLFRAEYEALCARNGGQKMKAVVAVMRSGLRLVYSVARDRRLFTAEPPVWRERPARRVATA

SEQ ID NO: 505135 - protein, 458 aa, unidentified
MSQKRRKQIRSRQPEWSLNLEVVHPNAAGIDIGNESHYVAVAPDRDPNPVRQFACFTEDLHRLADWLKSCGIVTVAMQSTGVYWLPVYEILTEKGLEVFLVNARHTKNLPGRKTDVQECQWLLQLHTFGLLNNSFRPPEEICVLRAYWRQRGEHVAAAGACIQRMQKVLTEMNVQLANVISDISGLTGMAIIQAILNGERDRYTLAVLADPRIHATREEIARSLEGNWRKELLFILQQERNLYQIYQQQITECDTALAAHLQTLNDKVEPGSQPPAAKPNKRAGSNAPTSFDMRGELYRISGTDLTQIDSINIMTAQTIIAEVGIDMSRFPTEAHFASFLGLCPDNQITGGKVFRRGTRHVQNRAATALRMAASTLWRSKTYLGAKFRRLRARLGAPKAITAMAHMLARLVYRMLRYGEQYVDKGINYYEEKYRDNEIRSIQKRAKQLGLQIALSPAP

SEQ ID NO: 505136 - protein, 437 aa, unidentified
MSDKKPVEIRVSVDVGYRRHSVAIGLPSGEVLEEFEIAHRPEGFAEFFSRIEKHQKVRDCEVAVAMEGFNGCARPLDAMVRRRGYRLYNINNLKLARFKEIFPGAAKSDRIDARKGLELFQLSDHLPLAKEVLQEVKGTPRENEVLKRLTRRRRRLVDERVRVISNLQTDMQAVCAGLLEITKNAGNQWFLNFLVSAPTLSQLARLRPATLLKVPAVGRKYARLIEDWQKRAHFSEEVEWVSEMIQEDAKRCLELDEKIKALRAKIKEVAKDSKIAKTLLSIPGFGTICTAELAGEIGTIERFSKEGSLALYLGMSTLDNSSGKYQGSKQPKHVNTRAKAAMMVALDRHRKVVPESQRYYEKKRSEGKKHNQAIRALGRHLCRIIYKLLKEEREYEIRPEKGNTKTKVSPRSLIKTQIRKPKISAKGKNNKLYHQSA

SEQ ID NO: 505137 - protein, 309 aa, unidentified
MEHFVGIDVAKDRLDVHLRPSQETFAVARDGEGLAQLVGRLQTLAPQLVVMEATGGYETIVASAVVAARLPLAVVNPRQIRDFARATGKLAKTDRIDAAAIAHFAEAVRPTARPVADAEAQALGELVARRRQVIEMMVAERNRRRRVTQSRVRRAIDRHLELLQTELSELEHDIDGAIRKSPAWQADADLLASVPGVGKATLRTLIAALPELGRLDRRKIAALVGVAPINRDSGTMRGRRSIAGGRPTVRTALFMAALVASRANPIIAPYYVKLRAAGKTAKQALTACMRKFIVILNAILRDRKPWQPA

SEQ ID NO: 505138 - protein, 421 aa, unidentified
MEDITEETAELVARVAALDIGKAELTACVRVPHEDKPGRRQQEVRTVATTTRSLLELRDWLICQGVTLCVMEATSTYWKPPFYLLEDAIECWVVNARDVKNVPGRPKTDRLDAVWLAKLAERGMLRPSFVPPPWQRELRDLCRYRRTLVQERTREKQRAEKLLEDTQIKLSSVISDIFGKSGRDMLDALIAGQRDPHVLAELARGSMRGKKSVLQEALTGHFRDHHGYLLAMMCDRIDALTAQIEELTGRIDEAIAPFAHQVAQLDEIPGVGKTGAQELIAEIGTDMARFPTAAHLVSWAKFAPRAKQSAGKSKPAATGKGSPWIAGILGEAGIGAARTKTFLGSRYHRLARRRGKQRALVAVGNSILTITYYLLSDPAARFTDLGPDWHDRLSPLRRKRQLIAELERLAGKKVLLQEAAA

SEQ ID NO: 505139 - protein, 456 aa, unidentified
MKIPQSTIRLLTGRLVKILLYREVSIMKSNTQNAKIEAITEKTLVLGIDVGSETHYARAFDYRGIEYSKKPFKFSNTEVGFATFKEWILDLKERHEKDKVVPGMEPTGHYWFNLGKFLQDNEMKPVLVNPHHVKKSKELDDNNPTKNDRKDPKVIAGLIREGRYMIPYLPDGVYADLRTASNIRFQLQAELTRIQNRISRWFNIYFPEYKTVYGKPDAKSGMLILKAAPLPEDILTLGIDGVNQIWRDAKLRAVGKARAKTLIKAAEHSIGSKEGTMSARMEIRMLLEDYESQNMRLQEVMVLIEELVKEIPMAEKLLEIKGVGIRTVSGFLAEVGDISRFNNPKELQKLAGLALVENSSGKHKGKTTISRRGRKRLRYLLFEVAMSLVAKNPEFRELHNYYTTRRLNPLKKMQSLMAIAAKLIRVFYAMLTKGVDYDPKKMISDIKRPTVYLQAA

SEQ ID NO: 505140 - protein, 400 aa, unidentified
MDKDDGSRLQEFRQLKKEIRGSSEHMVIGIDIAKDHHVAFFGAAMGKTLLKRLSFDNTREGFDKLLFHADTISSQHLLKKIVFGMEPTADYHKPLGEYLIRRGHMVVLVAGTAVKKNRELLDGRWDKHDLKDAANVADLITQGKCLFYEFTSPSLTELRSLISLKRKLKKQEHAYRVRIRNHVIAQYFPELDTYYTCGEGPSIVKWCIDPQELAALPFREFVTMVSSRNGGEKQQRRLGEIHRKAGISIGCRVHPQVVFEAKLLLGGLEQIHTMIRETDTRIAGVCNTFPEYPFLLSIPGFGPDTSAKVLGALGDPHRFENHRQVLKMAGLDLSAERSGRRQDVTPVISKRKKADLRNSLVPASRLTETYTYFYTGPPAPLQCPWSGASPETPSGLFPVL

SEQ ID NO: 505141 - protein, 340 aa, unidentified
MIGIDPHKGSHTAVALDDQELELASLRVRAGRRQRQQLLEWATPFDVRVWAIESANGLGYLLAQQLLAAGERVLDVPATLASRVRVLSSGRSNKNDPNDARSVAVAALRSPAMTEVRCEDHVTVLRLLAKRHIDLGRWRNKVCCRLHAHVAELVAGGISTEIVVAQAAELLAGLHPRGVAAVERHRQALELVEDLARIDDQLRASRRRVTGAVAASGTTLTELFGVGPINAAILIGYTGDPRRFATQHHYAAYNGTAPIEIASAGRTIHRLSRRGNRQLNHAIHMAAVTQIRHTHSPGRAYFDRKVEEKKTPKVALRCLKRRISDSVYRRLVADARRARR

SEQ ID NO: 505142 - protein, 323 aa, unidentified
MTYIGIDISKDSFVAAFPTVSGYQTRTYPNTVKGIRKFIGSLSVTEHHCVMEATGNYGFLLLYLLEGQGIAASMVNPKQIKHFSRMMMTVTKTDTKDACMIAMYGEKMNPPAYKMPSETLLLLKQKKAIIRQLKKQLTASKNLKSSLVVLPFQDKNGMKVLNKTISFLASQIKSLESELSDLASSEFDRQVKLLTSIKGIGITLATALIVATSGFACFDNAKQVSRFIGVCPTYQQSGTSVHVRGGINRNGDANLRSLLYVATWSALRGNTACKDCYARLKANGKPSKVALIAVANKLIRQAFAVIKSDSPYVDGFVSNHQIK

SEQ ID NO: 505143 - protein, 315 aa, unidentified
MERSSAAPVFVGIDVAKDRLDVHLRPSGEAWAVGRDAAGLATLVERLAATSPQLVVLEATGGFEVTAAAALVAARLPLAVVNPRQIRDFARATGRLAKTDRLDAAAIARFAEAVRPEPRPIPDAAARALGELVARRRQVVEMIGSESQRRRQLREPKLVRRVGAHLAWLQKELSEIETDLDDAVRTSPAWRATEDLLASVPGIGKTSARTLIAELPELGTLDRRKIASLVGVAPVNRDSGAFRGRRMVLGGRARVRTALYMPTLTAIRRNPAICALYARLVARGRPAKVAITACMRKLLTILNAILKTQTPWQHP

SEQ ID NO: 505144 - protein, 350 aa, unidentified
MYYAGVDYHKKYSYIVIKDEQGKRVHKGMVDNTREEFHKFLQPYQPGKAALEATRNWGLIYDWLEEILDDVALAHPLKVRAIAEARIKTDKISADILADLLRSNLLPEAYVPDKKTRDAKNILRQRMFFVRVQTMVKNRIHTILDRHPEILSKAPDVSDLFGASGMEWLKGIVLPGEDNKLLNSELELLEVLKQKISQSNGIVNELGKGDNRAKLLRSIPGLGAFFSVLVAKEIDDISRFKGDKKLCAYAGLVPSTHASGGRVFHGRIIKTGNKWLRWAVIEAVPHAIKSDPKLYAYYERIRIKKGKNAAKVATARRLLTIIYRVLSQGRLYERRTQKGRDRAPVALIAS

SEQ ID NO: 505145 - protein, 428 aa, unidentified
MNTPTSNPPVVAWVGLDWADQRHEIRLQAAGSPRLESFSVEQKPEVFQAWVAELRARFPQGRIALALEQSRGAVIYALMNYDFFLLYPIPPKTLARYREAFASSGAKSDRSDADLLLELVRTHGDRLRAWQPDDALTRQLRLLVEYRRKTVADRTRLTNRLTDLLKTYFPQALDWLGDLRSLAACEFLGAWPTLEAGQGGNRPALRRFFHDHRRLSAEEREKLLDQIRHARPLTQDRAVLEASELMTQTLVEQLRAVITALARLDQALEELFGQHPDQQLFDRLPGAGEALGPRLAAAFGTDRDRYQSAEEIQQFSGIAPVTAASGKMRWVHWRWACPKFLRQTFHEFADASRKKSLWARAYYQQQRQHGVSHHAAVRALAYKWIRILYRCWKTRTPYDEALYLRALQRRHSPLWLAAASLSTQEAHP

SEQ ID NO: 505146 - protein, 326 aa, unidentified
MHGYRCDKEVGILGIDISKDHLVTSEGRVYENNKKGYEEILKVKLNTIVVEPTGAYSIKPCQYFKEKGIKILQVSPNILWKEKDLRGKKTDFYDAEKLINMANKAKEYNYNPLKELVTLYIFLKDLEVKYKNRVKRALFLVSDEEKISKEMLEEFSKGNFKIQLYNLEYTKIVLEEIEVLSKALLETSEKIKEVEKMIQLQSENHVLLTIPGIGKLSSGIIIGIVGDIKRFPNPESFVAYCGLDPIVERSGKATVSKGISKKGNKYLRSLFYFLAEMNYSRNPTLLEFYENHKEKLKGKKLYTALARKLARIVWSVWYNNKPYEPK

SEQ ID NO: 505147 - protein, 411 aa, unidentified
MEVVHRRCAGIDIAKRGATVCVRVAGSSRRRTTETVRTWGSMTNQILALREHLIAERVSCVAIEATGDYWKPFYYLLEDAGFELLLANARHVKNLPGRKTDVSDAAWLAQLAAHGLVRGSLVPPPPMRELRDLTRTRTGWVRDRSREIARLERLLEDAGIKLSSVASELNGVSCRAMLTALIAGERDPAVLANLAKRRLRPKIPMLVEALTGRFSDHHAYLAGMHLEAIDRHTARIADIEQRIEALMEPFQAFRELICSIPGISRTVADVIIAETGGDLSRFPTAAHLTSWAGVCPGSHESAGRVKSTKTRAGNPHLKGALGIAALAVARNPYSSYLGAKYRRIASRRGPSKAIVAIERAILVIIWQMSRTGAFYQDLGPDYQTRHDPERAKRRALSQLATLGYKVTIEAA

SEQ ID NO: 505148 - protein, 359 aa, unidentified
MGACVRALELEEVPMPVVGGLDIHRKQITFDYLDTETGQVQRGQVSPADREHLRAWLARFAGREDVAFAAEGCTGWRYVAEELAAAGVAAHLAEPAGTAFARGRKRHAKTDKTDCRHLRMLLAEGRLPECWIPPGRILECRALLETYHDLRREHTAWAQRIHAVLFHQGAPALGEGMLRSEQGLAALRDVSAACLSPAGQLQIATALDMTDALDTRLHELRHQLLHEARHLAGAKVLAARLYGVGPFAALAMTCWLAGEGRFSSSRQAVRFAGLDVTVHSSDRKGPPGRLSRQGPPVLRWAVYEAAKTHARSSAPDYRYYAQVKDRCGGKRAALSEARKILRQACHILAELGDDALAAA

SEQ ID NO: 505149 - protein, 337 aa, unidentified
MKFCGIDLHSNNSVVVVTDETDRVLISRRCPNELTQILPLLEPHRGELFGVVVESTYNWYWLVDGLKAAGFEVKLANPVAMQRYNGLKHSDDKDDAAFLAHLLRLGILPTGYIHPPQERALRDLARKRIQLVRNRTQHILAAENIMARQSGHRLTCNEVKSLVATSVDRLGLSTEVALAMKANVAIVQALQTQNDVLEERLLHEVSLRPEFFLLKTMPGVGEVLATVIMLETGDIERFADVGNFASYARCVKSAHYSNGKKKGEGNTKNGNAYLIWAFIEAANFARRFSADAKRFFEKKKAKTNAVVATKALAHKLARASYHILKEKQPFDAKRCFA

SEQ ID NO: 505150 - protein, 348 aa, unidentified
MVILGADLHKRSHTVVVIDETGRKLAEKTVGATVEGHLELRRWAAAWRERRWALEDCRHLSRRLEADLVRAGEHVVRVPPKLMAGARRSAREPGKSDPIDALAVARAALREPDLPTATLEGPERELRLLVDHREDLVGERTRHEARLRWYLVELGVPEPAPRSLGRTTTQTALEAALAGRTEPVARFARALLARIIELTGAIRVLEREIESFARSFAPTLLALPGCGPLTAAKLVGEAAGIGRFRSKEAFARHNGSAPVPVWSGNTVRHRLSRGGNRQLNAALHRIAITQMRIDGRGRTYLDHRRTAGDTKTEAIRALRRRISDEVFRRMRHDEALRATERAPLATAA

SEQ ID NO: 505151 - protein, 401 aa, unidentified
MPDGIRWVSLDVHARESTFAVFDQATGEVVTRRVVGRPHELLPVLRDVLRPARMVYEAGPTGYGLVRRALAEGIELVVCAPSKTERPPADRVKTDKRDAIRLARLLAAGELTLVTIPSVEREQLRDLVRCREDIRVDLMRARHRIGGFLLRREIYWEGPGEAWSRKHRSWLTSVRFADQASQATLADYLHAHDVLIARRDQVEADLSKVAVSAPCAQAVARLRCLRGIDTLSALGLCSEIGEWERFDHPDQLASYLGIVPSEHTTGAQRRLGSITKAGSTHARRLLVEAAYHYRRGPAVGEALERRQRGQSPQVIHIAWRAQRRLNARWRQLKDARRKPNGVVAVAIARELAGYCWEIATWSPHPDTVPPTSLPGGDPLTHTPSISHKHTPNTRRRLTNSR

SEQ ID NO: 505152 - protein, 342 aa, unidentified
MKFYCGIDLSARDCHVCVIDEQLKVMVQQKLRNELPRICRLLEPYQAHLKIVVESTFNWYWLIDGLQAAGFEVVLAHTLGLYLITGAKVKTDRRDAYSLAKLLLVGAVPAAYIYPVETRPVRDLLRRRARLVQVRAGEYGSLRRLLLRQGILSSQQQEIKTATETELEQWFEHPLVRLHASQELQRIELYSQQIAELEKTILALAKTERSYELLLKLPGVGQTIALTILYEVGELTRFANAKVFSSYCRVVPGIAQSGQVTRRGRASKQGNHYLKAAFSQAAVHAVRCYPKVRRYYERQLKRHQGRGRQMVCYNIIAHKLAQAAFHVLKEQTEYRAELLFGP

SEQ ID NO: 505153 - protein, 403 aa, unidentified
MNNVAGIDVSKGKSMVSVLRPFGEVVAKPFSIGHTGSELKELADYLKSLDGETRVVMEHTGRYYEPVARFLHDEGVFVSAVNPKLIKDYGNNTLRKVKTDKADSRKIARYGIDNWAELRQHTPMDTIRMQLKTLNRQQSLYTKTKTMMKNNLIALLDQTYPGVNALFDSPVREDGSQKWVDFATAFWHVDCVRNMSLTAFAERYRKWCKRHGYNFSQSKAVEVHTGAQDLIAMLPKDALTKTMVRQAIDALNAVSASLERLKAEMQALAAQLPEYPVVMAMHGVGDSLGPQLMAELGDVARFTHRNAITAFAGVDPGADQSGTHEAKSTRVSKSGPPELRRALFLVMDCLLKTQPQDDPVYRFMDKKRAEGKPYLVYMTAGANKFLRIYYGRVKEYLASLEGN

SEQ ID NO: 505154 - protein, 335 aa, unidentified
MSIIGCDLHTRYQVIAMLGTEGGEVVTRRLEHENGEAKAFYAALPKPSLIGIEATGYTQWFERMVAELKHELWVGDPAEIRARAVRRQKTDTRDAEPLLDLLLTKRFPRIWVPTPEERDLRQLLKHRDKLVRTQTSVRNQLHFLAMSQGLCRRQKLWSAKGRAELEALSLGPWARQRRKELLELLDSLGPRIEELNQAVGAQAGRRPECPELMKVKGVGPVTSLAYVLTLGAVSRFPNSRAVVSYLGLNPGEHSSGGRQRLGHLSKQGNQMLRWLLVEAGHGAAQFDGELRRKYQRLKFRRGGAVASVALARHLAVRLYWTLRQASTTPSAGSHA

SEQ ID NO: 505155 - protein, 341 aa, unidentified
MELKRIAIDTSKHIFTLHGVDAQGRVVLRRELRRDKVEPFFARLPPVEVALEACGGSHHWGRVLTSLGHRVRLVPPQYVKPFVKRGKNDRNDAEAINEAASRPAMRFVPVKSADQQAGTLILKTRDLLVRQRTQLINAVRGHAAEFGLVVAQGTSKVAALLDRVAGDETLPAEAREIIAILGEQIKDLDMRVTALEARMKQAHKANPVSQLLEGIPGVGPIGALSLTLTVDPGQFQSGRHFAAWLGLTPRERSTGGKQRMGGISRAGDERLRQLLVIGATAVIRHVKPGSRNASAWLMSLLERRPRKVAAVALANKMARVVWAMMTSGEAYRGAHVVPASV

SEQ ID NO: 505156 - protein, 319 aa, unidentified
MAQNDPVVVGIDVAKDKVDACVRSLSLRLTCPSSTQGRRKLIGWLRKHQVNKAIMEASGGYERDWAKSLREAGIEVRIVDPKRVRSFAQSAGRLAKNDKIDAEMIGWFAETFSQAPGQMHDAMQEELAALVKARIGLVELKTRLQSQNEHAAPGPVQKAQARILKSLAAEIAKLEIAISAKIKATPHLAERAEIIESVPGFAKTTSANLVAGMPELGQVSDEIAAALMGLAPYDDDSGKRRGERHIKGGRRWVRNAIYMPCLGAATQNNPVLKAFYQRLIAKGKPPKVALTACMRKLITILNTMIARRQKWDPTRYAVV

SEQ ID NO: 505157 - protein, 360 aa, unidentified
MSVTEVKPLSFKDQDFYIGIDVHKKQWTISVITMNMLVVKNLSIEPFPKALLNYMQRRFPQGNYYAAYEAGFCGFWIARQLKALGLNCQVIHPADVPTSQKERLGKNDRIDSIKIARSLSSNRLTAIYIPERLAEEYRYLNRYRKRLVQDQTRIQNRIKSTLAYFGFAIPLAYRNRRWSGAFIQWLSTVEFESEFGKIAFEELLDQLQQTRSRISRVLKKIRQLAKEVSPFNIIVPLLQSVPGIGFIGAMILATEIIDMRRFKTLEALAALVGLIPTIQSSDEKEKNLGISQRRNQYLRTLLIEAAWIAVKVDPALLMKFKDLCCRMNKNKAIVRIAKILLNRIRRVWNTQTPYVKAMVA

SEQ ID NO: 505158 - protein, 378 aa, unidentified
MSDIGSSESGAVVYAAIELSRSQWLIAVLPPDAARPSRHAVPAGDSAKLIKLFERVRHQSEQRLGQAVRVRCCYEAGYEGFWLHRVLIAAGIDSLIVDPSSLQTERRARRRKSDGIDVESILYALIAWDRGERRRCSMLRVPDPAIEDERRLTRERGRLVAESTAHRNRIGGLLMTVGIYDFQPLARDRLHRLAALVTGDGRKLPVQLAIEIRREIERLDLVERQLALLEKARRPKRHAQPTPAECRIARLMALKGVGIEIASVLGNEVFWRDFANRREIARYAGLDPSPHDSGDKRFEQGISKAGNRRARWVLIEAAWLWCRWQPDSALARWYHQRVGTATGRLRRLFIAALARKLLVALWHYLKTGNPPEGAVLSA

SEQ ID NO: 505159 - protein, 377 aa, unidentified
MTRFPASTSNEQTIHAALELSKNSWLLALQSPGRDNPSLHPIKGGDAEGLMTKLDAARERVAKLTGRTPKVTLCYEAGYDGFWLARLLEQHGIECLVMEPASLQVDRRARRVKTDRIDVESILHTLIAWCRGERHVCSMVVIPSVEQEDLRRSHRERDRLIRERTAHINRIKGLLFGQGIRGINVKARYKSLKPAALITGDGRALPDRLGREIAREIERLAQLQTQIVEIERERDKAPTPCVATERKRHNLMRLKGLGPALSSTLTREVYYRRFVNRRQVASYIGITPSPYDSGDGRRSQGISKAGNRLARVAMVEAAWLWVRHQPNSALTQWFHQRTEGQSKRTRCIMIVALARKLAIALWRYLETGLIPEGAVVK

SEQ ID NO: 505160 - protein, 327 aa, unidentified
MIESLPIVGVDIDSRSCVCFFEGKRRRRKFDNNPSGFKELREWLKSQADGPFLVCMESTGRYSEPVAEYLDQHGHMVVVANPGFVSQHKESLNQHNKTDPTDAEAIGSYARCFRDKLRLWKPLDEVHKRLRDVLGQMYLLKKTITAFSNRGQCGLFDDDVISSNDQILSHLRSELATLAQLREELFEQLPKLDEVRKIVDEVPGIGPEIADSLAVHVRFEDFRNGRDLAMFLGCGSSQWASGKQKRRGKQKKTGDPQMRSLLRQGAVSAMRSSFYRPFVERLRKKGLSNGKIVGAIARKMVLIAYALWRRKEPFDRFYEHPLAKKRT

SEQ ID NO: 505161 - protein, 427 aa, unidentified
MVDDITRFNDFCQFRTNIRSSKHHLIVGLDIGKDKHHAFFGTAYGKTLLRRLIFENNIQGYQRLAEHVTALLSQNQLEQVIFGLEPTGNYHKPLARWLISSGHEVVYVAGKTVKENRQTLDNRWDKNDTKDSANVADLMSQGKCQFYEYPEADLLSLRNLLSLRKRLKKEEHRLRMQIRNNLLAKYFPEMDRYWGSSLEENLAIVYWYLDPRKIVATDFGDFVKHVTTTDRGLRQVQRLRKIYDAAKESIGLPADKAVVFEAQMTVDRLRQNNLEITRTMKEITRVCAKLPGCDLLQTIPGFGPYVAALVLACIGDPLRFKGQKQVIRLAGLDLNANRSGKTSNSAVPVISKKGDTDLRFGLYQAALIASYHNDIFRRIFNRMLENRQGERGIRTKMRVKLAAKLLVIAWTMLKNNQPFDARRLNAE

SEQ ID NO: 505162 - protein, 413 aa, unidentified
MEVLYPRCCGLDVHKSSITACALLREQGRIRTERRRFTTMTQDLGDLVAWLLELQVTHVAIESTGVYWKPVWNILEGHFTIILANAQHVKNVPGRKTDAKDSEWIAELLQHGLLRNSYVPPEAIRDLRDLTRGRATLSQEASRIANRIQKVLEDANIKLSGVASNVLGKSGRAMLDAIVGGQLDPEQLADLALGHLRAKIPQLRLALSGKVREHHRFLLNRLLLQLRFIENEIDVLDQRLEQLGRQDPVLVAAVARWTTIPGVDRVAAWSLAAEIGVAMEQFPTAAHLASWAGLCPGNCESAGKHLSGKRRKGSPWLGRMACQCAWAAARTKNTYLSVQFRRLAAKRGKKPAIIAVAHSILVIAYYLQKKESEYHDLGSNYFDRLNADGLRRYLVRRLEALGNKVTLEAASAA

SEQ ID NO: 505163 - protein, 373 aa, unidentified
MLYLAIDQHAKQITVCVRNEEGDTVLRRQVSTRPEKIEAFFGQFTEMDAEFMAILEVCGFNDWLVEELRKWECREIVLIHPEKPSKKKTDRRDAQKLADLLWINRERLAAGQIVRGIRRVYMVTQQEREDRQLTSLRKNLGHRRTRTLNKIHRIVNRHNLIWQYPTKTFQTRAGRNWLAKVPLPVIDRLEMDTLLKEWETCDEQISLVDEEIVERANRSVPDSVLNPTQILMTTPGVGCYSGLTLASRIGPIQRFPRPRSLANYFGLTPGCRNSGNAQDRLGSITKQGSKTARFILGQLVVHILKRDPKLRSWYRSIKRRRGSKIARVAVMRRLTTIFWHMLTYSEPYTIGGPPPRLREQQTSPTPEYAAAQT

SEQ ID NO: 505164 - protein, 424 aa, unidentified
MDVMHERVAGLDVHKETVVACVRIVAGGKVSRECRTFETTTAGLEALLAWLTQSGCTHVAMEATGVYWKPVWNILNDGKFELILANAAHIKNVPGRKTDVNDAAWIADLAAFGLIARSFVPEEKIQELRSLMRTRKQLLREQTRHVQRIQKTLEEANIKLGSVISNIVGVSGRRIIEAIIVGVRNPQKLAKLADRRIKASPKALYEALHGRLTGHHRFMLQLHLGQYDALASSIEQIDAQVETAIRTKIDDEAASGQPPFHSLTGLLCTIPGIASLAATSILSEIGSDMSRFATDGHLVSWAGLCPGQNESAGKRKSSRLRKGAPWLKTLLVQCAWAAVKKKDSYYKAQFNRLKNRGGPKKAICAVAASMLTAVYHMLKNGVEHQDLGAGYFDRRPAAQKAKRLVAQLAKLGFKAELHPLAEAA

SEQ ID NO: 505165 - protein, 332 aa, unidentified
MEEITTIGVDIAKNVFQLHGVNAEGQVVLRKALRRGQMQPFFEALSPCLIGMEACATAHHWARTLIASGHDVRLIPPNYIKPYLRRQKNDAADAAAICEAVTRPSMRFVPVKNEDQQATLMLHSARELLISQRTALINALRGHFAELGIVAPQGARNVRQLIAILEDERYSPQAVRTALTPLATVLIEIEGQITKLDKALLAAHRNNDVSIRLATVPGIGPVIATCLSASVSDPKLFEGGREFAAWLGLVPRQHSTGGKPRLGSISKMGNRHLRKLFVVGAHAALYRMKKGTADTPLANWARGLLSKKPFKLLQSRLPTRLPALPGRSWQGT

SEQ ID NO: 505166 - protein, 426 aa, unidentified
MRVMFERVAGIDVHKDMIKVGIRTPGHRAWTRTSEVLEYRTFYGVLLTMAADLRKRGVTHVVMEASGVYTEPVYYALAGQGFEQVAVINPAHARALKGHKTDAKDCLRLAELFECGLLRGSYIPPQPLKDLRDLTRYRIKTVQARTSEIQRLAKALESAGIKLDSVVSDLTGKSATLMVEALIDGERRGQVLADLAIGRMRTAGKLADLSQALTGRFTDHHAALCRLHLDRIALFDAAVGGLEAKIAVKASPYRRELELLKSVDGFGDTVAQAWLAEIGPAPHEYFGTHEKLASWVTLCPGNHMSAGKRKHGHTGNAGTYIKPMLVQAAWSAIRTEGRLQARYHKLVRRFGGPKNPVAVKKAILAIAHTLLKIAYQVLKSGKPYEDLGADYYARRESPGQRRAYLLRQLEKLSPGCTITITPAEAA

SEQ ID NO: 505167 - protein, 386 aa, unidentified
MSTTTTIADPAAPILYVGLDVHKESVMIAVLPTGAATPTRVDRLPNELRALRRYLARLATTGEIRACYEASGAGYVLQRAMREWGYSCEVIAPSLIPRRPGHQRKHDRYDAKQLAHFYRSGDLTPIRIPTAAEERVRDLVRCRGTFQRELLRARHYVLKFLTRRGLRYTTGKAHWTRAHHAWLERLVRDRVVGGEDAVVFEEYLGLMRYARQRRDALDSQVAALALTPALTTPVAWLSCFRGITTQAAMTLVTELVDWRRFAKPTQLMAFVGLVPREASSDATEVRGPITKAGNSYCRHVLIQAAWAYRHAPRVGAALARRQQGHPPAVITQAWKAQHRLHKLYQHLAYRKRPQVAVVAVARELVGFLWAVMQECPPSITAAASAA

SEQ ID NO: 505168 - protein, 402 aa, unidentified
MRSPWGTIPLHPLTERLMPQPNDLSRSLSSFVQGNTLVAVIELSLSSWLIAGVVPGVERQPLKKLAPDEKELLRLLHRWRGEAVKNGCTIERIVVAYEAGRDGFWLARWLRTHGIEAHVIHSSSVAVSREHRRAKTDRLDTAMLLRVFMGWLRGECGHCGMVAVPTIDEEDAKRPHRERESLVGERTRIINRMKAALVRLGIRGFKPELRRAPKKLDGLRTPEDLPIPPNTLDELRRDLARLAMVREQIDMIEQARLARIEQAPETGPNAMVRLLASIVGVETADMLVQEVLSRNLRDRRAVARYAGLTGSPDESGSKRRDKGLAKSGNARVRRGLVQLAWRFLLFQKDSALAQWYRARTGVQGVRKTVLIVALARKLLIALWRMVTTGEVPHGVVLRQAVA

SEQ ID NO: 505169 - protein, 338 aa, unidentified
MNIVFPGIDLAKNVFQLCGLNQAGKPVYTKRTGRKELLQTLANIPACLIGIEASTGAFYWQREFEKLGHKVKVISPQYVKPFVRGQKNDGNDAQAIAVALMQPTMQFVPPKSPEQQDIQALHQARQRIVNHRTATVCQIRGLLLDRGIPIGSAVSRARRAIPLILEDAENGLSSRMRRTIAELYDLFNDPERRIHFFDKEIETVFRQSEACQRIAKVKGIGPETATAVVAAIGKGTEFKNGRHFAAWLGLVPRQHSSGDRQVLMNMTKKGDKHLRTLFIHGARAVVRVATNNNDGHMNQWVNQLKERRGFNKTTVAVANKNARIIWSMLRNETGYQVV

SEQ ID NO: 505170 - protein, 360 aa, unidentified
MNRNANHSMSVGQIIGTMNGLQVFGLDIAKQIFQLHSVDMQTGEIVNVAITRARVLERFANQVPCLIAIEACGGASYWARELTKLGHTVRLLHAKIVRPFVSGNKTDVTDARGIWLAVQQPRVKFVGIKSVSQQATLTLHRQRELLVKMRVMQINALRGLLYEFGATFPKGRNAIFKDVESKLESLQSQLPRSVADSLREQVQRIKALGEDIAKVEQRITLELKADPAMQRILKIPGVGTLTATAAIATMGQASAFKSGREFCAWLGLVPKQTGSGGKVRLGHISKRGDTYLRSLLIHGARAVATLAKEPSPWLVAMKQRRPTNVAVVAQAAKTARTIWAVTAKEQEYQRGFKSVRPQAV

SEQ ID NO: 505171 - protein, 371 aa, unidentified
MSKEKTKSISLKQQVQPLKYSIGNDISKEKFDACISVIDSEQRVKVIASRTFDNLQWGFKEYYEWVNKKCKMSIPVVFIMEATGIYYECLAFFLHKKDCYLSVVLPNKSKKYMQSIGFKSKNDKIDAKGLSRMAAEQCLEKWEAPDETVMNLRSITRQRESLQEFKTQINNQLLAYQCSEFKNPTIINQMESTIALLDQQIKETEVLVNDEINKDEGLKTKVENITQIKGVGNITVATVLAETNCFKYFKNVRQLVSYSGYDVIENQSGKHVGKTKISKKGNSHIRRIMHLPAFCVVSSNEPIFKALYERVYKRTNMKMKGYVAVQRKLLELIYTLWKNGTKYDRNYLNKTSGNDEQKLLFPLGFEKTVIV

SEQ ID NO: 505172 - protein, 351 aa, unidentified
MTVTHYIGFDVHKKSVSYCVKDAAGTIAEEGKLRATREALRQWAGKRMEPWHGAMEATLFSGWIYDTLKPFAAELQMGHPAMMKAIGASKKKNDRIDARKTADLVRCNLLPACYVATVEMRELRRMLRYRNVVVAQAVRMKNKMSGLLMEVGAEYNKQQLHGKKYFAELLGSLEEVPESVKELLRLSRGALEMFETTQQQILDKLQKDLRLVERLEVLKSIRGVGDVTALSWALEICDPHRFPSIGDAVSYCGLTSALVSSADKQQRGPISKQRNAHLQTVLIEAAKLAPRWNAQLAAVHEREMGRGHRNRATLAVARKLVAYLLAVDKSRKPFQVRTPSAAEHQALATAP

SEQ ID NO: 505173 - protein, 366 aa, unidentified
MKRVMAGMDLHGNNVMIGIVDADGTRLRHRRLACDLEEIIAFLDPYKPFLDRVAVESTFNWYWLVDGLKAAGFPVVLANPAKIDQYEGIKHADDKNDAYFLAELLRLGILPTGYIYDPESRPMRDLFRRRMGLMRLRTTLLLSSKSLHHRTTGHSLAVGQLKALSPADLAALYSHPANRLTAEIQKELIEALNQCIRRIEKTVAAEALKKPYYQRLQTLPGIGVILGLVISMEVGEIERFAEPGQFASYCRTVDSNRVSNGKKKGANNEKCGNKYLAWAFVEAAHAARRYDAHCRRWFDRKSAKKGTTIATKALACKLAKAAWHVMAKAVDYDPARMFPELAAGRIEQLSGGQTSASKGVGPEPEN

SEQ ID NO: 505174 - protein, 343 aa, unidentified
MDQYVALDVSLQKTAVCVLNFSGRVLIEADVPSEPAALIAFIQTHAPRAARVGLESGPTSPWLWHSLKAAGLPMVCMDARHAHAVLSVRPSKSDRNDARGLAEMVRMGWYREVQVKSLAAHERMALLGVRRRLVDMRVEIDGQIRGILKTFGLVVGSGNKGAFAQRARMLAQDHPVLSALIDKLIEVREVAVAKVAALDKEIRRFVRNDLTLRRFMTVPGVGPVTALAFRSTIDEPNRFKRARDVGPYLGLTPRRYQSGETDRQGGISKCGDRFTRTCLYEAASVLLTKVQRWSPLKAWGTRLARRIGSKKARVAIARKIAVILRCIWTDGTEFWWTKETATA

SEQ ID NO: 505175 - protein, 428 aa, unidentified
MLKQNTQPDPAPDFAAFLALDWADEKHAFRLQVVGQSKIETGTLEQKPEVLGPWLAKLRERLGGRPIAVGLEQSRGALIHALMAYDFLVLYPIHPTTVAKYREAFKSSGAKSDPLDAGQILEILTKHQDRLHRLNPDTVETRLLGRLVEDRRKAVDLRTSHIQALGANLKEYYPQALELTNNNLSSRLAGDLLIKWPTFEDFQQAKPSTLKRFYYGHNVRRPEVIERVLALADKSQALTTDAAIVESGRRLTQMYARLIEQLNPVIKDYEQRIQRVFAAHPEVKIFTGLPGAGPALAPRLLAFFGTDRSRFAAALNVQSFTGIAPVTKSSGKSKVVYARAACPKFDRQTFHEFSRLSVSKCQWARNYVDYYTDQGKKYHTIIRALAYKWIRILFKCWQERTPYNEDKYMATLKLRGSIFATWHLQNKS

SEQ ID NO: 505176 - protein, 369 aa, unidentified
MTFYTLKAAPAANANELKNNNKPAKAKRILVGCDAHLRGYQAARKVDEGTIGVVDNFRSEEALLLYIEKQREQAEQVVVVYEAGPLGYTLYRKLRAIGVQCYVCAPDSSQQQKKRRKNNKIDARNLTSKLFNYLNGDPHALQLARVPSEAQEQLRMASRQHDQLVQERKRLGATGNAMLLSQGLGSWSNWWRPKAWSQLSTVAPQWLLEKLRIWVDVLKVLDEKISQAKVALARLRSGPRPKGVGALSQVQLQSEVLDWSLYTNRRKIACLGGMVPSEWSTGDKETRGSITKVGVPALRRIIVEMVWRMVLFQPQYKPVQKWQEVLKGPNPGLKKKAVVAIGRQLLVDLWRLETGRVTAQELNLIMIEN

SEQ ID NO: 505177 - protein, 459 aa, unidentified
MRKKSKRTKGIEKAHPFDGLSRVNPHAAGVDIGGEEIVVCVSTNETTQLVRGFGNYTIDLHAIAAWLAEHKIKTVAMESTGVYWIPLFEVLEQKGFDCLLISSRSLRRVSGRKSDVTDAQWIQTLHNYGLLESSFRPQADLIALRSLLRHRRNLVDHRSPHVLHIQKALLQMNIQLSQAVSDVTGVTGQAILRAIVAGVRDPKMLASLREPGCKKSEEEIAQALTGTWREEHLFVLKQALGLFDFYSQQILECDQEIERMYAKTRADLAAEELPPLPKRKRNSHSKNQFHETEKIRGHLKRISGVDISLVDGMGVSLAQTVILECGTDMGKFPTEKHFCSWLGLAPKHEISGNKVLQNKTLKTKSRAGQAFRMAAQSVKQAECAFGVLYRRLKARLGPSQATVATAHAIARVVYRMLKYQIEYDPLTVNEYQKQYEEQQIKYMKKRAAKLGYELQPVAT

SEQ ID NO: 505178 - protein, 422 aa, unidentified
MNDLNDKSFTAYVGIDWADTKHDICMQATGGQQREFDCIPHQVEQIEQWAQSLHKRFGGVIAVALELSKGPIVYALQKYDFFMIFPINPSTLAKYREAFTPSRAKDDPTDAELALDLLVRHPERFTPLNPQSVEIRTLTCLVEHRRNLGNDKNRITNRLRSALKQYYPQMLEWFEHLDTVLVCDFIVRWPTLKQVKRARKSTLEKFFHEHNMRFSNVLDARLKSIKPATPLTLDAAVVTPYSLQALVITDQLRVTLQAIRRYDDEIAEIAPKHPDYGLFSALPGAGPSLAPRLLVAFGEQRERFDSAATVQKYAGIAPVTERSGKKHWVHWRWQCPTFLRQTFVEWAAQTINKSFWAGAYYRQQRDKGCTYQAAVRALAFKWIRILYRCWQTRTPYNESVYLNALKRRGSPLLNPSTNGKMT

SEQ ID NO: 505179 - protein, 321 aa, unidentified
MKVVYPICCGIDVHKSFLVGTIISTTNGVQPHYQKKRFSTYNHDLHRFCDWLLLNNCLDVCMESTGKYWVPVFNILEERGIRTTIANPKWVKAVKGNKDDTKDSKWIGDLFRLGLVPGSFITPKEIRILREFTRYRYKLVCMKSSEKNRFQNAFTVCNVALDSVVSDMFGKSASAITDYLISDEAFNPEHCVSLLQRSLKKKSDSVLESIEGYSITSEQKLHMRIVRSHLDAISKLIAKVDDAIHSMVEKHERLISLLCTIPGIDRNCAITIISEIGTDMSQFGSSKRLCCWAGLTPGNNESAGKRSLFGSHVPESISNLH

SEQ ID NO: 505180 - protein, 345 aa, unidentified
MSNIKVLGIDLAKNVFQLHGRDAKGKGILRKRLTREKFVEYMAQLPPCLIGIEACGSSHYWARVLQAYGHDVKMMPPQFVKPYVMSNKNDKNDAKGIAEAVTRPDMKFVAVKNIEQQDVLLLHRCRELAIKQRTALANQIRGLLAEYGVIIPKGIGELEKLPEILEINQSKLTFKTKQIFMRLHEQFKTYTKQVNDYYDEIEKQANADPRCKEVQAIEGIGPITASAIVATIGDPSVFKNGREVSAWLGLVPRQHSSGNKIRLGSISKRGDRYVRLLLIHGARSVVKVCENKTDKKNRWVAEKKQRLGYNKAAVALANKNARVIWALLATGECYRSAKIIEPIEA

SEQ ID NO: 505181 - protein, 345 aa, unidentified
MPIVGGLDIHRKQLTFDFLDTVTGEVKRGQVAPADRAHLRAWLARFAGRDDVAFALEGCTGWRYVAEELAAAGVVAHVAEPADTAFARGRKRHAKTDKTDSRHLRELLAEGRLPECWIPPPVILECRALLELYHDLRAEHTAWVQRIHAVFFHQGAPALGDGALRTGKDLAAVRAAAAAHLSPAGQLQVAVALEVLEALDARMHQVRHQLLSAARHLTGAKVLAARLYGVGPVTALAMTCWLAGKDRFSSARKAVRFAGLDITVWSSDRKGPPGRLSRQGPPVLRWAVYEAGKTHARSSAPDHRYYAQVKDRQDGKRAALSEARKLLRQACHILAGLGDDALSAA

SEQ ID NO: 505182 - protein, 417 aa, unidentified
MEGSITWVGIDAHKKTLAVAVHSPGRREPEEFTVENNERAIRKLARRLTSAAKGREVRACYEAGTCGYTLQRRLESAGVVCEVIAPSLIPRKPGERVKTDRRDARKLAELNRAGVLTTVSPPTPEQEAVRDLCRCREDVRVDLHRCRHRLVKMLVRRGYVFDTSKQLWSIAHRRWLEQLVFENETDRVVIAEYKLAIEQAERRLRAMDAELARAAQLPLYREHVAWLRCFRGIDTTIALIFVAELHGIERFDSPRALAAYLGLVPSLYASGDSERRGMITKTGNGHIRRALVQASWQYRHRPGVGRALRARREGQPERVLAIAEQAERRLSGRYVRLRLRGKQINKVIIAIARELVGFLWAAMRVEQHARHGARSSAPLEGAKASAAPRSAPKLRKTRLSPTEVGQRHEARKEKRAI

SEQ ID NO: 505183 - protein, 392 aa, unidentified
MYIVGIDIGKNHHEASIVSPKGKQIGRSLRFATTHKGADSLMSFIFKNIGNSPCVFGMEATGHYWYPIYSFLKAKGYTIYVINPIQSDSLRKMYIRQTKNDSIDSFLIAEVIRFGQFPTTSMADENILAMRQLCRYRDSVISSRTEIKLRISTIMEQIFPEYEKQFSSLWLSTSMGILEKYLTPENIENAPIDELFEIIKDKSHNRLTRAKAISIKEAAADTFGIKIAQDAFSFQLKQLIDRMNFLDKQIEALDCQILEYYEKFDCYLHTIPGIGMIAAATILAEIGDINRFKSSSALVAFAGIDPTVRQSGEFSSTHNHMSKRGSPYLRHAIFLAATTCSFHNSPLNAYYKKKRDQGKHHLTTTGAVARKLTSVIYAVLRDSKPYEPKSFC

SEQ ID NO: 505184 - protein, 345 aa, unidentified
MSKFYEGQQFLGMDLHRRRSVLVRMSETGEHLETTRILNDRDSLAEVMSRAGESPEVVLEATYGWYWAADALAELGATVHLAHPLGVKAFSYRRVKNDQRDAADLADLLRMGRLPHAWIAPPETRELRELVRHRAKLVAMRSQCKAHIHAGLAKNGIWVPMTDLFGVEGNLLLDKVTMPAPYQERIASLRRFIEAFDAEIDLFTILAQRRLTHDAGYTAIQQIPGIGPVLGAVFVAEIGDVHRFGKPAQLTCWAGLTPSHRESDTTVHRGRITKQGSRLVRWAAIESVKMLPKSSHIGAIRDKVADRRGNRNIGAVAAARRQLELVFYGLRDHHIRALDHPPRAA

SEQ ID NO: 505185 - protein, 355 aa, unidentified
MVNQDHLEVYGGIDTHADTHHVAAIDATGRRLADVQVPATAAGYQAALRFLRSWPGLVKVGIECTGSYGAGVSRAMQVAGIAVSEVNRPNRFDRRIRGKSDPFDAYSAAEAVLSGRASAAPKGGDGLVESLRVLRTSRSSALTARTATINQIKGMLITAPEELRSRYRGLSNTKLIAALAASRPTPAPVTAAEATAYSLRLLARRWQALTEQIEDLSGHLQRLLEDHAPDLMSVFGCGRDTVAQLLITAGDNPDRLRSEAAFAALAGACPIPASSGKTNRHRLNRAGDRQANSALYHIVLVRLRYDQQTRNYATRRIAEGKTKMEIIRCLKRYLVRQLYPLIVQTLQPRRQTTAA

SEQ ID NO: 505186 - protein, 344 aa, unidentified
MPMYQLGIDVSKNTLDLCLLREGIKGRIKTRKLKNTADAAKVVAEWLKKQSCELGEVHIIMEATGVYHEPLAYGLHFAGARISLANPHRTREFARGMNILTKNDKVDAWMLACYGSLKEPEAWTPPPESVRYLRALLRRRDALVADSTREKNRLEKSVFTDSPDAVRASIENMLQELSNEIEHLDVLIQEHIKTHPELNQDFRLLTSIKSVGYLLGLNMLAILKSHSFESAEQAAAFLGVVPVERRSGTSVKGKPKLSKIGPPEIRTKLYLAALCGLRFNPVMKQMYTKLCQRGKSKMCAIGALMRKLVHWCYGVLKTQLPFDAEHNQQSYYKTTCYSTPSEQY

SEQ ID NO: 505187 - protein, 366 aa, unidentified
MKKTSTVQALKNEIFKGRKLTIGLDLGDRWSFYCVMDEAGQIILEQTLPTTPEAMKQTFGKIPRCLMALETGTHSPWVSRLLSELGQEVIVAHAQKVQWITKSSRKDDRHDARTLARLARVDPELLGPVRHRSAQAQLHLTVIRARAELVSARTALVNAARGLVKSYGQRLPKCGTYQVSEKLAEGLSAELREVLVPLFKEIESLNEHIKEYDERMEKLAKEMYPEVALLQQVKGVGTQIALTYVLTIEDPHRFAKSREVGCFLGLRPGRRNSGESEPQKGISKEGDRYLRTMMVQGAHYILGPFGEDSDLRRWGLKLAERGGKNAKKRAVVAVARELAVLLHRLWVSGEVYEPLRNSQKAMREVA

SEQ ID NO: 505188 - protein, 365 aa, unidentified
MKKIAYVGIDYHLNSLSLAVVVKGKNEPVDMVRLKNDDKLIRKYMSKLSERFEIKTCYEASSNGYSFQRKMAAWGYPCEVIAPSLIPRKPGDHRKNDFRDARDLAQNYAHGTLSIVHPPSEEEEAVRSLVRCRFAFKEAAKRVKQQINSFLLAQDQHWNRSKWTSQHRKWLWEMRMPNAYLQQVLDEHLAHLDYLETRLAHLDDQIEQVATSPVYAPSVKKLAAMKGIKTLTAMLLIAEITDFRRFPNPRALMAFLGLIPSEDSSGDKRKDGAITRAGNKRCRSALIESVQHYARSPHMSAQMKSDLSQLDAHSAGVAVKCLKRLHKRFWALTLKGKLRPVAITAIARELVGFIWAMMQPQPAIA

SEQ ID NO: 505189 - protein, 426 aa, unidentified
MTYRIAGIDVHKRMLAVVIADVAVEGEYQFERRRVGTSPSELCRLADWLVAQQVDEVVMESTAQYWRPVWATLEQRWRPKRLQESAGARSGQLHRAQAQSNRGAAGRKKDFPDAERLVKRLVAQELRLSFVPDVEQRLWRTIMRRKHQLTRNRVQFQNRLECLLEEAHIKLSSLVSDLLGKSARYMLQAVAEGETNPETIAALADHRLRATAPQLRDALGACRDLHPVYRQLLKMALEELKLMEEQIDKLEQEMANLLSAQQDVVQRLAEVPGLGVDSAQQIIAEVGPEAAAFPSAKHLASWVGVCPGEEESAGINYSHRSPKGNRQMKGLLNQASNAAVKTKGSIFEFIYRRLVVRLGHAQAIGAIAHRLCRLIWMILHQAIRYEERGPAVSRSTTERRAAKMIRELRRLGYRIEPVECKAEGSV

SEQ ID NO: 505190 - protein, 312 aa, unidentified
MTKIICGVDISKHHLDAGIWPGGAYRRFGNDAEGIAQLAAFCAEHAVALVAMEATGSYERMAFGLLWEQGMACAIANPRSVRRYAEAMGFLEKTDRIDALLIARFALSKDLKPTPPASKNQCRLKALVVRLRQITSDLTVNKQRRSHIEDEAIRAGVDEIILLLTRQSRQLEGEIASLIDDDPLWAALGQAFRSIKGVADRTVARIMAELPEIGTFDNKAIAKIVGLAPLAKDSGKKAGKRLIRGGRSSVRSIIVLIASVAGRYDKSLAEFNRRLTAAGKPKMVIRVALARKLLVRLNAKARDTRAQFANAT

SEQ ID NO: 505191 - protein, 386 aa, unidentified
MHHATTLAVPEETCIRGDCATLFVSLELSRSTWVATSLAPGSRKMSKHTLVGGDGRKLLDLLARLKTRAEQRIAAPVKVVTIHEVGLDGFWIHRLLEANRVESHVVDPASIAVPRRHRRAKTDAIDGETLLRTLMAWQRGEPRVCAMTVPPSPSEEDRRRVSRERATLLRERIQHTNRIRGLLFGQGITNYNPLHKNRRECLEELRTGDGRSLPAHLKAEVLREIDRLELVLRQISEVEAERDEMLRPAKASSPAALLMRLKGIGAEFAAVLYLEGLFRHFQNRRQLAAYAGLAPSSWKSGSIDHEQGISKAGNPRLRTTMVELAWMWVRYQPDSALSGWFRQRVGSERGRTRRISIVALARKLLIALSRYVTHGEIPAGAVMKPV

SEQ ID NO: 505192 - protein, 438 aa, unidentified
MACRYAGIDWASDKHDVLVADEDGVEMLAASYAHDEKGLTALCRALVRLEVGLVAIERPDGLLVERLLDAGLRVLALHPNNVAAARDRFRVSGGKSDRFDAFVLCELARTDNHRFRVLEPDCDQTKALRALTRAREDLVGTRSGVMNQLRAELERFWPGPLRLFSHMDAEILLAFLERYPSPADARGLGVARMQAFLVRERYSGGQHPTALMAKLRSAPRGRIGELELAARRQVVLTFVAMIRTLNAQIKDLERQIRTQVHAHPDGRIFLSLFKSPASVITAAELLAEIGDCRERYPTRDTLAADAGHAAVAKESGKRKTAGFRWGCNKRLRVAFCRLADSSRHWHPWAQDLYAQARQRGHEHPRAIRTLGRAWCRVVWQCWRNHTPYDPARHRALQRHITVTIPTPSGPMPDLAATQRMAGATVTPRAAHTGRARSA

SEQ ID NO: 505193 - protein, 419 aa, unidentified
MFKIFYKNCCGLDVHKTWIYACIGITDADGKTVYHESRFSSFSKGLRKLAKWLQKYNCKLVCMESTGKYWIPVFNILEKTCDVTLAHPKYTKPQKGNKTDRKDAKWICDLFMCGMIKPSFIPPAAIRQLRDLVRYRSKLTNMLTGEKNRAQNCLTVSNLKLDDVFSDVFGKSSRSITEYILDHPGETFDVTPFVDGRCKAPIEEIQAAVDGSVSKEQAAKLRQCLKHIDELTAHKQKIEEEILQIAEPFSAYLDLLRTVPGCDSDKMTAITILSEIGYDMSVFPSSKNLTSWAGCCPRNDRSAKHTKSTRISRAGAWIKPLLVQISNALIRSKKHPEFSERYRRLKAHRGHKKAIIAICRMLLTAIWNILSKLEPYTPDGFINDRPADKKKTMSTAEALKLLKSRGYIITDLPDGSVTT

SEQ ID NO: 505194 - protein, 375 aa, unidentified
MSEITRALIARVGVDLAKNVIQVHAVDAAGRRVVTRAFKRGQFVAWCSQLPPGCVVAMEACSSAHHFGRRLRAMGLDARLIAASFVSPYRMEGKSGKNDMTDAAAICEAASRPTMRFVALKSCEQQGVMSLHRLRESLKEERTACINQIRGVLGEFGLVFGKSAKVLRAVLSEVIEDAANELSPMARRVVQRGFEHWRELDEHMRWCDQQVGQHVRGSDQAQRAAKLTGIGELGASAFTASVGDFKQFKRGAQFGAWLGIVPRQNSSGGKASLGRITKRGDDYLRTLLIQGAKAAVMSASKRDDPISRWLVQLTSRVGWQKACVAMANKNARILWAVMTRESGYDPHHVSVKPQAKQSAPPSVAPATPAQQSCAA

SEQ ID NO: 505195 - protein, 444 aa, unidentified
MSDSLPLVTTEREWAAFAAIDWADQKHFWRLVPAGSQHAEQGELENTPEAVEAWATTLQQRFGGRPIALCLEQSRGSLVYMLTKYAHLVLFPVHPTTAARYRETFCTSGAKADPSDTASLLDLLLRHPERLTPLQPDTTETRLMQFLVERRRKIVDEKTRQKNRLTDCLKLYFPQLLHWFEDVSGPLVGALLERWPNLEQLQRSHPGTLRKFFHQQNCRGEELIEERISAIYQAIPATRDAAVLEAGAITARGLVAVLTTLRGNIAELDRRIAQLVASHPDAALFDSLPGAGPALVPRLIVAFGTRRERYDNAYQMQCYSGIAPVKAASGNTQRVHIRRACPKFLRQTFHEFSSHSIGQSEWARDYYQFQRDNHKSHQAAVRALAYKWIRIIFRCWKDGKPYDEQVYLQSLRRRRSLLGPALAGVTGPGWKTVAGFQKFSENPS

SEQ ID NO: 505196 - protein, 325 aa, unidentified
MQGKEASEQESTKCTAGIDVSKDWLDAHVMPADESLRVANTSEGIRKLKRWLVLHEPELVAVEATGKWHRELCRSLHASAIAVAVSDPYRVRMFAKAQGILAKTDKIDARVLAQFAAVMAPTVRPPASQALEALQELVTAQNSAVAERTALKNQLVAAESAFLKSQLACRIKELSVHIAAIRQETLRRIKADEGLAKRYTILTSIPGFGPIAAETLIACLAELGAITHKQAGSLAGLAPVANDSGQRRGARSIWGGRAIVRKILYLAAVSASRYNADMKIFYRRLIANGKAPKAALIAVARKLLVLANTLITQNRTWQPTAPKPA

SEQ ID NO: 505197 - protein, 359 aa, unidentified
MNSTKYIGMDVHTATISVAVRDAAGKLIMESILETKASTILQFIHGLRGELYVTFEEGTWAAWLYDLLKPYVTNVVVCDSRRNALLKEGSKSDRIDARKLSELLRANLLRPVYHGEKGLRTLKELVRAYLTISKDVTRVMNRVKAIYRGWGIPCAGQTVYHPRHREEWLSEIAHAGVRCRAELYYQQLDALVVLRKQVRQELLAEGKKHQAWKLLRSIPALGPIRAAVLMAIVQTPHRFRTKRLLWKYSGFGVVTHTSADHRYVEGQLERSKKPVSVRGLDPGHNHPLKDLFKGAAIQASTREGPFREFYETLVAKGMRPEMARLTLARKIAVIAWVVWKKGVAFDAKYLKPQTALECF

SEQ ID NO: 505198 - protein, 392 aa, unidentified
MQVTRIGIDIAKRQFEVHGVDERGTVVVRKSLKREQVSEFLAQLPRCEIGMEACGGAHYWHRELSKLGHTVRLLSAHKVKPYVVGNKNNRHDAAAICEAMSRPTMRFVEPKSPAQQDLQILHRARALLLRERTALSNQLRGVLHEYGIVMPLGAAALQRKVAEVLAGDDERATSVLRTVIGEQLERFTYLSQRLAKYDRQIAQFCHQDERCRRLLAVEGIGPLSATALVATCGNGQEFQNGRHFSAYLGLVPGHSNTGNKTVMLGITKRGNRYLRTLLIHGGRAALYAARRRSDPRSRWLKRLQERHCTNLAAVALANKNARIAWALLRYGQEYCPTRAHAQTATSARTARPAQSTPASAVHRARPVRSRTHSSAAPSAHHEGRGERMLRKN

SEQ ID NO: 505199 - protein, 354 aa, unidentified
MDNYIASCDAHKRYSLFGTLNLGTQARAHARVEHAPGTIRAFLAKLPEGTPVALEAVGNWYWIVDEIEAAGCLPLMANAGRAKAMMGHVDKTDKLDADGLLTLLQVGTLPTVWLPPAQLRDARELYRTRMALCKERTGLKNRIQATLAKYALSVEDETDIFAGKGRQQLELTIQSLPAETGRCVQQELQVLDYLQKQIHAMEKRIRECVKVTTAMQLLKTLPGVGDILAIVIALEMGPADRFGRAEQFCGYCGTVPKVKSSGGVTHYGRTRQECNHYLKWAFFEAANVAARHRKAASWRDKHIVRLYERVRKRKGHGVAIGAVARHLSEAAYAVVLHNETYREPQSQKALPKQR

SEQ ID NO: 505200 - protein, 423 aa, unidentified
MEVVHQCAAGLDVHKDTVVACVRTMANGKAQRECRTFGTTTEELEALRDWLTSCGCAVAAMEATGVYWMPIWKILSEGKFRLIVANAAHIKAVPGRKTDLNDAMWLADLAAFGLIKASFVPDEEFQELRTLMRARKQLVREQTSHVQRIQKTLTEANIRLDSVLSDIMGAAGRRMIEAMIAGVRSPSKLAALGDRRLKATPKELYDALHGRLTEHHRFLLKLHLGQVDALDAAIRAVDAEAEARAAQMDKEAKADEAPFSGLIDLLVTIPGVSKVSATTILSEIGRDMDRFATSAHLVAWAGLCPGQNESAGKRKRSRLRKGAPWLKTMLVQCAWAARRAKQSYYKAQFLRLKARRGPQKAICAVAASILTAIYHMIKNEVPHNDLGADYFDRRKPADKVRRLVGQFKKLGFAVTLQPIATAA

SEQ ID NO: 505201 - protein, 339 aa, unidentified
MVEPEFSQGRATRHSCAGGSMFVGIDVAKAELVVSVLPAMERFTVANDERGVRTLVERLRAIGPQLIVLEATGGYELLSVAALAAAALSVVVVNPRQVRDFAKATGQLAKTDRIDADILARFADVVRPAVRVIADAEAQELDALLARRRQLLEMLQAERNRLGQVFGKGKRLVRKSLRAHITFLERDLHMTDSDLGEMVRKTPAWRERDELLQSVPGVGPVLSRTLLADLPELGRLSRRKIAKLVGVAPLSRDSGMMHGRRFVQGGRTSVRAVLYMAALVATKRNTIIQEFYQRLVAAGKPKKLALVACMRKLLTILNTMVRTRTQWNAEAAHGMFTTT

SEQ ID NO: 505202 - protein, 369 aa, unidentified
MEQYSEVFVGLDVAKKRHAMAVAESGRQGEVRYLGEIDADAALVRQAVERLAKRHGKLHFCYEAGPTGYGLYRQLISMGHSCDVVAPSLIPRKAGDHVKTNRRDAVQLARLLRAGELTKVWVPDAKHKAVRELIRAREAAVDDLRRKRQAISSMMLRHGRTYPGKTTWTKKHKLWLQAQRFDHAAQHLVLQDMLLAMQHAQERLGHVEDVIAEFLPDWSLAPAVEALQALRGIRLVTAATIMAEIGEFSRFETAGQLMSYLGLVPGEHSTGDKVRRLGITKAGNQRVRRALVESAWSYRHLPRTSQRKQEIHDRLPPAVRDIALKAQTRLCARFRALEKRGKKLTVAVTAIARELVGFVWAIGRAVQTA

SEQ ID NO: 505203 - protein, 341 aa, unidentified
MKQYVGLDVSQKETAVCVVDENGRLIFEGRAKSDPGALAALLAKKAPDAERVGFETGSMSSWLWHELKRIGMPVVCIDARHAHAVLSVRMNKSDENDARGLAELVRIGWYREVAVKSEASQQVRSLLVARSRLVTMRRDLENQVRSMLKECGLIFARAIAGQFQRCVTELTGDGHVLWPVLLPLLSVHGHVCRELDGLDRRVRQMARADETTKRLMTVPGIGVVTALTFRHTIDDPSRFRSATSVGAYLGLTPRRKQSGETDTVGHVSRWGDRLLRTYLFEAASVLLHRTRRWCALKAWGLRLAKRNGMKKAQVAVARKLAVILHCIWIDGTSFQWGKEPA

SEQ ID NO: 505204 - protein, 357 aa, unidentified
MISIGIDVHKKKCVATLKRNSKRIVEQTSFCNNNYGINEFIQHIKGCYKEDAIAVCESTGNYWIRLHDTLEDNGINTLLANSLKTKIIAQAKLKDDKIDSNVLADLLRADLVYESFVPDKEYRELRQLVRTRLDLVTERTVLKNKVHALLAKYEYQCPVSHIFSNKGTEWLKTIDLSWIDRMAVDAYLDASVAIQKQIGIFTAKIAFVSKEDQRVKLLMTIPGIDYFTALTIVSEIVDIKRFSTPWKLVGYEGLAPSKRDSGDGHRYGGHITRQGSKWLRYTIVEAANTSTRYDDRIGRFYKRIAERRGPQKARVAAAKEMLVIIWHMLIKNEPYRTINREMVERKYKKMERESNMV

SEQ ID NO: 505205 - protein, 421 aa, unidentified
MPNIEIGVDSMVKENFIYVGIDLHKETHTAVMIDCYNQKLGEITFPNRPADFPKLVTKVKKCNTDAKEVVYGLENAYGYGRPLAVWLIDKGYFVKDVNTAISHRQAKHRGAMYRKSDSDDAEAIALATLNMLDKLPDACPNDAYWSLGQLVHRRDNIMKQRTRLVNQLHEQLCIAYPSYKSFFNDISRPTALYFWEHYPSRKYLRGKSVEDLRKELVPVSHNRCSTKNCEKILDAVASDKVKNNAYQDARDMVTLSIVSDLQHYDSQLAEVDKMLEQMYKMLGCTLTTIPGVNVITAVKILAEIGDIKRFANANKLAQFAGIAPLHLSSSGKGKDVATKQGNRRLHATIYFLAIQMVQLSSKGTPRNPVVRAYYEKRKAEGKTSQQALICISRRLISIIYGMLKYGTEYRMPVVENAGENR

SEQ ID NO: 505206 - protein, 353 aa, unidentified
MSVILAIDLGKFNSVFCWYDPATKASTFRTVRTGEAEFREVLLRQPVVTVAVEACSPAGWVHDLAVSMGLTVLVANTNAEAWAWKNVKRKTDRDDALKLAKLAAMGELPTVPMQPKPLRQRKSLIGLRKRLVGERTRGQNRIRGLLVGQGLAAPRGNRAWTALGLEGLGLLAKPLAECDLDELWRGELDLLLQRYRAVVEQIGSIERKLDAINAADSAVSLLETVPGVGPRTAEVIATSLGDPKRFRHGDEVGAYAGLVPKQYQSGETDRRGRITRRGPKLLRAALVECAWCSLRYNAWARSTWERLVANGVSKKKAIVALARKLLVRCWAMLKRGEVWKDPSAPLAADPVPG

SEQ ID NO: 505207 - protein, 428 aa, unidentified
MEINSRIAGIDVHKKMLAVVVADSQPEGQLRFERGKFGAMESELRRLASWLKARQVGEVVMESTAQYWKPVWQQLEAQCQLYLAQAQSNRGPRGRKQDFRDAERLVRRHLAGEPILSFVPDREQRLWRIMSRTKYQLRRDRVQLHNQLEAFLEEGHIKLSSCVSDLLGISSVRILRALSEGEADPARLAAMTEPGLRATHEQLEDALQGARRLSPAHRQILRLFLDRLELLDRQIATLHIDLGQALRAYNDAVVRLAEVPGFPPQRRRPVAGDPGLGPDSAQQIIAEVGPEAASFPSPQELSSWVGTCPGKEESAEVSKSNRSPKGNRMMRRLLNQAAHAAVKTKGSIFARLYRRLVCRLGHNKAIWAVANRLCRLVWKILHQGVSYIEYGNRPDPKTALARAKRMIRELQALGYQVQPLPAPQPLSN

SEQ ID NO: 505208 - protein, 424 aa, unidentified
MATRRRTNKVDIDALVDLYERCAGIDVHKEAVTVCVIRPGTGGSVQGEMASYGTTTRELRQLSQWLQECGVTHVVMESTGVYWRPVWQILEAGGFHLWLANAKQVRNMPGRKTDQADAVWLATLLRKGLIKGSFIPPPQIRALRDLCRSRTTLVRDRTRVVQRIEKVLEEANIKLDTVASDLMGVGSRMMLEELVQGETDTTKIAALALGRMRPKIPQLVEALEGYFRPHQTFLLKQLLHQFDDLCRRIERFEQQIEEYARPFDKQMARLDAVPGIDRLSAAAILSETGVDMEPFPTPEQFCRWATIAPGNNKTAGKQRTGKIGQGNRWLRGSLTQCAWAANHDKKSYFAAQYRRLLHRGKQRALVGVAHSMLAAIWHMLRRDVEYHELGADYFEKQNMEGLKKTYLKKLERLGFKVSLEPITV

SEQ ID NO: 505209 - protein, 440 aa, unidentified
MGNQTVFETVYQNAAGIDIGAEKIFVSVDGIEVVSFDTFTSDYYKCVEYLQLNGIKNVAMEATGIYWMALYAMLESCGLKVCLVNPKETKQVKGRKTDVKDCQWIQKLFSANILRQSFIPEQNYIEVRQLVRERLDIIEMGSTYVNKMQKCLELMNIKLKEVISQIHGASGIKMIQAIISGNRDKDYLLSLCDKRIIIKKGDLVLKALEGNYNETYLFMLEQNMHMWEKHQEHIAVIDKRIGQVLESLCTEKEPINVESKPKLIRHHAPKIDGLHGMLIRLYGVNLSSISGINDYTLLRLIGETGIEMSRFPTAKNFVSWCGLAPKHHSSGKMNKRVKGTSCNKTGQIFKEIAQGLMNSKYIAIGSFIRKLRAKKDSAIAIKAGARKLAIAFYNALTKGIDYVEHGIKKYEEQIKQRQKVALYKLAKKLNMELIEKQAVV

SEQ ID NO: 505210 - protein, 330 aa, unidentified
MYQQFVGIDIASESAACFWQNAEGQNQKLEIQQSSKEYQTLSKRLLKTASAHLSLIVMEATGNYWLRLALFLHEQGFQVAVLNPSHFYHFARSERRRAKTDLLDAELLARYGRLHQPPIWTPPPAIFYALQQRLSLRDDLQNDRVRNLNRLHALRQVPQVETAVLARLEGQIQRLESDIQALETEIWHLLGAEHEWSQSARRLLSIKGIGLITAAWLLTATQNFSRCQSPEEAAAYAGLVPYANDSGKKHGKRLTGGGHPQLRKMLYMAAGAALRFNPPLKVFYQGLVQRGKIKQVARIAVARKLVHIAWACVVKERDFDPNFGQQLAIA

SEQ ID NO: 505211 - protein, 412 aa, unidentified
MPRPTLVRRDTIILTESALIVAGADTHLDTIHVAAITTTGATLGDKEFPTTGAGYAAAIAFLMTLGHIVRIGVEGTASYGAGFTRALTAAGIEVVEVTRAVKSTRRLKGKSDPLDAYSAARTVLAGEGLATPKDDATTGLRALHIARRSAVKHRTAVINQIKAMLISAPDAVREKYRGLTTLKLIEAIARCRPDTVADTWAQSLLTAAKMLAQRVQFLETQAETLQTQIDALVAKANPGLRAAYGVGPDTAAQLLITAGANPHRLHSEAAFAALCGTAPVPASSGKTNRHRLSRGGDRAANNALHRIALVRMSSHQSTKDYVQRQLAKGHNKMEILRKLKRAIAREVFKLLTRQIAVPEYNDLRPARQSKNITVTAAANHFGVWPTVISRIERGLQRDDALADQYRSWLQAA

SEQ ID NO: 505212 - protein, 370 aa, unidentified
MSVRRILAKTIDTDLEYEAIGIDLAKNCVSAALLTTDGEVVCIDRLDYSELEKSAQALSSTTFAMEPCTEMNYLVQKLEAWGHRCLVIGGKNVQNYVENHFSGQKTDLNDAQALAFLAQDTQLRTIKAKDIEQQKYASLTTLREQYIKQYRQTIVSLKGICQAWGLNISKGISGKARLKDLIENHAAFPEELKESLVDMVTHAQTAQKALNKITKTLEELAKSDKVCQLIQTIPGLGSICSCRLRATIGDIKRFKNPKDFPAYYGLVPRSIATGHNERKGKITHRGDRTMRSLMVQAAGSLVNMATKGKLKSKQLTKWILKKQKEKMPWGKLVCAVAAKLLRIVRAVLISNKPYNSKIAGVAKCSLPKGS

SEQ ID NO: 505213 - protein, 343 aa, unidentified
MDYFAGLDVSVKETSVCIVDDAGKIVREARVASEPEALLQVLTKTIYRFKRVGLEAGPLSQWLYSVLAEAGLPVICVETRHMRAALKSRINKTDRNDARGMAQMMRVGLYRPVHVKTLRSQKLRVLLTHRKLLQSKAIAIENDLRATLRNFGLKVGMIGTVKFEARIRELVANLPDLAVLVEPLLIVRRAIREQVSVLHRRLLALVRGDDVCRRLMTIPGVGPVVALTFRVTVDVPARFRNSKAVGAVFGLTPAKYQSGENDRTGAISRCGDEMMRMMLYEAAQSMLVRTVKWSWLKAWAMKIARHRGMKKAIVALARRLAVIMHRMWVDGTEFRWTREVIAA

SEQ ID NO: 505214 - protein, 349 aa, unidentified
MTEQRRSYAGECVDVGVDVPKDTSTVTCVCHQQLVKTATVPAEPAGLAASLLRWFPGATRYSAYEAGFSAFVRHRVLTTAGITHIVVNPASIAVAAHDKVKTDRRDAKRLAIDLADGRLRGLSIPTEAEERARLLPRTRAQIVEHRATIARQIKAKLHQFGLIAPSSRRMISHRYVREIAAWSLAPELRVRLTLLAEQWRFATRQLIEIRRLLQEQAAAQAELEKVSRSVPGIGAVVARTLATELGDMTRFANERALFSYTGLTPSEYASGSSVRRGHIRRQGSGRVRHLLIETAWRALPRDTVLQEIFDRIAATRGKKRAIVAIARRLTGRIRACFRQGTTYAVGTYA

SEQ ID NO: 505215 - protein, 351 aa, unidentified
MSHKTAATVAHTIGIDTGKNILHLIGLDDQGAIVLREKIARGRIAARLANVPRCLIGIEAGMATHYVARELSALGHDVKQVPPAYSKPFRQGHKNDFRDAHAIAEAVQRPSTRFVPVKTDDQLDLQALHRVRSRLVGQRTAVINQIRGFLLEHGIAVRQGLRFLRQQLPDILAKRSDVLSPRMIRIMEDLSGDWRRLDERIQHITEEIEVLAHGSESCRQLMTVPGIGPLIASAMVAAIGNGAAFAKGRDFAAWLGLVPKQMSTGDRTILGRISKRGNRYLRTLLMQGARVILLRPANWAKHSFGLWLTAAAQRLHHNVLATALANKLARIAWTVLAQGRSYEARVEPKVA

SEQ ID NO: 505216 - protein, 431 aa, unidentified
MNDVSRFTRFSQFRKNIRGSKTHLIVGIDIAKDRHHAFFGTAYGKTLWRRLVFSNDITGYSRLIEQGRALLSQYQLKDVVFGMEPTSNYHKPLAHWLIKRDYPVVMVAGKAVKDNRELLDGRWDKNDTKDSANVADLISQGKCQFYENPNNDVLAVRNLLVIRKQLKKEEHRLRMRIRNGLLAKYFPEMDRYWSHRLGENLAIVRWYLDPRKIADTEFDRFSRHVTTTSRGLHQMRRLKAIHQAAGDSVGLPVDASADYEAQLLVERLKDVRQQISQTMQRIQDICEGLSGYKLLLTIPGFGPYIGALVVSVLANPFRFTHRKQVIRLAGLDLNASRSGKKSRDSVPKISKKGNADLRYALYQAALIATYHNDGFRRLYQRMLDGRHGERGIKTKARVKLAAKMLVVAWTMLKNHEPFDAMRLLGESVQQR

SEQ ID NO: 505217 - protein, 429 aa, unidentified
MEEIDDTDLVVERVAALDLGKAGLDACVRVPHTHHPGRRMQELRSYGTTTAQLLELAAWLRHWHVQRVVMESTSTYWKGVYYLLEAEGFDCWLVNAREVKNVPGRAKTDRADAVWLAKVAERGMCRPSLVHPPEIRRLRDLTRYRRALVQDRTRERQRVEKLLEDAQIKISSGLSDLHGVTGRAMMDALINGQRDPHTLARLAKGSARKKTARLEEALRGFFTDHHAMILQMMLANSDRLSSQIAELDGRIEEAVSPFCAQSARLADVPGVDVMAAAELIAEVGVDMTRFPSAAHLVSWAKFCPQTHQSAGKSKSQGRGKGNPWLAGTLGRVVFANSRSETFLGARYRRLARRRGKQKAIVATGNSLLTVVYHLLLNSDARFCDLGPGYYESRINKHRRARDLATQLQALTGQHIVIRDGKAVITDTAA

SEQ ID NO: 505218 - protein, 350 aa, unidentified
MKKICIGIDVSKETLDVTVIHIESYELVEKLGYSKFDNRPSGFRSMIAWVRKVIKSRGQMDEALFCMETTGSYDLPLCHWLHKNGLNVWRESALQIHCSKGFQRGKSDKEDSEVIAQYAARHQSRYTAFVPDAEAIADLKELICYRDSLVERRKECKVRLANKKETLVNRNSKAWKCIERLSKAEIKRLDKVIGECDEEIRNLMKEDEEMEKNYQHLTSIVGIGLINGAALIAYTGNFKKITTPNKMSCYCGCFTFYEDSGTSVHRKSPYRNACCKMLKGYLRMAAKSAMLANTELRKYSERLREKGKPYAVILNNVANKLLHIMFSLVKHDYDYEYNHEMVRRMEREIA

SEQ ID NO: 505219 - protein, 384 aa, unidentified
MKVTRIGLDIAKQTFELHGVDQRGRAVLRKTLKRERMLEYFTQLEPCEVALEACGGAHYWHRELSKLGHTVRLVPANKVKPYVDGNKNNAHDAAAICEASSRPSMRFVEPKTVAQQDLQALHRVREVAVHHCTLLANHMRGLLLEYGVTVGRGYPALHRALPELLGDDEQRLSALLKQLLAQQWRMLKLHQKQVQTYDRRINCIARGETSCSALLKIEGIGPITATALVAAAGKGHQFKNGRHFSAYLGLVPGHSNTGNKTVMLPITRRGNRYLRTLLIHGARSALYAARNKDNPRSLWLQRLKARRGYNVAAVALANKNARIAWAVLRFGETYQPARAHRPERCATPSPRLQRQPQSRLTLKPQGASSQVRNSASSRPALIKP

SEQ ID NO: 505220 - protein, 338 aa, unidentified
MASVKGDIIMYYVGIDISKRFVDVCLLADGMKGKRKTKTLPNGPNAVQALAEWLTRQKCDPGQAHIIMEATGVYHEHLAYGLHQSGIAVSVINPHRLREFARGMGILTKTDKVDAYVLACYGGLRQPEGWSPPSPEIRKLKALLQHRDSLLSDKQRIENRLSTLASTQAPEEVVASLDSMVRHVKSELERIERLIEDHIDKHPGLKNDLKLLKSIDGVGDQIGWNMLATIRGGHFRSAEQVAAYLGVIPVERRSGTSVRGRARLSKIGPPAMRAKLYMGAIAAISHNRHVKAQYERLLLKGKAKMLAVGAAMRKLVHLCYGVLHTQQRYDKNYGVVVS

SEQ ID NO: 505221 - protein, 454 aa, unidentified
MQKQDSYDYYVGIDCAQNKHDFAMKNNQDKFLIKKGHFSNTLQGYEKFLNTVLSKCLDKDKILFGMEVTGIYGTNLYERLKSDGYHVVMIFPDSVKNYRDYKRLNKTDKIDSACIAELLLNGDAQIVHAEKNGYIDLKAYIRRRNALKVTCTQETNRFLAKVCLYFPDLLKVFPSGRATLKAIFSIYPTPYSIIEADFNELVSVLQKASKNKFGVDKANELIHAARNSIVVRKSISDGELYNIHSLIDSIDSLESEIRNLEKIIDSKAEEFPAYHVLLTLTGCGKITAAIIVAEIGDISRFHKASQIVSLAGLYGDNSKSGSSVNKRGKISKKGSRYLRHAIYMVAEFARRNNPIFKAYFTKKKNGDRTKHILAVNAVANKFCKVIYSLMKNQSTYIIQYRDLAKLSESTQNEFFQNAETDFSAKTRRKKYLYEDEYGELHEFVFKSIKTALIE

SEQ ID NO: 505222 - protein, 414 aa, unidentified
MVICRAKYHTTLEVDVAAPSLWAGIDAGKLDHHCVAIDASGRRLLSRRVRNDEAALVALIEDVIALADGGSVQWAIDLNAGGAALAIALLLVRDQDLLYIPGRIVRHAAAAYRGDGKTDAKDAAIIADQARMRTDLPEFRHRDETTVELRTLCARRADVSADRNRALNRLRAQLLEYFPALERAFDYSHRKAALILLTGYQTPEALRRIGRTRLENWLRDRHAYNPGAIVSRAMEAANAQHIVVTGQHLAAVMVARIAQQILDIDAELADLDDMIEERFSRHHQASVIRSMPGFGPLLGAELVAATNGALDSFPSADRLAAVAGLAPVPKDSGRITGNLKRPRRYDRRLLRVFYLAATNSIKTCPESRAYYDRKRAEGKHHRQAVLSLARRRVNVLWAMHRDNTTYKSTAKTAA

SEQ ID NO: 505223 - protein, 418 aa, unidentified
MIKTKMQRIVNGKTLIVTVDMGKDKHFGYWRCQDGTDVKPFAFSNNGTGFSQFWERITKAKEIHHLDEIVFGYESTGSYAEALVHFMRARSVRLVQVNPMHTRRIKDLQGNSPNKTDAKDPKVIADIIALGHALTVVIPEGPAAELRRLTQARERSNQRHTALVNQLQGLVAIIFPEFMQVMPDVKILTARYLLRECPAPQDIVAYGLDNLTRTISKVSRGKLKEGRAKALYDAAKASVGVTEGQASIIREIHEILVLMEAAERFTEGLEKEMIHYLNQIPYSHSILSLKGIKEVTAAGLIGEVGDFRRFKTLSEVMKLAGLDLFEISSGKHQGRRHISKKGRPLLRKLLYFAALNTVRRGGMMHQRYQQYLDRGMPKIKALIAVARKVLGIIFAMVRDQSIYEEDFSRTSMQLEEAA

SEQ ID NO: 505224 - protein, 428 aa, unidentified
MDFTQNQRLAQMNDRTLIIGVDVAKHKHVARVVDDRGRDLAKRLVFANTMPGFSELLSWVRDLSEEHDRPDIVIGMEPTGHYWLNLAYHLKARGIHTVVVNPMKVKRFKEMDDDSPTKNDTKDAKVIAQIVRDGRFHEPTLPEDVYAELREGMKVYDIMQEDLSSIKAQMQNALDRYFPEFLQVFKDWTGKAALHLLEKGFLPEDIRQASEEALLAEVKTAAKRAVGIKRIQALKQAAETSVGLTVGLRMAREEFRYLIDQYKRIEERLVALEAQLEELVLHVPGADQMIAIKGVSALTVAGFFAEVGDLANYRDPRQIIKLAGLNLKLNQSGTFKGQTTITKRGRKRLRSLLFQVARPLSCHNEAFRKLHEHYRYRATNPLTGKQSFVALSRKLVKIFYVLGTRKCTFSETRMIRDIPGISGLQEAV

SEQ ID NO: 505225 - protein, 360 aa, unidentified
MKYIGLDCHKQYDHATMINTETGEIKSKRLAHTTEEFRKFIGDKADTKIVIESCWNWSKTYELTKDLVEEVILAHPLKVKAIASAKVKTDAIDSRTLAQLLMADLIPEAHLRKADNRIKQRIIRHRAFLVAMRTRVKNRINDMVNSQLLPTEMLTTKPKNLFAKRGKGENGVEWLKLLEWSRAEDRRIFESGMRLVEHLSQEISTSNEMVKEIYEKDKDARLLSTIPGIGRTLAVLISTEIDGIDRFASPSRLCSYAGLVPSTHSSGGKTYHGKITLEGNKWLRWALMEAVVPASYADCEIRSRLDALRKIKNANVAKTIMARWLLKVVYHVLKDGRPYVTANPAGENPGRLSKALASSY

SEQ ID NO: 505226 - protein, 389 aa, unidentified
MKIYVGIDIAKLNHFAAAISSDGEIIIEPFKFTNDADGFQLLVSKLESFDKNSLIIGLESTAHYGDNLVRYLVTELYQVCVLNPIKTCQMRKNNVRKTKTDKVDTYVIAKTLMIQDNLRFVSFFDLDMMDLKALGCFRQKTIKQRTRLKIQLTTYVDQVFPEIQYFFKSGLHQHAVYALLKEAPSPKEIASMHMTHLANLLKVNSHGHFTKEQAKELRVLAQKSVGANDSAISIQITQTIQQIELLDSQLEKIEAEMTDIMKFNDSVIMTIPGIGYINGGMILGEIGDIHRFSNPNKLLAFAGLDPSVYQSGNFQAKTTRMSKRGSRVLRYALVNAAWNVVRNNATFKAYYDAKRAEGRSHYNALGHCAGKLVRVIWKMLTDEVEFNLE

SEQ ID NO: 505227 - protein, 435 aa, unidentified
MCYVDDIRLEQFRQLKKEIRGSDEYLIIGIDVAKEKHRAFFGTAQGKTLLKNVVFDNTIEGFEKLDAYVDRIKVQYSLRKVVFGIEPTADYHKPLAEHLLKCGLMVVLVGGAAVKNNRQLLNGRWDKNDDKDSANIADLIAQGKCMFYEYPLMTLQNVRVLNAVKRRLKKREHGISAYIRNHILAQYFPELDTYYGSSETLAVVRECLDPSAIAGMEYDDFCRTVAPGKMTLARERRVGAIWRTAVNSVGCTMGEAAFHEAQIAVDSLKRVRQEIKTVEDKLEDACLEFPEYTYLLSIPGFGPDVSAKVLGAIGDPHRFTSGKQVLRLAGLDLCAKRSGKTSNRATPIISKQGKADLRCALYQAAFIASIKSTDFMPYFTNKLVGRAKEKGIGTKMRVKLAAKLLIIAWTLMKKKECFDPKYLKLGNRVEQKTAA

SEQ ID NO: 505228 - protein, 348 aa, unidentified
MIVGIDVHKHAHAAALLDERGSTIGTLAFANSPAGMHKLCSWLSDHGAAEAVVGVESPAGYGRLLVASLEAAGHKVLNVPAWQTHRERRRHGPGKTDPGDAIAIAQVVLRKRAELGPALEPELVRALALLELQRRRLVRDRTQAIQRLRADWNQVDPVGEARVVNLTRQKELRRLRRISFGDGLVEQVATRCIRDLARDIEDLNQRIASLDADIAELLAEHGNPLADLHGAGTQIAAAVIAHAGDVRRFRNAAAFARFCGAAPIPTGSGQTAGRHRLHRGGNRQLNAALYRIAIVQARHHPPARTYLARKTAEGKTPREARRALKRHLANVIYRRLYAWAETTPALNP

SEQ ID NO: 505229 - protein, 571 aa, unidentified
MTTATAAQCCTRIGVGFDTARYAHHVTFLHADLQAAGKPFYFSETAQGYQQLEQAFQQVDQRHPEAHFHIRIDAAGQYAANLEAFLRRLPYATTISVGEPARNRKYREAIYPKRKADPVDSLAMARFALHEHPPATAELPPAMQALREIASRLESQTRQSTRLTNQLHNLLARVFPELALLAKNLQAQWVVLLLEKYPTAEHVARAQLRSLTAIPHLTADKAQALQAAARASVASFRGPLAQQLVTNLVRSLRQSQAAEKELHDLLVQQYLALPQSNLINTITGIGDATAAILTAKILDINRFATPEKLDNYFGVFPEEDSSGTDKQGRPKAPGQLVMSRKGNDLVRKYLWLAAGTACQHNPAVRALYHRLAARGISGGVAIGHCMRKLLHLVFAVWKTGKPFNPDHYPWENPPARPGNAEKAAGHSQGTGPAEKVVTAATATVAAGAPPVKQPTQAPAPRTAPVDFAALRQRVTMEQVLHHIGILGELRGSGPQRRGRCPIHAQPGDRRRTFSVNVKKNVFQCFDPECNAHGNVLDFWAALRGLPLVQAARQLADTFDVCNAPDTEKRNP

SEQ ID NO: 505230 - protein, 349 aa, unidentified
MSQTLNTAIAVTGIDIGKNSFHIVGLDARGSIVLRQRWSRGQVEARFANMPPCLIGMEACVGAHHLSRRLRALGHDARLMPAKYVRPYSKGQKNDFRDAEAIAEAVQRPTMKFVATKTADQLDLQALHRVRERLVSQRTGIINQIRAFLLERGIAVRLGQRFLRAELPGILATPPDVLSPRMVRVIEDLAGDWRRLDERIGGLSSEIEAIAGQDAGCERLMSVPGIGPIISSAMVAAIGAGDAFTKGRDFAAWLGLVPRQMSTGDRTILGRISKRGNRYLRVLFVQAAWVVLIKPKSWQRHGLKPWIEAAKKRLHHNVLAIALANKLARIAWSVLARGRGFEASKLQVA

SEQ ID NO: 505231 - protein, 341 aa, unidentified
MLEVNTIGLDLAKNVFQAHGADASGAVVFRKKLRRNQILTFLAPQPTCTVAMEACASSHYWAREITRLGHAVRLIAPAYVKPFVKRQKNDVADAEAICEAAQRPAMRFVGVKSEEKQAAGIVFRTRDLLARQRTQAINAIRGHLAEFGIVAAKGPFHVTKLTTAIEDDPSALPESARQILRVLVEQMRSLDQKVALLDREIARRAKEDTEARRLMTIPGVGPITATALAALAPPAQIFKRGRDFAAWLGLTPLQRSTGGKQKLGETSRMGERTLRRLLIIGASAAVRWAMRKGTTADPWLSRLLSRKPKMLAIVALANKTARIVWALMAKGGTYRTSAVAG

SEQ ID NO: 505232 - protein, 461 aa, unidentified
MQNNAKRAKEVGDAPLGAPPVRVQVGIDAAVTANHHVCVRSLDSAGHEHTERFLVAPTLSGLALLTRRLASYPGAVAVAEPTSMTWLSLSVAVSEAGGELALLGSRHSARLRGAIVGKNKSDVIDADVLARAGDVFTLRPMPVMTPPQLALRRAVTRRGAAVIDGNRYWRRLMSLARWAFPDVWTAFGGSLPTAVAVLGRWPHLAHLGAARRASLTAVVAEHTRAVPDVPARVDQIRAAATAWARFWDGRLDLDALAWDVSEHLSDYHAALERVARATTQANAYWEQLFGDDGLLHSVPGIGPATGPTIRAFLGDGSMFDTGKQAACYAGIVPSNWSSGTVVQPSRAITKEGPAVLRLACYQAANTARAIDPQLAALYYRLMTERGHCHTKANVAVARKLVERVWTVITRGQSYQLRDPDGQPITSRAAKALIAERFTVPADVRQRARARSAATHRAKLTR

SEQ ID NO: 505233 - protein, 405 aa, unidentified
MRVFIGVDPHKLSVTIEVVDDRETVLTTGRFGTDKSGYAAMRRHVAAWPERTWAVEGSNGAGRPLAQRLLADGEHVVDVPAKLAARARLFDTGHNRKTDAHDAHAVAVVAVRTEGLRVLSYDVELEALRMLADRREELTRQRVQTVNRVQRQLSELTPGRAKKDITALQAKGILASVRPRDLAGKTRRRLAVEQLTELVAVEKKIKALTKELNAMVHARGSTLMDLPGVGPVVAARILADVGDVARFADRNRFASWTGTAPLDASSGEQIRHRLSRAGNRKMNHMLHIAAATQARLDTEGRVYYRRKLAEGKTRMEAMRCLKRRISDAVYRQLLADARRAALQAPETSEADPGGHCGATQESSAVDLPPHIDTSDQPLPEPATQTLQPTPPPRKTTGRTSLKRAG

SEQ ID NO: 505234 - protein, 402 aa, unidentified
MDVHRDNVTACIAQGPFDKAEEELIVREFPTMTSDIKELSTWLKEHNVKTVAMESTGIYWKPIFNILEEGFEVILANAKQVKNVPGLKTDKKDARWLARLLRYGLVPASFIPPKNIRELRDLTRTRRKLVGEMTRQKNRIQKTLQDANIKLSSVTSKVFGVTGEAMIRLLLEEEELAEEEITLLAKGKLKSKVDLLIKAMEGNVTSHHRFILQMHLNHIDFLSKQIKKFDKEIQRKLKPYHKEFKLIQTKPGFNEINSASIIAEIGVDMNRFPDENHLSSWAAICPGNNESAGKRMSGKTRRGNNYLKATLTEAAWAASRTKDTAISEKYRNIARRRGKKRAIVAIGHQLLKEIYYVLDTGEPHKEIGAETVSKRKSKMREHHMIQELTKLGYDIQPVRSSP

SEQ ID NO: 505235 - protein, 313 aa, unidentified
MEATALFVGIDVLKDRLDVHVHGRDEWFDVPRDTEGIAALVERLRALAPQIIGIEATGGFENVVVASLAVAGLPVVVVNPAQVRAFANALGKRAKTDAIDAAVIARFVAATQPEIRPVKDEETRLLADLVARRRQILAMIKAENQRRANAPPRMQKSIDRLLKALGREIDSVNGDIDTGIRNSALWREKENLLRSVPGVGPTIARTLIAELPELGTLDRHAVASLVGLAPWTRQSGRWRGKSFIGGGRANVRSALFMGALVAARHNPVLREFRNRLVAQGKPKIVAIVATARKLLTMLNAIIRDKTPWQKQNA

SEQ ID NO: 505236 - protein, 350 aa, unidentified
MTTIAEPRLVVTGGVDTHLDLHVAAVVTAVGGVLDTAEFPTTAAGYRGLLAWMRTFGDLDQVGVEGTGTYGVPLARHLRTEHVKVVEVMRPNRQVRRRHGKSDVIDAIAAARAVLSGEANATPKTHDGPVEALRTLKLLQRSAAKTRTQALNQLRALLVTAPDELRAKLRELTQRELLATCAGFRVGSDDDSLAGITRFGLRELAQRVLDLNDRLRGVKLRLKRITEQVAPDLTALKGVGPDVASTLLLTAGDNPERLANERSFASLCGVSPVQASSGKTHRHRLNRGGDRQANAALWRITLVRLHCDPRTKDYLAKRVKDGKSKTEAIRCLKRYIAREVFAALPIPAAT

SEQ ID NO: 505237 - protein, 361 aa, unidentified
MNKCIICGMDVHERTIKTCTAAGDGKPEVQTFANTEEGRAALIRYLRGWARKHGCKDMATAYEACCLGFGLYDELMAAGIVCHVLAPSLMRKSRKDVKRKTDEADARMIFETLRGHVLAKNSLPSVWVPPQDLRDDREVVRTRLNVGEKVTEVKTQIQMLLKKNGIRKPAGVGKAWTVVYRKWLLGWLECGGPELSHGAAIAMKSMLRQLAALEEEIKRLDKEMETLAATPRYRAASEALVKRIKGVGLLTAMVFLTELGDMNRFQNRRQLGSFLGLAPTSDESGEVTDRKGHINRSGPARVRWALCQATWVRLMHDELEAAAFDRIRKGSKKLKKVAQTACMRRLGILMWHTAKNVRTAA

SEQ ID NO: 505238 - protein, 363 aa, unidentified
MEVAGRFVGIDLGKRTYEMCIVDQKGKITRTGGKTDFAGIDRLCEKLNGDDAVAIEACSLAFRIERAIRKSVGCKVCVMNAGRLAVIYMSTRKTDKEDSLKLAKLLKNHDEDELPIVTPPSDEEWERRKLLSEYRSLKCQRTKEINKLHAIFEHNGYTQFVRKDMCSEKNRANILPLLKGYEKEEAERLIERLTLLEKQIEQLLQKINAEVESDAKIQKVMTVPGIGPITALAYVAYVGDVKRFDNAHQVSNFIGFVPKVDNSCTICRSGHTTKKGNPLLRSLLVQAAWATVKSKNGGALREKYKYMAESRCIGKGKSIVTIARKLGELLYLILKTDQEYKPQKFVIPEFKISKLAEEALKCS

SEQ ID NO: 505239 - protein, 359 aa, unidentified
MSKRLWVGLDVGADTMNVCVVNDQGSQMCEEVLPTSAAALDGLLRPMRRGNIVAVGMEAGGTSIHLARSLTRMKYPAVVFECRQISAYLGMRGNKTDRNDARCIAEVTRTGRGVVSEVVIKSTECQRIRSLLTLRQQFIRMRVAGEAGIGSLFRLHGGKLKRSYTAGALRREVREEVARLKKHEKIDLREDVEPMLALCERMRGQVELMDRQILETAKGIEACRRFMDIPGVGALTALSFYSAIGDPHRFKRNEDVGAYLGLVPRVRQSGNSVARYRISKMGSTLTRWHLSVAASVHLRANSGDTRLKAWGGELQERRGRGRARAAVARKLAVVMLAIWKSGESYDPFFSAPPALSSAS

SEQ ID NO: 505240 - protein, 360 aa, unidentified
MREKNQGQKVAVRGKEVFVGIDVHKESWQVTVRMDAEEVFHGRMPSQFPALRKILDRYKGSRIKVAYEAGPCGFGLHDQLREDGVEVLVVAPSLIPVESGNRVKTDKRDSRKLARLLEGNLLKQVHVLSEEERMHRELLRTRHQIVGHRSDVARQIKSKLLFHGISSGWAEKQQWTLKYVQWLRGLSLGSQYLKESLEVLIDLYEYLSRQLMRVNRRVAELSRSDKYREKVKLLRTVPGVGLLTGMEVLVELQDMGRFRSSEEIASYLGLTPSEYSSGEKSRQGRITRSGNWRLRSALVESSWILIARDHWMRMRYMRLKARKGAKRAIVAIARRLIIRLRSILLSNVPYRGGNPLVREA

SEQ ID NO: 505241 - protein, 343 aa, unidentified
MERYVGMDVSLKETSICVVDGDGEIVSEGTVISEPSAIAKHLKTKAGSARRIGLETGPTTTWLWHKLRALGLPVICIDARHAKAALSLQINKSDRNDAVGLARIMQCGWYKEVQVKSVTCHEIRAVLNSRAQLVKIKLDLENQIRGLLKNLGLVIGKARGNVFCRRVEELLGEQGLLSEAVRPLLVVREKISLEIAALHKKLMSLARNDEDSRRSMTVPGIGPITALAFHSAIDDPSRFRRSRSVGAYVGLTSRRHASGEVDWSGRISKCGDRMLRGYLFEAAGVLLTRVPQWCKLKAWGHRLWKRIGFKKAKIAVARKLAVILHRMWRDGTDFIWSSKETPA

SEQ ID NO: 505242 - protein, 313 aa, unidentified
MEPCRVAGIDVSKKELECFFIPNAVGWLEPNSGAGIEALVVRLQELKPDLVVLEATGGYETAAAVALILAGFEVAVVNPRQVRNFAKAMGKFAKTDKIDARIIALFGERIRPEARGVPEQDVRELDALVTRRRQVQAMITAEKNREQVAAVAVRPRIREHLRWLAQELDAIEQELGALIEKSPAWHARENLLMSVPGVGPATARTLIAELPELGALGPKRIASLVGVAPWPRDSGIFRGQRKISGGRASVRCSVYMATFVAIRCNPVIRAHYQALTARGKLFKVAMVACMRKLLGILNAMVRDSRPWTVSAAA

SEQ ID NO: 505243 - protein, 408 aa, unidentified
MLEVKVERCAGIDVGKKFLEVCILIGPVHRKPAEEVRRFGTNVRDLEALRAWLLEKACTEVVMESTGSYWRPVFNILEGNLQVILANPEQVKALRGKKTDRKDCRWLAGLLRHGLVQASFIPPRDIRELRDLTRRRRKLLENGTEERNPVAKVLEDANVKIGNVLADVFGMSGQAMLEALLENKLSAEQMANLAHRRLRPKIPQIFEALEGHRMSDHHRLLIGQALKHMQFIEDMVEELNQEIQKKLQPYQRQIELACTVPGIARDAAASILAEIGFDMSDRGPFATCHHLASWAGVCPGNNSSGGKRKSGNIRKGNRWLKATLSQTAWAGAAKKNSTFQFRYQRLKTRRGGKRAAIAVAHAQIIALYWVLRNGVPYQQQIRELHQQQRESMIRHHLARLTQLGYSTT

SEQ ID NO: 505244 - protein, 346 aa, unidentified
MRFYQRTHSFYCGVDLHARTMHVCVVDAEGVTREHVNLPCDPGRFLKVIEPYRERLVVCCECLFAWYWLADLCRDQGIAFVLGHALYMKAIHGGKSKSDKIDSEKIARLLRGGTLPQAYVYPKEMRATRDLLRRRMFLVRQRGQALAHVANTFTQYNVATPEKKLSYHKNRVGVVDRFQDQSVQRAVQSDLQLAEHLDEQLRGIELYLIQHAKIDDPQAFARLQTISGIGPILAMVIVYEAHDIGRFGSVQQFVSYCRLVKCSHESAGKKTAGHGNKIGNAHLKWAFSEAAVIMLRESAGAKKFVARREKKHGKAKAISILAARIGRTVYWMLKRKECFDEARFLK

SEQ ID NO: 505245 - protein, 437 aa, unidentified
MMLQSIPYLSVGLDAGADFTWMSIMLPNGILTGKPFKIIHSDPASRELAVTKIKEAQEAYSLESRCFLESTGIYHIPLLCFLRDKGFDCSVINPIITKNSTNMNVRKLHNDKFDSKKAAKVGLDASLKTSIIPDDAVIDLRNLVRDYYYFKDLQSAVVLKLTAELKVSFPAYRNVFCKATTQTSLKLLDAYPLAQDLLAAPKGTVVEMIRSTARFGEKYALAKYDALYAAAEDAAIFGRALPSNALRIRLYIKLYREYQEHLDGILEELHKAVDRLKGTPVHNRISLLQTLPGIGFLSAVVLLAEMGSFDLFSSPKKLYAYFGMDPGVNDSGKFHGDRVHMSKRGSSLARRILHMAAINNLKVDKAAKMPVNPVIYDYYVRKCAGKKKIVAVGAVMHKICNTIFAMLRDNKPFELITPEEHCQRYAAEHQGSVSTAA

SEQ ID NO: 505246 - protein, 414 aa, unidentified
MAVMDVVHGRCAGLDISKKDAKVCVRVAGTGRRKTTETVTTWGATTNQVLALREHLMTEQVTCVVMEATGDYWKPFFYLLEDAGFEVLLVNARHVQNVPGRKTDVADATWLAQLGAHGLVRGSFVPPEPIRVLRDLTRARTAITRERSREVQRLEKLLEDAGIKLSSVASDIMGVSGRLMLQALIEGQHDPAVLADLAKRRLRSKIPALTEALTGRFTEHHGFLARVHLDLIDQHTHAIEELTSRIEVVIEPFQAFRDLITTIPGIATLSADVIVAETGADMSRFPTAGHLASWAGTTPGHNESAGRVKSTKTRPGNPYLQGVLGAAAMSCAQHPGTFLGARYRRIASRRGPMKANIAIQHSMLIAIWHMGRNGTLYDDPGGDYFQRLHPERAKNRALHQLEAMGYQVTLDRAG

SEQ ID NO: 505247 - protein, 333 aa, unidentified
MVEGTEGSHHKEGSTKMSQISTIVAGIDVAKAHLDIAIHGCKQSWQVANSPEGLLELTRLMRRHHVTRIGLEATGGYERDVVEQLRKAGFVVIVLQPLQVRAYAVVKLQRAKTDRIDAALIAAFTAEHAVVREPPDPRLAGLSERLTCLEQIEEDMARLKVRLEHVRDPDMLRDWKADIATLKQRRARMIAKLSAMLRQHDDLATRLELLLSIDGIGPRTAIALLIRMPELGRLSRGEAAALAGLAPFNNDSGKRVRQRSIAGGRTRLRTSLYAAALPASFQWNAALKRLYARLRAAGKPHKLALVACARKLLIFANTVLARGTPWLKSQPLI

SEQ ID NO: 505248 - protein, 433 aa, unidentified
MKVKYEDRLKQKLLAITPDTLVVGVDIAKNYQWARFVDFRGIEHSRALKFKNRKGGFEIILARIQEICKKENFAKVVVGMEPTGHYWKAFANWLEKQDGITVVLVNPYATKQAKELDDNSQTKSDKKDALTIAKLVKDGRYFELYLPHDIYAELRGLSTTRTGLNKRKNALKNTITAILDEFFPEYEEVFKHPLTGKASRHILKTCPFPKSILELGEEGVTAEIKKAVKKTVGRKKAGQLVEAAKGSVGVDYGEEAARLKLRLMLEELELLEKQTEELESQMESALEKTGYAEFLLSIKGIGVVTLAACLGELGDPTRFESPRQMSRMAGYNLVEDSSGKNKSGTKISKRGRKNLRSVLYQMSLTMVATNDEMKQLYHYLKTREKSPLRKMQALIVVSKKILTLIHTLAKKKESYDPEKVFGTVRREQFKAAA

SEQ ID NO: 505249 - protein, 346 aa, unidentified
MPETEVDTFAGIDVSARELSVALRRGKGEDKPAMAKFSNHPSGHKALITHLLRGGRRVRVCLEASGNYSLDLALTLQAHRQVEISVINPRRARRFAESLGQRSKTDPVDARVLCEYAARMPWVVWQPPSSVALHLRAVARAIADLGVIHTQQNNRAHASAASQALPVLVVKEMQRHQKYLEQRMTRLRREALRLIAGDSELDRRFRLMLTTTGIAETSALQILGELAVLPDMLDARQWVAFSGLDPRLFKSGKSVEKRPRISRGGSRHLRRALYMPALVALRRDPYLRRFYQNLLARGKARLQAVVAVMRKLLHALFAMFRTNQSYDGSKLCCAVDMAGNAIAACA

SEQ ID NO: 505250 - protein, 365 aa, unidentified
MKKVSTMRAGGKDIFKGQLTIGLDLGDRSSAYCVLNETGEIVLEQKVATTPEAMKQVFGSMPRCRIAMETGTHSPWVSRLLAAPGHEVIVGHAQKIRLITKSRRKDDRLDARTLARLARIDPELLSPVKHRSAEAQLHLAEIRARAVLVSARTALINAARGLAKSYGERLQKCHTQQVRRETANGLSAGLRDALQPLLQEVESLNERIQEYDRRIAKMTSERYPETALLKQVKGVGDLIAATYVLTIEDPHRFRKSRDAGCFVGLQPGRRNSGESEPQLHISKEGDEYLRTLLVQGAHYILGPFGEDSDLRRWGMKLAVRGGKTGKKRAVVAVARKLAVLLHRLWISGEVYEPLRNTQKALSTAA

SEQ ID NO: 505251 - protein, 369 aa, unidentified
MKKHSKKANEKGRMSANQGQPEVTIGIDVGDQYSHFCILDGAGEIVKRGRVSSTQAGLEKEFGKIPSGRIALETGTHCHWMSEVLSQLGHEVIVADARELKSISGSRRKNDPRDAEQLARLARVDVRLLHPVRMRKRKTQQDRSVLRARDLLVASRTQLICAIRGMVKADGSRLADCSAESFPEQVGQSIPEGMRRALAPLLETLDVLNEKIRYYDELVTHIAAEEYPETCLLKQVPGVGPVTALYFRLVIEEAQRFQHSRDVGSYLGLVPKQQDSGESTPELRISKAGDEGARRLLVNCAHYVLGPFGPDTDVRRWGLRLAARGGKNAKKRAIVAVARKLAVLLHRLLVTGEVYEPLRNSQAAERAAA

SEQ ID NO: 505252 - protein, 317 aa, unidentified
MSKHNTVCAGIDTGKYKLDVAIDESADQLQVDNSPAGYRCLSAWLRQREVERIGIEASGGYEQAVVSFLRADGFVVIVFQPVQVRAYAKFVLQHAKNDNIDAVLIARCTAAATDIHEPPDARLAPLAQRLTMIEQLTQDVAQVKTRREACWDQRIREFWKQEIDRFKRLLQAELKQLVAAIREHRDLSTRLDLIASVDGIGLRTAVAILVRMPEIGRVSREQAAAIAGLAPYDDDSGQRRGLRHIKGGRQRLRQSLYAATLPAAFYWNTQLKALYKRLITAGKTHKLVLVACARKLLIFVNTVVARGTPWKSAPATT

SEQ ID NO: 505253 - protein, 353 aa, unidentified
MEQFIGCDAHKKFSLFVTMNETGEYGRATRVGHDREVFREFLAKLPAGSQIALETSGSYYWLVDEMERAGHRPQLAHALTAKRRMEGRHKTDEKDARGLAMLLRNGTLPRVWIPPAELRDQREMLRWRMCLVRMKTQLKNRIHGVLLRYNLSIEASDLYGDQGRVELLSRLGELPKWSQESVLEQLQMVDSVETQIGDCEKQLEALLYPSAERDLLKTIPCVGKILSAVIALEVGDVRRFPSAADLVSYAGLVPSARESAERKRQGRCPRDCNVYLKWAFVEAGNLIACKQKHWPEHHAVQLYQRVKQGTKMHGKATMAVGRHFAEASYWILSKQEVYREPKQTRQVLSSTHG

SEQ ID NO: 505254 - protein, 493 aa, unidentified
MDRNGEQVQVDSIEEEILARVAAIDVGKDAGMICTRVPHPNQPGKRASTVSSVPARTGTILALADRLVAEGIERVVLEATSDYWRPFYYLLGARGLLVWLVNARDVKNVPGRPKTDKLDAIWLAKLNERGMLRASFVPPVEIRQLRDYTRLRVDLIGERSRHIQRLEKLLEDALIKLSSVATNMMGVSGRAMIEALIAGERDPHALAELAKGRLRVKRSALVEALNGRFDEHHAELAELLLDQIDGFGAQIDHLDARVEQLIAELPAAQALPEPAGPGGPDTPHHLAALDRLDEITGVGRHTAQTIIAELGLSMAIFPTAGHLVSWAKLSPRAIQSGAKTRSGKTGKGNPYLKAALGEAAASAARTNTFLGARYRRLVNASANSKPSSRSPDPSSSSSGNYSPSPPAATPTSGPSSSISAYAPNAASRTTSASSKPSATRSPSNRQPHEHQPPARLFPISTSTRSSTSPRPDVRAGSCPTTSPSPGPPPINGS

SEQ ID NO: 505255 - protein, 325 aa, unidentified
MLYVGIDVAKDELVVAGCDAAERFSLEASYPNTKPGIARLLKRLRPLGELRICLEPTSSYHLAALVALLKLPGRVSVVNPAAARQYARATMRRGKTDRTDARVLARYGLHCDPAEYCPPSTAALKLRSITRLRETLVVQRTAMSNRRHAAKRAGAPRCVQSSIDAELKFLRTQLERLAQAGGKLIRADQQLATVYALLLSVKGIGEESALQILGELACLPPDMLKEQWVAVAGLDPRPSDSGQTSGLRRISRQGNVHLRRALFMPALVAANHGPGTRDYYQHLLVRGKKPMQALVAMMRKLLHAIWGMLHTQQPFAPQRFYRQTT

SEQ ID NO: 505256 - protein, 346 aa, unidentified
MKYSVGLDVSVKETAICIVDEAGKVVRESKVATEPQAIIAFLNGAEFEYARIGLEAGPLSQWLVNGLAEAGLPVICVETRHMKAVLKAQQVNKSDRNDARGIAQMMRVGLYKPVHVKTLASQQKRMLLTSRQLLCDKLQDMENELRGTLRNFGLKVGVVSAGHFEARIKELVAGQPPLEMIVVPLLTVRRVVREQLAKLDKMVLDQVRDDKLCRRLMTVPGVGPIVALTFRATVDQAQRFARSKTVGAHFGLAPRRFQSGERDYDGRVSKCGDAMMRTALYEAAQVLLTRTQTWSWLKAWGMQVARRRGAKKAIVALARRLAVVMHRMWVDGTEFRWRKEADTAAT

SEQ ID NO: 505257 - protein, 322 aa, unidentified
MRYIGIDVSKATFVVAYSSDKGGEIRTFNNTTAGIRQFIGTLPKDGSIHCVMEATGNYSALLLYMLNVAGITVSMENPLKVKNFAKAMLSTIKTDKSDARLITLYGEKMNPRPFKVQGEAILRLRQKRTVIRQLTKQITAMSNLRGSLACLPVPDKGATHTVDETIKFLEKKRDRLQSELTDLVEVEFSRQLALLTTIKGIGITLATALIITTGGFTYFQNAKQVSRYLGICPTYEQSGTSVNIRGHINRNGDAYTRGLLYVAAWTASRFNTKCGETYTRLRQNGKPGKLAMIAVANKLVRQAFAVVTHDKEYVDGFVSNRP

SEQ ID NO: 505258 - protein, 399 aa, unidentified
MMTIGAGHVGLDIHKHHVMIAAVDDQQEIMLAPQEVSIPHFTSWAQTHLYPTDQVALEATTNAWVLHDNLKPLVESVAVANTLQLKLIGASASKTDKQDALILAKLLAANLLPDVWVPPPPVRELRRLTQHRSQLLQQRSALKNKLHAILHQHNLQLPDGDPFSATNQSWWTELSINPTEALQIRHFWLSLEHFSQLLTETETHIAQLSVNDHWNDAMTLLMQLPGIGLYTGMTILAAIGDIARFPTAPQLVGYAGLGARVRASGESYRTGKISKRGRRELRFALIASAWVAVRWSDYWRAQFHPLAQRIGKQKAIVAIARKLLMTIWHILTKREPDRHGDPEAAARAFMTWASHHHLARSQGVHRLDFVRERLAHIGILDQITSFQANGRAHFLKTDP

SEQ ID NO: 505259 - protein, 376 aa, unidentified
MNQHKAFFGLDVHKEKIAVAVAVGRQAPEFQGVILNRPEAIRKWVQAVRQHHSQVEVAYEAGACGFVLQRQLDELGVSCQVVAPSLVPLPAGRRVKTDRRDALLLARLLRSGDLTPVWVPDAEHEALRDLVRAREATVADRLRANNRLRKLLLRHGVQPPPRVKPHTRAYQRWLADVQLPYPTQQVVLEEYRAAVAECQARIDRLEEVLRRAMATSRYAPTMAAFQCLRGIGPLTAVTLVAELGDLRRFKKARALMSYTGLVPSEYSSGDGHHRGPLTKAGNAHVRRVLVEAAWHARHVPRVGLGLKRRQADQPELIRAISWKAQQRLHARYDALVHRTHNAPKSVAAVARELIGFVWAIAQQVPPPTPHPLSLAA

SEQ ID NO: 505260 - protein, 348 aa, unidentified
MRFYDSQKQFYCGIDLHARSIYLCLMDRERRVLVHRKLKNGSTDLLLKILQPYKHDLVVAAESCFAWYWLADFCADNDIEFILGHALYMKAIHGGKAKNDRIDSKKIALLVQGGMFPLAYVYPKGKRALRDLLRRRLHFVRLRGELFAHVQIVNYQNNNRPLPRLGNNKSIRDEVPELFENETTRKIVESDLDLIKYYDEFIPKLEWHIFSKTTQLYQKELAILSSARGMGRIIALTILFEVDSIDRFPSVQDFASYARVVKCTHESAGKKYGTGGAKIGNPYLKYAFSEAACLMAKYNPRIKTYLQKMERKHGKSKGKIILAHKIARAVYYMLKRETVFDEDKFLNN

SEQ ID NO: 505261 - protein, 308 aa, unidentified
MSKHITVCAGIDTSKRKLDVALAAKKERLQVDNTPGGHERLSSWLRLHGVGRVGIEASGGYEFAVVAALRRHGFVVVVFQPAQVRAYATFHLQRAKNDKIDAALIASCTAEVKKIHAPPDPRLAAFAGPLTAIEQMTDDLTRLKTRRESCRDARLRQLWKEEIARLQKLQQAEFKALVATIRQHQDLARCLALINSVEGIGLRTAVAILVRMPEIGQITREQAAALAGVAPYDDDSGTYVGVRHIAGGRERLRGALYAAALPAAFRWNPQLIALYRRLTAAGKLHKETHAPVSLFDCRPFLRPDLPAR

SEQ ID NO: 505262 - protein, 328 aa, unidentified
MFTKCEISRINTEGREVDHVILDTSLRELIFHIKEVKSKTNQQVDVIFEEGELAGWLYRGLIPHAHKVVSSDPQKNDLIHSHGDKTDILDPLKLAQLYRGGFINPVHHIDDKKRAQFKSLVYMYHKVSKDVIRNKSRLKSLFRRSGIMVSGKKIYNPKNRSDYLSQIDNKECAKVEFEILDMLIDKKEKLERSIKHGSKKYSTINRLKTIPGFGDIIAPTVFVIIDNPYRFRRKSQLWSYANIGRRRAQSGNKEKSKKQKTGNRLLKKVIGNAYSVAKKGGNKFFKKYIELVSIKGKDSRIARRVVCRKILTTAWSIWKNGTVYQDNY

SEQ ID NO: 505263 - protein, 382 aa, unidentified
MQPINTVNPTIYLAIELSASTWLIAARLPGSEKPHLHRIEGGDTAALFALISSLRARVARRLDAAIGVVCCFEAGRDGFWLHRLLTAHGIANYVLEPTSILINRRARRAKTDRLDAIGMLRVLAAYLRGDRQSCSMVRVPTPEDEDAKRIHRERENLVQEKLRIENRIEALLFTQGIRKRPSLRSWERDLAVLRTGDGREMPRHLRAELDRLRRRLVTILELIREVEAERDEVVTTNPEHQTSRKIVALCRIRGLGENFAGVLTREVFYRSFDNRRQIASSVGITPMPYQSGSMDRDRRISRAGNPRARTTMIQLAWLWLRYQPGSELAEWFRKRVGTLAGRTRRIAIVAMARKLLIALWRYVETGVLPAGAEIRPESVAAA

SEQ ID NO: 505264 - protein, 343 aa, unidentified
MDYFAGLDVSVKDTSVCIVDGTGKIVREVKVASEPDALVTVLASPRYRFKRIGLEAGPLSQWLFSALAEADLPVICVETRHMRAVLKAQINKTDRNDARGIAQMMRVGLYRPVHVKTLRSQKLRMLLTHRKLLQAKAIAVENDLRGTLRNFGLKVGMIGTVKFEARIKELVESFPDLVALVEPLLVVRRVLREQINILHRRVLATVRDDKVCRRLMTVPGVGPVVALTYRATVDVPARFRKSKSVGAVFGLTPARDQSGERDRPGAISRCGDEMMRTTLYEAAQVMLLRSAKWSWLKAWAMKIARHRGMKKAIVALARRLAVIMHRIWIDGTEFRWTREAAAA

SEQ ID NO: 505265 - protein, 354 aa, unidentified
MSDKSSLTVAAMGIDIGKNSFHVVALDRRGAIVLRRRWSRGQVEARLANMPPCLIGMEACVGAHHLSRKLQSQGHDARLMPAKYVRPYSKGQKNDFRDAEAIAEAVQRPTMKFVATKTADQLDLQALHRIRGRLVSQRTGIINQIRAFLLERGIAVRQGLRFLRAELPIILATRSDVLSPRMLRVIEELVADWRRLDERIEGLSEEIEALARQDPACERLMTVPGIGPIISSAMVAAIGNGAVFTKGRDFGAWLGLVPKQISTGDRTILGAISRRGNRYLRALFVQAAWVVLVRIKDWDRYGLKAWIDAAKKRLHHNVLAIALANKLARIAWAVLNKERAFECVRTRATSPQPA

SEQ ID NO: 505266 - protein, 332 aa, unidentified
MENFYFIGVDVSKKKLDFCVMFEGKVVHEEETANHQSAIMSLLHQLEEDYGIASDQILVCAEHTGQYTFPLACACKAVECKLWLENAAEIKYSSGVQRGKNDKVDAKRIAIYARRFQDKVQYYERPTEDIERLKQLESERTLYVADLAKYKGQVKDQKDYMPKALYERKMKRLQALMEDLEEAIQAITDEMDEVIVSCPVLYRQRELLMSIDGVGRVVATNMIITTEAFTRFDDPRKFNCYAGVAPFSYSSGSSLHSKARVSHRADKVMKRLLHLAAVAITHRIGGELKKYYERKVAEGKNKMSVINALRAKIVARMFAVIKRNEKYKPILS

SEQ ID NO: 505267 - protein, 476 aa, unidentified
MNSKTKRANNQVNSVMNVQEQREMVEKANRILSEMKSFTWRDLETQGKFSKNDKLSFISDDMLILGCDIGSETHYVRAIDTRGRELSRKALAFDNNAEGFQKAHDWAVQLAASNDKKQIVLGLEPTGHYWFCLAAWMVSNGISVVQVNPYAVKQTKELEDNSQQKDDRKDPKLIANLVKDGNYGMPYLPEKVYAELRRLSMFREQLTEDRNRSMNRLHREMKIYFPEYKDAFGKIDGAFCMAVLKEAPFPEDILKLGGEGIREIWHQAKLRGRGYSRAAEIVKYAETSIGLKDGTAAGREAVRWFAEKIMELDEELAEIENKLNEKCREIPHAENVLEIPGIGGKILSGILAEMGDVSRFDDAKELQKLSGLGLVSCSSGKHKGETRISHRGRKRLRYWLFQAARSAVAHGEEYKWIHAHYTTRAGNALQKMQSLIVIACKLLRVIYTMLKTGKPYDPEKLLKDIRYPENVQTAAA

SEQ ID NO: 505268 - protein, 425 aa, unidentified
MKKTDYLSTLFVGIDIGSRTNVVSAIDFNQDFFIRMKPVPNAKEGAETLESLLVDVLSAHHEFNHVIIGLESTGFYGVHIANYLSASDLLAPFGTEVYCLNPKEVAKYKESFNALDKNDGIDSFVIADFARVGRISIKPWRGAQYLALQRLTRHRLHIAECIAREKTYVLNNIFLKFSEFAMLKKEDHPFSNKYGATAEAILEQYVTNDDIIGASIEELVELIESKSRGRITDPEETAKILKAAANGSYRLDRVVAEPITLSISSSFNCIRAFEKELKAIEKAIEHTVQGLNPVEYQILKSIPGIGHVYAAGILAEIGTIKAFTGNGALAKYCGIVWKENQSGNFRAEDTKMSKAGNRYLRYYVIEATGSVINNCPEYKDFYDKKFAETTTHQHKRALALTSRKFLRMLFGLLDKSQLYSLERSR

SEQ ID NO: 505269 - protein, 339 aa, unidentified
MYPFYLGVDLHLKNSYLVLLDQSGKRVDDRHLRTSELVAYVKDHVPRETCAVLEATRNWAYFYDELSALVAEVKLAHPKELKAISSAAVKTDRIDATVLAHLARMNYLPVAYAAPKDVRDLRQYTRHREELVNLRTQAKNRVHAVFAQYQIAYPKSDLFGKGGREFLDAYLDKVRPSAKYVLRNQLALIDRLDELIKETVLAQRKALNTEQKQIHRLLMSIPGIGAIHAATILAEIGEIERFQKSKSLCNWAGLTPRIRNSDQVIRHGRISKQGSPHLRAAMTQAAAVASYRNKYWKNVHDKLVPRCSKKGAKVAIARRLLTVVFYVWKRREIYREPSV

SEQ ID NO: 505270 - protein, 414 aa, unidentified
MDVVVERCAGLDVHRDSVVATVRVPGKGKSRRRRAQQTRSFGTTIRQLEQLANWLQGFGVTLVGMEATGIYWKPVFWVLERRFECWLLNAQHLHNVPGRKSDLIDSAWCCQLLEHGLVRPSFVPPPEIRRLRDLTRLRSSQMEERSRAIQRLEKVLQDAGIKLSSVASKTYSVSARAMLEALLGGVSDPAILAELAKGKLRAKIPQLQEALANRFELAHHGVLVAQLLAHIDALDETVANLDGRIIEATDPHAELITLLSTIPGVGRYIAEVLIAECGVDMTVFPNAEHLVSWAGICPGTNQSGGKRRSGKTRHGDRWLRTALSEAARAAARTKNTYLASHYWQIRGRRGEKKAIGATRHDILIAYYHITRDQVPFRELGPDWLARRHSVEHRTRRLVKQPEALGHAVTLEAAA

SEQ ID NO: 505271 - protein, 353 aa, unidentified
MTGTKYIGLDVHKESISIAVRNAAGKLVMECVIETKANAILDFIHGLRGELQVTLEEGTWATWLYDLLKPHVTKLVVCDPRKNSRDGNKNDQIDARDLSNRLYMNKLSSVYHGGAGVRTLKELARSYLTISKDLARVMCRVKAIYRSWGIPCAGKQVYAPRHRAEWLAKITEVGVLRRAEFYYQQLDALRLLRHEVRRELLAESKKHKATKLLCQIPSIGPIRAALLIALIQTPQRFRTKRPFWKYSGFAIEMHSSADYRSVKGELQKSRKQVSVRGLNRDCNHDLKNLFKSAATIASVKPGPFQEFYAALVAKGMRPEMARLTLARKIATIVLIVWKKGVRFDAKYLKPQTA

SEQ ID NO: 505272 - protein, 340 aa, unidentified
MTYVGIDVSKATFVVAYSSAKGSETKTFKNTVKGIREFIQTISPKENHCVLEATGNYSMLLVYLLSKAGFVVSMENPLKIKNFARVMLSVVKTDEIDARLIALYGERMQPAPFKLRNDSILLLKQKRTVLRQLKKQLTANTNLEGSLKVLPFIDSKSKKVLEKTIKFLQKQIKEMEEELTSLAEIEYKKQMDLLTSIKGIGATLAAALIIATGGFTYFDNAKQLTRYLGLSPTYQQSGTSVNVKGHINRNGDAHLRSQLYIGAMASLRCNTECKACFERLRSNGKPGKVAIIAVANKLIRQAFAVVTQEKPYVDGYKSAKPLYINFYYYLCIKLQHQGVE

SEQ ID NO: 505273 - protein, 329 aa, unidentified
MIRPTLGIDIAKLKFDVCLLNPQGKRRHKAFPNTAAGFSQLAMWLIKQGVTREEMHACLEATGTYGEALAYHLHEDGHTVSVVNPAAVKAFAGSRLSRTKTDKVDAELIARFCLAQQPLAWTPPAPEVRELQALVRRLEALIEMRVAEENRLEAGSVVAAVRASVEEHVAYLAAEIKRTEELIRNHIDNHPTLKQQSELLDSIPGVGQTTAALLLAEIVDMTQYRSARQVAAYAGLVPRERRSGSSVRGRPRLSKIGNARLRKALYFPAITALRCSPFFKEWATGLRERGKCKMSVIGAAMRKLIHLAYGVLKTGKPFDPEWARKEKTA

SEQ ID NO: 505274 - protein, 344 aa, unidentified
MNAVGIDVSKGKSMVAIMRPFGEIVSTPFEIKHTSSDINSLVKLIKSIEGESRIVMEHTGRYYEVLAHQLSEANLFVSAINPKLIKDFDNDSLRKVKTDKADSVKIARYALDKWQNLKQYSVMDELRNQLKTMNRQFGFYMKHKTAMKNNLIGILDQTYPGVNTYFDSPARSDGSQKWVDFASTYWHVDCVRKMSINAFIDHYENWCKRKKYNFSKSKAEEIYGKAKELVPVLPKDDITKLIIKQAVDQLNSASITVESLRTLMNETASKLPEYPVVMAMKGVGTSLGPQLMAEIGDVSRFTHKGAITAFAGVDLVLTNPALMNRKVFQLQNEVLLTSGKHYFR

SEQ ID NO: 505275 - protein, 411 aa, unidentified
MEEILCGIDWASDHHDVALIDVEGIKLGRRRISDDAVGLGELTGMFAEHGAGPGTVKIAIETERGLLVASLRAAGYDIYPVNPKAVDRYRDRHHLARGKSDAADAMVLAHILRTDAHLHRPLPADSPAARAIEVLARAHQDLVWSRQHEVNRLRSLLAGYYPAALAAFGDLTTRTAMTVLAAAPTPAAAAQLTTSDLLDLLAAAGRGRRRADARRLAEVFAAPQMRQPAAVEQAMGDAATAVITTITAMNTAVTALAQRIDASFEQHPDAAIYHSMPALGPILSARVPGEFGDDRTRWPDPASRRAYAGSAPITRASGKKRVVLARSIRNRRLYDAAHWWAFAALSVSPGARAYYHQRRAAGDGHQAALRRLASKLIGQLHHCLQHRVPYDEATAWTRHQEQSQPAPPAAA

SEQ ID NO: 505276 - protein, 390 aa, unidentified
MFYLGIDIGKFHHAAALMDQRGKVIATLPSFPNTRSGFHKLLALITAHLPPAEELRIGMEATGPYWIPLAEWLKAHGWIPVILNPIKTASLRNYGVRGSKTDNIDSVLIANTLRIEEEQPQQASPKLSEELRHFTRLRADMVKDRTRIALRVTSLLDRLFPELLSSFSKTLAPSCLTLLAAAPTPARVLALGEERLTTLLRKASGGKLKATRAKEIMDKAAVSVGITTQASEEVLALLLEQINLIGSQLTTLDHRITKLYKQAGLYFTSIAGVGTLTAGTILGEFGSVTRFTQAKQMVAFAGVDPKLRASGQHQGQVHISKRGSPYLRRALYLACQGAVRNDDYFHSIYQRHRDNGKSYKEAIIAVMNRFIHVLYAIWRDNRPYYPLTSA

SEQ ID NO: 505277 - protein, 323 aa, unidentified
MDELPSAILGLDVSKAKIDCALLLNGKLRSKVIANTPKGFAALVQWLHEHGAHCVHACCEATGVYSDAVATFLVDAGHRVSVVNAAVVASFARTRMTRNKTDRQDARLIAQFCERERPAAWKPLPASQRRLLAMVRDLQTLQDIRQAEANRLPDAHADVQPRIARHLAFLDAEMKKLRAAIRQHIDHDDDLRGGRDLLDSIPGVGEATIAWLLAYLGDGTRFKGTRQAAAFAGLSPHRHESGTSVRAHKGIDKRGVPDLRRALYMPGVVGYSRCRAYAPFVKRMKACGKAPKVIITAIMRKILTIAQAILASGKPFDPSLHGA

SEQ ID NO: 505278 - protein, 341 aa, unidentified
MQITTIGLDIAKNVFQVHGIDAAEKVVVRKQLRRGQVLKFFAALAPCLVGMEACASAHYWARELTKLGHEVRLMPAKDVKAYVKRSKNDAVDAEASCEGVRRPTMRFVQVKSAEQQGRLMQHRVRDLLMRQQTQVINALRSHLAELGIVAAQGREGLKQLLAIIADESDERLPIDARASLIVLAAQLQALHTMIGSIERRLTVQHRANEASKRLQSIHGIGIIGASAIAATVTDPKSFQSGRDFAAWIGLVPRQNSTGGKPKLGPISKQGDRYLRRILVVGAHSVLRRAKQNPEKYPWLTQLLARRPFKVVAIALANKMARIAWALLASGGHYRPRLAAAA

SEQ ID NO: 505279 - protein, 319 aa, unidentified
MTAVMIGIDPHKASHTAVVISGAEEPLGELRVRASAAQAERLLAWAAAWPERTWAVEGAGGLGHLLAQQLLSAGERVLDVQPKLGARVRLLATGNVNKNDPNDARSVAVAALRSPGVREARPDDNAAVLKVWSKRRRDLASSRTQVVCRLHAVLCELVPGGVPKKIIAAHADRLLGSITPPDAVAAARRELAAALIEDLRRIDGHLGETRKKLDAAVRASGTGLFGVGPVIAATIIGEIRDVSRFKNRDRFAAYNGTAPIEVSSGQRKVNRLSRRGNRRVNHAIHMAAVTQVRQPHSEGRAYYDKKLTEGKPARRPSAS

SEQ ID NO: 505280 - protein, 341 aa, unidentified
MMIIGCDFHPRFQQIAWLDQVTGECGERRLEHPGQAAEFYRSLAPGQVRIGMEATGNYRWFRRLIVGLGQEILLGNPAAIRASVVRRQKTDKQDARHILNLLVEGRFPAVWQPPVENEALRQLLLHRCRLVRMRAQVKNQLDAVAKNEGLEERRTWSATRRREIEALPLSGWYERRRKDLLALLDTLSGQIRELDEAVELSAWNDEGARLLMTHPGVGPVVSLAYVLAIGDWRRFPRGKQVGSYFGLIPAEESSSDKRRLGRISKQGNTLVRWLLVEAATKAQRYDASWHRQYLRLSMNKHHGVAKVAIAHKLAVRLYWMLRSGQDYQHVMERGSHAGQSV

SEQ ID NO: 505281 - protein, 334 aa, unidentified
MNEIIAIDLAKTVFQLHFVEGSPSVIQRKVLKRQQILTFFSNRTPCRVVMEACGSSHYWARKLRAFGHDVRLIAAQFVRPYVKSNKNDAADAEAIWEAAQRPGMRFVAVKSADQQSILALHRIRQQIVRIRVMQINQLRGLLYEFGFIFPAGRSASIKAIRDQLPEMEADVPRMLLDSVEEQLGRLALLDEQVARIEMRITEWRRNDEACRRISEIPGVGLLTATAAVAVIGDAKTFRSGREFAAYLGLVPRQTGTGGKVRLGGISKRGDVYLRTLLIHGARSVIACAKRLPDQTQKLLARRPTNVVAVALANKAARIIWALLAHDRRYEPIAA

SEQ ID NO: 505282 - protein, 364 aa, unidentified
MKKVSRSSRATELKAKPSITVGLDLGDRRSHYCLLNEDGEVVEEGRIATTEAGIRQQFEGEPTQRVAMECGTHSPWISRLLKHLGHQVIVANARKLRAISQNESKNDRADAEMLARLAHSDPRLLAPLQHRSVERQRDLNLMRTRDTLVRARTMLVNAVRGLAKSAGGRLPACSTGYFIEHARPALPAELKKATAPLLNQITSLTRQIRRLDAEIEKLAEQYPEIALLRTAPGVGPLVAAAYVLTLDRADAVSTSRAVGAFLGLRPRQSQSGDSDPEHRISKTGNIYLRKLLVQSAHYILGRFGPDSALRRWGLRLAGAGGKRAKKRAVVAVARKLAVILNCMWRRGQPYQPFPEQKPAALAAA

SEQ ID NO: 505283 - protein, 467 aa, unidentified
MPRVRPHPHRRSPAVTLPPELHQVNLNAAGIDIGAAHHYVAVPPGRDPDGRDVRTFGAFTADLIALADWLTRCGIETVAMESTGVYWIPLFEQLTERGFEVKLVDPRQLKHVPGRKTDVLDCQWLQQLHTFGLLAAAFRPVDQICVLRSYLRQRGMLVRYAAHHIQHMQKALEQMNCKLTHVVSDIAGLTGLAIIRAILAGERDPHVLAQLRDRRCKADEATIARALEGTWRREHLFELRQAVELFDFYRAQIAACEAEIEAQLGQFADQSGGQPLGDAPRGRPAGRGALSFDARQHLQRLTGVDLTRIDGIDAPTALKLVAEIGLDMTRWPTEKHFASWLGLAPGSKVTGGKQFSGRTKPSANRAATALRLAAHSLHHSRSALGAFYRRLKGRLGAPKAITATAHKLARLIYRMLRFGTEYVDSGQDYYEQRYQSRVVAHLMRRAQQLGYQLIKNELVSVATTSPA

SEQ ID NO: 505284 - protein, 357 aa, unidentified
MGEHDRKPFHNKPEPSLERSRGTSSNSLGWDIMKNDSEFSVFVGVDVSKRRLEVFLPDSRRRLTIENSEESIVHDLLGALKGSKRKQTLVVLEATGGYESTLLKMLAKEGIAAALVNPRRVRDFAKGIGMDAKTDPLDAELISKYGQVVRPMPLAAKSAEEEKLKALVARRSQLLQLITQEKNRLQQTADAEIQDFIRQSLESLKKQLKQVDTRLAGCVKRDSAQARKVEILGSVQGIGPVAISTLLAELPEIGQLNREEIAKLVGVAPLNDDSGDRRGKRAIKGGRSHVRRVLYMSALVATRCNARISAYYQHLLGQGKLKKVALVACMRKLLTILNVMVKNNVPWRDEKSAPAMN

SEQ ID NO: 505285 - protein, 352 aa, unidentified
MQHFIGCDVHTRNQVVAWIEEETGEIRKRRLEHEGKEVKEFYAQFPRGTVVGIEATFPAYWFERLLGELGHELWVGDAARIRASEVRYQKTDPRDAEGILDLLRTGRFPRIWVPSLAERDLRQLLVHRMKQVRARTQVKNQLHALAISQGVCRKRKLWSAKGRAELEKLALLPWAARRRQELLEALDRLDEQVRELDRAVEEAGRTRPEVALLRTHPGVGMVVGLAFVLSVGPVERFPHSRKLVSYWGLNPRENSSGGRQRLGSISKQGNTMMRWLLIEAAQTAARLDPQLRRTYQRLKHHRNSGVAKVAVARRLVVRLFWMLRTRHNYAQLVHMSGSPSSAVVPPQGGPNV

SEQ ID NO: 505286 - protein, 270 aa, unidentified
MKLTTIGIDLAKTLFQVHGVDERGKAVLKKQIKRDQMATFFANLPACLIGMEACASAHHWARKLEGFGHTVRLMAPQFVKPYVKTNKNDLADAEAICEAVARPNMRFVPVKSVEQQAVLSLHRVRQGFVKARTAQANQIRGLLGEFGLVMPQGITNVRKRVPEVIENASNELPAAFRHLIARLLDHLKELDRQVDEIEAQIKAWHRSSPLSLKLEKIPGIGPLGASALVASIADAKSFDNGRQVSAWIGVVPRQHSSGGKIDIAWDKQTG

SEQ ID NO: 505287 - protein, 409 aa, unidentified
MSTDACSNVFAGLDWAVQTHAVCVIDTAGGVLDRFEIAHDRDGLAELMRRLARFGARVRIAIERPSGLIVDALVEAGHHVFPIHPNAVKASRPRYRSHGAKSDASDAYLLADLLRTDGHRWRELSPQSDSIRALRALVRCRDDLVGTRVALGNQLRSTLEAYWPGAACIFADITSPIGLAFLQRYPSAISATRLSEATLGRFCRSQHYSGRRSPAELLERLRSAAAGLAGPLTNEAAGQLVRAMVAVLQPLVTQISELTRRIERFVESLPDGQIIMSFPRAGRVCAAQILAELGDVRERFPSLDQLAAEAGAVPVTYQSGKTRSVAFRWACNHRLRQAVTCLADNSRHANAWAHGIYVAARARGCDHPHAIRILARAWLRVIWRAWTDRKPYDPELHLGALKLASDQGG

SEQ ID NO: 505288 - protein, 414 aa, unidentified
METVYRSVAGIDVHKKMLAVVIRRQPGEQAEYQKRKFGATCAEIQHLEVWLRAQGVSEVVMESTAQYWRPVWYGLEPHFRLHLTHPLKTRAPRGRKSDFRDAQRLADRWSAGDLEESFIPGSEQRAWRWLTRTRVQLKKKLGVIHSHVEGLLEQGGIKLSAVVSDLFGVSGWAMLEQIAQGVTDVEVLAGEARGALRKKERELKQALAGQLEPVYRLLLRQHMDQVRLLRRQVEEINQSLAEAMQEHLVALHRLSKIPGVDLYAAQELISEIGPKACAFASAEQFASWVGVCPGSQESAGVNYSARSAKGNRYLRRLLCQIAWAAIHTKDTFFAGLFARLKPRVEGKGAAWAVAHRIAKIVWLVLHQEVEYQEKGSAPPNERTLVRKFKRLLKEFGSLGLDVRALLDQQLPAPA

SEQ ID NO: 505289 - protein, 341 aa, unidentified
MKNKSFIGIDISKNVIDVSIFCEETPIKDFSHDVFNNSRKGFGEMCTWLKKNHVVLSNCLFGMEFTGSYSMELEKFLNARNYQFCMLSTHVVKHYPMGPKDKNDKIDSAKIADFLYRYNGTECVKPYNMPNKTMQRLKALMNERKFLVEQRTCFMNRRQLCITKEDAQLYDGYIKKFSRDIENIELEEQKLLATDDSLLSTYKNLLTIPGIGFVNAINVIVITRNFTAFETARQYASYVGVAPHFRTSGTSVKWRPRPSARCDGQAKADLSMAATVVVQYDAELQSFYNRKLGGKQDSDTKRKALNAVKFKLVLRMFAIGKQNRKWEPLDSKSSNEKLAIS

SEQ ID NO: 505290 - protein, 339 aa, unidentified
MSLYGGIDLHANNSVIVLLNEQDEVIYRKLPNALPTILEQLAPYHTEVKGLVVESTYNWYWLVDGLMEAEYRVHLANPAAMQQYSGLKYTDDHSDARWLAHLLRLGVLPEGYIYPKAERAVRDLLRKRAHLVRQHTANVLSVQNIMARNTGSRFSVKRIQELTKQELTTLLAEETQVLAVTSSLMVLDCLRQQIKTLEQSVHKRLHHTPSYEQLLTVQGIGTILAQTITLETGAINRFPSVGHYASYCRCVDSTKISNGKRKGTGNVKNGNPYLAWAYMEAAQFAMRFQPEAQRFYQRKLAKSRNNTVLARKAVAHKLSRACYYMMRDLVPYEATKAFG

SEQ ID NO: 505291 - protein, 383 aa, unidentified
MVGIYIGLDVHKNSVYVTEMKEDGSIGEQYEIRNEEESWNEFKKRYLSVKPEIALEVSTTGKYVARLLRDYGFSIHLADPVKLALIFNTSKKNDREDSYKLAKLLRLNELPEIHLPSRESDDLRSLVRYRKSLGEEITRIKNRIHALLSVHGISLKQTDIFGRSGLIEIERQSVKLSPAERIVLDHMLSSVIQLRKNAMEIEDEMARSGHERYDVRLLMTIPGINVYSAVAIVSEIDSITRFSSKEKFASYTGLTPKQDQSGSRDIRGHVSKHGPSMLRFVLVTAAHSVIKYSRKMKQKYMHIVRRTGMKRAIVAIARILAETVYTMLSRNTEFMDSIDSLTERKITAMSVRAKKPAHITDISDTARLLRSQKFRKMSEEPFS

SEQ ID NO: 505292 - protein, 470 aa, unidentified
MKKHQERKTKSKGTKPIHDSQPDAAGIDIGANEIWVAVAADRTQEPVKRFGAFTQELKAIVQWLLDCRVRSVAMESTGVYWIPLYQLLEDAGLKVCLVNARHVKNVPGRKSDVRDCQWLQYLHSVGLLMGSFRPPQVICAARSIYRYRQNLLSMATQHTQHMQAALDQMNIKLHHVIDDLSGVTGQAIIEAILAGQRDAHQLAKLRDKRIQASEATIVKALEGDWRSEHLFVLAAALENWKQVQQQIQKCDQQLLVYSRQFEACTTVAQPIKVMHLKPELEGTKWGESRAQKPRKKTSKNQPEGSWREELERFFGVDLTAIPGISVLSGLTLMTELGNDLSAFKTAHHFASWLCLCPDNETSASKVLRRRTRRSQNRVRQALRMAASTLHHNKSYLGDKYRRLRAKLGAPKAITAMAHQLARIIWTLITRRLPFDLSIFALEQRANEQRRLKSLSKTARQMGFQLIPIPA

SEQ ID NO: 505293 - protein, 342 aa, unidentified
MVTPVRIGMDTAKSVFQLHGVDENEIVVLRRQLRRADMIRYFEKLPPALVAIESCGSSHHWARLLESFGHEVKLIPPQYVKPYVKRGKNDAADAEALCEAVTRPTMRFVPVKSKDRQAACMLMTVRERLVMVKSQLSNAFRSYAAEFGIVGPSGRQNVNGLIARVLEDDTLPELARELFQFQAKEYAAVEARLAEIDAKLMKWHRADELSRRIATIPGVGPIGSTLLSMKAPPAETFGSGRDFAAWLGLTPRDHSTGGRSRLGGITKAGDPSIRSTLIVGATALLRHVRLGHTKPSPWLAKLMERKPPKLVAVALANKFARIAWRLMVSGGVYTRPAALNPT

SEQ ID NO: 505294 - protein, 318 aa, unidentified
MSSAREPYVGVDVSKGHLDVALLPSGESFVVSNDEEGFDELLGRFEALRPTLVVLEASGGFERPVAGALAAAGIAVAVVNPRQTRDFARATGKLAKTDALDAKVLARFAEAVRPTPRTLPDAEAREFQAILARRRQIIAMMTAEKNRLGAATSRAVGGRIEAHIRWLEKELGRTDRDLDKAIENNPTFKENEALLKSVPGVGPVLCRTLLAELPELGSLSPRELSALVGVAPLNRDSGTLRGRRSVWGGRGRVREALYMGALIASRYNPTIREFYQRLLAAGKPKKVALVACMRKLLIILNAVMRDRALWRCPHALNP

SEQ ID NO: 505295 - protein, 387 aa, unidentified
MDVKVSTYAAVLGIDVGKFSHWACLVRRTGEIAVSRPVPNAEQDLDLLYSQVGEGTLVVVDQVRNIGSLAIARAKAAGLDVAYLPGLAAHGASKLFAGDAKTDERDSLVIAKTALGIPDALLPVPDRDDRVEAARSLASQRDHMVTCATRDKNRLRSILLESCPAFEALTNLSDDRWLTMMEKLGGPWGIADAGRASVGAVTRGANREEIDAAWKAIRSSTRPSEYRVAAENPQVRMLAKRIREASAEAKRLDAEIGALLIGDETYECLLTVPGIGPRTASELVIGVRIEAFPDHDHLASYCGIAPRNRQSGRSISSVSASHQGNKRLKNLLIFSCNSLTRSDNQFGDYYRRCRGRGMSHGAALKAVARKRIKVIYAIMRDKTPYAA

SEQ ID NO: 505296 - protein, 385 aa, unidentified
MTEQSAPATTAFDHDSTLVLALELSGKGWEVGAVLPGATRRPRRGLAPRDVDGLLKQIERWKTEAQRSGRTVRRTVLAYEAGRDGFWIARSLLAHGIEVQIMHPASIPVERRRRRAKTDRIDLDMLLRTLLAWLRGEPRVCSMVRIPSEAEEDMRRPERERERLVSERIAVENRIENLLCLHGIAGFKPRLKKAAERLHALRSFAGTPLPAMLMDELNRLMTRHRLLSEQIREIEVAREQMAMAAEPDGTVQQIQMLARLVGLGLATATGLTREVFCRSFADRRAIAGFVGLTGTPFNSGGMEREQGISKNGNPRVRRILLQLAWRWLRFQPDSALSCWFVERTGGAKGRIRKIMVVALARKLLVALWRYVETGEVPAGARLAAA

SEQ ID NO: 505297 - protein, 348 aa, unidentified
MVIIGIDAHKRSDTAVIADTVGRQSAVTTIGTTSSDHLALLAWANKHDDQEPLWAIEDCRHLSRRLERDLLAAGEQVVRVPPKLMSHVRDSARTFGKSDPIDALAIARAALREPALPVARLDGAEREIRLLVDHREDLVAERSRVISRLRWHLRELDPAWAAPANFDRASAFARIKFHLDDFAGIIADLAQRLLTHLHRLTEEIDELTAELSRRIPVIALALLAIVGCGSLTAAKILGDTAGVTRFRSKDSYARHNGTAPLPVWSSNKARHRLSRTGNRQLNAALHRIALTQARCHPGARELLARRKAGGDGGMEALRILKRRLSDVVYRALIDDHKSSAASTLILAA

SEQ ID NO: 505298 - protein, 359 aa, unidentified
MLYLGIDQHRKQLTVNIRDEQGDVVLKRQVSTEWDRVRKFFEELRELAEPEGGFLAIVEICGFNDWLLEMLKDYGCREAVLIQPEKRSRKKTDRRDASVLSQLLWVNRQRLLGGKRVQGLKRIILPSQEEQDNRQLTALRQRTAALRTRTINKVQHILLKHNLQQECPTKGMKTKKARQWLTELPLGEVDRLEMDQLLAQWELWDVQIAKIDANIQERQHKHKTAPILATLPGANAYSSLALASRVGAIENFPRPGSLANYWGLTPGCRNSGDATDRLGSITKEGSAMARFILGQLVVHVLRRDASMKAWYARIKKRRGSKIARVAVMRRLATIIWHMVKNQEAYCMGGPPRQRQKKAA

SEQ ID NO: 505299 - protein, 322 aa, unidentified
MPEVEVMVGVDVSGTQLDVALWPGGESFSVSNDAQGVEQLVTRMVEVRPRAVVIEATGGLEGLLVGELCAAQVPVAVVNPRQVREFARSLGQLAKTDRLDARVLAQFGHSAHSSGRLTLTQLLPVADAELKALVRRRRQVMGMLVAETNRRQRASKVVKKSIVASIRSLKRTLAELEQQLRETVKNSPAQQKKAAILQQVPGVGPQLARTLIAELPELGHLGRRQIASLNGVAPHARESGPFKGRRMIWGGRATVRSALYMAMLTATRFNPLIAPFYRRLLERGKSKKLAYIACARKLLVILNAMLRDHTTWNPMLDLQHSR

SEQ ID NO: 505300 - protein, 338 aa, unidentified
MSIVMGLDQHRAQITAEWLDTETGEVSRSRIAPADRASVRRFLGRFSGRELEVALEATTGWRFVVEELRRVGAGVHLAEPAETSGLRGPKRRAKTDWADARHLRELLMIDRLPESWIPPDHILDLRARVRLRHTLSHQRCEWQQRIQSVLYHHGVPARRQLMVSDGREWLAAQPLPPAAREQVTVFIAIIDALDVLITPLDKELRSYGRRQAGCKALQGQYGIGELTAVTILAELGDASRFSSSRDVVRYAGLDITVKQSDQRRSPGHLSRQGPPALRWALYEAAQVARRPGSPDRAYYVQAAERIGGNRACLAVARKLLKRCYHTLRELGEEALQPA

SEQ ID NO: 505301 - protein, 328 aa, unidentified
MTSSNLATRVIGIDVAKDKLDVSDAAGKIKKEVKNSIKPIVQYIVKKIDQPGQTLVVCEATGGYERPLVKSLQEAGIPVCVANPFQVRQFGKGMGLLEKTDPIDASLIRRFGEIVELQPTAPKSPEHEHHEALVRRREQLMDMINQEQNRRGQTIDKAVTKQIDEMLKTLKKQLDQVDRQIKEFLQEEAKTNNAVVVLQSVPGVGIVTTSTLICDFPELGKVNRNEAAKLAGVAPIANQSGTRDRKRSIFGGRTHVRRVLYMAALVATRHNPVIKKFYAKLLAKGKPKKVALVACMRKLLTILNDMVRNNELWRHEKVVTEEKVVTGT

SEQ ID NO: 505302 - protein, 314 aa, unidentified
MPEQLFVGIDVSKTRLDVAVLPSGEIFAVDNTAAGFTELLIRLSEVQPRLIVLEATGGLEQAAMLALHDAGLPVTVLNPRQVRHFSRALGQHAKTDRLDAVLLARFAQTLQPEAQVPSDASQRALEALLARRRQVALLLTMERNRLHSSQDLYVQQDLQEVITYLEGRRKHLDQTLHDAVQQDPKFQATYSVLTSTPGVGPVMALTLLAQLPELGSLSGQKRANLVGVAPLNRDSGTSRGHRGIWGGRAEVRQVLYMSAVSAVRCHPTLKTVFDRLVKKGKPKKVALVASMRKLLVYLNAMVRDQALWQARPMA

SEQ ID NO: 505303 - protein, 365 aa, unidentified
MHATTKTVRNESSAAVTLAVDLAKDVFELAFADAAGRIVERKRLKRGPFSECLENRAPLRIVMEACGSAHAWARRFVRLGHSVELLPAQHVRPYVRRNKTDRADAAGLLEAARCGDIRPVPVKSPEQQGTQGLHRIREHHKAERTAAINTVRGLLREFGFAIPAGADKVRPAVLAALEDGDNDIPMDLRHALAGLLDRIVSCQEAMAAIEKQLADIVRRDTRSQRLMAASGIGLITATAMSAGIGDFTRFPSGRHFASALGLTPREYSSGGQRKLGRITKRGDVYLRTLLIHGARSALMAAHKAKKRGQPLDRTQHWALALAERKGHNKAVVALANKTARRLWAAEHHGASFDPEHVSRREQQAG

SEQ ID NO: 505304 - protein, 455 aa, unidentified
MKKAQRVRSHLKQVNLFAAGIDIGSRSHFVAVPDELDEQPVREFAGFTGDLNRLADWLVEIGIQTVAMESTGVYWIPVYEILESRGLEVLLVDARHVKNVPGRKTDVLDCQWIQQLHTYGLLRGAFRPQEEMVALRSYLRQREGLIASASDSIRHMQKALRQMNLLLDNVVSDITGMTGLRIIRAILAGERDTKQLAKLRDKRCRNNEQTIADSLEGHYREEHLFALQQAVERYDFYQQQVEACEGVIERHVREIEGDNDNDQDVPPASKPKGHSKNGFDFDVRSQLYRLMGVDLTEINGMSESNVLTIVSETGIDMNAWPSEKHFASWLGLSPGNKITGGKRLSGKTKPSPNRAAAAFRLAAFSLANSKTALGAFYRRLRNRLGAPKAITATAHKLARLFYRLLKNRTPFIDPGQDYYEQQYQERATRNLKKRAAALGYKLIPESTDGLQESMC

SEQ ID NO: 505305 - protein, 361 aa, unidentified
MKNVSQHLIAEVPRRQPRVEMTIGIDLGDVWSHYCTLNEDGEVVGRGRFRTSPKAVEKWFTDLPPARVAMEAGTHSIWISEQLQELGHEVIVANVRELRAISHSDRKSDQVDAEKLARYARLDPEILRPISHRTVEQQEALTLIRARDLMVRLRTAAVNAVRGLTKSCGHRMPASSTRCFAKRSVAVMPPGLAQALGPVLEQIAEMTLKIKQYDRQILELGQEKYPETQALVKVPGVGHLTALTFVLTLGSKERFEQSRDVGCYLGLRPRRSQSGDRDPQLGITKAGNVYLRSLLIECAGHILRPQGKDSALRQWGLHLAARGGKQARNKAVVAVARKLAVLLHRIWTTQEPYMPFYEQAA

SEQ ID NO: 505306 - protein, 341 aa, unidentified
MELQLYGGIDLHSTNNHIGIIDAQDRRVLKKKLPNDPRIIVATLEPFNRELVGVVVESTFNWYWLVDLLMEEGYRVHLANPSGMKRYEGLKHCDDTHDAFWLAHLLRLGILPEGYIYPKEQRPLRDLLRKRGHLVRLRTSLILSLQNIISRNCGFKVNVNRIKRIRENEVTPLLVGHGELELSGRVSKEAIDFLTRKIRDIETVVEKKLRVKEPFTFLKTICGIGKILTLTIMMETGSIARFPTVGDYVSYCRKVPTRWTSNDKTKGKGNKKNGNKYLAWAYSEAAECARRYDPFARSYYNRKAAKTNFMVAHSALAHKLARAAYYVMRDQVPFDHHKLFV

SEQ ID NO: 505307 - protein, 348 aa, unidentified
MFYVGLDLHKETSWFYVVDNNGKKVSSQNISNKPEILKQYFKKIPKPFTLAVEATYNWYYFVDMAEQYTEEVFLANSYELKAFAKRHKKTDKIDARLIAGILQKGFLPVVTIADQRTRQVRELLCYRINLVTDRSRNIYRLKALLDKLGQDSTGDFATYKRLNNIVIEKLPIIYANLIKNYIERITELTQKLKNIEKEVVAISYNDPDMFNLMSIPGIASFSAALIKSEIIDISRFATFNRLCAYAGLAPRVSASANKTFHGPLNINRRKYLQWILLENVYHFIKAIPRVNERYLELKQRKGHNTAKVALAREFLKIIYHVLKEQREFYFYKKDFKIQSVAATALCGV

SEQ ID NO: 505308 - protein, 414 aa, unidentified
MRVNCRTPISPSTAVIGVDLAKNKFVAVTLLGDGHRSKARTFTLTATGLADFDSFVERTTGESDGFVVGYEPTGHYGVPLLERLHRDGVPLYLVQPHQTKRAKDLYGRNGRKTDAKDAFLVAKLVREGASRLWAPQQAPYSELRVLCRQREQLVVRRSGIRNRLHRHLDVVFPELVGLFGDLYSPSCLYIVKTTPLPADVLSFPQEELAAGLFKASHRNLGAERVREVRLAAEHSVGSVKNTTAHRLAIEQSLEELEFLSRRIERVEDQMRLLLHQVDYAEHLLTVPRLGEVTVAILLGELGDLRGYRNARQLAAMAGLDLSERSSGTQRGNLHISRRGRRYLRQTPYLAALRLGWEGFSAHRQRLVEVNKLRKIKATVANMRRLLRVMHAMVRDQADFDQALHVAEPVAAMVA

SEQ ID NO: 505309 - protein, 351 aa, unidentified
MIIIGCDFHTRFQQIAMLDPTTGEIVERRLEHEPGEAERFYASLPKLARVGVEATIRAQWFEKLLAHYGHELWIGDAAAIAAARVRKQKTDSRDARHILDLLLTDRFPRIWVPSPTERDLRQLVRHRHKLVRYRTSVMNQLHGLAISQGLCRKRKLWSRVGRQELEALALDRWACRRRQELLQLLDQLNPWIADLDQAVEKEAERRPEAMQLMKQPGVGPVTALAFVLTIGPVNRFRRSKQVVSYLGLNPTEESSGGKQRLGSISKQGNSMMRYLLVQAAQTASQSDPELRRHYQRLKFRRGHSAVAKVALARKLAVRLYWKLREAAQPVPPARMQGSSSNPMVEETPSIS

SEQ ID NO: 505310 - protein, 350 aa, unidentified
MNKIATIGLDIAKNVFQLHGIDADGQVVVRKSLRRGQMRPFFEKLAPCLIGMEACATAHHWARTLIAVGHDVRLIPPSYIKPYLRRQKSDAADAAAICEAVTRPSMRFIPVKSENQQATLILHSARELLISQRTALINALCGHFAELGIVVPQGAHNARRLIAILEDDEGYTSQAVRIALGPLATALIEIKGQIAKLDKAILAAHRNDDVSLRLSTIPGIGPVIATCLSASVPDAKLFEGGREFAAWLGLVPRQHSTGGKPRLGSISKMGNRRMRKLLVVGAHAALYRMKNGKTQSPLAEWARTQLAKKSFKLVAVALANKIARIAWAIRARNIQFEPDFVPDHWALTSV

SEQ ID NO: 505311 - protein, 339 aa, unidentified
MGLYVGMDLHARNTYVAILDENYKRVFKKRVTNDLPLIVHTLHPFKDELKGIVVESTYNWYWLVDGLMDAGYRDIHLANPSAIKQYEGLKYTDDQHDAFWLAQLLVLGILPEGYIYPKETRPIRDLLRRRSFLVKQRTSHIHSLQSMIERYTSVHVSGNDLKKLALEELHEIFQQEHLLLSAEASLDNIHFLTQHITRIQKAVKEKVRIQTPFNLLMTVPGIGEVLALTIMLEVGNITRFPHVGNFASYCRCTPTDRRSAGKSKGKGNRKNGNRYLSWAFIEASHYARGFNERFRRYYQRKEVRTNKIVATKALSSKLARICYYIMRDQMPFREEALFC

SEQ ID NO: 505312 - protein, 345 aa, unidentified
MKKNIIGIDFSKETFDATLLDCRNSELLEAVQSAVHEKFTNNKEGFQAFVKWIKSSVKKITPDELLLCGEKTGKYSLPLSNFLYAKGYSIWLDSGLRIKRSLGISRGKSDKADSLKIALYAYRYQDMAVCYVPLSKNVSRLKELFLYRQHLVSQVKAMDVRKNVTDDFKKELGDVKFIVDSAAKIIQQIKATIKKCEEKMQELIEEDDELKTTHDSITSIKGISLINATAFIAYTNNFKDFGGNAKKIATYWGVAAFAQESGTSVHKVARVSKIASKMLKSLLTQAARITVRWEPKFRQYFEQLISRGKHQGVALNNVKNKLIHVITALAVSKEKYNREYEYIKR

SEQ ID NO: 505313 - protein, 368 aa, unidentified
MKKNTSNKQRTGKGNRQEQEKEVFAFYIGIDLGDKHAEVCVMNPAGEVHQQFRLRMKATDFEDYFLTIGRSRVAVEAGGQSQWVAELIQRCGHQVYVSNTRKVAYIYESDDKDDPGDAYKLAELVHFKPRLLHPIQHRSQALQADLSWIRAREALVESRTHLINTMRGISKAFGERLPKCSVESFTAKLAAEIPAAIRGAVAPLLETIDHLNEQIHYYDQMEEQIARERYPQYRLLEQVNGVGVHTALSYMLTIGDPERFQKSRMVGCFLGMRPRKQESGESRPQLGITKAGDEYLRKTLVNCAHYILGPHGRDSDLRRFGQRICERGGKNAKKRAVIAVARKLSVLLHRLWVTGEAYEALRNSKKVA

SEQ ID NO: 505314 - protein, 408 aa, unidentified
MDFEENKYLSTSFGNNQPGADELVNRIAACMQKHKNLDTLLIVLESTSVYSVHISNFLASSEVLMPYKPYVFCVNPKTTANYRKSYIGMEKTDPTDAYLIADFGRVGRTKKLEPWRGGQFIALKRLTRHRMHLSECITREKTYMVSNLYLKFSELQLLEGDDKPFGNLYGATSSAVLTEFLSPQEIIDMPEEDLLAFLAQKSRNRISDLSKTSELLRKAARDSYRLDKCMYEPLNISLASSFNCIQAYQKEIRLIEQAIDKCIKGMNTNALIILQSIPGIGPVWASGILSEIGDITAFHSSDALAKYAGLYWPKGDSGDFISEDNQMSKAGNPYLRYYLGEAANSVRKHIPEYADFYARKYAEVSKHQHKRALALTSRKFVRLVFGLLAKNQLYTGEKLDAEYNIEPN

SEQ ID NO: 505315 - protein, 357 aa, unidentified
MVTGLKHQMEKRSMEHFAGLDVSVNETSVCIVDDAGSIVREVKVASEPDALLAVLKSGVYRFRRIGLEAGPLSQWLYSALGEAHLPVICVETRHMRAVLKAQINKTDRNDARGIAQMMRAGLYRPVHVKTLRSQKLRMLLTHRKLLQSKAIAIENDLRGTLRNFGLKVGVAGAVKFEARIRELVKDLADIATLVEPLLVVRRTLREQLGILHRHLLTIARDDEVCRRLMTIPGVGPVVALTYRASIDVPARFRNSRAVGAVVGLTPCKYQSGESDRTGAISKCGDEMMRVMLYEAAQILLMRSTQWSWLKAWAVQIARRRGVKKAIVALARRLAVVMHRIWVDGTTFRWTREEATAA

SEQ ID NO: 505316 - protein, 355 aa, unidentified
MDNLRYIGLDVHRDTISAAVLDREGKLIMQSVVPTRAPAILDFLHGIRGTLHLTFEEGIHSAWLFDLLQRRVARVVVCDPRKNKLLKSGNNGDLIDARKLAELLRNNSLSPVYHGELSALEVQRRARSYTMLTEDTTRIMSRLKAVFRSQAISCHGKSVFRPDHREAYLAQLPTPGLRQRAELLYQELQAVHLLRLQAKREMLAECRKHPAMKSLRSVPFLGKVRTAVLIGRVQTPHRFRTKRQFWSYCGLALETHDSAQYHVVHDQIQRKPRFVQVRGLNWNHNHDLKSVFKSAATMAAHRDGVFREVYCGLLAKGMRPEMARLTLARKIAAITLKIWKEGGTFNAEQVKPQAA

SEQ ID NO: 505317 - protein, 427 aa, unidentified
MEQILQPIGKAEPEFAALVAIDWADQKHYWSLKVVGQEGLQRGTLDNTPEAVEVWIMELHLRFGGRPLGVALEQRRGALAVMLSKYAHVHLYPVHPMTLARFRQAWYPSRSKSDPSDADLLLEILTTHRSRLRRLDPDTVEMRLLQNLVENRRKLVDERTALSNRLTDLLKLYFPQILGWFNDVASAVVGDLLEQWPSLQDLQRVKPAKLEKFLRDHHCAEIAERLTQIRQAIAATHDRTLLDSAPYLVAAWVRQMAVLRESIRQLEKCIAERAAQQEDWHIFQSLPGAGAALAPRLMVALGTQRDRYSSASDLQSFSGIAPVKEASGNTQWVHFRRACPKFLRQTFHEWAACSIAQCEWAKAYYQQQKSRGKQHHVAVRALAFKWMRILYRCWKDRQPYREEIYLASLAKRRTAMVATLAKAVQIS

SEQ ID NO: 505318 - protein, 480 aa, unidentified
MPATFPIPGTNDLERAMTAVMIGVDPHKATHTAVVIGPAEEPLGELRVRASAGQAEELVAWAADWPERTWAVEGAAGLGRLLAQQLVAAGERVLDVQPKLASRVRLLQAGDTNKNDPNDALSVAVTALRSKTARPVMAEDYPAALKVRAERHRDLARLRNQVACRLHAVLCDLVPGGHPKEISAAQAARILEQTSPSGAVDRARAELAAGFLEDMRRLDAQLRDTRKKPAAAVSASGTTLTGVSGAGPVIAGTIIGDIADVSRFPGRDHFAADNGTAPAEVSSGNRKIHRLSPRGNRRINHAIHMAAITQIRHKHSDGRACYDKKIAEGKTHKKRSGPSSGGPAMPSTPASWPTPGEPGSGQREGPGRATGERLRLQRGRLTPRTPALRTSHSRTRAPRYGRHPGSHTLTVEADFKQNPDNHLTAAAKRTRYAWQFPFLGDRVRGPEPGILSACSGKVRADGDSGGDRGRAWVRKAQRLA

SEQ ID NO: 505319 - protein, 331 aa, unidentified
MYYAGIDLHRNNLVVSLEDQFGAVSQPRTFLCAAPELIREFFAKRRPFRAVIEATCNYRWLYDLLAPLGEVVLAHPKRLRAIAAGRAKTDKLDAALLAKLLRAELIPRAYVPPAPYDRLRDLTRARARIVRHQTQTKNELHALLARYNVHPPFKTSFGKRWKAWVTQLDLGMAGAILRDEMLRRIAHFQQEIERLDEALEAVAPLFPQIEALLDIRGIGRFTALLIVAEIGEPWRFANGKQVGAYAGLTARVNQSGGHCYHGHITRQGSGWLRWGLVQVAMKVTPGDAKLRAMYTRIRKRSSAHIARVAVARKLASICWLRLMRWHYAQAA

SEQ ID NO: 505320 - protein, 345 aa, unidentified
MATYYIGADVHSNNTEMAIEQRGKIVARYSVPTTIPAISTVLDSLQGKKLFAMEEGPMAGWLYRNLHEKVEQFIVSEPRRNKLITCDGDKDDKIDARKLAVLLRGKFLKAVHHTDDSDRAHLKHWVNLYHDRVRDAVRYINKIQACCRMHGVAIPRKVVRNQANRHDWLSGLNNPVLKEQLRMLWIGYDATKEQVEIAKKQLSSSARKHRTIKHWCRLPGIRVIRAATIFAYLDTPWRFKKRSRLHKYCGVGLERTTSGTDRKGRIKPARLKLPWAVNRRLKNAVLGAATSAITRHRSNGFKDYYQRMLSNGITPANARHSVARKMMSVMSAMWKTDSAFDPKLL

SEQ ID NO: 505321 - protein, 428 aa, unidentified
MNDFEDTKRERFCQIIGEISGSDEYLVVGIDVAKDKHHAFMGTATGKTLYRRLIFENSRSGFVGLLEQVELIRSQNGLKKVIFAVEPTGNYHKPLSRFLVDSGSHLVLVTGKAVKNNREVLDGRWDKHDTKDAANVADLASRGRCQYYDRPSEKIVEMRDLLSLRRRLKKDEHGIRVRIRNTVLAKYFPELDKYFDTGRGEILSIVKWCPNPVKIADMPFDRFFRMVTKRERGIAQKLRLRKIHASAGESIGCPMGEAAEFEAKLLVDKLNQVRQDIGKVEKRIKEIGEGFAEYRYLLTIPGYGPYVSSVVLSAIADPFRFDNASQVIKLSGYDLCADRSGQSSDKAVPVISKRGSGELRYALYQAAQVASVKNRYFKAYFTGLLQGRQRERGIHTKMRVKLAAKMLVIAWVMMKRKEVFDPGRLNIR

SEQ ID NO: 505322 - protein, 344 aa, unidentified
MTKTPIAVLGIDLGKNSCSLAGLDATGAVVLRRKMTREGLIAFAAALPGCVIAMEACCGAHYLGRTFEAQGHEVRLMSPEYVQPYVKAQKTDDRDAEAIAEAATRPTMRFVSLKSEAQLDLQVLHRVRERLVLARTALTNQMRAILLERGIIMPKGRMMLMRRLEEIGLEGLAVGARAQALMKDLIEECADLDRRIRTYDEEFVAVARDDVQARRLSSIPGVGVINATALLAAVGDGSAFVRGRDLASWLGLTPRQHSTGGKTKMLGISKRGNRYLRKQLIHGARAAMPHLAAKSTRMGAWLRGLLERAHPNVAVVALAAKLARIVLAVLRDKTNFDPGAVVAA

SEQ ID NO: 505323 - protein, 439 aa, unidentified
MSILMIRYVGLDVHKRVVEACIVDHTGKVVHRERFALNRRTLALFATKILRTTDHVALEATTNCWAVADVLRPHVAKVLVSNPMATKAIAQAKVKTDKVDAYVLAQLLRCDFLPEVWQPDEATRRLRELTGRRSALVSQRTAMRNRIHSVLAMRLIEAPLRLFNAEGLAWLAEIELDDQARTLVDSDLRQLEFLQKEIDALDAELARRGYANEQVKLLMTLPGVDVATAEAMLAAWGDPKRFPDGDHAAAYLGLVPSTKQSANQCYHGPITKRGNTHARWMLIEAAQHLDKHPGPLGHFFRRLCRKKNRNVAVVAGARKLATIGWQMLVTGEPYRYAMPRSTEEKLRRLRVKATGERRKSGPPQGQKAVAKLPGGSRTIRALGEVCQSEGLPGPRPLSTGEQRTVREADSEAFVTQIAATQLVPRPPKRRKVQEVASHG

SEQ ID NO: 505324 - protein, 428 aa, unidentified
MNYNQNDKIAQITSQTLIIGVDIAKHKHVARAQDFRGMEFGKAFYFENTNSDFNHFLNWIQQLMNQQGMEKVVVGMEPTGHYWLNLAHFLIEQRINFVVVNPMHVKKSKELDDNSPTKNDVKDARVIAQLVKDGRYAVPNIPQGVYAELRVARKIRDLLSVDLQAVQGQIHNWLDRFFPEFLTVFKDWEGKSALQLLKLNLLPHELSKLTDQEILIHLRKAVTRAVGLSKITKLKEAASHSIGIREGSAMAKLELRTLINKYELINEQFEELESNIDDLLKQIPGVEQMLAITGIGKDTVAGFFSEVGDLSNYSHPRQIIKLAGLSLRENTSGKHKGQTKITKRGRKTLRALLFRVAMPLVAKNSAFKALHHYFTKRPNNPLKKMQSLIAICNKLIRILFTIGKKQCEFSEERMLRDIPHMVGLPKVA

SEQ ID NO: 505325 - protein, 350 aa, unidentified
MNNVTTIGVDIAKNFIQVHGMDKNGKKMLKKRLARNNFLPFMVNLPKCLIGMEACGGANYWAKELLKLGFEVKLMSPKKVKKYLDINKNDARDAEACAEAVGRGNMVFVPIKTDSQLEIQGMHRIRSFYIKQKIAEMNMIRGLLLELGIAIPQGESALFKKLMALLEPDNNQLSLKNQAFFQDLYDDLKKLNHSIEKYTSELVLLAEQDEMCQRIQTIQGIGPMTASALIAKIGNGSEFKKGRELSAYLGLVPKQYSSGDKQLLLGITKHGDRYIRQLLVHGGRAAVQAAKRINKETGVFIKQDAHSRWIRNLADRAGFNKAAVALANKNARMVIALLKNNTTFQPQLAH

SEQ ID NO: 505326 - protein, 342 aa, unidentified
MDHIGIDVRKNASQVCIRTETGQLIERRVRTDRESFAKWLGKRDKARILIESSTESEWVARCLEELGHEVIVADPNFAPMYAQRRRKVKTDRRDARALCEACELGAYRPAHRSSEASRALRAQVAVREALVQTRSRHISLIRALLRQQGYRVRSGGAASFAERVGELELPQALQDQMAPLLAVMRSVNAELKAADKALAEQAKTHEVAKRLCTAAGVGPVTAITFVVTVDRVERFAHAKQVRAYLGLVPRELSSGEKQRRGHITKAGNRRMRALLVEASWQLLRSRRADTEALRAWTHRIAIRRGKRIAAVALARKLAGILFAMWRDGTDFGQTKTSAAHAA

SEQ ID NO: 505327 - protein, 344 aa, unidentified
MNKNWFIGIDVSKKTLDASIFVAGEVINKFPHVQVRNDKQGFKDLFRWAKEQGMKTKDTLFGLEFTGYYSDALEQFLTKKQVSYTMLPTTVVKHYQRGPHDKNDKIDSAKIADYLFRFNGTECIKLRVLPSKALQQLKDLKSERKFLVQQRVACENRQKVAKSKSEEKHLQKLIDLYKAEIEQVEQQIADVIVQDEEIYTTYRLLNSIPGIGFVNAVNTIANTQNFTAFETARQYAKYVGVAPSEHSSGTSVQWRRRPSPHADLQAKADLSMAALHAIELSAEIRQLYERKLGNKPKDKDIQKKALNAVKFKLVREMFSVAKRARIFELRGLDKAQAETHNTEE

SEQ ID NO: 505328 - protein, 471 aa, unidentified
MPHHCHQPPAGYFWQGNADNARLRVICRFGISHGVFLILTKKGGDETMKKTDYLSTLFVGIDIGSKINVVSALNFSQEFLIRMVPVKNAKGGAELIEQLICDALGKDPELKRIIVALESTGYYSFHTANYLSTSEKLLLFGIKVYCLNPKSVKNYKESYVDLPKNDGIDSFVIADFARCGRITIKPWKGAQYLALQRLTRHRLHITECIAREKVYMLNNIFLKFSEFAFLQKDEHPFSNKYGATAEAILTEFTTTEEIVNSSVEDLVDMITARSRGRIANPLNAAELLQKAARDSYRLDKCMYEPLTTSIACSFNCIRAFEKELKALDAAIEEAVKGLNPTEYQILLSVPGIGKVYGAGILAEIGSIKYYKNHNSLAKYSGIYWNQNQSGDFDGEDTSMSKAGNRYLRYYLIEAAGSVIQHCPEYAVYYEKKYTEVLKHQHKRALALTSRKLIRMLFGLLDKSQLYSPGKE

SEQ ID NO: 505329 - protein, 414 aa, unidentified
MSLKIVYKICCGIDVHKTFVVACIATTNSHGVTVYERHRFSTFTKGLKELLQWLLQNNCKDVCMESTGKYWIPVYNVLESDCDIVLAHPKYVKAIRGKKTDKKDAKWIADLFKHDLVAGSFMPPADIRQLRDLMRYRHKLTCFTSSEKNRLQNCLTVSNIQLASVVSDTFGKSSQNILDKILENPLDTSFDIEPLIHGSMKGKIPELELAVDGYISPWQAGKLKIIKKHFEDLESRKAELEELILALANPYQQELDLILTAPSIKSIFTAICIISEIGVNMEAFPSAKHLCSWAGLTPTNNESAGKKKSVRVSKAGCYIKPLLVQCANAVITSEKHPEIRNRYLRLKRRRGHKKAIIAIARMLLTALYNMLKNKEPYNAELYRKSDLLPVEREITVEQAILMAQFQGYKIKSAT

SEQ ID NO: 505330 - protein, 349 aa, unidentified
MDINTIGIDIAKRTFQIHGVDRNGKTVLKKKVSRDQVLSFMVKLPKCLIGIEACGGANYWARELIKLGHEVRLIAPQFVKPYVKTNKNDQADAEAICEAVTRPNMRFVPIKSIEQQDILSIHRVRERLVRNRTALANEIRGLLLEFGFIIPQGINKVIVKLTEILDEGKLSELSYQTFNKLKEEFVENDKKVKELEKRLKVIAMDSRQCQQLITIPGIGLITATALVASIGNAANFENGRQLSAWLGLVPRQHSSGGKERLLGISKRGDIYLRTLLIQGGRAVLNAKLRFISEEQKSKKDYSKFTGWIFNLIERRGHNKTVVAVANKLARVVFAVLSSSNNYLESKVCS

SEQ ID NO: 505331 - protein, 421 aa, unidentified
MKYALARVLPGAPPGGVSAGIDWASADHAVCVVGTAGEVKDRFTVAHDRAGLAAMAARLRKAGVCEAAIERGDGPVVDALLAAGFTVVVISPRKVRNLRERHVSSGAKDDRFDAFVLADALRTDRARLRPLVPDSPGVLALREAVRARKDLVAQRVAAANRLRAHLQTAFPGAVGLFTVLDSRLSLAFLGAFPSRQAAAGLDEAAIAAWLQGFPRRGNAAPPGVLAARLAAAAPGTGDDPAQAALTRILAAAVAGLAARIRDLEAEIAVLLAACPDGPVFASLPRAGTLRAARLLAEIGDCRARYPDAAALAGAAGVSPVTRRSGKWVSHEFRPHASAHLRDALCDWAGDTRHASPWAAGIYDSARARGKDHPHAVRILACAWTGIVWRCWQDGVPYDPEKHRALQDILARQGRHTAGEHE

SEQ ID NO: 505332 - protein, 384 aa, unidentified
MSATPKGAADVVMTGVRSPESADVEVVLGVDTHLDFHVAVALDNLGRRLGELTVPTTTKGYKRLVCWAEDFGPVRCAGVEGTSSYGAGLARYLTATGVAVVEVERPKRRHLRRNGKSDPIDAEAAARTVLAGETAGAPKSADGRVEMIRALRTARRSALKARGQAANQLQALVVTAPDALRERLRRLSTRRLVAAACRFRPGTQPETPEAATKLALRSVARRHEALSEEIAELDVQLDRLVAEAAPELLALPAVGTDHAATLLIVAGDNPERLRSEASFASLCGASPVEASSGKVVRHRLNRGGNRDANRALHMICMVRMGQDRRTREYVARRTAEGKSKREILRCLKRYVAREVYRVLVVAVEASPLTTGYPGASSGRLSVMS

SEQ ID NO: 505333 - protein, 438 aa, unidentified
MSNKVFFNLDDLFISVGIDIGADFSWMSIALPNQQFVGKPYKILHNSIDSLTTAVSKIKEAEELYSLESRIFLESTGIYHYPLFCYLRDKGFNCSVINPIITKNSTNINIRKVHNDRFDSKKAALVGLKPDLKVSLMPSDLALNCRNLCREYYDLMDNRSAYVNKLQGELCMAFPQYLDIFSKVTINTSLTLLETYTSPSAFLEADRQEIIDIIRSTARFGLTYAQNKYNAIVQAATDANQFGYIINSNIKRIRLYISFIRKYDEEINNILESLHELVDANEDADFVKQIHLIETFKGAGFLSAVSIMGEIGDFSAFSKPKQLFAYFGLDPAVKQSGKFEGTKVQMSKRGSAIARRVIHTLTLQSISISRNGEAKNPVLREYYLKKCDSKPKLVAMGAVSHKVCNMIFAILRDNKPFKIIAPQEHIKQYNAAKCDIAA

SEQ ID NO: 505334 - protein, 334 aa, unidentified
MDRHESPAPAAWVGIDVSQHTLDACLLPADGSKPRFEVFDNDPAGHAALAAWADTHAGGAPVRFCLESTGAYGEALACALADAGRHVAVVNPARVKYHGVAAGQGNKTDRADARLIAEYARDRRPPAWQPPGPEVRELQALVRRRDELRSLAAREKGRLAQPGHTPAARRSIKRTAAFLAREADRLQAEADALIDAAPALRADRDLLASVQGVGPQTASTVLAELPAVGQLPSAQSAAAYAGLAPREFTSGSSVRKRTRLSKAGNARLRKALYLPTLTAIRFNPVIKAFFERLREAGKSRMAAVGACRRKLVMICYGVLKNRTPFDPEWSKKTR

SEQ ID NO: 505335 - protein, 360 aa, unidentified
MTKARSQVGLDVHATKIVAAVLDAETGELQTFAMSGDAVGAAGFCAGLPRPARVAYEAGPTGYGLARELAKRGVECVVAAPSKIPRASGDRVKTDRRDAELLARLLMAGKLHPVRVPGDEEEALRDLVRAREAVRVDLMRCRHRLSKLLLRHGIRFEDGSAWTQRHRDWLATVTLEWPAAQATLLDARGAIDALTHRREQLEREIVAMIPDSPWSVQVGRLRCLRGVDTLTAVGLCAEIGDFERFARAEQLMSYVGLVPCENTTGQQRRLGSITKTGSGHARRLLVEAAWHYRARPSVGRALTDRQERQPPEAIAVAWSAQQRLHRTWARLEARAKRRTIIAVAAARELAGFCWAVTQIE

SEQ ID NO: 505336 - protein, 316 aa, unidentified
MERVEVSTKVAGIDVSKSKLDVAKHGASEAVRFANNAEGFEQLGSWLAAEGIERVGLEATGGYERAVVSWLHAHGYEVVVHQPLEVRLFARLKRRRAKNDRIDAIMIAAATAQVDTVKAAADPLLVELAERMTAYEQASDQLARLQHFLEHVTLADLKASYLEQIQHAKAWKHQMLVAVVTRIKSRADLQRRYALLMSLPGVGPVVAAGLVVRMPELGNLSPAQAASLLGVAPFDHDSGVFKGHRRITGGRARPRRLVYMSALAASRHDPGFSAFAKRLKAAGKKPKVVLVAVMRKIIQAANLVLSRGTPWTLRNA

SEQ ID NO: 505337 - protein, 321 aa, unidentified
MTRVVIGMDPHKRSVTIEVMAPDESVLGGGRYGTDEPGYAALLREAKQWPDRVWAIEGCNGIGRHVAVRLVADCEQVVDVPPKLSARARVFSTGQGRKTDATDAHSIALVGTRMAGLRPVVDDQQLAVLRVLADRRRALGEDHTRMVAQLHHLLLELIPGGAKKDLSAAQAKALLAKVRPRDLAGKTRRRVAAELIADLERIYARKKAADKELRELITDTGTSLLTLNGIGPSGAGRLLVDVGDITRFPTKGHFASWNGTAPLDASSGDRVRHRLSRAGNRQINRTLHIMATVQLRNPSEGRDYYDRRRRPARPRWKPCAA

SEQ ID NO: 505338 - protein, 327 aa, unidentified
MQTITTIGLDIAKSVFQVHGVDGAGQVFIRRQLKRRSVLAFFQKLPPCLVGIEACASAHHWSRELQALGHKVRLIPPAYVKPYVKRQKNDAADAEAICEAVTRANMRFVPTKTPEQQTAVINAIRAHLAEFGIVAPVGRHGVEELLNVLADPNDKRVPEIARACLSALGAQLRRIKEQVLEFDRLIRAWHRSDEMSMRLDEAPGVGPVLATAVVATVADPKSFRSGRNFSAWIGIVPKQHSSGGKNRLGNISKQGDRYLRGLFVAGALAVIRYAKIHGTKHRPWLTALLARRPTKVAAIALANKLARMVWAMMVKGERYKEPVALAA

SEQ ID NO: 505339 - protein, 345 aa, unidentified
MEIRTIGIDLGKTVFHLVGVNARGGVVVRKKCSRTQLLRFTSKLRACLIGMGACGGSHFLGRGLREQGHDVRLMPAQYVKPYVKTNKNDYIDAEAIAEAVTRPTMRFVPIKSDDQLDLQSLHRVRERWVVRRTAVINQIRGMLLERGITMHKGRKHLEASLPHILEDAENKLSGALRALLTQLQIEMQYLHRQIGESDKLIDRIAGELEPCRRLVAIPGIGPVIATATIAAIGNGAAFKKGRGFAAWLGVVPGEHSTGGKQQLTGTSRRGNKYLRKLFVLGAHTVLLQRTKQSSGLSTWLTSLSERKRKQVATVALANKMARIVWAVLFKGEAYRPPLLPEPVAA

SEQ ID NO: 505340 - protein, 397 aa, unidentified
MIAVGIDISKAKSTVAVIDSDGTVLASPFTMAHTQPEMEAFVTYLKELGEPTTILMEYTGHYHYPVLKKLQDEGFPVCIVNPYQMKKYGDVEIHKAKTDKKDALRIAAYALEKSYKLVPYSSMEQKYEDLKFLSRQYSQRITYVAKLKVQLIALLDQTMPGITRILPLNSRNPEKCALLLFIKRFKSFDEIHRIGKARFLASYDVLAKKASERSASSKGLSIYELAVDSITTRGEDPYIWLSQNQCVDLLSTTQNAADEIISQMRNIAETIPEYKVLRAMRGVGDRLGPIILAEIGDIRRFHSGKALNSYAGNDAPPYQSGQFESRNRHISKRGSSALRKACYEVMQALKLTKPQDDPVYLFMLKKEQEGKPFNVAKMAGVNKFLRIYYARAMELYK

SEQ ID NO: 505341 - protein, 317 aa, unidentified
MSKPTTICAGIDTGKRKLDVALEGGRERLEVDNNAAGHRALADWLRGHRVKRVGIEASGGYEYPVVVELRRRGFVVIVFQPAQVRAFAKFHLQRAKNDKIDAALIAMGTAGVKTIHAPPDSRLGPFAAHLTMLDQISDDVARCKNRLESCRDPHTRRFWKEEIARFKKLYKIELKSLVAAIRQYRDLAERLDLINSVDGIGLITAVAILVRMPEIGRISREQAAALAGVAPYDDDSGQLIGVRHIEGGRKRLRGALYCAALPASQRWNPQLIALYRRLRGAGKEHKRALVACARKLLIFANTVVARGTPWTAQPNPA

SEQ ID NO: 505342 - protein, 451 aa, unidentified
MEKKQISLEVINPNAAGIDIGSRSHWVAVGQNAEDVMEFGVYSEDQQKMCEWLKSKGVTNIAMESTGTYWQNLFSTLVSNGFEVILVNGKQTKNVKGKKTDIKDCQWIQKLHSLGLLSSSFLPDSTTDIIRTYSRHRQNILQQAAGSINRMQKYLRLMNMRLDVVVSDIAGETGIKIITAFLAGETNGKKLSENRHYNCRKSPEEIAKALQYNGREDYKFALKQEWNTYQHLQKQLAEVDVEINKLLKDIIDKDDNKKQHVANKKPYKRKTKNGIKGADMNQISYQYFEGVDLMAIEGMNDAMIMALISEVGMEGMKKFESAKQFTAWLRLAPNNKISGGRLLSRHIPKGSSRLKIALRNTANAIGNFKEGHLVDFFRRINYKKGRIIAINALARKLAVILWNMIVKGTSYNPPTQYIFLDEKRRLGLVKKIRKQITKFDLTNEDLGFSTS

SEQ ID NO: 505343 - protein, 370 aa, unidentified
MGNRNMFVGLDVHKETIDVSIAEGDRHGEVRHYGVIKSDLEPLDKVVRALHAPDRRLHFVYEAGPCGFGIHRHLTNRGEDCVVVSPSMIPKRSGDRVKTDRRDSQMLARLHRAGELRAIYIPDATDEAMRDLVRARADAVGVGTQAKYRLKAFLLRQGRRYPGREGWTLPYRRWLTDLSFPSAAQHIALQEYRDAIGETEQRIARLTEQLRHLAPTWRWAPVVDAFQALRGVSFITAVGLVAELGDLTRFRHPRELMAYLGLVPSEHTTGPRVRRGAITKAGNPHARHLLAEAAWAYQGIPRIGRQHAYRQEGLPKVVCDIAWNAQLRLTTRFRRLVAKGKAKPKVATAIARELTGFIWAIAQEVSPAAP

SEQ ID NO: 505344 - protein, 323 aa, unidentified
MEEGRIRSTVAALEKQFANEPRMRIALETGTHSPWVSRLLECHGHQVIVANARKIPVITASESKNDRNDAEQLARMAAFDPKLLHPVEHRSLERQQDLNLVHTRSVLVRARTMLINSVRGLVKSGGGRLPACSSAAFPGKAREVIPEVLKMACEPLLEQIAQMNRGIGEMDRQVEGLDKKYPEISILRTAPGVGPVVAACYVLTLDCAEAMETNRQAGAYLGLRPRQQQSGDSNPQRGIAKTGNNYLRSLLVQSAQYILGRFGPDSELRRWGLKLATSGGKRGKKRAIVAVARKLAVLLLSMWRNRRKFEPFPQAAAGLTVAA

SEQ ID NO: 505345 - protein, 399 aa, unidentified
MLAVGIDISKSKSVAAILNQDGSMHTSPFEFHHTQPELDAFIKYILNSNQSATILMENTGHYHYPVLKAFREAGLPVCMVNAYQIKKFGDIDLRKAKTDKKDAVRIVRYALEKSYSLVPYTSMEQKYEDLRFLARQYNQRMLTLKTNKVFLLNLLDETMPGITNILPLTTRTPETSLSVLFINRFKSYDRIKKMGKSRFLDAFEKIARKSRNRQTKTYGLAIYEAALRNITTRGENEYTLAAQDQCLELVCESQKAADSIILKMQTLAETLPEYAVLRSMAGVGDRLGSLILAEIGDIRRFHSGKALNAYAGNDAPPYQSGTFESHNRHISKRGNAALRKYCFEVMQALKLTRPQDDPVYLFLLKKAQEGKPYNVAKMAGVNKFLRIYYARAMETLKQQ

SEQ ID NO: 505346 - protein, 345 aa, unidentified
MNKLVSSSPSTVYCGIDVSASSLAVALIELDDCIAQREFANNASGHKALLAWLGKRNALVRVSLEATGVYSLDLALALDAAACIEVAVLNPKLVNRFAQTLRRSKTDAADAMVLAEYSRRMPFTAWQRPGVVPLCLRTIGRHIESLVVEQAGLKNRLRIAQSTATTPRAVMVDLRQALAASQRRVAKMRREAIRLVRDEAALWERFQLLVSVPGIAEISALQILSELVLLAPAMTVRQWVAYSGLDPVHQVSGTSLHKPSRISRAGNRHLRRALYMPTLAAVRCDPHMRAFHRALLERHKTGLQALMAVARKLLHAIYGIFKTGRPYDGSRLFPNLQLELESIAG

SEQ ID NO: 505347 - protein, 362 aa, unidentified
MMQSTTIIAFDQHAATTVAAVLLPAHRTPALHTLTSDSPTILRFVERLRRARAIRCCYEAGPCGFELQRALQARDIACDVIAPALIPRRAGDRVKTDRRDAGQLAILYRAGALTAIHIPTDQEEAARDLLRCREDIRADLLRARHRLSKFLLRHGRRFTGTKKAWTRGHDTWLRGQTWPMPALAQTHAAYVRAVDETLARLRDVESDLRGLLDLEPLRPRVQRLRCFRGMDDLTALTIAAELGDPRRFASAPRTMAFVGLVPSEHSSGTKQARGAITKTGNAHLRRVLVEAAWHYRHRPFVGAALRRRQHGAPAAIIAQAWTAQQRLHRRYHRLAGRGKPKQHVITAVARELTGFVWAALIQ

SEQ ID NO: 505348 - protein, 344 aa, unidentified
MLMVRNVVGGVDTHADAHVAAVVDSNGGLLGVESFPADEAGFEDLFGWLVGFGPVLRVGVEGTGSWGVGLARFLAGADVEVVEVDRPNRQQRRKVGKSDPTDAVSAARAALSGAAAGIPKTRNGPVEQMRVLLVARRSARTQRIQTLNQLRHLVFCAPEPIRVRFKDRYKTGLVTEAAAMRPRKGSDPVEFTTNTVIRSLARRIQGLNAEMRAIDQALVVLINQTAPTLLELYGAGPDSAATLLVAAGDNPDRLRSERSWAHLCGVTPIAASSGKVIRYRLNRGGDRNANAALYRIVLTRMSSHQETRAYVARRRAEGLSTPEVMRCLKRYVARQVFKQLPRAA

SEQ ID NO: 505349 - protein, 371 aa, unidentified
MSFLGIDLHSNRITVATLAVKDEAFETITKTYNFERESFQRFLDSLSENDYVLVENTFNAFWFYDQIAGRVKECLVYNTNMARSRGNKTDKIDSRHLAQKLGYYLMMGERKEYLPTVYVVDAEIREIRGLFTTYQLYKKTKVQLKNRIHSILKQNGICIERGKIDRKDFEARIDGFEISEIWKFQIRSALKALKSVHEEQKEIKDQIHLLGYKLFKEEIELLMSIRGVSAFTGIALMSDVVDVNRFSSARKFCSYLRATPKVTASNQSIHIGHINRQSRPLTCSLLTQSILHLSQAGEHMNEFYGRVKIGKSAGKSRIALIRKILVSAYYMLKRKQKYYWVAEELYSKKLKDFQNKMAKIKTSAEEEKKSA

SEQ ID NO: 505350 - protein, 371 aa, unidentified
MEHTRFVGLDIHKERISIAVAESGRSCAVEYLGEISNDPVAIGKLCDRLERSSKTLAFCYEAGPCGYGVHRQLISLGHRCDVVAPSLIPTRPGDRVKTNRRDATMLARLHRAGELTPVWVPDADHEAMRDLIRLRSVVRQIVSRARQHLQGFLLRHGRKHGRGTAWRMAYRRWLSTLAFEHPAQQIAFQDYVDAVMDAERRLQRVEEQISGLLPKWNLRPVVDALQAMRGIALITAVVLVAEVGDFTRFANPRQLMAYFGLIPGEQSSGETIRRGGITKTGNAHARRALVEGAWAYRMKARIGRHKVDRIEALPKVVRDIAWRAQLRLCTRYRRLSARGKTANVVNVAIAREMVGFIWSIACTVQSAPKTA

SEQ ID NO: 505351 - protein, 395 aa, unidentified
MRSIGLDVHKHFAEVAIVEPGQGIVSRQRLPVSPASLRQFAAGLGPDDQVVLEASFNTWAVADLLAEHAGRVVVSNPSKTRAIASAKVKTDKVDAGVLAHLLAADYIPAVWVPDDATRTLRRMVAEHRGLVVQRSQIRNRTHAILNRNLVECPYTDAFGRAGRRWLTAAPLPEPERREVDRLLRLLAALEREIEQLEIELAQARLQDAGLRHLVTVPGIGLITALALLAVIGDVKRFERPNRLVGYLGLDPRVHQSGDRPAYTGHISRLGQAHARGLLLEAAHSAIRVPGPLHAFYERVRSRRGTQIALVAVARKLVTLAWHLLTKDTDYEWVRPSLKAQKWRLVELRAGLPKGAVHGIWTRANRDQEDAILRQAEAAYRTLVAARRHKPTRSPQ

SEQ ID NO: 505352 - protein, 351 aa, unidentified
MLIIGCDFHTRFQQIAMVDSTTGELVKRRLEHGTGEAERFYAALPAPARVGIEATIATQWFEKMLTRYGHELWFGDAAEIRAAMVRRQKTDDRDALHILDLLMQNRFPRIWVPSAAERDVRQLVRHRHKLVRLRTTVMNQLHALAMGQGLCLRKKLWTTVGRQKLESLQLDPWASFRRRELLGLLDQLDPSIEELNRAVIREAESRPAAVCLMQQAGVGPVTSLAFVLTVGPVSRFANSKKLVSYLGLNPSEESSAGRQRLGAISKQGNTMMRCLLVEAAQTAARLDPELRRDYQRLKFRRGHSGVAKVAIARKLAVRLYWKLREAAQSNTAARMQGSPAHSVVGESLSPY

SEQ ID NO: 505353 - protein, 414 aa, unidentified
MSDITFTQVVSRGCGMDIHKEVVVATVRGEGIKQETRSFKTFTSSLTQLREWLLSLGITHVAMESTGVYWKPIYNVFDGFIPHIWIVNARHIKNVPGHKTDKNDSVWISQLLLAGLLKPSFVPPRQQRELRDLTRYRRKVIQMVSANKNRIIRVLEDGNVKLSTVLSDTGGSTAVKLIDMLCDGKMLTLEDVDAVRHKRCHHTSEEMLEACTGYMSEHKIYMLQQIRECNKKLQERIDELDKRIKAIMEPYSWMVEKLCEIPGIQDRVCEDLIAEIGLDMGNFPTSAHLCSWAGMCPGNNESAGKKKSGRTSHGDKHVRTVLVEAAWAASRTKGTFFMERFKRLALRRGTKKALIAVGHSLLTCVYRVLRGESYNELGELYMASKTEKRRRDYLKAELAKLGYNVTLTKKDKKD

SEQ ID NO: 505354 - protein, 401 aa, unidentified
MEGPIVSIDVSNGNSHYMCFIKNNKRFGKVKKIDHDIEGFKRLLEDIQKLEAETNEKVCAVFEATGVYTKPLERFLSKNSIKTYMINPLESARKRKEEIHNKKTDKLDPISISKVYYDKEEMMELKKKDETYNWLRKKNRLYEDQLNHLRKYKVTFQNQLSICFPGYLDLFKDGYSDIPMTILKKYPHPDLLKNKKAETVARYLEKNTCHTHKVSLEYALKIIGFAKKTYPGCEKDDVEVEIFKILLDKVIETQRECEKTLNEMITVASTLEEYRYISSIDGIGPNLAARIIAEIGDIEEFKSREALVAYAGLDPHIYQSGDQDGKHLKISKKGNKYLRCLLFLAVGCSIRGAKDNPVNRFYQKKKQQSNPLNSKAAKTACTAKLLKIIYGICKNKTTYER

SEQ ID NO: 505355 - protein, 357 aa, unidentified
MMKFRTFKEHQQKGKPMPVVTVGIDLAKNVFAVHGVDEVGKAVLIKPRVSRDLLLALIAQLPPSLIGMEACSGAHHWARAFQQYGHTVKLMAPKLVAPYRMSGKRGKNDAADAAAICEAVTRPSMRFVPLKDEHQQATLCLHRTRQGFVEERTATYNRMRGLLSEFGVVLAQSPERLRREIPTHLDALPGWARRCISDLLEHASNIEARLAEYDRAINQIARDDERSRRLMHLRGIGPTTASALLASLSAGHDFRNGRQVAAWIGLTPSQYSSGGKERLGAITKTGDSYLRNLLIFGARSVMASLGDKQDRFSRWVRSLVERRGYWRTAVAIAAKNARMAWATLKYGDAFKHIPATA

SEQ ID NO: 505356 - protein, 415 aa, unidentified
MALKIVYQICCGIDVHKTFVVACIASTNKQGVTTYKRHRFSTFTQGLKELLQWLLDNHCKDVCMESTGKYWIPIYNVLEKDCNIVLAHPKYVKAIRGKKTDKKDAKWIADLFKHDLVAGSFMPPADIRQLRDLMRYRFKLTCFMSSEKNRLQNCLTVSNIQLASVVSDTFGKSSQRILDKILENPDDTSFDIEPLIHGSMKKKLPELELAIDGFITPEQAGKLKVIKKHFEDLESRKAELEELILALASPYQQELDLILTAPSFKNKFTAIGIISEIGVNMEAFPSAKHLCSWAGLTPTNNESAGKKKSVRVSKAGCYIKPLLVQCANSVAKSEKHPEIRNRYLRLRKRRGHKKAIIAIARMLLTALYNMLKNKEPYNAELYRKSDVLPVNREITIEQAILMAQFQGYKIKSAAE

SEQ ID NO: 505357 - protein, 342 aa, unidentified
MDVSVIGIDLGKNSCSVAGMDEAGSVVFRRRASRAGVMEIVRRHPGSIVAMEACCGAHHLGRVFLEEGHEVRLMSPEYVRPYVKAQKNDDRDAEAIAEAATRPTMRFVPVKSQEQSDPQSLHRGRERLVGDRTALVNHLRALLLERGRIVAKGRAKLRSEVEELLAGAAPELSPRIRILVADLVEEWNRLDARIKAFDAEFVALARADPAMRRLSTIPGIGPINATALVAAVGDARAFGKGRDLAAWLGLVPRQATTGGKPRLLGISKRGNRYLRKNLVHGARAVLPKLAERDTPIGRWLRDLLARQHKNVVVVALANKLARICWAVLSGDRGFAEEVAEMH

SEQ ID NO: 505358 - protein, 310 aa, unidentified
MDAIYVGVDVSKDRLDVHVRPGGEAFVVSRDDKGLEELVERLRQLSPALVALEATGGFEIMVAAAITGAALPLAVVNPAQIRHFAQAVGKRAKTDPVDAGVIAHFAEAVKPAPRVVPDEAVQLLGELVARRRQIIDMIVAERNREKRATNVRVRKSLARHIAALEKELHKIDGDIDTLVRGSPVWRAKEDLLVSVPGVGKIIARTLLAELPELGTLGRRETASLAGLAPHARQSGHWRGKSMIAGGRAPVRSVAFMAALVATRYNPPLKDFYKNLLHLGKPKMVALIAVARKLLTILNAILRDNRPWQNA

SEQ ID NO: 505359 - protein, 403 aa, unidentified
MIFVGDDWAEAHHDVYLMDESGRRLGSRRLPEGLSGIRQLHELIGEHAEEPDQVVIGIETDRGLWVGALTGAGYEVFAVNPLAVARYRDRHHVSGAKSDASDAKLLADLVRTDRHNHRRIAGDSPDAEAIKVLARTHQSLIWTRTRHTNALRSALREYYPAALVAFEDLDHGDALGVLDRAPTPEQGAHLPLAALQSALKRGGRKRNIAARAREIQAALRTEQLTAAPAISAAFAATTRATVGIIGELNRQIGELETSLAAHFETHPDADIYLSLPGLGVVLGARVLGEFGDDPNRYTDTKSRKNYAGTSPLTIASGKKRAVLARHVRNRRLYDAIDQWAFCALSSSPGARALYDQHRDAKESHHQALRAVGNRLVGILHGCVRHHTPYNEHTAWAHRTPAAA

SEQ ID NO: 505360 - protein, 335 aa, unidentified
MEASYYIGIDISKQRLDWHLTDAQNTELATGQTVNSPKGIHKMIGQWKRGKFYLDELIVCFEHTGPYGLLLAALLEESGICYVMVSAIQVQLSLGIRRGKSDPIDARRLAEYLWRFQDRLTPSHLPSKMLLELRGWLLWRERLVKMRTALTNGIQANILTSEVADLGEINEQMQTQHDQLTTQLKQVDRKINKLLRRYNTTEGQYDLLVSIPGIGPVIAGWLLVYTEGFTRFSNARQLACFAGSAPFPKQSGEHRGPDRVSQWRCQRLKSLLLNGVHSAIQYDPELRAYYNRKCGEGKHPQSVRNAVICKLLYRVFAVINRGTPYVKIHQHKAAK

SEQ ID NO: 505361 - protein, 407 aa, unidentified
MIFAGVDWAEAHHDVHVQDENGKRLGGGRLPEGVEGIARFHELAARHAQDPGEVVIGIETDRGLFAAALVAAGYQVFAVNPMSVSRYRDRHSVSGAKSDPGDAKVLADLVRTDRHNHRPVAGDSDLAEAVKVLARAHQSMIWSRRRQANMLRSALREFYPAALAAFDDLTSGDAIEVLRAAPAPAPGAALSRPKIAAALRRGGRQRRIDARAAQIQAALRAPQLAPAPVIASAMGATVSASVAVIAEMTTQIAALERQLAADFEQHPDAEVVRSLPGPGTILGARVLGEFGDAPDRYATAKSRKNYGGTSPITRASGTRRAVLARHVRNQRLADALYLWAFAALTASPGARAYYDHRRAAGDTHHAALRALGNRLVGILHGCLAHHTPYSETTAWAHRASTYITEAA

SEQ ID NO: 505362 - protein, 316 aa, unidentified
MSESMSFVGIDVSKNVLDVHVLCTGEHWQVGNDQAGCASLVERLKPLGKTMLVVMEATNVFWRMAAAALAGAGLACAVVNPRQVRDFAKSMGILAKTDAIDAQVLAQFAQRVKPPVRALPDAQCQVAAELLARRAQLMGMRVAEKNRLGTANARKVRKDIEATIAFLEKRLAALDEEIDRWLKSTPIDQSRADLLQSFTGIGQNAARSLLITLPELGRLSGKQIGALAGLAPFAKDSGGKRGQRHIAGGRAVVRAALYMPALSAITHHPVIRALYQRLVQAGKHHYVAITACMRKMLVILNAMLRSGKPWKASHHA

SEQ ID NO: 505363 - protein, 342 aa, unidentified
MHSERKNYLGIDVSKGWFDVSLIAVVEHAKQPVVTERFDNTPTGMKDFKKWLKLQHVSYDENSLLVIENTGVYHRLIWSFCSTHNLQLHIGNAAHIKWSLGITRGKNDVIDSKRLCMYCLKQADELKTTPVLNPVFMKLKDLMSSRNRLLTQLHSTKNYLNEIKCTDDKALLTILDKAHKAAIEGIKKSIEQIEAIIEKIIQQDQAIYNNYNLIKTVPGIGHLTAIYIICCTNNFASKPSGKQLGSYAGVVPFGNSSGTSIKGKNKVHKMANKDLKKMLHLCALVAIKYSPEFKQYFDRKKAEGKNGMLVLNAIRNKLLLRVVAVVNKQQPYVNNASVVAVR

SEQ ID NO: 505364 - protein, 391 aa, unidentified
MLICGIDIGKNHHEAAVIDKDGRLLAKSFRFANTTPGAEGLLEYINRCNTEKDVVVIGMEATGHYWLSLYCYLFDAGFQVNVINPIQSDAIRNLFLRKTKNDAKDSFLIAETIRIGRYSKTEMADEDILSLRQLCRHRMDLVDYIADQKRKIIGVMDRVSPEYQNFFSNMFGKTSTELLSKAVTPEELLAIPTDDLCKLLRDNSRGRFGEAKAAELRQAAKTSFGITIGTAAFTMQLRQLLEMIELLERQLVELEAEIEQYLLKMNTPITTCPGIGSVLGAVILGEIGDISRFTEPKKLVAFVGIDPSVKQSGEFTGTQNKMSKRGSPHLRRAIWLAANVAAFHDPVLSAFYQKKRAEGKHHYTAVGAVARKLTFIIYAVLRDNKPYVPNC

SEQ ID NO: 505365 - protein, 345 aa, unidentified
MTAEEQSVTAGVDTHGDTHHAAVVDAVGRHLGDAEFPATAAGCRRLLAWLRRWGAVQRVGVEGTGTYGAELTRMLRGHGYDVVEVDRPDRKLRRSKGKSDPTDAYAAALAALSGRANATPKARDGAVESIRALRVVRRSAIKARTQTMNQLKSLLITAPGELRDQLRPLTTAALILTCARLRPGSAMTDPAVAVKQALRTLARRYQALTAEIREADELLAALVKATAPNLLEIVGVGVEVAGQLLVTAGDNPERLKSEGAFAHLCGVAPLPASSGRTDRHRLNRGGDRGANNALYTIVLSRLRYHQPTRDYAQRRRAQGLSHKEIMRCLKRYVAREVHKALIRTP

SEQ ID NO: 505366 - protein, 342 aa, unidentified
MTLYIGVDIHARQQTLSYLDTSDGTTGQVELDHEVDDVREYYRKLEGEVIVGIEACGYTNWFEELIEQLGHKLLVGDAAEIRRLARRRQKNDRRDAELILELLIRGEFPTLYRWTKASREVLRQLRYRHKLVKLRTMVANTLHALALNAGVSLRARLLTKGGRKQLSALQLSAISQQQRDELVSLADELTRRIQQVERWLETQAQSDARVQRLQTHPGVGLLTSLCVVHTLGEVARFSSTRKVAAYVGFDPMEDSSAERKAYGGISKAGSRLLRYLLIEAGQTAAKDDEQLKQFYRRLLPRRGKARAKVAVGRKLLIRCFIMWRAEIDYAEFLRRGQQEETE

SEQ ID NO: 505367 - protein, 387 aa, unidentified
MAQVNDLSRSLTAFDLISTLVVVVEMSKASWLVSGAVPGVERQPLKKLEPDATALLRLIERWRNEAVRAGRPISRIALAYEAGRDGFWLARWLIARGIEAHVIHSASVAVSRERKRAKTDRLDAAMLMRVFLGWLRGERGHCGMVAIPTMEEEDARRPSRERESLINERSRITNRMKSALARLGVRGFKPHLRKAPERLAGLRTAEGTGLPANIIEEFRRDMARLALVREQINSIEKTRAERLKRAPDTGPHAMVRLLARVIGIGIETADMLVREILSRKLRDRRAVARYAGLTGSPDESGLKRREKGLPKAGNARVRRGLIQLAWRFLTFQKDSALARWYRTRTEGPSGARKTTMIVALARKLLIALWRLVTTGEVPDGVELRPAG

SEQ ID NO: 505368 - protein, 318 aa, unidentified
MNTKINQSINVGVDTGKTQLDIHIRPLDLFFSVENNDKGIKKALKTIKSHSPERIVIEATGRLEMPFVLACAEAQLPIVRANPVHIKRFAGAIGRRAKNDRLDAELIAHYGEAIKPALTVIKPKNIRLMSDLVIRRNQLLSMQTMEKNRIQILPASLHPTIKPMLTTIKNQITKLEEKLVKLIEDSPEYQAKNTILQSVPGIGNIAAASIISNVPELGYITNKQAASLIGVAPITRESGRYKGKRVIQGGRAQVRTVLYMAMMSAMQCNPVFKATYARLVAAGKPKKVAIIACVRKMVVTLNSMLRDGAMWDENAAKN

SEQ ID NO: 505369 - protein, 393 aa, unidentified
MKSILSVGMDVHKNSFSLCAYDGYTGEIVSESTFASDVKLVIKFIETLKSLSLIEIKCGYEAGCLGYSLYKSLTSRGVDCVILAPTTMQVSAKNKMVKNDRMDALNIAKNVASGSYKAVYVPDEEDVEIKEYIRMIHDFKKELKRVKQEICAFVLRHGYQYDGKSKWTMDWIRNLQMSEIQRETLNEYVAEMDNLNDKIERFMNRIHEMYQSDRYNEKVSELRCFKGIDTFAAMTIQVETADFERYPNAKAYASYTGLTTGEHSSGDKNNRIGITKQGNTVIRKTLVECAQSLVKGNVYTPKSKRPKSRQKGMDVNIIAYADKATERLKKKYQKLIERNVPRNKAIVAVARELACFEEWKQETSIKIEKINERRREERLLKRQRIDDIEELRK

SEQ ID NO: 505370 - protein, 315 aa, unidentified
MSTSGFYAADVSKSELVIACEADDAEIVRVANGAAAIDAWLDRLPAGSLIGMEATGTYHRLLAARASARGFTVYVVNPRDFHFYARSVGARGKTDPLDARLLARYIAHEHTHLHRYVPPSALCEQLCALLERRAVLVRTRQTLVQSLADLPTLQPHTQVALRALDDLVAALDSQLATLNASDPATASLVRRLRTICGVGPLVSTLLAALLQRFAFRHADALVAYVGLDPRPDESGSRRGRRRLSKRGHPEWRRLLVAAAMSAARTRVWGDYVLGHKNKGLPSTAVHVILARKMLRVAFALYKSGNDFFAPEIKPI

SEQ ID NO: 505371 - protein, 398 aa, unidentified
MGSNGRDRRWCISGRWSEVARTTGVDQKQGGRHERADRAGFDELDRWLERQGPVERVVLESSGHYYWPLASHLQRRGYGVSVVNPLQAKYFAKSRLQRSKSDPADARTLAALGMSEEPRVKDPLLGAEAKEAARFWGGLVKEQAQIRNKLLRLVEIGFPELQECFEDPLCATALAVLREAPTARAAARKRVSTLAETTRPGGRRRLGENKARRLHELAAKTIAPPELDAQMGFEVGMLIQQFDLLDKQIEIAEQRVAEVLDSELARRLQTIPGVGPALAATFIAEIGDIWRFEDFDQLASYAGIHPKEMSSGTKGQNPETRWRMAKTGNAYLRSAAYKMAVIGTQHNPMIRAHYLRKRAQGKSAMNALGHCMSKALAIIWGVWRSGLDFDPTLGGPRT

SEQ ID NO: 505372 - protein, 402 aa, unidentified
MNSVGIDVSKGKSMIAVMRPFGEVVVSPFEVRHTANELNELAGLLKSLDGETRVVMESTGNYHAPVAWLLHDAGLYVSVVNAMLVHDYGNNSLRRGKTDKKDAVKLANYGLDHWLTLPKYVPEEDTRLMLKTCYRQYQQYSKVRTMLKNNLISLLDTAFPDANRLFTSPPRADGSEKWVDFVAAFWHCECVCGLSKKAFTTQYQKWCRKHGYNFSEDKALDIYASACGHFGVMPKTDTAKLLVEQAVSQLRATSAALAALKQEMQSLAVSLPEYPVVMEMFGVGPTLGPQLIAEIGDVRRFHSKKALVAFAGIDAPPYQSGQVDVRSRNISKRGSASLRRTLFLVMGVLLQCAPMDEPVYQFMNKKRSEGKPYRVYMMASANKFLRIYYASVKAYLDSLEHG

SEQ ID NO: 505373 - protein, 431 aa, unidentified
MEEVTGEPLYLERVCGIDIGKAALEACIRVPSEANPRRRAQETRSFGTTKKEVLALADWLRCWGVTEVVMECTGDYWKGPFYRLEAEGFDCVLADAKQVRHLPGRPKNDRCDARWLAVCFERGAITACFVATAEFRLIRLNTRYRRDLTEERTREKQRVEKLLESAALKVSSVLTDLHGVTGRDIMDHLIRGERDPKMLAQLARARARRKIRELGEALEGAEFFTPVHARLLAAMLARIDQATRDIEQVSQVIEQLLAPHEEQLRQAESMPGWGRRAAQDAIAETGVDMTRFRTPAHLVSWAGRCPLDQQSAGKNTHRAKVKKGNRYLAGLLGETSVAAGRTQTREGARYRRLARRRGKAKAQVALGNTQLKVYHTLLSAPGARYQDLGVDYYDRRNTRRQVRSHIQRLESLGFKVSLTPLPDVTGCPEVA

SEQ ID NO: 505374 - protein, 442 aa, unidentified
MKKEVKNEFRLVHPNAAGIDIAKDVHYVSVPADRDETPVKHFGSYTEDLHELAQWLKQCEIDTVAMESTGIYWVQLFLILEEYGFDVFLVNARHIKNVTGRKSDVLDCQWIQQLHSFGLLNKSFQPENEIRELRAYMRHRKNLTQSCASQIQLMQKAFEQMNIKLQNVLTDICGKSGQLIIQAILAGERNPDVLVELIDHQVKASKQEIKKSLVGNWRAEHLFELKQAYELYLFFKEKISECDIQIENVLDRLGANGSGWDRTTKTPRRVYTKNRFDFNATNYLKSFIGVDLTKIFGISEILALEIISETGIDMTKWPTKKHFTSWLNLVPNNRVSGGKLLKPKKVKKKNKAGQAFLMAAFALQRSNHWLGSFYRRIKAKQGPATATKATARKLALIFYDMIKFQREFSPINNEVYDKHFAEQRIKYISNQAVKLGFHLIPA

SEQ ID NO: 505375 - protein, 402 aa, unidentified
MSYYVGCDWASTAHQICVINAHGQIVWQNEVPHTAEGCAALRRRLQRFGAPADVPVAIERPSGLIVDLLLEWGHPVVPIQPNALKASRSRYRISGAKSDASDAFILADLLRTDGHRFRAMNPVADETRALRTLVRTRDDLVATRIGLANQLRAVLEGFWPGAAQVFADIDSPIALAFLERYPTPEGAEHLGEKRLAAFLGRNSYCGRRPARELLERLRRAPTVIVGEANTEASGEVVRALVTVLVDLVAQIQKLTSAIAQAMRVHPDGAIVMSFPRAGCTNAAQILAELGQERLRFPSVERLAAEAGVVPVTVESGKHRGVTFRWACNKRLRRAITIFADNSRRASPWAAQIYQRAQARGCDHPHAIRIKARAWLRVLWRCWQSSTPYEVSNHGSAQRLSVA

SEQ ID NO: 505376 - protein, 354 aa, unidentified
MNSLRYIGMDVHRDTISVAVLDESGRLTMQSVLATRAGAVLDFIHGVRGTLQVTFEEGTHSAWLYDVLVRRVEKLVVCNPRKNALLKSGSKSDAIDARKLAELLRAGMLSAVYHGETSALEVQQMARSYSQLTEDTTRVMARLKAVFRGQAVSCAGKKLYGKRHREEYVEQLSGGLRRRAEHLYQELDALQPLRHEVRRELLVECRKHAAAQWLQSVPFLGPIRAALLIGRVQTPHRFRSKRQFWTYCGLGLETRDSGQYRMVNGQVERRRRPVLIRGLNWNHNHEMKNLFKSTAIAASVRQGVWREFYLGLLDKGMRPEMARLTLARKIAAITLKIWKKGETFNAEHLKLQAA

SEQ ID NO: 505377 - protein, 404 aa, unidentified
MDLAPIYRCAVGLDVHQAQITVCVLSEGADGEVVAEVREFGGFKRERRAMAAWVAGFQPDVVVMESTGIYWKSPYAALEQAGIRALVVNARHVKRVPGRKTDIADAQWLAILARAGLLTGGFVPPANFRELRLIARQLQRLTGIRAGEKNRVHKVLTDGGIRLSVVVSDLHGQSAWAMVKALAAGETPEQVLCHASTRLRASEQELLDALDGELSEAHRFVLAELVDHVEDLDRRIACFRDRLLAGLAPQQGLLCALQTLPGFDELGAALLLVEIGDDMQAFGKPEKLAAWAGVCPGNHESAGKRQSGKQRKGNPYVRRLLCEAAHAASRTRCALAEKYKALQVRRGRKRAIFALAHKLLKLVFVLIDRGDYYRDATVDYEALSVARNAPRWIKMLRKHGYLAA

SEQ ID NO: 505378 - protein, 344 aa, unidentified
MYFIGVDHHKQASVMTVVDKDGRELKTGKMLNRRAPVEQFLAGIRPFTAVVEAGRSSYVMADLLRELGGEVKMANPVEVKAIAHARIKTDKRDSRTLAHLLRAGLIPEIYQREAWNRRAQRVMRMRAFWVRKETEVKNKIRALLAQQREDVRLAVEKWERSLFNLKGLEFMARLPLEARDKEVLDDLLQGYGEIQTHIKKSDGLVRALYKEIEEAHRIDTIPGFAATLSVVTAIEIADVTRFPRVEELHSYAGLIPSTYSSGERTYHGRITKQGNVWLRWAVVEAVYPAIKKDLGLRVLYSRLTKRKGPNVAKIAVARRLLTIIYRVLTEKREYIPEMKQQSAA

SEQ ID NO: 505379 - protein, 367 aa, unidentified
MVHIDVTHHNFRISVGLDVHARSVLGCALDGDTGEVFQRRLCPDHEEIVAWLGDLPGPVAVTYEAGPTGFGLARALTAAGIFCEVAAPSKLIRPAGDRVKTDARDAAHLARLLHLGQITAVTVPPASQEAARDVVRAREDCREDLMTARHRVSKLLLRQGIIYSGGKPWTGRHEVWLRAQRFDNPALQLSYEAAFDAMLACVDRRARLDDAITKLAADSEFTPVVHRLGCIRGIATLTAFGLAVEIGDWHRLTGRTIGAYVGLVPSEYSSGETRAQGGVTKTGNGHARRLLVEAAWHHRSPYRPGAELRRRWDLAAPAARARGQSANRRLHTRWVGFDARQKRPVIANVAIARELAGWCWSLAVMPD

SEQ ID NO: 505380 - protein, 427 aa, unidentified
MNEPKYKATLCVGADVHKNEIVLRAVDKAQGHEVLERFRVTNNLPGAQSAAATIAQVAADLGYTRIEIGWEATGMLWIPFHRYLSTEPLLLPFELELICFNPKLVAKFKDGLVLRSPKNDDRDAFDVAARIRFGELPVTYVPSDFWQGLRRLTRYRYRLSKALSQEKMRFQSYAFLKASDWKRVKPFSNVLGATSAALLTEFTVAELQDMTHDQLVDLITHRGRGRFTDPTATARDVRQALRTSYPIDPRMDQMVTDSLAAMWDHVRYLDRSMKRLDKSIARYIDPIPNPIITIKGLGAVITAGILAEIVVVLRFEEQKHLAQYMGLTWRKSSSGGFVSQNTRMTKVGNVYLRYYFIQGANLLRQHNLEYKAYYWRKYQEVSKYQHKRALVLTARKLVRLVHALLTKNVPYVRPRTTDPGQEDDRFQ

SEQ ID NO: 505381 - protein, 355 aa, unidentified
MPSKADTAVARTIGIDTGKNTLHMIGLDERGAIVLREKISRARIAARFVNLPPCLVGIEAGMASHYVARELVALGHEVKQVPPAYSKPFRHGHKNDFRDAHAVAEAVERPSTRCVPIKTDGQLDLQALHRVRSRLIGNRTAVINQIRGFLLEHGIPVRQGHHFLRKQLPLILATRTDVLSPRMIRIIGDLMADWKYLDERIEGVTDEIEALAHADEGCQQLITVPGIGPIISSAMVAAIGNGAAFCKGRDFAAWLGLVPKQMSTGDRTILGRITKLGNRYLRMLFIQGARAVLLRPASWVKHSFGSWLTAATRRLHRNVLAVALANKLARIAWTVLAQGRRYEARVEPRVEPAAA

SEQ ID NO: 505382 - protein, 371 aa, unidentified
MSLHSQGRRERLYRVGEPKPSLIQFRGAEMADHSQAVVEVFAGLDVSAREISVARLRSRDGALMLASFPNNASGHKALLSYLLQGTKHVRVCLESSGNYSLDLALALHAHPQVEVSLVNPRRARRFAESLGERSKTDPVDARVLCQYAARMPWVVWCPPTARALKLRAITRAIESLGVMNTQEKNREHALKASQALPSLVIREAQRHQRYLEHRIEQLRHEARRLIAKDAELERRFRLMLTVPGIAETSALQVLGELAVLPENLDARQWVAFSGLDPSQFTSGTSVQKRPRISRGGSAHLRRALYMPALVGLRREPHLRIFYERLVSRGKARLQAVVAVMRKLIHALFAMFRTNQAYDGAKLCSAELALSA

SEQ ID NO: 505383 - protein, 345 aa, unidentified
MPIVGGMDIHRKQITFDYLDTETGQVRRGQIAPADREHLRAWLARFAGREGVAFAVEGCAGWRYVAEELAAAGVTAHLAEPADTAFARGRKRHAKTDRTDCRHLRMLLAEGRLPECWIPPGHILEGRALLETYHDLRREHTAWVQRIHAVLFHQGAPALGEGALRTGQGVAALRAAAAAHLSPAGQLQVATALEVTEALEARMHMVRHQLLAAARHLTGAKVLAARLYGVGPVTALAMTCWLAGEGRFSSSRQAVRFAGLDITVYSSDRKGPPGRLSRQGPPVLRWAVYEAGKTHARSSAPDHRYYATVKDRCNGKRAALSEARKILRQACHILAELGDDALATA

SEQ ID NO: 505384 - protein, 338 aa, unidentified
MKLYGAIDLHSNNNVTVLIDEQDKVVYEKRLANDLGLIAQQLAGYQSSLEGIVIESTYNWYWLVDGLMDKGHQIHLANTAAIQQYEGLKHTDDTSDARWLAHILRLGILPEGYIYPKEERAVRDLLRKRGQLVRQRTANLLSIQNLMTRNTGSSMNSNRIKTLQPQQVDELLADGDRALAVKANVAMVQCANGQIEILERTVRDRVKLRPEFCFLKTVPGIGQTLALTIMLETGDIGRFAGVGNYASYCRCVGSQKLSNGKKKGQGNTKNGNKYLSWAFVEAANFAIRFSARIKRFYQRKKAKSHGVVAIKAVAHKLCRACYYIMKNRVAFDVTKAFA

SEQ ID NO: 505385 - protein, 362 aa, unidentified
MRIIGCDLHARQQTLAMLDTATGEIVNLALKHEGDNVREFYSKLPHPVRVGIEATGSMQWFVNLMEELGIECRVGHPAEIRAAEPRKQKHDRRDADLILKLLVENRFPAIWLPSKELQDLRALLRHRHQWVRMRTRIQNALQAIALANGLRRGTALWSHDGQNRIASLPLAPHTAYRRSELQAMYAKFEAEIEKLNQRVEEQACGRVGARLLMTHPGVGPVTALATEVFLGNPARFADSKALASYVGMIPREYSSGERQRLGGLSKQGNPLLRFLWGEAGAHAVRRDPELKRFYRRKLVQKGFGKASVAVARKLGIRLWIMLRDQIEYNEFCRRGQKQQKRSDACAGMPETPNGAKSHRPVD

SEQ ID NO: 505386 - protein, 402 aa, unidentified
MTYDYVIGMDVGKYFHHACVLDIDGAQVLSKRINQNEKSLRKLFSTFSANDHKVLVVVDQPNNIGRLTVAVAQDIGIDVRYLPGLAMRQLSRIHAGNAKTDIRDAYIIAHAAKNLPESLRSVDRVEEAFLQLKVLNGIDEDLARSYTRLINQIRSALVGCYPQFEQALRGQIIHRKWVLHLLARYGGPTKIKRLGKAQAAAFARRYKARNPEPVIDAIFAAISEQTVAIAGAQYAEMGVAMSAKDALLKLEHRKQIEQEVIELINDIPHTQILLSMPGIGPKTAAQILMTAGDMSDFPTAGHLASYAGLSPRTNQSGTSIMSNSLNRAGNKKLKNALWQSSFASIRFHERSRQFYERKRREGKRHNAAVVALARRRLNVLYAMMSNHEYYRDPDQSQEVKAA

SEQ ID NO: 505387 - protein, 419 aa, unidentified
MKPQASEAFAAFVGLDWADTKHDVCLQATGTEQREFLRLEHSPEAINAWVQTLRTRFNGQPVAVCLELNKGPIVSALRNYEFLVLFPVNPLTVAKYREAFTPSRAKDDPTDAELQVEILLKHRDKLTPLSPQSPTMRALAQLVEHRRRLVGDKVRLTNRLTSALKNYFPHVLQWVQEKDTVLFCDFLSRWPTLKAVQLARRATVEGFFRAHHVRSADVITTRIQAIKSALALTTDEGVITPNVLLVQALVAQLRVTLQAIADFDRAIAQRAQDHPDFPLFEALPGAGAVFAPRLLVAFGEQRERFTSADELQKYAGIAPVTERSGKKSWVHWRLQCPKFLRQTFVEWAAESTRHSFWAQVYYQQQRDKGKAHQAAVRALAFKWIRILYRCWQERTLYDESVYLQALKRRNAPLLHNLAH

SEQ ID NO: 505388 - protein, 427 aa, unidentified
MARAIGLDVHLEFCEVAIAEDRVVRSAGRVETKPDALELFAQSLGPDDRVALEVTGNAWEIARIVEPHVARVVVVSPADTGIRQARAKTDRLDARTLARLLWSGELDAVWMPDRVTWVMRRRLSRRGQLVWTRSRAKNEIHAVLLRCLVGRPPFADLFGVKGRRWLAELELPVEERETVDAGMRQVEFLDTEIAAVERLIARDALASEEIKRLMTVPGVNVIVAASFVAAIGDIGRFHNPRKLVGYLGLDPRVRQSGSGPASHGHISKQGSVRARHALVESCWSAVRQPGPLHAFYQRVRARRGHSVAIVACARKLACLFWVLLTREEDYAYAQPSLTRKKLRLLELAAGAQRYSPAGDGVWHANEAVRAAERELAHQAEIAYQRTVRDYHATQATTKGAGATPGRASSSRQSGKQRGRATVPDPAL

SEQ ID NO: 505389 - protein, 326 aa, unidentified
MEHELHYIGIDTAKEKLDVDVLRPDGRHRTKKFANTTKGHDELVSWLKGHKIDHAHICIEATGTYMEPVAECLYDAGYIVSVINPALGKAFAQSEGLRNKTDTVDARMLAEFCRQKRPAAWEAPHPLERALRALVVRHQALTDMHTQELNRTETAREVQRPSIDAHLLWLEAELKRLEKQIKDLTDDDPDMKHRRKLLESIPGIGEKTSAVLLTYIGLKDRFAHARQFAAFAGLTPRRYESGSSVRGASRMSKAGHVSLRRALYMPAMVATSKTEWGRAFRDRLAANGKKGKVILGAMMRKLAQVAYGVLKSGVPFDASRHNPVAA

SEQ ID NO: 505390 - protein, 344 aa, unidentified
MIWIGLDVHQRFSRMGCFDPASGEIHDLGSVSNEATALEEVLEELRSPKTVVLEAGRSSYYMAGLLESMAEEVWIVDPGEVRRLQHTISKTDRRDAAALAWWAAKGVLKPQWRPDGQTMDLRELTRGKTALTGMSTQVRTMIRMLLARHGNECPHRDLMSERGQLWLEEVELEGHAGKMLAGLREILVVVQTKVDDFERMVEHTSAKHPMARRLRTIPGIGPFLSLALAVEIGDINRFPGPAQLRGYSGLVPAVYQSGEKDARGPLTKAGNKWLRYAAVLAAQRIGQMKEPDPRLKRIFLSVAFRHGRNPGKIAVARRLLDLIYHLLKKGQDYRAPKPRGVTTA

SEQ ID NO: 505391 - protein, 395 aa, unidentified
MYSLFVGIDISKDSFSVAALDEKAKTVFSMNPLMNAEGFSDFLKMLSSHRKDFSTVVVALESTGPYHLNLYSFLLSKGITTIIVNPLIIANFNRLSLRKTKTDRKDAFTIARYLYLNRDSICNLTSSQVTTDLRDLARERESILKMVASMKNDIRRILQSTFPELEHRVDVLCVTMLRFLKGFPSARLINQATCREVAEGFSQRGSGRRISMPYTRIIELAKSSVATTSPSKELILPGKIETLFHLTKRADEITKMLVELCKSIRQEEFSILTSIKGIAAKTAAPFLAELGDHQKFQSYKKMLAFSGLDPTTHQSGKFEGVSMISRRGNRHLRKVIYNMTFCVVRYSGPFRDYFFRRKREGLPFKKAIMATAHKLVRAIFAMLKSGTCYRAAEVA

SEQ ID NO: 505392 - protein, 402 aa, unidentified
MKVCGLDVHKDSIFCSIYDGKTTSEVKIFDSTTRAIYEMGEHLMTERVKRVAMESTSIYWIPVWNILLEMGFELTLVNPFLIKQMPGRKSDVKDAQWIATLLHKNLIRGSVIPNSTIQELRFYTRKYMKLQQDKCKLLTKMDRIMVMANIRISSCVSKLTNKSVIIVIEALIKGETNPDNLVKLVYGNTKNKQSGKLREALTGYIMDHHRKALKWEKEIYDILERQTLECIKEMERICNKHYKDEMLLLQTLPGVSKISAICLIAETGADMSVFDNSGKLTGWAGLRPRNDESAGKFKSKAITKGNKYLRVVLIQVAWAASRTKGSYFMEKYHRLSMRKSNKKAVVAIGRKILVIIWNMLKEKKPYNPNLVCIYDPIKIERTLAYHRKEMEKAAKLLHKEII

SEQ ID NO: 505393 - protein, 375 aa, unidentified
MTNNTVFIGLDTHKETIAVAIAEDGRDGEVRYYGQIENQPAAVLKLVKKLASKYEWLRFCYEAGPCGYGLQRQIASLEHECIVIAASHTPTKKGLHVKNDRRDALELARLHRSGDLTPIWVPDEAHEAVRDLVRARITAMEMVKRYRQHLQSFLLRHGRIFQGRTNWSRAHITWIRTLKFDHSAHHILIEENLAAIRDSQDRLARLEQQIVNLLPSWTLAPVVQAIQAMRGVSVMAAVILVSEIGDFNRFGHPRQLVSYLGLSPSEHSSGSKIIRGPITKAGTARGRRVLIEGAWAYRLPARVGKKIASRHCGLTKDVLDIAWKGQIRLCKRYRSMSARGKNKNVVVTAIAREMVGFIWEIARSTPHPTVVAHAS

SEQ ID NO: 505394 - protein, 394 aa, unidentified
MEHPIRIGMDTSKRVFQVHGVDASERACLRKKLSRDAMMALFKAMPPTVIGIEACGSAHHWARTLSAMGHEVRLIAPQLAKPYVKRGKNDAADAEALCEAMSRPTMRFVPVKTVAQQAALLLASERARLVSGRTRLANAIRGHAAEFGLVGRTGVAHVGELLARVAADEGLPVLVRELFAGLGEELAQLEVRLAATDARLQAWHRGDEASRRLAAIPGIGPITASLLAMKVPDPAAFKSGRDFAAWLGLTPKDHSTAGRVRTGGITRAGDEVLRSLLVVGATSVIRHMRAAPPPPPKGQRKEAGQTGGEPARADAAQAGAGEAGRAKAGPAKAGHTAPGGPRPWLAGLLKRKPPKLAAIALANKTARVAWKLLSSGEVYNPAHSHTPAPALAAA

SEQ ID NO: 505395 - protein, 459 aa, unidentified
MKVRVGVDIACRAAHRAACADEKGQLLWSGHRFRTSAADLETLWSRLPAEATEVTVVMEPTRNAWVPLAAWFRGRGAIVVVVPSEQSSDLRAYYAKHAKTDRLDAELLARLPMLHPEGLHPEAANGPADPLKRAVKIRSSLVRRRSQCMHRLDALLEILGPDWVGALGSDMTQAAFKFLATWANPHQIKRIGRARLARWFQHQTRKAWGEGRADAVVSAAEATLALWGPDGLDYEALAADIAAEASVALELSRQIAQLDQRIFDLYCEADPEQIVRSAPGVGKILAAQIRGRLGDPHRFTSLAAARSFSGLIPHQNSSGLTDVTGGPTKQGDACLREALFLAADHARRSDPQLAARYQRLMCDKGRHHNSALCTVAAVLLTRITACLRNATPYQIRDVDGRPITAEEGRTIVAERYQIPSQVRAARRTVSGNVGSRRRDERTKSEVAKRSTVTPVPIPV

SEQ ID NO: 505396 - protein, 454 aa, unidentified
MKRKRSYSATDVEQIDVAALLQLITVGCIVAIDVAKTKFVAAIATAAGEVLKLVKFEHPRQTAAFLKMLRAIQEAQCNPVVVMEPTGTYGDAVRYQCHALGLPVHMMPPKHSHDFAEVMDGVPSMHDPKAASVLAKLHAIKPARVWSPDSDARRDLRAWVDQRPPLARTLAIYHGQLEAMLARHWPEFQSHVDVYGQRSWTALLKQFPGPQEVAAAGEGACETLRKASRGQFSSSRGQALVASAKTTTGVPMTPGERERLRVIAEHIELQTHRLDAVDAKLAELATTDIVLERMASLVGPACAASIGALVGSPLDFPNARALEKAIGLNLKEKSSGNINGHRSITKRGPGQVRRLLFLAALRLMKDDATALAWCRARKGYQAEQKIKAVVALMRKLTRALWHVARGAAFDPTKLFDTRRLNLHVNPTPRSNTTSAPRSPSPRAKEPYQGGAATA

SEQ ID NO: 505397 - protein, 412 aa, unidentified
MEVVHASCAGMDVSKTDAKVCVRVAGAGRRKTVETVTTWGAMTASILDLREHLAAVQVTCVVMEATGDYWKPFYYLLQDLPGVEVMLVNARHVKNLPGRKTDVADATWLAQLGAHGLVRGSFVPPAPIRRLRDLTRTRTAITRERGREAQRLEKLLEDAGIKVSVVASDILGVSGRAMLEALIGGQRDPGVLADLAKRRLRSKIPELTQALQGRFEEHHAFMARVHLDLIDQHTAAIEALTARIEQVIEPFRGFRDLICTIPGISTLTAEVIVAEIGEDMSRFPTAAHLASWAGTTPGSNESAGKVKSAKTRPGNPYLQGALGAAAMSCAQHPGTYLNAKYRRIATRRGPQKANVAIQHAMLVAIWNMGTNGTLYDDPGADYFTRLNPERARTRAVQQLESLGYAVTLANAS

SEQ ID NO: 505398 - protein, 469 aa, unidentified
MTPRSGQAFRTSDQLDDLAVSQRHAAGIDVHAAVHFVSVAPADVPAGFRNPDPKLPDGVRKFGAVTSDLEALAAWLTECGVTTVAMEATGVYWIPLFDLLASQGFHVILVDPRQTTHAPGRPKSDVLDCQWIRRLHSYGLLTASFRPCDEIVRWRGFVRQRDVLIRYAAQHVQHLQKTLEEMNVKLTEVVSDVVGQTGMKILKDIVAGQRDPLKLAKHRHDNCKSTEAEIAEALKGTWRREQLFALKQSLKLYEFYQKQLRECETQIESCLRSMADKSQGAALPPNARKVRRKPEKNEVRFGARVLLFKMAGVDLTAIEGIGETTALVILSEIGVDMSAFPHEKNFVSWLGLCPQHRGSAGKIYQRRTRRGANRAARALRMAAQGCHRAQNAMGAFYRRIQARAGGAKAVTATARKIAERVYRLLKYGQEYVRQSEEAYESAYRLRLEKALAKKAASLGYKLVPETQPV

SEQ ID NO: 505399 - protein, 348 aa, unidentified
MLADELDFVLGVDTHRDVHAVGVIEVRSGVVVFEAAIAADSDGYAEALRLAQRHAPGRRAFAVEGTASFGAGLTRFLVERGEQVFEVGRLRRERRSGGKTDALDAVRAARSVLTQKRPSLPRSSGEREALRALVAAREGAVNAKQAGLNQLRDLLVTTPEPLRGELRTLTQARLLNRLAATRPERRRNPELRGIMLALRALARRVQSLTLEERQLAREIEKLIRTLAPQLLEQPGIGALLAAQVVLSWSHPGRIANEAAFARLAGVAPIPASSGQTIRYRLDRSGDHKLNRALHLIANTRKRTHPATIAYIERRMQERKTRREANRCLKRYLARNLYRLLEHGPPMAT

SEQ ID NO: 505400 - protein, 348 aa, unidentified
MSQSKQYVGLDVSLKETSICVIDDADKIVWRGQVDSTPEAIASAVKQHAPHAVRIGLESRQLSSWLFHELKEAGLPVICVDARHAKAALSLKVNKTDANDALGLAQIMRVGWYREVTVKGLDCQAERALLVARAQIVSQITTLKNCVRGILKTFGRVLPKGLRSQFSARVRAAIDGHPVLGAIIEPTLQVLEATRAQLLVYDKAVIQRARSDDTARLLMSAPGVGVVVALAYMTGVEDPARFKRSSSVAAYFGMTPRRYQSGEVDHAGRISKCGDGMVRGLLFEAAKVLLSRSTRPSALKTWGEALGKRIGAKKATMAVARKLAVILHRMWTTGTTFQWNAEAASPAT

SEQ ID NO: 505401 - protein, 410 aa, unidentified
MEVLYPHCAGLDVHKDTVVACVRHMVNGSVEREVRTFKTTTKELLALSDWLAGAECTHIVMEATGVYWKPVWHILADGEFELVLANAAHVKNVPGRKTDVNDATWLAELLAHGLIRGSFVPDRQTQEMRNLLRTRKQFVRERTSHIQRIQKTLEDANIKLDSVISDIVGLSGRRMIEALIAGETDPNALAALAHRRIKASPADLEAALRGRVTDHHRFMLRLLLQHTDAIAAATTQIDQQVDALVEPFRTAVQLLTTIPGINELSACVILAEIGRDMSRFPTAGHLISWAGLCPKNDQSAGKRRSTRMRKGAPWLKTTLVQCAWAAARKKASYLHAQFHRLRARRGAKKAIGAVAASILTAAYHMLKNGALYEDLGPDHFDRRAKATQTRRLVARLQNLGYAVQITPLAA

SEQ ID NO: 505402 - protein, 424 aa, unidentified
MKSASNTLSSECPLVLPEVAINDVTAGIDWACDDHAACIVDGRGHKIATITVEHTTAGLRDLVAFLGRHGVGEVAIERPDGPVVDTLLAADLVVVVISPNQVKNLRGRYGSAGNKDDRFDAYVLADTLRTDRARLRPLVPDTEATIALRRACRARKDLVKHRVAAANQLRAHLRNVLPGAIGLFKDIDSEISLAFLARFDTQDRADWLTPKRLGDWLAKQGYSGRTDPAVLHQRLLDAPRGATGDHATTQAHITASYVALLKTLVEQIKALSTQIDRQLDAHPDAHIFTSLPRSGRVRAARLLAEIGDCRARFPTPESLTCLAGAAPSTRQSGKLRTVGFRWSCDKQLRDAVTDFANGSRDANPWAADLYDRARARGHDHAHAVRILARAWLHVIWHCWQDRAAYNPETHRALQRVLATQPEAA

SEQ ID NO: 505403 - protein, 318 aa, unidentified
MQVKINDIFMGIDVSKETLDISLNGRHKKTGNNARAISDFIKSDIAGKKIRLCVLEATGGYERLVMCLLQAAGIPVHRVHPNRLHSFAKAAGHFAKTDKLDAALLEKYAAFAADQEHGDKPLSESHMQMMDLMSVRRQMEEDVHANQCRLHNICGIAKKHLEAVINSTTEQLEKIEKEMELLIAADKELKEKRRLLTSYKGVGNRIAGVLLIELPELGSLSKKEVAALVGVAPRTNESGRKVGKGHIGGGRFYVRKALYMAALVAMRHNQAMKAIYDRMISSGKAAKVALTAIMRKIIVCLNAMVQNNETYRNPAIYS

SEQ ID NO: 505404 - protein, 345 aa, unidentified
MGEVITIGLDIAKSVLQVHGVDENGAVVIRKRVSRAKMLEFFGSLKPCLVGIEACPAAHHWGRELQALGHSVRLMPPSYVKAYLKRSKNDANDAAAICEAVTRPTMRFVAIKSKDQQAALMLHRARQLLVRQRTMLSNAIRGHLAELGIVSAKGRQGTGTLLGIIADAGDRRVPPVARGVLDVLARQYHALGTELGSIDRNLLAWHRSSEASRRLEEIPGIGPVVATALIAEIGDGWKAFRSGRNLAAWIGLVPRQQSTGGKEKLGSITKQGNRYLRWLLVAGAMAVIRYAQKHGTLKRPWLGRLMARRPTKVAAVALANKIARMAWAIIVHGERYREPGVLAAA

SEQ ID NO: 505405 - protein, 343 aa, unidentified
MQQKATVLGIDLAKRVFHLVGMDDTGHIVLRKRLTREALMPYIVQLPRMLIGMEACGGAHYWARRFRAHGHTVKLIAPQFVKPYVKSHKNDPADAEAICEAVTRPTMRFVSVKEVEQQDLQSLHRARERVVKARTALVNEIRGLAMEYGLVFPHSVTKFRQTFLATLEAEHDKLTPLSTELFGQLYDEFGAPEKRLTYYNEKIAAIGAAHPVCQRLGTILGIGPLTATALVAAASDASHFKNGRQFAAWIGLVPRQHSTGGKARLLGISKRGDVYLRTLLVHGARATLRWVRRKTDRRSQWIRALIERRGKNKAAVAVANKNARIVWALLITNQVYSAEQAAA

SEQ ID NO: 505406 - protein, 389 aa, unidentified
MKIYVGIDIAKLNHFAAAISSDGEILIEPFKFTNDADGFQLLVSKLESFDKNSIIIGLESTAHYGDNLVRYLVAEFYQVCVLNPIKTCQMRKNNVRKTKTDKVDTFVIAKTLMMQDDLRFITFFDLDMMDLKALGRFRQKTIKQRTRLKIQLTTYVDQVFPEIQYFFKSGLHQNAVYALLKEAPSPKEIASMHMTHLANLLKVNSHGHFTKEQAKELRILAQKSVGANDSAISIQITQTIQQIELLDSQLEKIEAEMTDIMKFNDSVIMTIPGIGYINGGMILGEIGDIHRFSNPNKLLAFAGLDPSVYQSGNFQAKTTRMSKRGSRVLRYALVNAAWNVVRNNATFKAYYDAKRAEGRSHYNALGHCAGKLVRVIWKMLTDEVEFNLE

SEQ ID NO: 505407 - protein, 386 aa, unidentified
MQKLNDLSRSVTALQPEGTLIAVIEMSLSSWLVAGIVPGVERQPLKKLAVDESALLKLLHRWREEAEKAGRRIERIVVAFEAGRDGFWLARWLKARSIDAHVIHAASVAVSREHRRAKTDRLDSELLKRAFLGWLRGERDHCKMVAIPTAKDEDAKRPNRERESLVGEQNRIINRMKAALIRLGIRGFNPKLKRAAGRLKDLRTPEGEPIPPNTLAELRRDMERRRLVSNQIQQIEEARRQRLEQAPSDGPHAMVRLLARVIGVGTETADMLVQEALSRNMRDRRAVARYAGLTGSPDESGKKCREKGLARSGNARVRRGMIQLAWRLLMFQKNSALAQWFRARTENTRGTRKTMIVALARKLLIALWRLVREGVVPDGVVLRPAQ

SEQ ID NO: 505408 - protein, 344 aa, unidentified
MPLYGGIDLHANNSVVVLLNEQDHVVYYQRLNNHLPTLLEQLTPYRDDLEGVVVESTYNWYWLVDGLMEADYRVHLANPSAIQQYSGLKYTNDHSDARWLAHLLRLGLLPEGHIYPKAERALRDILRKRSHLVRQQTANILSVQNILMRNTGVRFNAQRMRALSPPDLMRLLPEPAQVLAVRSGLAVLHTLGEQITTLEKTVSTSLKHTPAYEQLLTVDGIGTILAQTIVLETGDIGRFATVGHYASYCRCVPSTKVSNGKRKGQGNVKNGNKYLRWAYMEAAQFAMRYSPKVQQFYQRKQAKTQGVLARSAVAHKLARACFYIMRDLVPFEVTKAFGSGLAHR

SEQ ID NO: 505409 - protein, 345 aa, unidentified
MELHTIGIDLGKTVFHLVGLNLHGEVVVRKKFSRTQLLRFTTNVHVELIGMEACGGAHFLGRALREQGHEVRLIPAQYVKPYVKTNKSDYIDAEAIAEAVARPTMRFVPIKTDDQLDLQSLHRVRERWVMRRTAVINQIRGLLLERGITLRKGRCHVGAALPGILEDADAKLSGALRMLLAQLKLELDHLDLRIDEADEMIKKTARENEACQRLVAIPGIGPVTATALIAAIGNGGAFRKGREFAAWMGVVPREQSTGGKQKLLGISKRGNSYLRRLFVQGARAVMQQRTKQSSGLSRWLAQLTSRSHRNVAAVALANKIARMAWAVLAKNEQYRPPVLTDVAAA

SEQ ID NO: 505410 - protein, 347 aa, unidentified
MNKPVSIAQSTVFCGIDVSAGSLAAALIEPDQPLAQREFANSSSGHKALIAWLGKRKAMVRVSLEATGIYSLDLALALHAAPRIELAVLNPKLVNRFAQTLVRSQNDASAALVLAEYSQRMPFAAWVAPSGRGLQLRVLARHIYSLVAQQTRELNRLHAVEGSRTAPRVVVQDIRRGLTFQARRIAQMRRAAREMIAADAELEERFRLLTATPGIGAISAIQLLAETVLLPPGLTVREWVAHSGLDPAHHDSGTSVHKRPRISRAGNRHLRRALFMPTLSAVRCDPHMKAYYEALQARHKTKLQALMAVARKLLHAIYGIFKTRTTYDGNKLFPEINIVPELQSASR

SEQ ID NO: 505411 - protein, 481 aa, unidentified
MKERSAIGIDPDSKGFVCALVRSSTAKVISKGYMTTEADLESFLRWVKKEGEPIVAIEGCNGLSRPIEKALREAGVTFYSFKPEDTNTFRKAVLGQNKNNEKDAESVARYALALDSQGKLQRYQRVWFANMELRLLTRSYDRKSEAATAEMNRLWKHLRHASPDLYLAFGGYHPEINLNKDMLGTQGILALFSQKPEVWEWKDLSEEGFLQAMGGSCKGRCALIPELRKVGARVKPFPRSTALLIQSSARLIAQLKRDQGEMVKMMDEVTKDSLPVQTLKETRGIATITASTLIAEIIDIRRFGSDDNLASYSGLGMREHSTGDTTRMVGTQSFNHHLKDAFMTAARNFVTFNPDSHLSGYHRNLVKSGMDPLEATRRVARALVRVVYRKLASLAKADNGCLAGNGEEHKEGESDMASGSTRSGQSHTSDMSLSSPQKTETLTATRVKTEARATVRVKREARSTRKTKTSRRREKILEKSS

SEQ ID NO: 505412 - protein, 298 aa, unidentified
MSTVTIGVDLAKNVFELAVASQAGRITERKRLSRGQFEQYWARCAPCRVVMEACATAHFWARYLRVRGFDVNLLPPHYVKAYRRRSKTDRADCEAILEADRCAGIKAVAIKIEDQQALVALHRVRAQWMATRTARINTMRGLLAEFGVSAAVGSQRFLNDLHTLLVRKQSELPDRVRRTVVTLWEEVREIEQRVEALETELEGVGREEPVIQTRRSIPGIGLLTATALFATIGNIHAFSSGRQFPAGSGLHHANTRPADVVTWAASANRVIPTYGCCLCTEHDRRSMPRGGVTARDNL

SEQ ID NO: 505413 - protein, 340 aa, unidentified
MAILAGFDVHRAQITFDALNTETGEVLRGRFRADREAVGEWVGQFAGEQVQVAVEACTGWLFVYEVLAGAGVMVHLAEPAEASALRGKKRHAKTDRADARWLRTLLAEGRLPEAWIPPAHVREWRTQTRLRKTLIDERTCWLQRIQATLFHHGIVNVPDQLLRANGRAFLHTLTLPPASLQRIEIALAIIDELDRQLVPLERELARLARRQAGCQALMRQYGVGPVTATTVLCELGDVSRLSASRKAVRCSGLDIGVYRSDRRSRTGRITRQGSPALRWALYEAAQAACKPASPDHADYLALKARGLSHTRASLTIARKLARRSFHVLRELGPDALAPIT

SEQ ID NO: 505414 - protein, 484 aa, unidentified
MQARRLVGIDLGISSAHTVRVLAGDGTVVCRRKALSTLESLGEVEEAALRGATADTRLEIVIEPTGPAWLPIAVFFSARGHTVYRVSSAKAADLRRFLRRHAKSNGIDAETLARLPLVDPAGLRPLELPDAPRAALDRRVRACDRLTQAAATHKRRLKDLVRQLLPASPLAGELGQADLAVLERWADPHALVTVGGARLARVIAQASNGQQGARRAEQWLTAAKAALELYAGHPAIAFTELAAEVTTEVRLLRATQAELAAHATKREACYQQVDPAALARSLPGLATVGGPALVATMGPAGRFRRSAKFRSFTGLAPKASETGQSDRKGQPITKAGNRLLRTTLVRAADHARRQDPQLARIYWIQMVQRGKDHLGATCVVAAHLAERAWVVMNRGLPYVICDTDGTPVTPAQAKVIIAERWTVPEQVRRRRRSRKGEGPSTSPRRTCPGRSRRNEATLPSAGQSWPPTPRRQAGPATQLTPKPP

SEQ ID NO: 505415 - protein, 355 aa, unidentified
MLAELVDAVVGIDTHRDTHQVEIALPNGAPIALTTISNDSTGYAELLAWIVDHAPGPRLALSIEGTRSYGVGLARAATAAGLTVLECEQPNRKARRGKGKSDPIDAHLAVLAALRLDADRLPIPRTDGDREALRILLGARGELTTASTAQTNRLRALLLGGDDTDRTLARGTLTESRLAGLARRRPPREASPEQAVRHAEIRRLALALREAARALKANRVQLQTIVNDVVPGLTERRGIGPVSAAQAIVSFSHPGRCRNDAAFAALAGASPLPASSGRTVRHRLNRGGDRALNRALHTIAVTRMRSCPTTQAYVARRTAQGKNPKEIRRCLKRYIARQLYRTLTPAMTPAVEVSG

SEQ ID NO: 505416 - protein, 328 aa, unidentified
MTDLLPLGLDVSKLKFNACLLRTDGKLRHKVFPNNPAGFAQLSDWLNRQRVAQVHACLEATGTYGDSLATYLHEQEHCVSVINPAAMKAYAHSHLSRTKTDRVDAALIAGFCAERRPPAWHPPAPELRELQALVRRLDSLVEMRTMEENRLSSGVTVEAVRESVEELIAHLSEQIRRTEALIGSSIDSHPGLRRQRELLDSIPGVGEATAAVLLAEVPDIKEYASARQVAAFAGLVPRERQSGSSVRGRVRLSKIGNARLRKALYFPAITAIRCSPFFQTWVVGLRQRGKSKMSVIGAVMRKLVHLAYGVLKTGRPFDPEWTQKAKTA

SEQ ID NO: 505417 - protein, 374 aa, unidentified
MKRPKDKLIAGIDLHSNNVMIGVINQDGKRVAHRKLDCDLKQVTEFLGPLKPQLQAMAVESTFNWYWLVDGLRAQGYPIDLANPAKIEQYSGLKHVDDEDDAFHLAELQRLNILPKSHVYDPELRPVRDLLRRRTNLVHQRTSLLLSFKSLYTRTTGRRLSLNDTKKLTPKDASELYEHPANQLIAQVQTEHIDALNQSVNRLDKAVLACAREIPLYEKLLTLPGIGRVLGMTITMEVGHVKRFKTDGDFASYCRMVDARRLSNGKCKADNNQKCGNKYLAWAFVEAANFARRYDEHCRRWYDRKAAKTSTIIATKALGCKLAKAAWHVMTAQTDYDAKRMFPELVVTKTTGLESGRRRPTRGLRPRMKTTKAN

SEQ ID NO: 505418 - protein, 320 aa, unidentified
MMAQNNLVVVGIDVAKDKVDACIRSLSQRQTFPSSARGRRELILWLRRHKVDKAVMEASGGYERDWAKALREAGLLARVVDPKRVRNFARSAGRLAKNDAIDAQMIAWFAETFGEATCQAHDVEREKLSQIVYARQALLDVQTELQNRSEHSVPDVVQRVQARLLKKIAAERATLEAAMVAMVKATPRFAELADIIESVPGLAEITSAGLTAAMPELGQISNKAAAALLGTAPYDDDSGKRRGERHIRGGRRKVRNIFYMACVGAATRHNHVLKAFYRRLIAKGKEKKVALVACMRKLIVILNVMIARRQKWNPNLYALN

SEQ ID NO: 505419 - protein, 422 aa, unidentified
MEQTRRCIGLDVHRDFAQVAVWQGGVVTQAGTFATTPEGVREFAAGLGAADEVALEATGNTWAIATLLASHAGRVVVSNPAKTRAIAEAKVKTDKVDAEILAQLLAADYLPSVWLPDAETNALRRQVLRRAHIVRQRTRLKNQVHAILARNLVPRCPAADLFGIKGRAWLDGQDLPADERAAATALLRQLDFHARELALIDQDLAQVALDHKDVRRLMTIPGVDATVALSIVAAVGDFTRFRTPDRLVSYLGLNPRVRQSGGQPASHGRITKAGPSHARGMLVEAAWSASKAPGPLRAFYQRVRARRGMQVAAVATARKLAVLCWHLIIKGEDYAFALPSLIAHKQRKLELRAGASPARGRKGRSASYSLAAVRAAERDLAAQGEAAYRTMVAAWQPARPASAKRATGAAASKGTRLIKPTG

SEQ ID NO: 505420 - protein, 342 aa, unidentified
MSISYVGVDLGSSNFHQVAISERGVITLNRELATSEANLVKAFSGMRGEIHVHLEAGELAPWASEIIRPLVTRVVCSHPQKNAWIARDRDKSDRVDAYKLASLLRLNEFQEVRYPQSQLRRDFKAVVQHYDELTQQQARLKTKIKARLRMQGVITRGQLVFSARGRKAGLQAVKSVLVRTAIQQLYEMLDQSLESQAEARLLMLRTAQALPEINIMRTAPGMGPIGACRFSAYVHTPQRFSSTRKLWKYCRLSISHRSSNGKPLRRPRLDRSGCGRLKDVSRKAFEAALRTHGDNAFKRTYQRALETTHDQTHARLTVQRKIISTLRAMWINQTPYSDQMTP

SEQ ID NO: 505421 - protein, 440 aa, unidentified
MGRCVGLDIHKRVVQVCILDPAGQVQAQTRLDCTLEALGAFAQAHLQRTDRIALEATTNTWSIVALLRPFVAEVVVSNPLRTQAIAQAKVKTDKVDARVLAELLRVGYLPEVWQPDPATQQIRQLTSRRAGLVADRTTVKNRIHALLHVRLIPTPGTDLFSRQGLAWLKALPLDDLGRAALESELRLLAAMEQELQAMDALITRYAWPDPRVKLLMTLPGIDVRTAQALLAAVGELARFPDADHLAAYLGLVPSTRQSAHKAFHGPITKHGNAHARWLLVQAAQSLARHPGPLGAFFQRLARRKNRHVAIVACARKLATLAFHVLRNQEPYRYAKPTTTRVKLSRFRVRASGQKRPTSLPTGIGAIASARRIPALNELYAAESLPPARTPDQLPAGELNTLRRSGTLAFARSVHTPHRVAGPTQAAAVQPQEAEEVQQGA

SEQ ID NO: 505422 - protein, 342 aa, unidentified
MFYIGCDVSEKSSYVYVTDGKGRKVESQEIPTDKDGYRRYFKRGMNKPVKVAVEAGGHSRWIHDALKKMAISVYIVNPNKVKLIAKNKKKTDKVDATFLAKLLRIDELPERVYVAEGDSRELRDLLRSRHQLVTSTTCLMNHLRGMLRQEGIKLQAKAFNAASTFTRLLTNKSVPKHLHPIITSYEKTIAELRTQRGALDDVIAEYGNTDIELLKGVPGFGEVASKTTYAAISTVKRFKRAKQLTSYCGLVPSVFSSGERADYGHITREGRSEVRHVAVQGVRAILRSTNSESKPLRKWYERIARRRGSKTAVVALARKLIEIVFYVLRDRRPYNAQLLHVS

SEQ ID NO: 505423 - protein, 413 aa, unidentified
MLERSEVLVAEVFVGHDWAETHHDVYVEDGDGGRLGRARLPEGIDGVARFHELVAPLVDDPAEVVIATETDRGLFVGALVAAGYTVLAVNPMSVSRYRERHSTSGAKSDPGDAKVLADLARTDRHNHRPVAGDSDLAEAVKVLARAHQSLIWSRQRQLNQLRSTLREFYPGALAAFPELGSSDALAVLAMAPTPSRGRALSRSKIAGGLRRAGRQRRIEERATEIQAALRQPQLEAPAVIADAMGTSSSALVAVILELTAQIARLEIELAARFEQHPDAKIIRSLPGLGMILGARVLGEFGDDPDRYADTKSRKNYAGTSPITKASGRSHIVLARYARNHRLSDACHQWAFAAITASPDARAFYDQRRQNGDTHQRALRALANRLVGLLHGCLRHHALYDRHTAWAHRQQQAA

SEQ ID NO: 505424 - protein, 383 aa, unidentified
MPGADPFNHEFKPADYEIFAGLDVDKQSMTVTFAKPEGMLRSMRMPSQPEPLLGYVRRHLPGQRIAFAYEAGPTGFHLHDGLVAAGYPCLVVAPSMVPTAPGQRVKTNRLDSQKLATSLRGGQLRSIHVPSPTYRCLRHLVRLRDTFVRQIAATKCRIKGLLLLENLAFPHPSGLWSLSVLQQLSVLPCVPAIRFKLDRLLESLAFAQDQMLQTTREIHRFCLQDPELNRCLGYLTSIPGIGVITATHLLARIGDWRHLRNVRQLAGFLGVVASERSTGDSIRRGGITHVGDSRLRGKLVQAAWAAIRQDAELREFYQRIYQRNPRDHAAGKAVVAVVRKLTTRIYAVLKEQRPYRIHRRLTREEIRPRERLDCPQNSESASL

SEQ ID NO: 505425 - protein, 354 aa, unidentified
MSQKLDTSPAVIGIDIGKNSFHIVGQNQRGAIVLRQKWSRGQVETRLANLPPCLIGMEACVGAHHLSRKLQMLGHDARLMPAKYVRPYSKGQKNDFRDAEAIAEAVQRPTMKFVATKTADQLDLQALHRVRDRLVGQRTGVINQIRAFLLERGIAVRQGLRSLRSELPGILATRTDVLSPRMLRIIEDLAGDWRRLDERIEGLSSEIETLARQDKACERLMTVPGIGPIISSAMVAAIGTGDVFSKGRDFGAWLGLVPKQISTGDRTILGKISRRGNRYLRALFVQAAWVVLVRVKCWERYGLKSWIEAAKKRLHHNVLAIALANKLARIAWAVLNKGRAFECVKTEETASLPA

SEQ ID NO: 505426 - protein, 364 aa, unidentified
MSEITRVGVDLAKHVIQVHAVDAAGKIVTNRPLSRDKFMAWCAQLPAGCMIAMEASSSAHHWARKLVVLSLDPRIIAAHLVSPYRLQGKGGKNDANDAAAICEAASRPTMRFVPIKTVSQQGMLCVHRLREGLKTERTATINRIRGLLAEFGLVFAQSAKALREVLSTVIEDASNDLAGLARLVIERAQTQWKELDDHIQWCDERIAAHLKDDRQAKSAMQLMGIGPVTASAVVATVGDFKQFKNGAQFGAWLGLTPKQNSSGGKNNLGGITKHGDMYVRMLLIQGAKSAIMTAHKRDDPISKWAHQLREKSGWQKAVVALANKNARILWAVFARGKPFDARHVSMKPGQPQAAMSVATVVAMP

SEQ ID NO: 505427 - protein, 425 aa, unidentified
MFAESRDDEQIIARVAALDIGKAEIVCCIRLPAADGERRAQEVSTHSTMVTSLCELANRLVGLGVERVVMEATSDYWRPPFYLFEAHGLDPWLVNAKDVKHLPGRPKTDRLDAVWLCKVAERQMLRPSFVPPADIRQLRDLTRYRIDLVGVRTAEKNRVDKLLEDACLKLSVVASDIFGVSGRAMMAALIAGERDPTTLADLARSRMRTKIPRLEESFAGLRLGTFDDHHRFLLARMLARVDAVDADIGAVDAQIGQHLTPFADAVARLDEIPGIGPTAAAIIIAEIGLDMTRFPTPAHLASWAKFAPGINSSAGKTKGNGSTGHGNRYLARVLGEAVAGAGRTDTFLGARYRRIARRRGKNKAIVAVGRSLLVIIWHLLADPDTRFHELGPDHYDRHVNTHTKRRNHVRQLEALGYRVTLEPAA

SEQ ID NO: 505428 - protein, 386 aa, unidentified
MQKLNDLSRSLTALEPNGTLIAVIEMSLSSWLVAGIVPGVERQPLKKLAVDESALLKLLHRWREEAEKAGRRIERIAVAFEAGRDGFWLARWLKARGIEAYVIHASSVAVSREHRRAKTDRLDTELLKRSFLGWLRGERDHCKMVEIPTMQDEDAKRPNREHDSLIGERSRIVNRMKAALVRLGIRGFNPKLKRATTRLDGLHTPEGEPIPPNALAELRRDMERRRLVNNQIRQIEEERLERIEQAPCDGAHVMVRLLARVMGVGIETADMLVHEVLSRNMRDRRAIARYAGLTGSPDESGRKRREKGLARSGNARVRRGMIQLAWRFLLHQKNSALTKWFRSRTENARGTRKPMIVALARKLLIALWRLVREGIVPDGVVLRAAQ

SEQ ID NO: 505429 - protein, 345 aa, unidentified
MKKLIAGMDLHSNNVVIGLMDMDGKRVAHQKVECKLSQVLKFLAPYKKRLEQIGVESTYNWYWLVDGLQAEKYPVVLANPAGMVQYNGIKHTDDTNDAFFVAELLRLKILPTGHIYDAPLRPVRDLLRRRLTLVHHRTALMLSFKSLYTRTTGGEMTLGELKDLNVKGAQELYEHPANQLIAGMQIQHIDELTRSIEKIEKAVLASARELPYYSKLATLPGVGRILGMTITLEVGEVTRFAGPGNFASYCRTVEAQRVSNSRKKGENNSKCGNKYLSWAFVEAANFARRFDEQCRKWFDRKAARTSNVIATKALACKLAKAAWHLMAEGTDYDSKRMFGQPAKTK

SEQ ID NO: 505430 - protein, 381 aa, unidentified
MSRHQNGAPVEGHDDTILLVFELSKSKWKLGVMLPGSERLSRYTVDGGDLAAVSLVLERARARAGGKARIVSAYEAGYDGFWLHRWLESQGVRNRVLDSASIQVNRRARRAKTDNLDLDQLMRVQASLERGEPKVCSVARAPSPEQEDARRVTRERERLVRERVGHTNRIKGLLHAQGVRGLEPRDANFVAMLAQARTGDGRSLGPMLLAEIGRELQRLALVSAQIKDLEAHARAAVAEARCAAAVKVAHLTRLKGIGEISAWPLVNEVFWRRFDNRRQVGSYFGLDGSPYNSGKSRREQGISKAGNARARTLAIELAWLWLRHQPDSDLSRWFFARVGQSLGRVRKIALVALARKLMVALWRYLETGVVPDGAVVGLAHG

SEQ ID NO: 505431 - protein, 349 aa, unidentified
MEHCAIDLGGRESQVCVRGADGQVLQEERWPTASLPQYLRELPPSRVILETAAEAFRIADAAKQAGHEVRVVPATLVRTLGVGARKTKTDKRDARVLSEVSCRIDLPSVHIPSTRSREWKTICGMHDVLVSSHTKLINNLRGWLRGQGLRLTRGTAETFAERMSRLQALPEYVTSQVEALVTLTCKVRESDRRIAAIAQSEEVCRRLMTVPGIGPSSAVRFVAAIDDVSRFNSADKVCAYLGLTPGESSSSDHQQRLSITKAGPPSVRWVLIQAAWMLQLRCRSSAARPLQLWAAEIARRRGRLVATVALARKLAAISYALWRDARHTSLRRTGVLVDIWDQTTPFQRR

SEQ ID NO: 505432 - protein, 343 aa, unidentified
MDHFAGLDVSVKETSVCIVDETGRIVREVKVSSEPDALLQVLKNNTFRFRRIGLEAGPLSQWLFSALAETGLPVICVETRHMRAVLKAQINKTDRNDARGIAQMIRAGLYRPVHVKTLRSQKLRMLLTYRKLLQSKAIAVENDLRGTLRNFGLKVGMVGTVKFEGRIKELVENLPDLAGLVEPLLVVRRVLREQITVLHRRLLAIVKDDEVCRRLMTVPGVGPVVALTYRATVDVPARFRNSKAAGAVFGLTPAKYQSGESERTGGISRCGDDMMRTMLYEAAQSMLLRSAKWSWLKAWAMKIARQRGMKKAIVALARRLAVIMHRIWIDGTEFRWTREVAAT

SEQ ID NO: 505433 - protein, 371 aa, unidentified
MSESSKTVYVGLDVHKESIAVAYATEGRDSEVVSLGTIGPRQADVDKLIRRLQGKGAPLVFGYEAGPCGFWLYRYLTGRGLTCHVVAPSLIPRKPGDRVKTDRRDAMTLARGMRNGDLTSIHVPDVEDEARRDLSRGRYDALQDLKRSKRRLKSFLLRHDMRYEGRASWNAAHLRWLAQVVCPTPPQQIVFQEYLRAVTEQHERRQRLERELHEAVKSWRLYPMVEALQALRGVELTGAVILASELGHISRFDHPRQLMAYLGLTPSEYSSGERRQQGGITKAGNSHARRALVEGAWAYRYPAKVSRHLQLRLEKLPAEVQAISWKAQVRLCRRYRQLTARGKHVNQVVVAIAREMAAFAWAIARLVPLTA

SEQ ID NO: 505434 - protein, 339 aa, unidentified
MNVMIGIDPHKASHTAVAIDVAEDQLSSVKVRATRRQVDQLMSWAEPFEKRTWAIESAGGLGYLLAQQLVARGEDVLDVPATLASRVRLLATNRSNKNDPNDAHSIAIAALRAPMLRGVERADHGEVLRLLAKRNMDIGNHRTRVVCRLHALLAELAPGGIAKEMYVSDADVFMAKLRPETPAQQMRFDLALELLDDVRRLDAQLKESHRRIRVAIKASGTSLTEIYGVGPIIAATLIGYSGDVTRFASRDTYASYNGTAPIEFSSGGRIVHRVSTRGSRKLNHALHIAAVTQIRNPGVEGRIYFERKVAEGKTKKESLRSLKRHISNAVYRQLILDAH

SEQ ID NO: 505435 - protein, 488 aa, unidentified
MNNVAGIDVSKGKSMVSVLRPFGEVVAKPFSIGHTGSELKELADYLKSLDGETRVVMEHTGRYYEPVARFLHDEGVFVSAVNPKLIKDYGNNTLRKVKTDKADSRKIARYGIDNWAELRQHTPMDTIRMQLKTLNRQQSLYTKTKTMMKNNLIALLDQTYPGVNALFDSPVREDGSQKWVDFATTFWHVDCVRNMSLTAFAERYRKWCKRHGYNFRQSKAVEVHTGAQDLIAMLPKDALTKTMVRQAIDALNAVSASLERLKAEMQALAAQLPEYTVVMAMHGVGDSLGPQLMAELGDVTRFTHRNAITAFAGVDPGADQSGTHEAKSTRVSKSGAPELRRALFLVMDCLLKTQPQDDPVYRFMDKKRAEGKPYLVYMTAGANKFLRIYYGRVKRISGISGGKLRKYPSLLGNDTAFTLKASYDRKRAIKMFLDNLSTSILKLCDTRRLSYEAASERCDLSSRYFADIARGKTRLTILTLEKLCVGFD

SEQ ID NO: 505436 - protein, 336 aa, unidentified
MVVHKKSWTAHFKTDLFDNKTVTMPAESESLINYVEKNFAGHAVSCCYEAGCCGYWIARSLQQRGWEVKVVNPADVPRRNKQDWQKTDRIDSRNLCKHLSDGNLKGIYVPGEEQEQLRALFRRRVHLARNLRSIKNHIKSQLLYFGIKLPAQYDNPNWSREMKTWIANIKWKYNSAAESMKSRLKQLEFMWYEELHISNELRAYCRKHYKKDYYLYKSVPGIGGITAAAIIAELGDIRRFNRLDELAAIVGLVPGIYQSSENKINLGMTQRSNHQLRSLLIEASWVAVRDDLGLQQYYRKHSHKEPNKAIIKVAHKLLSRIRAVIHSDIPYQKGLL

SEQ ID NO: 505437 - protein, 367 aa, unidentified
MSTIRFIGLDVHKDSIVMSVADAGNAEARAIGTFPNDVNKIMKQLKKLSADLSLLRVCYEAGPTGFGLCRRLKEAGIDCKVIAPSLVPQQSGLRIKTDRRDSRKLAHFLRSGDLTEVWIPDEKTEALRDLERSRDDAKNAERTARHQLSKFLLRNDRAYRDGREWTAKHLDWIRKQKFDDPCRQCVHDDYVKAVDDAKERIKRLMKEIEKFVQGHALEPLVKALMSFRGVKLLTATVIAAEIGDLRRFKTAPQFMAFLGLVPSEQSSGKSIKRGSLTKTGNAHVRRILVEAAQHYRHRPVLSAALRKRQEGVAQEVIDISWEAQQRLCRRLTHFTENGKPRNKAIVALARELAGFIWSLGQLSQLLA

SEQ ID NO: 505438 - protein, 348 aa, unidentified
MTEALFAGMDLHSNNVLVGIEDETGRRIKHQKLECDLPAIDRFLKPYKSRLKSLAVESTYNWYWLVDGLRALSYPIKLANPAQIQQYNGLKHADDKSDAYFLAELQRLNILPTGYIYDPVLRPVRDLLRRRLSLVQQRTALVLSFKSLYTRTTGQDLKLGRVKSMTAEEAKGLYEHPANCLIAKVQKEQIENLDQSIHRIEKAVLLSARALPCYEKLLTIPGIGRILGMTITMETGEISRFQTPGDFASYCRTVKSQRTSNDKKKGDNNRKCGNKYLAWAFVEAANFSKRYDETCRRWFDRKAAKTNKVVATKALACKLAKAAWHVVSQNENYSPDRMFPESANMPKQ

SEQ ID NO: 505439 - protein, 320 aa, unidentified
MQCIGVDVGKQTLVTYDGEEERVFPNRKGLPEFAGFVNHGREALIVFEATSTYSRRLEALCREKNILTVKLNPRLIPSLREVEGKRSKTDQTDAELLYQYGVERGKDEAEHSLLVDRLAQAVSAQLAIYRVTQKARVSYQGLFEALSQDPSTPRELLDELTETITSLEEKEQECIARAKKLIEEEESAAESLQVLMTIPGVGPVTAITLLALFRRYPETNRKQIVALAGLDPIEYRSGSSVHKKPRISKRGSAEIRKRLYEATLSAARFNPAVNEIYHRLRERGKPEKVARIAAARKLLLIAHAIYKSGESYRPPINGEG

SEQ ID NO: 505440 - protein, 367 aa, unidentified
MQNHIFVGIDLGDKNSVARIAVDRGKSERLGFVNTRAGRQRLFREVKKRCELAGDARIVMAYEASSCGFILHDEAKALGIDCHVLAPTKMEKSTEQKKNKNDDRDADDVIEKLRGHVLAGNRLPTVWIPNTEIRDDREVVRARLASSERQTQIKAQIQMLLKRHGLEKPSDLGNRRSKAYRRWLESLAEMESLGWGKCNTLASLLRQLKDIEKEIANLDKLVQHLAQQQRHKPIVEALMKEKGVGVLTALVFRLEIGYALRFRRGRHVGKFVGLTPTSHESGQQSDRKGHISRQGPPRLRKVLCQASWVSLRHDNRARELHQRLVVKNPKKKKIALVAVMRHLAVRLWHRMREVEVEQERLKQEQQS

SEQ ID NO: 505441 - protein, 453 aa, unidentified
MPKKRQNREVKLPVLRPDAAGIDIGAEEIFVAVPADRDSQPIRRFATFTQDLNALADWLTKCEIHTVAMESTGVYWIPLHQILEDRGFEVYLVNAQYVRNVPGRKSDVADCQWIQYLHSVGLLRASFRPPAEICAIRSLWRHRESLIQMASQHTQHIQKGLDQMNLQIHHVLSQITGWSGLRILDAILAGDRDPIALAKLCNWRVRTSHDVIAKALEGDYRREHVFTLRQSLEGYRYYQKLIVEVDEELHNYLRDLPKAVEAGAGPPPRTKTRVYQKQHNDPAFDLRGELYRIVGVDLTDIPGINELTAHTIISEIGTDVSRFRNASAFASWLGLCPERQVSGGKVLYTKTRPVKNRVAKALRMGAQCLYHANNYLGEFFRRMRRKSGAPEAVTATAHKLARIVYHVLRTKEAYNETVFLRHDNEAIKRAQDRLRKQAAKLGFQIVPQQSTEA

SEQ ID NO: 505442 - protein, 330 aa, unidentified
MTTYSDRDGKVHLGIDVSKRTLDVCILREDALKGESFVVTNDQEGVEELLSRLAENKPGASVELAVMEATGRYERLAATMLAASSISVAIVNPRQARDFAKAIGQLAKTDKIDAFVLARFARAVEPRASVVPDEQAIALQGILARRRQLIEMLVSEGNRLQMTSLKALAKRIRAHVQWLEKEIERIDADLDRAIEDNAAFKANEALLRSVPGVGRVLSRTLLAELPELGTISHRRLCALVGVAPFNRDSGRGRGKREVWGGRAPVRATLYMAALVATRHNPHIKEFYGRLLDAGKPKKVALVACMRKLLTILNAMMRDRAIWRCPHALTP

SEQ ID NO: 505443 - protein, 458 aa, unidentified
MKSLPVINPHAAGIDVGSEKLHTSIAGDEPVVFGTFTSEIYRLRDYFLQQGVQTVAMEATGVYWLYVYEVLEAAGMEVIMVNGRSVRNLPGRKTDMADCQWIATLHAHGLLRGGFVPTAQIRRLQDYMRLRGDHVMGAASQVQKMQQALERMNIKFHDVISNLTGVSGQKVLAAILAGERDPERLLQLCDEQIRKNKRDRVLESLRGTWREEHLFALGQAVAAWKFYQGLVAECDRQVERVLKGLAEQMPPCDPGPGEATTQASSKPKRLGKNAPEIEGLNNLLKRICQGRDVTAVAGIADGLLVQLVAETGTDMTPWASEKHFTSWLGLSPGTAQSGKRKGSVRRHRNRAGRLFCLGARSLARSVDKSLGGFFRRLKRGKGGLVAIKAVARKIAVLYYRTLKHGLAYAEQGLRRYERQYEESQRKLLGKLAAKAGFRLLSVQAEELQKRSHSANLPA

SEQ ID NO: 505444 - protein, 349 aa, unidentified
MAAQRISYTGERIDVGIDVHKETYTVTCLCQRQMVKTATVPADPARLAESLPRWFPGASIFSAYEAGFSGFVLHRVLTTAGITNIVVNPASVAVAANEKVKTDRRDAKKLARDLADGRLRGISVPTEAEELARLLPRTRAQLVAHRATITRQIKAKLHQFGLITPGSRRLMSSRYLREMAAWQLPTELHVSLMLLADQWRFATRQLLEVRRLLREQAKAQVALETVYRSVPGIGEVVARTLATAWGDMTRFANERALLSYTGLTPSAYSSGTAIRRGHISRQGVSRLRHVLVETAWRALPRDPILQAMFDRIAATRGKQRAIVAIARRLIGRIRACFRHGTISAVGAVS

SEQ ID NO: 505445 - protein, 425 aa, unidentified
MPTKHMKDWKDLTHYAGFDWAKDHHVVVIVDAQGYLVADFEFAHSREGWEEFVAKTSAWPHLGVAIETSQGAAVDQLLQRGYRVYPVQPVAARSYCQRKAPSGTKTDHLDAWGLADALRVDGQNWKPLQPWDPMTQELRLLCRDEVSLIEQRTALVNQLQQALVEYYPTVLEAFEDWTQPFTWEFVLAFPTPQALVTAGRRRWEKFLHTHKLWRSETAPKRLQLFAQADQFKASEPIIHAKSQLAVSLAKLLCTLGQQLKLYRQQIEALFQKHPDHDLFGSLPGAKKILAPRLLGMIGSDPDRYGSQEVLQCIAGTAPVSYQSGKINKVHVRWSCDKLMRHTVHLWADGFRKKSAWGKVYYQKKRQEGMSHACALRCLGQRLLKILFRMLKNKTPYDAELHARNQQTHGSWILTLIDAPTAKPCE

SEQ ID NO: 505446 - protein, 339 aa, unidentified
MVEVYVGLDVSDKSTHLCVVDGSGNVIWSGACVTDPEVIARTLERRAPGLKRVILETGPLSAFLYHGLFEREVPAICVCARHAKGVLSARINKSDPHDAEGLAQMARTGWFKAVRIKAEATHMDRARLKIREQLIEAHRAMAGQLRGLLKLFGLRLGKVTTPGKRRERLVALFALKPELEPILKPLIESLEALEVQIRRSSQQLAAQAAADPVTARLMTVPGVGPITALVFKSSIEDPGRFARGEDAGAFAGLAPRRNQSGERDHKGRISKAGDPMLRGALYEAANSLLARVKRPCALQAWGKRLAETKGPKRARVAVARKLAILLHRLWLSETDFRWA

SEQ ID NO: 505447 - protein, 336 aa, unidentified
MIHVGVDLHQRFCYMTALDARGRLLTAGQVANEEAALRSYFQQFRGPVQAAVEACSFWPAFRRALPKKVELRMVHPQRVKAIAAAKLKNDRIDSATLAHLLRCDLLPEAWMADEATRELRQQVRLRATLVRQRTRLKNQVHAILHQQGLRYEGSDLFGRRGRAWLKQVSLPAAGGSAVQVYLKLIDEFTVQIQAQEQQLKTSWEKDARVSWLKTIPGIGWYSAILLLAEIGDVQRFADKRALTNYAGLVPWLRESADKRRSGSITRVGSPWLRWIMVEAAQTALRKYPEVQRWAKPLLRKKHKNTVVVAIARKLLVAVWAMLHDGTAYEEKHFAVC

SEQ ID NO: 505448 - protein, 363 aa, unidentified
MRLRDVIDCLAMKNSSTQYVVGIDLGNLKHAVCVTERATGEIVYERNVTNHRESMRRLSKKFPDSLMAMEVGSHSPWISRFFDGLGHEVLIANPRKVRAIFQNDRKCDLYDARMLAKIARFDPSMLYPIEHQSEEAQRDLLQIKIRDSLVRRRVDIISTVRCTLKSLGIQLKSPRTECFAKQARKDLGGADGATLALIEPALATLDTVSEQIKVLDKDIEALAASRYPQVELLTQITGVGVLTALCFVLVVGDHERFAKPRDIGSYLGLVPKRDQSGEVDKELRISCKGDAYLRRLLVGCAQYILGPFGPECDLRTRGLALAERGGKRAKKKAVVATARKLAVVMLSLLKSGENYEEDRNSAA

SEQ ID NO: 505449 - protein, 399 aa, unidentified
MDPVIGLDIAKGESQVQAFLERKKPYKKNFKFTHNLLGLHEFYRFYQEVEQVSGLSPAVIFESTGHYHEPVLQFLESHEVTYYLINPVVSYEAKKTNLRKVKTDAIDAYHLCELYYKEDLETFQKKTMRTMNLRNLTRQHGALTGTYVQIKLQFQTILDQVFPEYHGVFGSLYSKISLKTLLQYPTSYDVKNAKQEELATKMHKLGAKRSYSWFLNKARELKDAAKRNPFKQSKYHSHLVSLRMYVELLLQYQRHLSKLEEEIDALARTFEEYELIRSIPGIGGKIAATIISEMGEIDRFSHPKKLVAYAGIDPSVHESGKFKATINRITKRGSSRFRQALYTAVQCGLTNNRNAKLKAFYDQKREEGKPHKVAVIACANKLIHWIHAMLKRKESFVEQ

SEQ ID NO: 505450 - protein, 337 aa, unidentified
MDFQLALGIDMSKLTFDYALIDHQGTILSQGQATNNQTAILKWIGQMEEEFDGVWNKAIVCMEHFGYYGAHFLQALHQSANANIWLESSLRIKRSAGLQRGKDDATDALKIACYALDFQRNVQLWKPRKRNLDRLELLISHRDRLVKNLMSIRNPLKEEENFIDPLLHQEMDQISQPSIQAIQKAIEQFDQRIEILLKDDIHLTRQTQIITSIPGFGQVIASKLILVTHGFTRINTARKLACYSGIAPFPHRSGTSIRGKTRISHLANKEIKKMLHLAALVTIRKGNIMREYYIRKVEKGKNKMSVINAVRNKLLHILMACIQNDTIYQTKYHHELA

SEQ ID NO: 505451 - protein, 365 aa, unidentified
MQSNRISFKGQKIYVGIDVHLKKWSVTVITERGFKHTHAQKASARELLDFLERRYPEGEYHAVYESGFSGFSTYYSLRDIGINCMVINPADIPTSQYEKVMKSDSVDSEKLAKALRAGLLTPVYIREKENLDDRAVMRIRKTAQSQLSSYKIRVKHLLHQNGVELPERFDRPGTYWSGSFIRWLKEEVVLLSSTRLSLDLLISQVLSMRRNVLDCTRELRRISQSDKYRERFALLLSIPGIGMIVAMCILTEIYDIKRFSNERQFASYLGLIPTCHSSGEKVSHGEKTYRGNKVIGPLITEASWVAVHKDQGLNAAYGYYCQRMKPHKAIIRIARKLSNIIFHVLKNNTRYEPHQWDKGRQKTCL

SEQ ID NO: 505452 - protein, 406 aa, unidentified
MKKEVVEFDQVVECGCGMDVHKDLIVATIQGKIIKTQTKSFKTFTSSLIKLKEWLLKNGVTHVAMESTGVYWKPIFNVLGDDFRILLVNARHVKNVPGHKTDKQDSLWLTKLLLSGLLKGSFIPERPIRELRNLTRYKTKLVNQISAERNRFQKILEDANIKLSSVLNDVFGATGTKIINHILMHESYRPEELLQYVHGKVKANRQDIKESLTGYITPHHRFMLKTILGNIAKIESTVAEVDTQIEICIEPYKTERKLLESIPGVGIEGATCIIAEVGVDMEQFPDQNHLASWAGVCPGSNETAGKNKSGRITYGNKYLRSLLVECGWAASRTKNTYMSAKYKSLVGRRGKKKSIIALGHKILIATYFIIKNKVAFKELGEDHLNNFRKDRLIAYYTQQLEKLTAA

SEQ ID NO: 505453 - protein, 352 aa, unidentified
MYYVGLDVHKAYCMTAVLNEQGQLLDRCRLASEPVTLRQYFGRLGQPTQVALEACYNWGYFVDILQDCADEVVLAHPLKTRLIAEARIKTDAIDARVLADLLRAKLLPVDYAPNAATRQVKSYLRYRAGLAMLGAQVKNKIHALLDQHDYPQRAGVDKLSDLFGKQGLALLRTVQLPGAEQAVLESWLRVHDQLREELRGANAWLRAQVREDRLAQLVMTIPGIGHQFALLVRYEIDRIERFASAKKLIGYIGLAPCTWSSGGHTRHGSITKQGNKWLRWAMVEAAQKAPLTSPYFAAYYQRIKERAGFARARVATARKLVEVVYGVMKTQTEYQEPIYGPSPLKGSSRAAA

SEQ ID NO: 505454 - protein, 408 aa, unidentified
MELLYPRCSGLDVHKDSVVARIRCVSEPPHDEVKTFDTTTSALLDLNEWLRQHGVTHVAMEATGVYWKPVWHLLEGDFELVLANAQHIRNVPGRKTDVNDATWIAELLAHGLIRSSFVPPQPIQELRDLTRTRKQLVREIAQHATRIQKVLEDANLKLGSVLSDVMGKSGIAILRAIIAGQSNPEILADLAQGNARKKRAELVEALHGRIRAHHRKLLGVHLELVGALKEAVQELDDQVGKSCASIQESTRLLTTMPGVSDVTAQAIVADIGTDMTRFHSDAHLRSWACLCPRNDESAGKRRSTRVRKGGTWLKTALVSAAWAAVRTKGSYFQGQFQRLRARRGPKKAILAVASSMLTCAYHMLKTGVEYRDLGADHFARRDREKMIQRLVRRINDLGCVVQLTPQAA

SEQ ID NO: 505455 - protein, 348 aa, unidentified
MKEVSTIGLDIAKNVFQVHGADRAGAVVIRRALRRSQMLAWFAKLPRCLVGIEACGTAHYWARELRQLGHEVRLIPPAYAKAYVRRNKNDPADAEAICEAVSRPAMRFVAIKTEQQQALAAIHRVRDLLIKQRTMLKNQLRGLLAEFGIVAAQGRRGLIELLAILSDGEDQRIPSLLREGLKAVMETLHGIERKLEGVDRQIVTTGGENATCRHLITAPGYGPILSSAMAALVTDPGAFKRGSDFAASLGLVPRQDGTGGKVRLGPISKRGNGYLRRLLVNSLPSGLTRWGATSLIKAQHARRDPWVARLLAVKPRKVGAVALANKLARIGWALMRRQEDFRGRPATA

SEQ ID NO: 505456 - protein, 461 aa, unidentified
MKEGEGRPSNTRGQLQGLPVVRTHVAGTDLGSEHHWTCAPTVDGNGREVADFGATTPELIRMGEWLQARHVQSVAMESTGVYWIAPHEILEAQGLEVLLVDTRQLARVPGRDKKTDPTDCEWIQRLHACGLLQGSFRPPEDICMLRTLVRDKATLVAEASDWVRRMQKSLDQMNVRVHRAVSSIEGATGMAILRAIAVGERDARKLAQLRDPHCRKSEEEIAEQLSGHWREDHLFSLRQALKMYDDIGKRIAEYEEEILRKLGQMERPEQRGQSAPPPRNVNKARAIRQRGQEAKRQALFRMSGVDATQIDAIGVETIEVVLSEYGADLSRFPDEKHFVSHATLAPGVAKSGGRPIKKKKKNSASTRVAGALRMAALALRHSDTALGAYYRHVSSRVGADVAVFASARKIATLIYRLLRWGQPYVDEGAKAYEERHHQLRLKALLSKAKQLGYQLTPAGTS

SEQ ID NO: 505457 - protein, 344 aa, unidentified
MDHFAGLDVSVKETSICIVDDRGRIVKEAKVASEPAALLKVLGNPTYRFKRIGLEAGPLSQWLFSALAEAELPVVCVETRHMQAVLKAQINKTDRNDARGIAQMIRVGLYRPVHVKTLRSQKLRMLLTHRRLLQSKAIAIENDLRGTLRNFGLKVGMVGKVRFEARIQELVENIPDLAVLVEPLLIVRRVLREQIVILHRRLLAIVREDEVCRRLMTTPGVGPVVALTYRATVDVPARFRKSKSVGAVFGLTCSRYQSGEIDWSGKISRCGDEMMRTMLYEAAQSMIHSKKWSWLKAWAMQIAKRRGMKKAIVALARRLAVIMHRIWIDGTEFRWTREQAAAAA

SEQ ID NO: 505458 - protein, 448 aa, unidentified
MSKSKTKIETVKRISQLTVINPTAAGIDVSDKEMMVAYPIGSGQLEVRSFGCFTSDLHSIANIFRRFSVTSVAMESTGVYWIPLFLLLQEYGFEVYLVNAKHVKNVTGRKDDESDAEWIQKLHSCGLLSASFQPDNLTRTLRSIVRHRKSLERTCSLYINRMQKALELMNIKLHTIISDIDGKTGTLIIESILAGERNPEILADLRDRRIKASREEIIKSLEGHYTTEHLFELRQCCQLYCTHRQMIDECDKEIEKQLIGQIASKNEGVITNIPEIKRKALGKHKLPFNATSYLKEIFGVDITEVFGISELSALAILSEVGTNMSKWKTEHHFTSWLGLAPNTKISGGKIISSRIMKKKHHAGQAFRMAANGLHNSKSPIGDYYRRIKGKAGAGKAVVATARKLAIIFYKMVADQQAFNPKALEDYQQQYKQKKINQLKRKLELLEAA

SEQ ID NO: 505459 - protein, 343 aa, unidentified
MNEVITIGLDLAKNVFQVHGVGDAGAVMISKRLRRRQVIPFFKKLPSCLIGVEACATSHHWARELGALGHEVRIMPANYVKPYVKRNKNDAADAEAICEAVTRPTMRFVAVKTKEQQSLMMLHRTRSLLVRQRTMLVNAIRAHLAEFGVVAPVGLRGMKALLAVIADAKDQRLPPLGRTCLESLVESLMNLEQEIAFAERHIHAWHRSNEASRHLESIPGIGPIIATALVASVSDPSIFKSGRELAAWIGLVPKQNSTGGKERMGRISKQGDKYLRWLLVAGAMSVIRHGRKTNFKNNPWLADLVYRKPAKVAAVALANKNARTAWALLANGEIYRQPAAAKA

SEQ ID NO: 505460 - protein, 313 aa, unidentified
MTDLYVGVDVSKDYLDVATSDGTSLRVSNDEAGQQQLVARFSAAAPTLVLMEATGGLERAIAAQLSAAGIALRIINARHVRHFAKATGLLAKTDRLDAEALVRFAQTLKPEPRPIAPEQTVALQALIVRRRQLVEMLGMERNRLRTAHRGVRKSLQASIRWLEKRLAEVDGDIDGALRECGAWREKVELLESVPGIARVISMSLLAGLPELGELNRHQISALAGVAPFNRDSGNWRGRRSIYGGRPLVRSALYMAALVGARHNPVLKAFYQRLRQAGKPAKVALTACMRKPLVILNTMLKTGQPWRIQVVAEA

SEQ ID NO: 505461 - protein, 343 aa, unidentified
MDHFAGLDVSVKETSVCMVDDTGRLVREVKVASEPEALLAVLTNPACHFKRIGLEAGPLSQWLFSALAEAGLPVICVETRHMRAVLKAQINKTDRNDARGIAQMMRVGLYRPVHVKTLRSQKQRMLLTHRKLMQSKAIAIENDLRATLRNFGLKVGVVGTVKFEARIKELVENLPDLVVLVEPLLIVRRVLREQVGILHRRLLAIVRDDDVCRRLMTVPGVGPVVALTYRATVDVPSRFRNSKAVGAVFGLTPSKHQSGESNRTGGISRCGDEMMRMMLYEAAHIMLVRSAKWSWLKAWAMKIARHRGLKKAIVALARRLAVIMHRIWVDGTEFRWTREVAAA

SEQ ID NO: 505462 - protein, 405 aa, unidentified
MVDIMVSDFRKGRYNLMKIFVGIDIAKLNHFAAAISQGGEIILEPFKFTNDADGFQLLVSKLESFDKNSLIIGLESTAHYGDNLVRYLVAEFYQVCVLNPIKTCQMRKNNIRKTKTDKVDTFVIAKTLMMQDDLRFVSFYDLDMMDLKALGRFRQKTIKQRTRLKIQLTTYVDQVFPEIQYFFKSGLHQNAVYALLKEAPSPKEIASMHMTHLANLLKVNSHGHFTKEHAKELRVLAQKSVGANDSAISIQITQTIQQIELLDSQLDKIEAEMTDIMKFNDSVIITIPGIGYINGGMILGEIGDIHRFSNPNKLLAFAGLDPSVYQSGNFQAKTTRMSKRGSRVLRYALVNAAWNVVRNNATFKAYYDAKRAEGRSHYNALGHCAGKLVRVIWKMLTDEVEFNLE

SEQ ID NO: 505463 - protein, 413 aa, unidentified
MTEGILNVGVDWATDAHQVCVLDEMGEACFEGSFEHSGAGLQRMCAQLAELAAFGDVTVRVAIEVPRGAVVETLLERGHEVFVVNPKQLDRFRDRFTMPGAKDDRLDALVLASALRTDRERFRRLEFDEPVVLKLRERSRMHEELSEERKRLANRLKQQLLRYFPQFLELYDDVAAPWMLALWAHVPTPKHARKVQARSIARILKEHRIRKHTGREVLKVLKQKPLYVAPGTTEAAVEHIQMLVPRLTLANQQLKHCHAQIKACLAEMAAPAEDDAGQEGEQHDVTILSSLPGVGPIVLAVLLAEANGPIRRRDYHALRSLCGVAPVTRSSGKKRVVSMRYGCSGRLRNAVYHWARVAAMHDELCKVRYRALRQRGCTHGRALRTVGDRLLRVACAMLEHGSTYAARAPRRAA

SEQ ID NO: 505464 - protein, 331 aa, unidentified
MFPVGIDVSKNTLDLCMLYDGIKGRIKTRNIQNNRHSVENILRWLRLQHCGPEDVHVVMEATGVYHERLATELHDAGFRISLANPHRSREFARGMGIMTKTDKVDAYMLACYAFLKKPHRWEPPAPEIRYLGALLRRRDVLLGDALREENRLEKYLSTDTPADIISSCRRMAQLLREEVSNIERQIKAHIKASPALRRDYTLLTSIKSVGPQLGMHMLVVLRSHNFVSAEQAAAFLGVVPIEKRSGTSVRSRPRMSKIGPPQLRAKLYMSALCGKIYNKRMRNIYDEMCLRGKPKMVAIGALMRKLVHWCYGVLKNRTVFNDEDLKPVLST

SEQ ID NO: 505465 - protein, 360 aa, unidentified
MISERTSVGLDVHARSVVATALDSVTGEVFKTTLVPAHEEVIGWLRGLPGPVATTYEAGPTGFGLCRALTAAGIRCEVVAPSKITRPSGDRVKTDAKDALLLAQLLQVGQITGIRVPTVSEEAARDLVRAREDIRGDLMRARHRVSKLLLRHGHVYYGGKAWTGGHARWLHQVRFDQPGTRAAYEADLESVEFALARRDRLDAAITAMAADSEFTPVVRKLCCLRGISTLTGFALAVEIGEWERFTGSGIGAYLGLVPSEYSSGQSRRQGGITKAGNSHVRRLLVEAAWHHKPHYVVGKVLQARWDQAPAAARTRAHLGNQRLHHRWATYTARKKKHTVATTAIARELAGWCWSLATLPD

SEQ ID NO: 505466 - protein, 343 aa, unidentified
MNEISIIGLDIAKNVFQVHGIDSLGEPVVRRQLKRGQVLAFFGKLPPCLVGMEACATSHHWAREIAKQGHEVRMMPPRYVKPYVKRNKNDAADAEAICEAVTRPTMRFVPVKSPVQQSVLMLHRTRELFVHQRTTLINAIRAHMAEFGIVAGVGRNGVEALLKIVAGSSDERIPSAARECLMALATQLELVKRQIVEADRRVLAWHRSSKVSKRLEAIPGVGPLVATALVASIPDPHAFRSGRDMSAWIGLVPKQNSTGGKERLGNISKAGNRYLRKLLVVGALSVIRRAKILGYTKHPWLVRLMERRSTMIAAIALANKIARTAWAMMTRNETYKTPLAQPA

SEQ ID NO: 505467 - protein, 336 aa, unidentified
MALYCGIDLHSTNHLVVIIDDEDRRVLEKRLVNDVSITVNTLTPYRDQLAGIAIESTFNWYWLVDGLQDAGFVPCLANPAAIKQYAGLKYTDDPYDAFFLAHLMRLGILPTGHIYPREQRGVRDVLRRRLSMVRMASRLLLAVQSQIWRSTGINISNNCIRRPDFELPLPSGPVLEGAVAQWRLFQQTQVEIHGLEKLALDLYQGEEYYQLLQTVKGIGVILGLTIGLETGSIKRFKKAGNYASYCRVVKSERISNGKKKGQNNRKAGNKYLSWAFHEAAHFARRFEPKVQRFYEHKRQKKGNNILAIRAVAHKLARAVFHMLKKHEPFDVDRAFG

SEQ ID NO: 505468 - protein, 365 aa, unidentified
MMRFYTQQHRFYVGIDLHARTLHLCVLDSAGSVVADRKLPCHFDSVLQAIQPYRQDLVVGVECMFGWYWLADRCAEHSIPFVLGHALYMKLIHGAKAKNDRLDAHKIARLLKGGNFPMAYVYPRGMRETRDLLRRRMYLVHKRAELITHLEILNAQNNLPPFGKKLGYAANRAELHIPERFADPSVRMSAALDLALCDKLDELIGTVELYLTRSAKVDDVQTYHRLRTVPGVGPILALVLLYEMHNVARFEQVGQFLSYARLVRCEHESAGKKLGSGGKKIGNAHLRWAFAEAACLFLRASERARQWKQKQEKKHGPAKVLGILAARLARSVYHMLRKEEAFDEERFWHGQAAAVQPAGSRTKGS

SEQ ID NO: 505469 - protein, 338 aa, unidentified
MSIYAGLDVSDKTTHICVVDGDGKVLRRDVVASDPDVLAKWLNKHCPDLMRVVLETGTLSTFLYHGLVERGVAIECICARHAKGVLSARVNKSDVHDAEGLAQLARTGWYKRVHMKASATHIDRAALRIRSQLITSRTAMANQLRGLLKLFGLRMGTARTSGRRAERLTAFYAQRPDLKPLFAPLIAAMEAIEEQLRASNRLLNERAKADEVCTRLMSVPGVGPITALTFTSAIEDPHRFARSDDVGAYAGLVPRRNQSGERDISGHISKAGDPMLRKALYEAANVALSQVKRPFALQQWGRKMAEAKGAKRARTAVARKLATVLHSLWLNETEFRWA

SEQ ID NO: 505470 - protein, 338 aa, unidentified
MDHFVGIDLHSNNSYLAVIDTDNNRTFKKKARNNLSEIIKHLAPFEKQIKGIVVESTYNWYWLVDGLMDKGYKLHLANPSAIKQYEGLKHSDDITDAFHLANLLRLDILPEGYIYPKHERPLRDLLRKRIHLVHHRTALILSFQNLVARNLGSKMNVNTINRINEEDLEDLFEDEYLILSAKASISTIHFLRSRIVQLEKVIAKAAKLKSEYKLLKTVPGIWNILAQMIMLETGPIERFKKVGNYASYCRCVQSNRFSNSKSKGKGNRKNGNKYLSWAYVEAANHALWSYEYVKRYHQKKTAKTNNVVAIKAIAHKLARACYYIIRDQKEFDPLKAFS

SEQ ID NO: 505471 - protein, 476 aa, unidentified
MNCAAQPFRWRQQEELEMNPKRSKSRHGRKMPMVHPNAAAIDVGATMHMAAVRADRTPEPVRSFGTFTADLHRLVDWFTQCGVESVVMESTSVYWIPVFELLDARGFTVFLVNARDAKHVPGRKTDVSDAQWLQRLHSYGLLRASFRPKGQIAELRSYVRQRERLLEYAASHIQHMQKALTEMNLQLHHVVADITGATGLRIIRAILAGERDPQALATLRHYSCHSSAETIAKALTGSYRAEHLFALEQALALYTAYREKASACDVRIEAVLKELSIHRGRDHGAVPPPRRRHRTDQVNALAFDVRAALFALLGKDITAIDGLGAYLSLKLIAECGDDLSSWPSAKHFTSWLGLAPSNKVSGGKMLSSRTRRSGGRAAALLRLAAVAVGRTDTALGAFYRRLSSRIGKAKAVTATARKVAVLFYNAVRHGMEYVDPGASSYETRYRTRVVNNLHRRAKAFGFVLQPLEPKAGAAVS

SEQ ID NO: 505472 - protein, 347 aa, unidentified
MLYVGLDLSRKRLDWQALSAAGGRLGIGEVPPDGDGLRGLVRRLGDADVLAVIESMSGARFVHDRLELAGWDVRIADALKVRGIAPLACKTDRIDCWVLAELARLGLVPEIWLPGAAVRAERERARFRLHLVKHRRALKSRIHAILFQHGVPNPSSDLFGLGGRRLLERLALPEPWRATLAASLALIDTLDEQIARCEGELRALGAEHAYVPLLRTCPGIGWVLAFTIASEIGDISRFASAGKLVGYTGLCPRVDQSGERDRRGPLRKNGPNHLRWALVEAAHTAARHPHYRPIRERMRARHGPKRGTKLAAIEIGRRLAEAIWHMLTRNEPFAPAGAPASLAARRP

SEQ ID NO: 505473 - protein, 411 aa, unidentified
MEVVHVRCAGLDISKKDAKVCVRIAGVGRRKTVETVTTWGSMTNQILALREHLVEQRVTCVVMEATSDYWKPFYYLLEDAGFEVILVNARHVKNLPGRKTDVADATWLAQLGAHGLVRGSFVPPEPIRQLRDLTRARTAITRERAREVQRLEKLLEDAGIKLSAVASDIMGVSGRAMLERLIAGDRDPADLADLAKRRLRSKIPELTEALVGRFNEHHAFLARVHLDLIDRHTVAIEQVTARIEVVIEPFQGFRDLISSIPGISTLLADVIIAETGADMSAFPTAKHLASWAGTTPGNNSSAGKVKSSKTRPGNPYLQGALGTAAMWAAQNPHTFIGARYRRIASRRGPQRANVAVQHTLLTAIWHMGTTGTLYEDLGGDYYSRLNPERTRSRAIRQLEAMGYRVTLDHAS

SEQ ID NO: 505474 - protein, 343 aa, unidentified
MQTVTTIGLDIAKSVFQVHGVDAAGQVVIRRQLKRRYVLAFFQKLSPCLVGIEACASSHYWSRELQALGHSVRLMPPAYVKPYVKRQKNDVADAEAICEAVTRANMRFVPTKTPEQQSGLMLHRTRHLFIRQQTAVINVIRAHLAEFGVIAPVGRKGVEELLRVVADPNDKRVPEVVRGCLAVLGSQLLSLKKQILDFDRMIMAWHRSNQTSKRLNCIPGVGPLLATALVASVGDPKTFRSGRNFSAWIGLVPKQHSSGGRDRLGSISKQGDRYLRSLFVAGALAVIRYAKIHGSKHRPWLTALLARRPTKLAAIALANKLARMAWAMMATGARYNYPASLRV

SEQ ID NO: 505475 - protein, 334 aa, unidentified
MTFELLAIDLGKSSFHLHSIASDGAILSRKVSRSKLAETVNALAPKTIAMEACASAHHWGRQFKDNGREVLLINPRFVKPFVRGSKNDAVDAAAIYEAATRPTMRFVPVKSITQQDVQSLHRVRERMIIQRTSLINHARGLLAEYGIVLPQGAWRFVSQAPAAVESADLSDLGRELFLELLDQLTDVNDRIAKIDRKISEICRDREDCRRLSELPGVGPIIATALVASVEDGRHFKSGRELAAWIGLVPRQYSTGGKPRLGGIGRRANHYLRRQMIHGARAVISRLASHDDRRSQWLKELVSRRGYNKAIVALANKTARIAWALLTRQERYAAQ

SEQ ID NO: 505476 - protein, 349 aa, unidentified
MTFYMKAHELYCGIDLHAKRMYACVIDQRGESLFHRNLNSRPEDLALLCERFAGRDLVVGVESTFNWYWLADCCDERGVTFILGHALAMKAIHGGKTKNDKQDSLKIAHLMRGGNFPTAYVYPKHLRAQRDLIRRRCYFTRQRAELQAHIRITAAQYNLPTPTGQLRWQSNQKGVAESFPNEAARCTIAADLAMINALTKQISQLEKKLVEMARFDDPSTFFRLKAVPGIGDILALVILYEIGELKRFRTAGQFLSYARLVPGQHTSAGKNYGSPGRKQGNPQLKWAFSEAVSLLKQQSPTVKSAFTKLEKRHGKGKALSILGARLGRAIYLILKRGDIFNEHQFLKLD

SEQ ID NO: 505477 - protein, 361 aa, unidentified
MPSTKVSKDLFTGQSIYLGIDCHLKSWKVTLLTDKFELKTMSRDPDPVSLVSYLKKHYPGADYKAVYESGFNGFTICRSLRNLGVDCQVVHAMDVPTSHKDRQQKSDKSDSRKLAQLLRSNGFEGIDVPPVHIEIDRKLLRQHFSLTRMLTSEKNRVKATLHQFGIEIPEKFSSSQSRSWSKVYIEWLRSVPEIKPELQSTINNYIETGLLLRKQLLTVTRQLRELSKTEKYKDDFALLTSVPGIGSLGAMRILLQVYNIKRFKTMDELCGYVGLIPKMYGSGEKMITGKLSKRGRKDIKIMLVEASWVAVRKDPALTARFNKLTERMNKNKAIIRIAKNLLNRIRFMLTHKVEYEIGVVS

SEQ ID NO: 505478 - protein, 342 aa, unidentified
MYYIGLDVHKKTISYCVKDASGQVHREGTIGASRNELDGWVRTLPQPRMMAIEATIFTGWIYDHLLPHAEQVKVAHPLMLRAIAASKKKNDRINAGKIADCLRCDFLPECHMASTEIRDRRRTLRYRHLLVRQMVQMKNRVSGLLLETGVSHNKQRLHKVGYFGELISKNEEVPECILPLLRLSRETIVRCQKTEYALVSSLERDPLLAERLKRLRTVPGVGPITALTWALEIGDVSRFRSLKQAISYCGLCGDEKSSADKVLRTPLSKQRNKHIQSVLIEAAKLAPRQSHDLALIHEREKQKGHANRATLAVARKMVAYMLAVDRRELDFVPSEGRNTAAA

SEQ ID NO: 505479 - protein, 346 aa, unidentified
MSVVIGIDIGKNSFHVVGHDKRGAIMLRQKWSRGQVEARLANLPPYLIGIEACTGAHHLSRKLQALGHDARLMPAKYVRPYCKGDKNDYRDAEAIAEAVQRPTMKFVATKTADQLDLQALHRVRERLVSQRTGIINQIRAFLLERGIAVRQGLRFLRAELPGILAKRTDVLSPCMLRLIEDLSGDWRRLDERIENLSGEIVAVACQDKGCERLMTIPGIGPLISSAIVAAIGTGDQFSKGRDFGAWLGLVPKQMSTGDRTILGNISRRGNRYLRTLFVQAAWVVLVKVGPKQWERYGLKSWIEAAKQRLHHNVLAIALANKLARIAWAVLHNGRAFEYVKTNATAS

SEQ ID NO: 505480 - protein, 424 aa, unidentified
MKYTQNKKIMQVEETTLVVGIDIASEEHYARAFNWRGIELGNVISFSNSREGFEKFKTWMEKLRKENQKEKIICGAEPTGHYWFGIGQYLKEEKIKLVLVNPYHVKRSKELDDNSPTKTDIKDPKTIAKLVIDGRYSEPYITEKVYSEIRILNEIRMSLTKEKIIIKNKVERWIKIYFPEYKEVFSDWSKQGSLLILKQLPLPEDIREKSKVEINEIWRAKKLRAVGMKRAEMLKEAAEKSIGNKEGLRSARKELEILIKEYELKETHYTEIMNEIEIIIKEIKNTEKLLEIKGIGLVTVVGLIAEIGDISRFESAKQIQKLAGLSLMETSSGKHKGETSITRRGRKRLRQILFQAVMPLVAKNEEFKELHNHYITREKNALKKKQSIVAISCKLIRVVYAILKNGTKYEAGKVKEAIELKKAG

SEQ ID NO: 505481 - protein, 370 aa, unidentified
MDVHTTNYTLCAMEPIIGEDDRVFATIKVTPDYKNILMFIENLKLKLGLNDEYDIQCGYEAGCLGYSLYNQLTAAGIKCVILAPTTMLTPQGVRIKTDMRDAYMIAQCLSYGGYHAVYIPTEDDDSVKEYLRMRNDHKLALKKIKQQINAFCIRHGFCYDGTKWTLSHLKWLKKLEITNGLHRETLDEYMASYEEQEAKIERYDKRIGEIAEQTRYHDKVKKLGCFLGIKTHTALSLIVETGDFERFAKGNQYASYLGLAPGENSSSDNIHRLGITKAGNSHLRQLLIEASGGICKGAVGHKSKELRARQNGNMAEVIAYADKANTRLRSRYYKFIRHGKKRNVAVAAIARELACFVWGMMTDNIEMKAA

SEQ ID NO: 505482 - protein, 410 aa, unidentified
MTEIIVAQDAPVLVAIDIAKARHEVLIAIPDKKRRRRFTVLNELADFNRLIGTLRDYGCPVRVAFEATGNYHRALAYHLATAGFEVKLVSSVALARTREALNNSWDKNDPKDAQVILHMMEIGNEQFYHDPLVHGTNDIQELSKTHDIVSKSKTELWHRVLTHYLPLYFPEADRFHRSSRSDWFFAFLERYPSPHFITAMGKDAFTTDAWDVIGRKVAKERLLADIYETAKSSVGLPVAPDSDAISMFRLVLGEGRSLIAQRNQIEDRAIALLKDLPDYQLLTSIPGIGPINALTILAEAGDLRRFGHHRQFLKFCGMDLATIQSGTFRGQTKLSKYGNARLRRTLWMAGQVAILQRTNSFRDKFERYIAKDRHNTHLRRKAYTAIAAKMARTVHGIIKLGEPYRPFFEG

SEQ ID NO: 505483 - protein, 338 aa, unidentified
MIVIGVDVHKHSLTAVAVDELGRPLAERSGPVEDELVRWARSLADGRLLWAVEDCRHVTRRLEQLLLVAGERLVRVPPRLTGPERRRGRTRGKSDRLDALAVARAALREPRLDGPRPQEPRLRELKLLVDHRDDLVAERRRCQQRLRWHLHELDPSVQVPLGALDRTVWLDRLRRQLARREQTTQLRIARDLLGRCRELTRSISELDQELQERMQTTAPRLLELAGCGPISGAKLVCEIGPIDRFASDAQLARHAGVAPLDASSGKHQRHRLDRGGNRQLNCALHRIAVTQGRTYGPARAYLERKQNEGKSRREAIRCLKRQLARTVYTTLKTESALT

SEQ ID NO: 505484 - protein, 463 aa, unidentified
MAKPQRAQKRKKQEITLHDLESLPVLHLHAAGIDVGSAEHYVAVPANRDPQPVRRFGSFTADLHRLAQWLKACRIQTVAMQATGVYWIGLHQILEEYGLDVQVVNARHTKTLPGRKSDVQECQWLQTLHTFGLLNNSFRPPQAIQILRSYMRQREVLVAAAATCVQHMQKALTEMNLQLTNVISDISGTTGMAILRAIVAGERDPHRLAALKHSLIRASRQEIAQSLQGHWREELLFILAQNLSLYDTYLAKVKECDQRIQAQMQTMEAKIDPVAHPIPAPRRVSWSRKRQPTFDLRGELYRLTGVDLTQVDGLDVQTIQTVLSEVGVDMSRWKTEKHFGSWLGLAPDNRVSGGKILKRGTRHVVNRAATALRLAAWNLIRSQSALGAKFRRLRARLGPPKAITAMAYQLARIVYRMLKFGQPYHDHGVAHYESKHRERQLFWLKKQAAALDLQLIPIAEVTL

SEQ ID NO: 505485 - protein, 348 aa, unidentified
MNIITVGIDLAKNVFAVHGVDDNGKAVLVKPKVSREHLLPLLVQLPPCVIGMEACSGAHHWARLFRQHGHTVRLMAPKFVTPYRMSGKRGKNDAADAAAICEAVTRHHMRFVPIKEEHQQIILCLHRTRQGFVEERTATYNRLRGLISEFGIVLPQKVACLRREIGAHLEDLPGYASQCIIDLLAHADGLDVRIGEYDRIIAKAAKDDARSKRLMERPGIGPVSASALLASIGGGHDFKNGRQVAAWIGLTPGQYSSGGKARLGRITKAGDPYLRSLLVMGARAVLAGLGDKQDGFSRWARSLQERRGYWKTVIAIAAKNARLAWAVLKYGEDFRLTPTAGSAAPNAA

SEQ ID NO: 505486 - protein, 396 aa, unidentified
MATIGIDVGSRVHVVARCRSGQMRADRGVFKVSESRAGFSRLDAWLDGQPEPVERVVLESSGHYWIPLASHLARRGVPVAVVNPLAARYFAKSRLGRTKSDPADARSLAEMGMRDPLPDRDPLAGLELRQAARFAMTLVEEQAKLCQRLHRLVELAFPELLELFDDPTCRTARALLRMAPTAREAGRRRTSTLGGANRGPGRRALGTSRAEALKAAAADTIAVPELEAEAAFEIGLLLDRFDLLESQIEAADRRLAGLVDGVVARRLRTIPGVGAATVAVLLAEIGDIGRFTDLDQLLAYAGVHPAERSSGRTGAREGTSWHMSKAGNSHLRTAAYRMAVVGLQHNPVIRAHYLHKRAAGKSPMNALGHCMRKALSLVWGVWRNGVDFDPDWGVRA

SEQ ID NO: 505487 - protein, 358 aa, unidentified
MKKIVIGIDISKEKIDASAIDVRNTQQGVQKLDYQRFENRPLGFRRMLVWARHLIKGVALDEVLFCCETTGGYDRSLCDYIYAKGLDIWRESALQIKRSMGVRKGKDDRADSLMIAEYAMRHMDKAVIYETPSDNVRELKALLQYRHKLVQEKTEKKVRMSHLADTAAKSKSMSFILRDARKSIKALEKSVKQCERQILELIKGDGELSRSYRHIVSVSGIGIVNATALIAYSNNFRGITTANRMASYYGIASFRDTSGTSVDKKAYVKCYSNSLLKAYLTQAAVWTIRENSIYHDYYLRLKKKGKPYGIIINNARNKLIHLVFSLVENDTDYEQNHEYIRMKRRVNADFATEFKNIN

SEQ ID NO: 505488 - protein, 465 aa, unidentified
MNTINRSTGTANAKEQTGRGTSGLDVINPHAAGLDLHKEIITACAPVIVGDTRHPVRTFGTYTHALRDLATWLKKQGTTTVAMEATGVFWFPVIEILRAEGLEVLLVNAREVRSVKGRPKTDKLDCEWIRRLHAWGLLRGSFIPDTETGALKSLWRHRMNMEQEDARAIQRMQKAFQIMNIRLDMAVTDIVGETGIRIIEAILAGERDPHELAKLRDPRVAKSEREIATALEGNFKAEQLFIIRENLAHHRFLQGRIAETDNLMATRMATMEKKASASELPAATKPDRSNHGEALTREHLYELLGVDLTQIDGVGVLTASSFLVNAGRDMSPWATEKHFAAWLGLSPNVKQSAGKTRSGPTRQTASALAHALRMSALTISRVDSWLGAYCRRLKGRIGAPKAITATAHKLAIIFYRAVKEGGVVKRLDAEAYEQAHRERTLKNLRHRAAHFGFDLMPKDIVPVMA

SEQ ID NO: 505489 - protein, 371 aa, unidentified
MNSILYVGMDVHKENYTLCCYSFDRDKVEYRQTVPSDYRLILKYLEQVRRKYPEEVEFICGYEAGCLGYSLYHQLTDHGVKCIILAPTTMGITNTNRVKTDRKDAANIARCLAFHTYSAVYVPDGEDNAVKEYLRMRDDQKLALKKIKQQITTFVLRLGKQYTGSKSLWTENHLKWLRGLDLTLLEKETLQEYLITYDYLTDKLERLDARIEELARNERYGERVRRLGCFIGIKPHTALSLLVEVGDFRRFEKAPNFAGFLGLVPGEDSSGGGRNRLAITKAGNSHLRRLLVESSQSYSRGTIGFKSKELKKRQEGNPPEVVAYADRANERLRRRYYRMTLKNGAKRNVAIVAVARELACFIWGMMTDEIA

SEQ ID NO: 505490 - protein, 324 aa, unidentified
MFYLGVDVAKKKLDCMLLDTSSGKVKSKADIPNTPAGFAALLEWLVKNKAANPHVVMEPTGMYHENAALALADAGLVVSLVNPAQLRAFAQGLGIKTKTDKADSAVLARFGEAQKPTPWQPPSQSARRLKALLARRDAVADDLQRELNRQEANSFSPTPETVDESIAQSVAFLKAELKRLEKLIIKHINDDPDMRNKKELLETIPGVGPRVSSHMTALFAGRTFGSAEQLAAYLGLVPVMWESGSSVRGRPRMSKAGPAYLRKVLYMPAVVARRWNPHIKALNDRLLAKGKSKMATIGAAMRKLAHLCFGVVHSGKPYDPKFAM

SEQ ID NO: 505491 - protein, 324 aa, unidentified
MIFIGIDISKLTFDAAYSLNSRTIHKQFSNNPKGFETFYLWMNKSKKEVYTCLEATGIYSFDLAQYLSHKKINVMVVNPIITHAFFKMELNRNKTDKADAQLIARYCEHVVVTGGYEKKSYQPKGADYEAIQRLVTRCDQLEKSKTQENNRLEASANKQTSRSIKRLQKAIDNEIVRVKKEISDIVKNNQYLCQQVELLVSINGIGERTAWSILAYIGDINFFSNAKQIASYAGLTPKIIQSGTSIDKSSLSKLGHKRLRKSLYMPALVAIRYNPILKVVYERLVNNGKPKKVAIVAVMRKLLILSYGVLKSEKPFDINYQMTD

SEQ ID NO: 505492 - protein, 441 aa, unidentified
MEKKVVTFEQIHAHGAGIDIGSKEIFVSIDGEQVVSFKTFTEDYHKCCNYLKENRIESVAMEATGVYWMSLYDILESYGIKVCLVHPREIQQVKGRKSDVKDSRWIQKLYTAGLLQESIVAEGKLKELRILVRDRMDLISMGSTYINKMQKYLELMNIKLRNVISQIHGASGLRIIKAILAGERDTEKLLSLCHERIIKEKAEELKKSLCGNYNEYYLVLLEENLRLWEEHQKSITNIEHAIESLLDQMCEGKDDIDINTPSSPTRHHDPDVKDLHKKMVLLYGGVDLSSIAGINDVTMLRLLGETGSDMSRFPTKKHFVSWLGLSPKNNQSGKMKKRVSSRSNKAGEIFRQSAQSLLVSKHKAIGVFIRRLKSRKGAQIAIKAGARKIAEAYYNALTKGIDYVEKGAVKYAELLQQKEIYLLNKLAKKHNLKLSIYESVI

SEQ ID NO: 505493 - protein, 312 aa, unidentified
METKFVGIDVSKLTLDFDCLPVSAPQQFANDLDGIVVLVDLLKGSGVERIVIEATGGYETAVASALAVAKLPVVVVNPKQVRDFAKATGSLAKTDRLDAKLLALFGERILPPVRTLPDEAQRALADLTDRRMQLVVMRAQEKARLASVTEVARKNVKQHIAWLDKCISKLDDDLEKRLRNSPLWCEKATLLESAPGVGHVTTFILLARLPELGQLNRQAISALVGLAPFNDDSGKRRGARYIRGGRADVRCALYMATLSAIKHNQPIKAMYERLTASGKPFKLAMTACMRKLLTILNAMLKKNQTWKIQASS

SEQ ID NO: 505494 - protein, 343 aa, unidentified
MEHYAGIDVSLESASVCVVDASGRIVREAKVASEPEALITWFGKLGVEVSRIGLEAGPLSQWLYAGMREAGLPVELLETRHVRDAFKAMPVKTDRNDARGIAQLMRLGWFRPVHCKSVPAQELRAVLTARKLVQGKRHDIEMSLRGILRGFGLKVGPTTPRSFEGRVRQLVEGHPTLLAIADALLLARATLAEQLGKLQKRLVSLARDDTRTRLLMSTPGVGVLVALTYVAAIDDPARFRSSKAAGAHFGLTPKKYQSGETDITGRISKIGDASVRTALYEAANVILTRPVKGSSLKSWAMRVAKRAGMRKAKVALARKLAVVLHRMLADGTQFAADKAAAAI

SEQ ID NO: 505495 - protein, 430 aa, unidentified
MNYTQNQKIEQVTESTLVLGVDIGSSEHYVRAFDYRGRELTRKVFRFSTDINGFNSFYDWVTQICIKHGKNEAMIGCEPTGHYWYTFYQFVKDYGMKLAFVNPASVKKAKELDDNSPKKTDLKDPKTIAKLVIDGRYSFPYVSEGIYAEIREVTSSRDRIMKELNAASNRIQRWLKIYFPEYLTVYKKFDTTTGMMILEEVPLPTMVTALGVDNIIKIWREHKVRGKGASFNRAKTLVDAAHDSVGKSGGQGAVMEIQMLLEDYKVKKQQLEMVTSVMEELIMQIPNAEKMLSVDGVGLVTVAGFISEVGDISRFKNPKQIQKYAGFELVENSSGKHKGRTTISKRGRKKLRKIIYQVVLPLIQSNKEFRSIYDYYRKRIKNPLKGRQAMIAVGCKLIRVFFAIMTKGVVYNGSKMIEDIHRPTQLPQAA

SEQ ID NO: 505496 - protein, 417 aa, unidentified
MIIYVGIDVGKRNHEAGIINGEGKQIGKTLRISNTITGFQRLNDFIQDRIKKITGEQDSSSDELLVHIGMEATGHYWKTLYTYLEKVGYKISVINPIQTEKVRKVQSIRKAKTDKIDAIVIANTLRINQPEQSVFADPDRIAIQKLSRTRRSIVESCTRCKLQGQTIMDQIFPEYESIFDNIYSSSSIAILKKCCTPKQMKEASINELTSIISKTSRGWYGADKAGQIIEAAQSSIGTEIAAEADILELNLLIAQIEMLEKQIKVLDAEIDKYMAKIKTTIFSIPGIGKVWGTTIISEVGDINRFSNSAKFVAFTGLDPSIHQSGDSSGLGGHISKRGSPHLRWAIYEAAECTRRFDPVFKAYYDKKRSEGKSHRSAVCACALKLTRVIYSILKTNKEYVVDPAQLEGAPIRSNCCG

SEQ ID NO: 505497 - protein, 435 aa, unidentified
MADPGAPEDCPVAIGYLNGSRDCWALTGVSALDGMNGPDIPKRAGYTIGFKTPTAAQSRKGSRSMSRFSTYVGLDVHKNSIVLAFASADSSEAAVSLGSVPADYKRLKTKLLQLGLPGTIKICYEAGPTGYGLYHKLRADGFSCDVVSPAKTPRMSSDRVKTDKRDARKLAAFLRSGHLTAIRVPTLEEEGLRDLLRTREAFKKSHTNLKRRLSSLLLRQGRIWHKKSNWTLEHREWIRKQVFEHLGTTLGFRRYLEELAHLDALILELDAEIETVAKTMKSYDLIRALQAFKGIKLLTAAMIVAEIGDFRRFPSAAKLMSFLGMTPSEHSSGERQRRGRITKAGNARLRTLLVEATWAYWRSPHVSKILLKRSAGVSAEIRDQSWKAQRRIYKRLHALTASGKPGRVALIAAARELAGFVWAVGQESQPTEATS

SEQ ID NO: 505498 - protein, 426 aa, unidentified
MRFIGLDVHKDFCEVAVVEGDACWSGPRVRSTPEDLEVFAQSLARKDQVVLEATGGALAIARILEPHVGRVVMANPMAVRAIASAKAKTDRLDARTLARLLASGFLPAVWIGDERTRLLRRLVSRHAHLVRQRTRAKNEVHAVLQRTLKGRPPVSDLFGKRGRAWLGAQDLPADERETVEASLRHIDFLDGELRLVDRTVAEQVLSWPEVRRIMTIPGMGATAAAGVMAAIGDVRRFPTSRHLVGYLGLDARVRQSGSGPARHGRISKQGSAEARHLLVEAAWAAMRTPGPLRAFGERIRARRGANIATVAVARKLAVLCWHVLSREEDYAFGRPSLVREKIRRLELAAGAPNRNGYRNPVRVFATPAQRRLEREVGDQAEKAYRRFVKDFRSSGKKGAGATTGARISAARKGQAARQEQAPDPAL

SEQ ID NO: 505499 - protein, 307 aa, unidentified
MDKPTTIGLDLAKSVFQVHGVSKGGAVVLRRQLRRGRVLAFFARLDPCLIGMEACSGAHHWARELAALGHEVRLMPAAYVKPYVKRGKTDRADAEAICEAVSRPPMRFVPVKSAAAQAALLDHKARDFLIRQQTQTVNTIRAHLAEFGIVVAKGIHNVDRLLEAAGRAPEAARPALELLADQLRDLRERIETVTKRIEVAQKTDPLARRLATIPGLGPIASSAFAVTTPDVAAFRSARDYSAWLGLTPKPHSSGGKERLGRRPADDWLWGMLQRKPATVVAIALANRMARMVWARIRTGESYRATPA

SEQ ID NO: 505500 - protein, 347 aa, unidentified
MTSIVKQVVGIDVAQNELVVSLGCMSHDTGIEIFAFKTFSNNEKGFNGLVAWVDKLAVKGIKVRYVMEATGVYHEKLAYYLSDQHQEVSIVLPNKISNYFRTLDVKTITDKTASQAICKFGLERKLEVWKKPKKIFKDLKQLTRERDQLIADRTVLKNQLHAEKAEAFPNENSVKRVTKRIQLNDKQELEIKAEIAELVKKDSDLVKKVNNITTIPGVGKLTAVIVLAETNGFELIKSKKQLVSYSGLDVRLKDSGTSVKGKPRISKKGNRHLRKAMYMPALAAMRFNEHHKAVFVRLVSKHGIKMKAAVAVQRKILELIYTIYKTDKAFDKHYTNTNIPAETVQNS

SEQ ID NO: 505501 - protein, 372 aa, unidentified
MQSTTKFIGLDVSKEKNSVAIADEGQAKPRYYGSITHSPAALRKLIKELGPASTLSFCYEAGPTGYETHRWLESMGAHCIVIAPSLIPKRAGDRVKTDRRDAEQLARLFRAGELTPIYVPAPEDEALRELVRARETAKEDAHRARQRVLKFLLRHQIHSPEHIKRAWTKKYRMWLGTVTFPQVSMQTAFTEYLHTLHEVEQRIGRLEKALIEEAATHPKAEMIRILQSLRGIGFLTAVSLVSEIGSFARFSSPAKLMAYLGLVPREHSSGASTKRGSITKTGNGRLRRTLIESAWSYRHRPAVKGDLAIRLEGLSADVGQISWKAQNRLHAKYRRLIFVKHKHPNVAIAAVARELMGFIWAVARTIEHPNAQ

SEQ ID NO: 505502 - protein, 369 aa, unidentified
MTESSDYESIQVFIGVDVGKDTHHAVAVNRSGKRLFDRALPNDENKLRALISDLKQHGQILLVVDQPATIGALPVAIARSEGVLVGYLPGLAVRRIADLHAGEAKNDARDAAAIAEAARTLAHALRTLKVADEQIAELSMLCGFDDDLAAQTMQASNRIRGLLNQIHPALERVLGPCLDHPAVLELLQRYPSPEKLASLSEKKLAAQLSKLAPRLGKSLAADITRALTEQSVVVPGTNAAIVVLPRLALQLITLRKQRDEVALEVEQRVLVHPLYPVLTSMPGVGVRTAARLLTEVACRAFASAAHLAAYAGLAPITRRSGSSIRGEHLSRRGNKTLKGVLFLSAFAALRDPISKAYYTRKINQGKRHN

SEQ ID NO: 505503 - protein, 333 aa, unidentified
MLQINTPVNTWIGIDISKDKLDACLLRTSGKPLHKVFDNTADGHHRLIDWAVSQSRHGVRHFCMESTGRYGLALAHQLSEASEYVSVVNPATIKYSGPGGSANKTDKADALKIAHFARKESPNLWEPSSPEIAELSSLVRHKSDLDQDLRRQLNRLQEPGHGSVVKTSIETLVSQIRERIVMIDAEIEKHINDHPDLKETKDLLETIPGVGSETSTLFLAEIPNPKNFDSAQALAAFFGLSPRERQSGKWRGKTTISKTGSSFVRSRLYMPAMSAVRYNPRIKALYERLLAAGKCKMSSLIAAMRKLVMIAYGILKHRRPFDANHGDRDAVVA

SEQ ID NO: 505504 - protein, 347 aa, unidentified
MRIMRIGIDLAKTVFQVHGVDAQEKPAYRRQLRRSQLLAFITNREPCLIGMEACASAHHWARKRQAMGHTVKLIAPQFVKPYVKGNKNDANDAEAICEAVGRPSMRFVPVKTVEQQDLQALHRIRSELIRQRTAKVNQIRGLLGEYGIVVAPHVPALRKALQAILEDAENGLSGYFRTLLDGLRADLVYLDEQIDRLDQNMQHQASTNAQARKLQQLRGIGPITATALVAAIGQNAGQFKRGRDLAAWLGLTPAQHSSGGKDRLLGISKRGDAYLRTLLIHGARAVVRTAAGRSDRLSLWIQNLCSRRNKNVAAVALANKTARLVWALLSREADYDPAYGLGGCNAT

SEQ ID NO: 505505 - protein, 366 aa, unidentified
MTSVPSAAGLIHLGMDTSVNEIVVAVLQPGEEVPVVDRICGDEESVRRLIGRFPDRRLLSACYEAGPGGYELHRLLTSMGVACDVVAPSLIPKGSSDRVKTGKRDSVRLALTHRAGLLTPVRVPSPAEEAVRDLVRARGDLLDDRKRMQQRLNAMLLRHGRVWRGGKKWSYAHRAWVDRQVFDEPALAEAFALYRGGLEAREAELAAAGARLAAWAGREPLAGPVTRLGGYRGIARLTGLTLAAEVVDWRRFASARAFMGFAGLIPTGYSSGSRTRRGHITKAGPEGVRTALIEAAWAYRYRPAIGATLRRRQAGLPPETLARSWKAQQRLHAKYAKMTARGKPPGVAVVAVARELAGFVWAEMTT

SEQ ID NO: 505506 - protein, 311 aa, unidentified
MTEHTTVGIDIAKDTFDVFISPDGQFLHLENTPQGHQQLLDALSSRTVVRIVMEATGRYHSLLTATLELAGLPVAVVNPAQVKHFARALGTLFKTDPNDARIICEFGRRMSPDIRPAPDEQTQRLAMMVSRRRQLVDNRTMEQNRYGSCTDELIRVGIKRHIDWLNAEIRDTDDDIDRQIKVMPLWQEKVKLLEEVKGIGRTTLAVLLSMLPELGQLSRRKISALVGVCPYAHDSGKMKGKRCIWGGRSAVRAALYMAAMSAVRYNPIIQAFFERLRARGKAFKVAMTACVRKLVTILNAMVRDNKKWVAD

SEQ ID NO: 505507 - protein, 300 aa, unidentified
MLDTTTFVGLDVHARSIKAVSLDVMTGEVRCATFGYDAGAVAGWVRSVDPRARCVYESGVTGFDLQKRLSGLGVDCAVGAVSKMIKPSADRRRKNDRNDAEFLARMLSVGNVVEVWVPDDECEAARDLTRALEDARDDLSRAKQRLSKFLLRHGLVFDERTPTGRRKGNWTRAHWSWIESIGFAEGADNDVLAYYVDAVRRAAEEKARLEGLVEAEARKPRWRRRVDSLRCLKGVDTATAADLVFEAGEFSRFGNARSFAAWVGLTPSEHSSGESDRRGAITKAGNKHLRKALVEAACTT

SEQ ID NO: 505508 - protein, 341 aa, unidentified
MQSTKYFLGIDISADDFAASCITSPDNLVFSTQKFLNNIDGSTEFVSLLSKHSIKHSKVIICMEATGVYSENISYFLASKGFTICIEAPHKIKNKTKNSPRKNDFVDALAIAEYAYRYIDKLSLWKPNNEILDQIQVLLSTREHLTVQMTANVNALKSLKYKHYQTPLANQIYEQTINKLKEHIKQIDQEIKNLIDKDDSFKSKVSLAKSVPGVGLLLAANLLVLTKGFTEHTNYKHTAAYSGICPYEQISGTSLNKPPKSRKSGPAKLRKLLYLAALSVRTHNKNFKKYFLRKVAEGKNKRLVLNNIENKLLKIIFAVVNSGVAYTENYKSINPGLLKTA

SEQ ID NO: 505509 - protein, 377 aa, unidentified
MHSENIAAYIGLDVHKETLAVAIAAPERLGEVRYYGTINNEAQAVRRLFQKLQGLYGNILSCYEAGPCGFGLYHQLTAMNIKCQVIAPSRIPKSPTDRIKNDHRDAISLARLLRAGELTPVWIPDLTHEAMRDLIRARAAAKRDSRVARQRILSMLLRTDKRYAGKHWTGKHRTWLANQSFSQPSQQIAFQHYCQSLEQIEDRILQLDQEISRLLPEWSLCNLVCQLQALKGVGQLTAITLVAELGEFSRFSSPKQLMAFLGLVPGEYSSGNSIRPRGITKVGNSELRRLLYEAAWSYRTPAKVGAWLIYYRPDSVTQYSKDIAWKAQQRLCSRYRSLTAKGKKSQVAITAVARELTGFMWDIALAAQSSFSQQKQN

SEQ ID NO: 505510 - protein, 344 aa, unidentified
MQITTIGLDLAKSVFQIHGVDATGQVAVRKSLRRSQMLPFFAKLPPCLVGIEACGTSHHWARELIKLGHEVRLMPPAYVKPYVKRGKTDAADAEAVCEAVTRPTMRFVPVKSPEQQAALSMHRTRDLLVKQRTQLINMIRGLLAEFGVDIPKGLERALLLARQIVEGNAPEVPFEAAKIVGTLSQQALDTHVRLREIDRDLVVWLRGNDVARRLMTIPGIGPVGATALAASVTDPQQFRSGRQFAAWLGLTPLQKSSGGKERLGRITKMGDKYLRRLLIVGMTSLVRRAKYSPGKIDPRLVDLLARKPIRVATVAMANKTARIIWAIMSRGEIYRTGHLPVLAA

SEQ ID NO: 505511 - protein, 362 aa, unidentified
MADGTTWVGLDVHEQTIAVAVIRAGREEVEELGIIANQPAALRKQLDRVGAREQLRVCYEAGPLGYTLYRQLTALGIACQVVAPSLIPVKASERIKTDRRDAAKLVRLLRSGDLTAITVPTPEQEALRDLTRHRTAVRGELQRTRVRIVSLLKRHGIAEPAGTRWTKTYLTWLAGVEMPEAADGVVLADLRVGITQTQTRLDAVTAAIAEQAATSPDAVVITALQELHGVGLLTAVSLVAELGDLRRFDHPRQLMAYAGLVPSEHSSGSRSRRGGITKTGNTHVRRLLVESAWHYARPLRTRSAGTGEVGTVATSAAQARTRLPKRYWRLVGRGKPHQVAVVAVSRELVGFVWAVARAVPPS

SEQ ID NO: 505512 - protein, 398 aa, unidentified
MSKVFVGIDVSKEHSTAQGIGSDEKKLFYLRFSMDSAGFAELRTAIKGCGVNLEDIAVAMESTGCYHINLFSFLCAEGLRCAVVNPLLISKFVQGSLRKTKTDKKDAMTIAQFLLNNEKKLCVVTSSQDAQDLRDLARERESQSWMIASLKNDLKRLLQNTFPELETLRKNIYTETMLNFVRQYPSARLIRQAKRKDIDKALICPGEKRKRVQISADDLIDAAKRSVGSAGTAKELIVSEKATTILYLQEKCEKITEALVDACEATRIEDLEIIKTLDGVKNILGTSFLAEMGELSNFKSYKSLIAFMGLDPSTNQSGKHVGPSKISKRGNRHMRRIAHIMTLGSIKSDNIFREYYLRRLAEGLPKMKALMATTHKLIRVIFSMLTHRMPFKKEVPAV

SEQ ID NO: 505513 - protein, 389 aa, unidentified
MQIRPDRPEAPSAIRSDLGAIFVSLELSRSSWLITSLSPGGGEKMSKHSVAAGDIRVLLTRFSALQQKALARTGRSFPIIVIQEAGLDGFWIHRALQKEGIESHVVDPASIATSRRRRRAKTDKIDGEALLRALLAYKRGEPRVCAMVKAPTPEEEDRRRLCRERKVLIAERVSHVNRIKGLLYCQGVSGYQPLDRDRRGRLDELKTGYGCPLPTHLKVQIGRELDRLELLLEQIKAVETERDALLAAQQSVPTSPTAMLLNLKGIGPEFTTVLCSEGLFRHFDNRRQVSSYAGLAPTPWQSGSIDREQGVSKSGNPRLRETLIELAWLWLRHQPKSALTLWFEERVRLNGGRHKKKNIVVLARKLLVALWKYVTSGVVIEGAVMKTQR

SEQ ID NO: 505514 - protein, 421 aa, unidentified
MGRLKIVYPICCGMDVHRDFLIACIASTNSQGVTEYESKRFSTFSGGLRALRDWLADRNCVDVCMESSGKYWFPVHNILESTCNVVVSHPKFVKAIKGKKTDKKDAMWIADLFKHDLVRGSFIPPEDIRQLRDLCRYWQKLVWCLNGEKNRAQNCLTVSNFKLDSVFSNVFGKSSSAIIDFMLEHPGEAFDVAPFVHHRCKSPIEEIQAAVDGAFNPFQAEKLKIIREHMDDLEKLKALLESLILTLAEPYMHQVELLLTVPGISEIMTAIRIIAEIGVDMSVFESSKHLCSWAGLTPQNNESAGKKKTIRIGKAGQYIKPLLIQCALAACNPRSVKQPEILRKYQQLKKRRGTKKARVAIARRLLTAIFQMLLKDESYSPFVAPAKESIPEKRILSREQGLAMLRRKGFIFDDDIDAVTA

SEQ ID NO: 505515 - protein, 441 aa, unidentified
MAMRKRDDEVVFPNAAGIDVGASSHWVAVPRHTTDDPVREFGAMTGDLNAMADWLLACGVDTVALESTGVYWIPVYEVLEQRGLKVWLVDARQMKYVPGRKSDVQDCQWLQKLMTLGFLRAAWRPNGEVCVVRAVARQRDVLLADQASWVQRMQKALVQMNIQLTEVLTDVMGMTGQLIIRAIVAGERDPKALAQHRNRRVKASAEAIAKALTGNWRDEHLFVLRQALAMYDDIAAHLGECDCKLQALLTELGQTKVDLGKAPREGSKLRGEFDARQILANWAGVDLTRINGLGLTAVLKILSELGPDLSRFETVKHFCSWLGLCPGTKISGGKVLSAKTKRSANRVRQALKMAAMSLSHSDSALGAFYRRLCSRMDKPSANTAVAHKLARMVYFMLTRGEDFVDQGQQRYEEQQHQRSVAALRRRAAALGFDINSASMPA

SEQ ID NO: 505516 - protein, 398 aa, unidentified
MDLPVYYELKTNNGNRDYRIQIGGHYMNYNTVYVGMDVHKESFTLCSCKYEDEKASHYQRTPASYKNVLRYLAFLRTIYGEYTRFVCGYEAGCLGYSLYHQLENFNVECVILAPTTMLEQRSKRRIKTDKRDAEIIARSLAQHNYSPVHIPTETDNQTKEFIRMRDDHKAELKKIKQQILSFCLRQGYQYDGSGNWTAKHVKWLRSLKPAGLYKEILDEYLLTYTILTDKLNRLDQRIEELASKEEYTESVSKLTCFLGIKTHTALSVIVEVGDFQRFVSARKFAGYLGLVPGQHSSGDDRNGLGITKAGNTHVRRLLVESAQSYTRGKIGYKSRVLRSRQAGNSPQVINYADRANERLRRRYYKMVLKDGKKYNIAKTAIARELACFIWGMMTDNIY

SEQ ID NO: 505517 - protein, 387 aa, unidentified
MTVRTVTNLPAVTHGETVRCLFAIELSKQSWVIGFITPLSSRISRRILSGGDWKGLLELIEEVRARVSREMGRTVEVMSCYEAGYDGFWLHRQLEAHGVRNYVIDPASLQVDRRVRRVKTDRIDTERLLRSLMAYLRGEPKVWSVVRVPSVAEEDARRLHRERDRLICERVQHVNRIKGLCALQGIYDYHPLRPQAVARLEQLRTAQGGALPPRLKSEIKRELHRLEVVVEMITTLEAERDAIVEDEASTHVNAEKIQALHKLKAIGPEFAAVLVGEIFHRDFNNRRQLASYVGYAPSPFQSGNVAHDQGISKAGNRKGRTTGIELAWLWLRYQPDSDLSVWFRARVGTVKGRIRRIAIVALARKLLVALWRYLETGLVPRGAVLKG

SEQ ID NO: 505518 - protein, 366 aa, unidentified
MRNYTNKTVYLGMDVHKKTYAVTAICEGQVVKKDTLKADPTILTAYCRKYFVGAKIESAYEAGFCGFYLHRCLEAEGIKNIVVDAAGIEVAVGDRVKTDKRDSLKLATHLSVGRLRAIRVPSAEREDCRAVTRLRETFSRQRSRFACQLKALLFQHGMIHADDKRKVSEKWAKVLEATPVSPGLKYAIANYIALWRQMNIRIKEIDRELSAQAQKDGAIEAIYRSVPGIGTTSARILANEIEDTLQFDNEKKLFSYTGFTPREYSSGEHVRQGHITRHGKPILRKILVQAAWRAIRLDPSLREIFQRLSIKGGKKKAIVAVARRLIGRIHACFRTGELYRIPLSKNKKAEEKNIVHQELGEANTAP

SEQ ID NO: 505519 - protein, 388 aa, unidentified
MFFLGIDIGKNTHVASLLDEKAKVIFKAYSFANTLDAAEALLVKLEPYKDSLEIGMEATGHYWLSLYSFLSEHNFIVHVINPMQTDGWRKGIEIRKRKTDVIDSVLIADLIRYGDFLETSLADEDTLSLRNLTRFRAYLVNSVSDLKRKAIAVLDQIFPEYASVFSNVFGQTSKELLKSLSLPSDYENLSATKIEEVLSNITQKKKASETISTLSDKASRSFGISFCKDSFAFQLKLIIEQICFIEEQITSVELEIEQLMSKLGTNIKTIPGVGNVIGAVILGEIGDIERFDNPSKLVAYAGLDASVSQSGEYEASSGKLSKRGSPYLRKALYMAAQRAEFCDPVFHAYYEKKRNEGKHHLVATNAVARKLCHTIYAILKKDIPYEVQ

SEQ ID NO: 505520 - protein, 440 aa, unidentified
MKITYKRVAGLDVHKKTVVATRMRVTAEERIEWETRTFGTTTPELLSLHDWLDEWALSHVAMESTGDYWKPVYNILEDRFEVWLVNARHVKRVPGRKTDVKDSEWLAELMLHGLLKASFIPPKPQRALRELTRYRTRLVEERARVVNRVQKLLEGANIKLAVVVSDVMGVSARAMLAEIAGGQEDVKEMAQLARGRLRNKIPELEEALTGIVEEHHRFLLAKQLAHIDFLDEQIEEIGEEIRRQMEGLDRVGGSGSGEGGEVQGEKAKAEGALGWEEAVALLGTMPGVDRRTAEVILAEIGLRMEQFPTAEHLTSWAGLAPGNYESGGKRYSGRTRQGNRALSRIMVQAAWAASRSKGTFLQARYHRLAARRGKKRAIVAVARSMLRSVWYMLTYRQPYQELGGDYFDRRKKESKISYLVRRLEKLTGGSVSVELQAATV

SEQ ID NO: 505521 - protein, 410 aa, unidentified
MSHTIAGIDVHKKLLVAVIADSAQPDVVLQSRRFGAGSAELNHLAAWLEQHGVVEVVMESTAQYWKPVWMALEPHLRLHLAQAQSNKAPQGRKSDTADAKRLVRRFAAGELMLSFIPEPEQRVWRSVTRGRLQLIRERVQLQNQIESLLEEGRIQLSSVISDLLGASGRRILRAMAKGETNPESLAVLGDKTLRCTLPVLVDALTGSRGDVHRRLLDQQLDRIELIDKQIQELDQLAAELMGKYQNTITRLVAIPGIGAEAAQEILSEIGPEAAAFPSSEQLASWIGVCPGSQESAGENHSGRCAKGNRFLRRLLCQAAQAAARTKDSHLQSIFQRLVVRLGYVKAIWAVAHRICKIVWNILRKGASFIEFSETRSPKAIRRAITHHLKALRRLGYQIPPLPAIAVEAQR

SEQ ID NO: 505522 - protein, 367 aa, unidentified
MFNERTTIGLDVHARSVRAAAIDTVTGEVVQARLPGGNAATLAWVEAVGERMGPVAAAYEAGPTGFGLARGLGRAGVPVTVAAPSKIIRPAGDRVKTDARDALLLARLLRMDELTAVRIPTDSEEAARDLVRARDDARTDLLAARHRLSKLLLRRGIVYDGSVTWNRPHDAWLRRVRKDGLDGAGAGTVAAFDAAFDAVTMILARRDRLDADIVAMAADSEFTDTTNRLCCLRGISTLTGFALAVEIGDWHRFTGATIAAYLGLVPSEHSSGGSRSLGPITKTGNSHARRLLIEAAWHHKAGYAPGKVMTDRWAKAPAAAVARGDAGNRRLHRRWMVLAAKNKKHTVANTAIARELAGWCWSLAIMD

SEQ ID NO: 505523 - protein, 384 aa, unidentified
MSSHPAVVPTTARSIIYLGMDVHKESITIAVLPAVAKGPTRLDRLPNDLPKLKRWLDRVAREGELRACYEASGAGYVLHRALHDWGYGCEVIAPSLIPKRPGVQRKHDTRDAADLARLYRAGELTAVRIPSEADERVRDVVRCRETFQREILKSQHYILKFLARRGFVFREGTNWCTPHLKWLQHLTTEGSPLAAYDRLVYREYHALLLYKLQRRDELDRQIEQLALLPSLAPMVRHLQCFRGISIHSAMVLATEIVDWRRFERPAQLACYLGLVSREDSSGDRQRLGSITKAGNSHCRHVLVQAAWSYRHRPQTSVDLKRRQQGQPPAVITHAWKAQQRLHQRFNHLSYRKRPQIAVVAVARELVGFLWAVMQDVAPANSHAA

SEQ ID NO: 505524 - protein, 319 aa, unidentified
MAQNDQVVAGVDVAKDKVDACVRTLASRPIFPSSTQGRRQLVAWLRKYKVTKVVMEASGGYEREWAKTLRQEGIEVRIVDPKRVRSFALSAGRLAKNDAIDAKMIAWFGETFSEGPGQAYDADREELQALVKGRLGLIDLRTRLEAQGEHAAPGVVQKAHARILKDLNTEIGKLEAAISAKVKSTPDLVERIEIIESVPGLGRTSATNLAAGMPELGRVSEKVAAALIGAAPYDDDSGKRRGERHVKAGRRWVRNAIYMPCVGAATLNNPVLKAYYRRLIAKGKAPKVAIMACMRKLIVILNTMLARRQKWDPARYALS

SEQ ID NO: 505525 - protein, 345 aa, unidentified
MQSMYYIGLDVHKKSISYCVKDASGQIHAEGAIPATRFDLDRWMKTLPQPWTAAMEATLFTGWIYDHLLPHAAALKVAHPLMLRAIAAAKKKNDQIDANKIADGLRCDFLPECYMASTEIRERRRTLRYRNLLVRQAVQLKNKISGLLMEAGVSYNKQKLHKVGYFRELLATNQEIGEGLRPLLRICRETLVCLQKTESALVRSLEHDPLLAERVERLMTIPAVGPITALTWVLEIGDVKRFSSIKKAISYCGLCGAEHSSANIIKRTPLSKQRNKHLQSVLIEAAKLAPRRSSGLALVYDRERQKGNANRATLAVARKLVAYLVAVDRRQKEFLTVERENRTAA

SEQ ID NO: 505526 - protein, 344 aa, unidentified
MGVAIGMDSHKETLAAAAVDELGRVIDVREFRNRPDGHRALIGWISSQQDPRTVGIEGSQGFGAAVARRLLLAGEDVREVPATLTHRQRSRRPSQGKSDPVDAVAIARVVAVGDGLSSARRAQVLADLKLLVDYRDQLVRARTQVANRVHADLVVICPGYEETVPNLRARKHILAARALLGRDRSVRAGLLRRRLAEMLRLSTEIGEAERRMAEKLEEANSTLTEIPGVGPYIAAKILGEVGDPSRIRSRAAFAVLSGTAPLMASSGQTHRHRLNRGGNRQLNWALHYIALVQSRTLPEAKAYTARQRDAGKSFREALRCLKRQLSNVVYRHLTADAERLEQAA

SEQ ID NO: 505527 - protein, 419 aa, unidentified
MKKTQNTRGYERYFAIDTHREYHLVGGQNEDQEWVVNPRRVGIEKFAEWAQKNLRAGDIVVLETTTNVWDTYDIVAPLVSRVLVANAAAVGEIAGARVKTDKEDIKRLLKLLFGGIIPEVWVPPAHVRELRAFISYRNRLVKMSTMIRNHLQSLLHKHSLTAEGVPEEGILDQAWWDAQTSISVLEKMQIRQELGLLDEIKKLQTGVNEELEKQSVGEVWGKQALQLMQLSGVGVIVAMTVLSAIGDITRFEDARHLVGYSGLGAGVHDSGKTHKEKHITKKGRKELRWIMVEAAWRAVRMSPYWKALYEKYLRRMRKPNQAIVVIARKLLVAIWHVLTKEETDVHASEEDLAYKMLLLSWSLKDNVRKGLTYKQFAKYALMKLGVEKDITRFVRKEVPRRLAPRAEVLERMAELGIAQ

SEQ ID NO: 505528 - protein, 391 aa, unidentified
MTYVGIDVAKDKHDCYIVNSDGEILADVFTIPNDQIGFNLLFQKLQSVAPDLSKVKVGLEATGHYSYNILGFLLDKGLATFVINPLHTNLFRKSTSLRRTKTDQVDARTIAAMLASDVVLTSYTATSYHNEELKSLTRYRFDKVQERAKLKSSVSRLVNILFPELEKLVPTLHMNSVYAMLSEFPGAKQIASCHLTRLNHLLSGSSKGHYKRDKAIEIREAARASIGSVMPAKSLELKHTIHLIEVLTEEIDEIESSIKEIMNEIASPILTIPGINYRMGAMILAEIGDFSRFDSPNKILAYAGLSPSTYQSGKLENAYPHMEKRGSRYLRYALFNATKYVCIWDPTFVAYLAKKRAEGKHYNVAISHAAKKLIRVICALQKSGKPYCPAT

SEQ ID NO: 505529 - protein, 352 aa, unidentified
MKAHNAERPISVVGIDLAKRSFHLYGVDAHGQQVLSKKLSRIRLSAVVANLPPCLVAMEACGSAHHWARQFRSDGHEVRLIAPQFVKPFVKSNKNDAADAEAICEAAQRPNMRFVAIKTLEQQDIQAIHRMRSLAVDRRTAQINQIRGLLLEYGIEVAKGRPAIQRRLPEILEDGDNGLSVRFRTELHGLAEELRHLNERVAHYDAQIDAIAQSDPQARELMTIPGIGTKGATALLAAVGEDARVFNNGRALAAWIGLVPRQHSTGGRDRLLGISKRGDVYLRNLLIHGARAVLRWAERKEDRHSRWATALKARRHTNVATVAMANKIARVAYAVMTTGKPYDPAIGAMANG

SEQ ID NO: 505530 - protein, 394 aa, unidentified
MILVGIDIGKNKHTFSIIDKETGEILLNPSVFDNNQTGFLYLIKKLSNYAKPELLIGMEDTGHYHFALLKYLLDNRYTAALINPTTTDLTRKIQGGITKNDTLDSITICDVISSNQRKKPYRITKVNRFDLYEQKQLTRHHHNLKEELNIYKNRLQKCIDIVFPEFNSLFNSKYGIVYMNVLKTFSSANAIANADIRSIRKCFEFKGRGGRISLSAEQLKTAAKISVGIPSAAEEIQIRHLVCQIELLEKQLSETDKRIAEFSVQNNSAILTIPGISHFSGTSILAELGDICNYQKSSQIIKFAGVAPYHYESSQFTAQHTAITKKGSRYLRKTLYQIILPVINNNEVFYAYYNKKLAEGKGHRCAQGHCIRKLLRVIYHLLTTGQQFSPELLV

SEQ ID NO: 505531 - protein, 327 aa, unidentified
MEAYDGPQIVGMDLHRRRSVLVRMTGDGRRLGTAKITNSPAELRREIARAGSCPKVLEATSGWYWAADVLQAAGAEVHLAHPLGVKAFSYRRVKNDEKDAADLADLLRMGWLAEAWIAPAEIRELRELTRYRIKVVRLRASCKDQVHAVLAKLGIQVTYSDVFGTWGNLWLDGLALPQPYAGKVASLRSLVAQLTGEIGLLDTVIASLLEHHDGYHALQSLPGIGPVLAAVITAEIGDIARFRHPARLCCWAGLTPRHRQSDVKVTRGHITKQGSPILRWALIEAIQRLPAGTPVRQARDRIIARRGSQARNIAKVAAARYLLTCVY

SEQ ID NO: 505532 - protein, 340 aa, unidentified
MHTITTIGLDLAKRVFQVHGLDQKGQPVLRKQVRRGQVLKFFATVSPCVVGMEACGSAHHWARELQAQGHDVRLIPPQYVRPFLKTNKHDAADAEAIAEALVRPTMRFTPIKSADQQAVLMLHRSRELLVKQRTMFLNAIRGHCSELGMIASQGASRVKDLIAIIDDPEDARLPAIAREALGVLIAQLEAVKEAIRTLERKLQAWHRSQQASQRLTTIPGVGIITATALVATIGDGSQFNSGRHLSAWLGLVPRQHSSGGKSRLGRISKRGDGYLRRLLVHGSRAVLRWQRGAPKKPSSWIGELLTRRPTNVVLVAMANKTARTVWAMMRDQQTFTAVVR

SEQ ID NO: 505533 - protein, 394 aa, unidentified
MCCGPREEARSKKQKEKRVFGTVTRELLALADWLCECGVTHVAMESTGVYWKPVWNISERQFEVLLVNAQHIKAVPGWKTDQKDSEWVADLLQHGLLRGSFVPPRETRELRDLTRYRVSLAEECNRIANRIQKVLEDANIKLASVASETLGASGRAMPEAIVAGQQDSEQLAEMSKGRLWNKIPGLRLALEGRLTRHHRFLLRQLLDHLEFTEFKMSEIEAEIERRLRPFEEEVARLCTLPGVERVTAWGMLAEMGFNLEQFASAVHLASWAGLCPGSCESAGKRRNGKTRKGSASLRRCLCQAGWAVSKQRDTYLSALYRRLAARRGGKRAVIAVAHTILVIAFHMRSRKQDYYELGADYFDRLKADGLRRSLVRRLERLGHKVTLEPLAQPA

SEQ ID NO: 505534 - protein, 420 aa, unidentified
MKSATNTPASALPEVPPNDVTAGVDWARDDHAVSIVDGRGREVFRCTVHHTSEGLRELVKELDRHSVGEVAIERPDGPVVETLLAARLVVVVISPNQVKNLRGRYGSAGNKDDRFDAYVLADTLRTDRARLRPLVPDTEATVALRRACRARKDLVSHRVAVANQLRAHLRNVFPAAVGLFADLDSAISLAFLTRFDTQDRADWLTPTRLGDWLTKQGYSGRTDPAVLHQHLRDAPRGATGDHAATQAHITHALVAVLTTLVEQVKTLSAQIDRQLDAHADAHIFTSLPKAGRVRAARLLAEIGDCRAKFPTPESLTGLAGAAPSTRQSGKLRAVSFRWSCDKQIRDAVNDFAADSRHANPWAADLYHRARQRGHDHPHAVRILARAWLHVIWHCWQNDTSYDPARHHALQRVLANPKQAA

SEQ ID NO: 505535 - protein, 319 aa, unidentified
MGTVMNQTSSSLYIGIDLSGSTLDVAIHDTTEHFSVDNETAAIEQLVQRLIALGPTLIVMEATGKLELAVLRALCQAGLPAVAVNPRQVRDFARATGKRAKTDRIDAFVIAHFAAVIKPVVRPLNDVQTEQLQALLLRRAQLIDMLVAEKARLERAHAAAKESLNDHIKWLKQQLTVADRDIDSFLRASPAWRQKEDLLRSVPGIGPGAAATLIAFMPQLGSLNRREIAALTGVAPFNSDSGKHTGKRRIQGGRAIVRRALYMACIPALRFNPTIRAFYDRLRQAGKPFKVAMTACIRKLIVTLNAMVHNSTPWNPSTN

SEQ ID NO: 505536 - protein, 371 aa, unidentified
MGQKAFVPQEYDVFAGLDVDKKSISVTFMNHQQGFIRSLHMPYSVEQLVKHVRKHFAEQKVAFVYEAGPSGYGLYDGLSTEGYNCLVAAPSMIPRAAGQRVKTNRLDSRGLSENLRGGQLKSIHVPSPIYRELRHLTQLRDTLVSEGAGTKQRIKSLLLFEGIPFPLAAAGSQWSLKVKAKLRKLPCSKGVRFKLDQLLDRVEFSEKQVVKVSKEIRQFCQNDPELLQCIEYMMSVCGIGWIVASQLLARIGDWRELKNVRQLGGFLGLVPSERSTGEKTHRGAITHTGDGRLRSKLIQASWSAIRQDEELREFFRSVCRRHPRGVGPRVAIVAVARKLSTRISAVLMQQRPYMVRQKVHLAPLTQEETSP

SEQ ID NO: 505537 - protein, 484 aa, unidentified
MVQRRIVGIDLGIASAHTVRVLDEGGREVCRRRCEPTVASLTVIETAALCGAAAGTRLEVVFEPTGPAWLPIAVFFTTRGHQVFRVSSAKAADLRRFLSRHAKSNGVDADTLARLPLIDPAGLQPLQLPGAEAAALDRRVRACDRLTMAASEHKVRIKDLVRQVMPCTPLVGDLGQADLAVLQRYADPRTLLKAGRARLSALIAKASNNHQGQARAEQWLAAAQAALELYGEHPAVPFTDLAAEIATEVRLLRATQTELAEHATEREVCYRWADPAQLARSLPGLSTVGGPAVTAVIGDPDRFSSAARFKSYLGLTPRASETGNTDRKGQPMSKAGSRLARATLVRAADWARKQDPQLAKVYHQQMVERGADHLKASCVVAARLAERLWTVMHRRMPYVICDTNGTPVTPEQAKTIIAEQWTVTEDVRRRRRSSKTRAGKAPHQVLNGHDQDAQGVTRRPSPRRSSTNPSRRVKQPHGLTTDPR

SEQ ID NO: 505538 - protein, 348 aa, unidentified
MSMVFGLDLHRQQITFDGLDVESGEVWKGRVWQPDRERFRRWLERDVAGRAKGQPVVLAVEGCTGWRYVVEEITAAGFEAHLAEPADTQAARGPKRRAKTDRSDAALLRELLQRGDLPESWIPPMAVLEWRERVRLYKSLVDQRSVWTQRIHAELFQHGVSIPEGQIRSATTRRELVNHVGLSPAARQRIRAGYAMIDAADAEAEPLKLDMTRFGKQQPACRALVDAHYGIGGLLAVAIWSELGDCRRFSRSEQAVRHSGLDVTVDASDLRRAHGHLSRQGPSTLRWALFEAAHNASRPGSPDHDYYTTVKARHNGKIAALSVARQFARRCYHILRNLDPDVVYAMPA

SEQ ID NO: 505539 - protein, 319 aa, unidentified
MEKTKHIGIDVAKDSMEVAEHESQQNWSFTNDEPGIAKLIKMMKKLGAKLIVMEATGGYEIGIAAELHSQGFPVAVVNPRYIRDFARSAGILAKTDVLDAYVIARYAAVMQPAARALPAEETRRLGVIMMRRRQIIVMRTAEKNRLRQADSAVKEGIKSHINWLDQELDNINKELKQMIETNPEWKEKNDIIQSVPGVGQNLAITILSDFPELGQLNRKQAAALTGVAPFNRDSGLMKGKRSIWGGRGVVRTAVYMCIVSAIRFNPQIKTFYQRLVKAGKMRKVAMVACMRKLLCILNVMLKNHATWKYSAHQLIGPCH

SEQ ID NO: 505540 - protein, 338 aa, unidentified
MVLIGIDPHKASHTAVVIDRDEHELARLTVRASRGQVVELLAFAAPFTERTWAIESAGGLGFLLAQQLVRAGEDVIDVPATLAAKTRLLGSGRGSKNDPNDALSTAVAALRDRRLRPVLAEDPAMVLRLLADRHQDLTSLRTQAVCRLHALLAALTPGGVQRRLSATAAAAFLAKVHPDTMVTTARRAMAADLVADVRRLDKAIAEVKARTVAAVTASGTTVTDLYGVGPVIAALLIGHTGDITRFPSSGHYASYNGTAPIEASSGPKVRHRLNPRGNRQLNHALHMIAVTQIRGDNPGRDYYRKKIAEGKTTREARRALKRKISDAVYRQLLADTRN

SEQ ID NO: 505541 - protein, 343 aa, unidentified
MYFIGLDVHKKTISYCVKDAAGRVHQEGKIGSTRRELDSWIRNMPQPRTIAMEATIFTGWIYDHLIPHAEKVKVAHPLMLRAIAAAKKKNDKIDASKIADCVRCDFLPECHMASTEIRDRRRTLRYRHLVIRQMVQMKNRVSGLLMETGVSYDKQRLHKVGYFAELMATNEDVHESIRPLLRLSRDMISRSQKLDYALVSSLERDPVLKDRLRRLRTVPGVGPITALTWALEIGDYTRFSSIKQAISYCGLCGDEKSSADKVMRMPISKQRNKHIQRVLIEAAKLAPSESPELALTHARELERGNRNRATLAVARKMVCYMLAVERRQQDFVPVEEFSRKVAV

SEQ ID NO: 505542 - protein, 430 aa, unidentified
MNLKPIAGIDVSKYFSEMVVISPTNEIIARLTIHHNNPSDFDRAIEILKKVEEDFAARPTIVMEATGHYHKILSRFFTSNGWDVAIINPIQSNSIKNAGVRKVKNDKIDALWIALTFRLTNSTTAQPSSEILDCLKNLCRQYYNLSDELTSYKYRLTSVVDQIMLNFKEVFPDICSKTSLAILENYPTPNDILGADTEKLISIIQQTSKKSYQWAKEKYELLIAKAKEFKSFSISNLANVTMLKVYINMVLTLQQNIDKIFESINQLVQQSSQTQPSISENINLLQSIPGIGFLSAATILAEIGDFEKFSKPNKLVAFFGIDPSVNQSGQFVGTKNKMSKRGSKILRRILFTIALANIRTKRDSKPCNPVLFEYYQKKCQQKPKKVALGAVMRKIICIIFAVMRDKKPFELRTPEEHIRRCFNNTAVYCV

SEQ ID NO: 505543 - protein, 416 aa, unidentified
MSVALPQALFFTGIDWACAEHAVCVLDAAGKITARFTIKHSAEGIASLVRRLARYGDPADLPVAIERPSGRLVDLLLEAGHPVVPVSPNAIKTWREGEVLSGAKSDAGDAAVIAGYLRLRYHRLAPAAPYCDETRALRAAVRTREDLVQMRVAATNQLSALLEAHWPGARAVFADVESPISLEFLTRYPTPAAARHLGHKRMAAFLVKHGYSGRRPAAQLLARLHGAPAGTAGRALTEALQDAVLAVVAVLRALNGAVKDLDRSVAAHLGEHPDGPVFTSLPRPGQINAAQMLAEWGDCRPAYDGPDCVAALAGVTPVTKQSGKYRGVEFRWACNKRFRRAVTTFAGNSRHASPWAAQIYAEARAAGKDHPHATRILARAWIRVIWPCWVNGVPYDPARHRAAAALAGQTPSQPAA

SEQ ID NO: 505544 - protein, 384 aa, unidentified
MEKSSTLYVGLDVHKGSIDIGAADAGRDGEVRHVGSIGGELVGLDKALRRLISKGHPLHVVYEAGPCGFVIWRHLRAQGIGCEVVAPSSIPKRSGDRVKTDRRDAMMLARLSRSGELTAVRVPDTADEAVRDLARAREDAVRECRNARHRLKALLLRNGIAYEGKTAWTAAHLRWLATLKMQHAAQQIGFQEYLHAVTEATARIARLEQAMRDTLPEWGLAPVVQALQAMRGVQLVAAMTLVAELQDFLRFDNPRQLMAYVGLVPGEHSSGPKRRQGSITKAGNSAARRMLVEVAWHYQHSPRVSPIIAARHDQLPKEVTDIAWKAQLRLNAKFKRLVARRVMKNKAVVAVARELTGFVWAIGREVQTSGWQGIKTEPAGTAAD

SEQ ID NO: 505545 - protein, 397 aa, unidentified
MIAVGIDVSKSKSTVAILNGDGSIRAKPFDVHHVADELQALVDYIKRTSDPPTILMEPTSHYHYPLLKAFTEAELPVCLINPYQMKKYGDTELRKAKTDKRDSLRIAQYALKKSYSLIPYTPQDQKYEDLRFLSRQYSQRISTLTVAKVQLLSLLDETMPGITTILPLKSRDPDNCVLLRFIKRFKSFDVIRKMGKTRFLDSYQVLVKKTKDRFAGSKGLAIYELVLNSVTTRGENPLSAMTQDQCVDLVSTSQKAADEINLQMRIIAETMPEYKVLRSMAGVGDRLGPIILGEIGDIRRFHSGKALNAYAGNDAPPYQSGQFESRNRHISKRGNPALRKACFEVMQALKLTKPQDDPVYLFLLKKEQEGKPYNVAKMAAVNKFLRIYYARAMELYK

SEQ ID NO: 505546 - protein, 437 aa, unidentified
MGCNYAGVDWASDKHDVLVADAAGEKLLAGTFAHDENGLRALCRALVRLKVELVAIERPDGLLVERLLDAGLRVLALHPNQVAAARDRFRVSGGKSDRFDAFVLCELARTDHHRFRVLEPDSDQTKALRALTRGREDLVAARTALVNQLRAELERFWPAPLRLFTHLNSPISLAFLERYPSPADARGLGEARLAAFLARERYSGRQKPAALLAKLKAAPQGRLGELELSTRRTLVLTLVAAIKTLSAQITELERQIATAIREHPDGQIFLSLFKGSVITAAELLAEMGDCRARYPTRDALAGDAGQAAVARESGKRKTACFRWGCNKRLRKAFCTLADSTRHWHPWAQALYADAIARGHEHPRAIRTLGRAWSRIVWQCWQQRTAYDPARHRALQRHITVTIPTSSGPVIDHAATTRMAAGLTTNGADPSPEVTAAQ

SEQ ID NO: 505547 - protein, 338 aa, unidentified
MNISRVGLDLAKQVFQVHGVDSHERVVCRRQLKRAQMLDFFRQLAPCLVAMEACGSAHYWARELQGLGHEVRLIAPQFVKPYVKGDKHDAHDAEAICEAASRPSMRFVPVKSAQQQAGQSVHRIRSRLVRARTALCNEIRGLLGEFGLIASRRGRAATVELLETVTAAEPVPLPAPMGELLSGLKEELQALDARIERLERVIKRSAREDARIQRLLAVEGIGPLTASAVVAAVGDARQFRTARQFAAWLGLVPRQHSTGGQQRLGGITKRGDTYLRTLFTHGSRSVVRCCANKTDARSRWLQGLLQRCNANAVAVALANKNARIVWALLSRETTYQPA

SEQ ID NO: 505548 - protein, 343 aa, unidentified
MEYYVGLDVSLKQTSICVVDQAGLVVREGVVDSDPEAISVYVTSRAPNAVRIGLETGPTSTWLWTELKRLGLPVICIDARHAKAVLKMQINKSDRNDAIGIARIMQTGWFKEVHVKDIDSHSVRALLASRALLVKIKRDLENHVRGLLKNLGLVIGRAKFNVFAVRAEELIEGRPELVAAIRPLLEARGAVEQQVSELDRKVMKLARHDAQIRRFMTAPGVGPITALCFKATIDDPARFARSRSVGAYVGLTSRRHASGEVDWTGRISKCGDAMLRSYLFEAAGVLLTRVPKWSAVKAWGARLAKRNGLRKAKVAVARKLAVILHRMWIDGTEFNWSKKEIAA

SEQ ID NO: 505549 - protein, 401 aa, unidentified
MVFLGVDWAEGHHDLCLMDEQGKVLGRRRVPDGLAGVVEIHELVSEHGDQVCVGIEVDHGLLVQALVGAEYQVFAINPMAVSRYRDRHSVAGAKSDAGDAKVLADLVRTDRHNHRVVRGDSEQAMAIRVIARAHQTAIRTRRRQINQLRAQLREFYPGALAVFEEGLGEPEALEVLLLAPTPGRGRHLSLAKIGSALRRGGRQRYVEQRSKAIYEQLRQPQLERPAVIADALGMAVSSLVRVLRQLNHEVATLEAQLTELFECHPDAEIYRSLPGLGVVLSARVLGESGDDPTRYRNARARRSYSGNAPRTVASGKQRRVAIRAARNDRLADAFYQAAFVSLTRSPEANTYYRRLRAAGKSHSHALRALANKLAGVLDGCLRNHQTYSSAIAWPAQLRSAA

SEQ ID NO: 505550 - protein, 362 aa, unidentified
MNDATTICEAKMTVGLDLGDRHIQLCALSPDGEVIEESRLSCREKALRARFEGAAPVRLVLEAGTHSPWVSRLLAELGHEVIVANPRKLRLIYMNDSKSDRVDAEYLARVGRLDPALLSPIMHREASVQADLVVVRSRDVLVRTRTALINHVRGSVKSLGGRIPSSSAAAFSRIAVEHVPECLTSALLPVLTMIGDLSERIGRFDREIERLCSEEYPECAALSQPAGVGPITALTYALTIQDPSRFPNARAVGSYLGLRPKRSQSGASAPELGITKAGDVMTRRLLVGSAQYILGPFGPDTDLRRWGLTLAGRGGKAAKKRAVVAVARKLSVLMFRLWVTGEVYEPLRNSAPHEVEAVAISA

SEQ ID NO: 505551 - protein, 313 aa, unidentified
MKIERWLGIDVCLARLDAHLLPAGESWSVSNDAAGIEDLVRRLKAGSDVLVVMEATGGYQHEAAVALSHAGAPVAVVNPRQVRDFGRATGQLAKTDKISAEILAMFGEKLRPEARFVPDEELELLTALIQRRRQLLEMLTAEKNRLRVTRTLEVQRGIKTHIRWLEKRLEDTNQKLDQAVRESPMWREKDKILQSTPGVGSVVSRTLIGELPELGKLNRKQIGALAGVAPFARDSGTLRGKRSVWGGRASVRSALYMAALVGVRHNPVLADMYQRLRARGKLPKVALVACMRKLLVILNAMLRDGSTWKEAHI

SEQ ID NO: 505552 - protein, 468 aa, unidentified
MKHKSRRAKQQEASLLSEELQLIEPDAAAIDIGSRSHWVAVNPQRASEPVREFGTFTCDLNRLADWLAECRASSVVMEATGVYWVTLYELLEERGFKVYLVDAHTVRHLPGRKKSDVVDCQWIRRLHSYGLLQGSFRPSEQIRRLRSYLRSRSKVVECAAQQLLRMQKALTLMNIQLQHVISDLSGMTGMAIVRAIVAGERDAKQLARLRDPRIRASRETIEKSLQGNWQEELLFDLKIALESYDHFQSQIAAYDEQIRQGLKALPSKADLQKQPLGPPRPKSCRTRPGTTQQEQLDLRQELYRISGVDLTRIDGISLQTAQKVLFEIGTDVSAWSDERKFASWLGLSPNHHISGGKVLKRKSRKVINPLSIALRLAARTLRNSKSALGANFRRLIAKIGMPKAITAMARKLAVLIYRMLKYGSDYVDKGMQHYERKYQETKLQYLRRQAARLGMQLVPNQGVATSVH

SEQ ID NO: 505553 - protein, 312 aa, unidentified
MTDITIGADISKDHIDLHSLPDGRSLTVANDRKGFAAIVRWIGTKGVERIVYEPTGACHKAFERFMMVQRLRLSKVNPRLARRFAEATGRLAKTDRIDAGLLARYGALLAPRILRANTQIHNDLKELHVARLALIKDRTAAKNRAKNVSNLLLKRQNVDRLRQIERQMKAVDEAIMSLIGADVSLKARFDILVSIPGVSQITAFTLLIEMPELGELDEKAVAALSGLAPMSRQSGRWTGRAFIAGGRAIVRHALYMPALVACRFNPQLKTKYEELTKAGKPPKVAITAVMRTLIVLANALLRKNQKWQPKPA

SEQ ID NO: 505554 - protein, 388 aa, unidentified
MFFLGIDIGKNTHVASLLDEKAKIIFKAYSFANTLDAAEALLVKLEPYKDSLEIGMEATGHYWLSLYSFLTEHKFIVHVLNPIQTDGWRKGIEIRKRKTDVIDSVLIADLIRYGDFLETSLADEDILSLRNLSRFRVYLVNSVSDLKRKAIAVLDQIFPEYASVFSNVFGQTSKELLKSLSLPSDYENLSATKIEEVLSNITQKKKASKTISTLSDKARRSFGIDFCKDSFAFQLKLIIEQICFIEEQISSVELEIEQLMSKLGTNIKTIPGVGSVIGAVILGEIGDIERFDNPSKLVAYAGLDASVSQSGEYESSSGKLSKRGSPYLRKALYMAAQRAEFCDPVFHAYYEKKRNEGKHHLVATNAVARKLCHTIYAILKKDIPYEVQ

SEQ ID NO: 505555 - protein, 282 aa, unidentified
MKTKIKKIVGIDVSKLTIDVYDGKKNYHFKNNYEGFKQLLKTTEGHYVMEATGSYHVQLASYLFEKVQTVSVVNPLSVKRFSQMKFIRAKTDKQDAAMIFEYGQIMELELWKAPKEYIVKIKQIFTATDLMLKHQSAYNNQLEAFAQMKIIDGLVIATIKEQLTVLKKSIKVLENKAEELVLENAKELYQKLKTIPSIGRKTAILLIAITNEFKNFENSKQLASYIGICPRIYQSGTSVNGRGKICKMGNGQIRHTLFMCSLTASRYNLGCKEMFERLTLLV

SEQ ID NO: 505556 - protein, 345 aa, unidentified
MPSIVGGLDIHRKQITFDYVDLDTGEVQCGQIAPADREHFRAWLAGRFDHPERVAFAVEACTGWRYVAGELAAAGITAHLAETADTATLRGRKRRAKTDRADARLQRDLLSQGRLPECWIPPPHVLECRALLEAYHDLRREHTAWIQRVHAVLFHQGAPVFHDLSRADAPAELAALARAHLSAAGQAQVMLCLRMLEVTGGELDGLRRRLLAAARRLHGAKVLADSIYGVGPVTALALTCWLGGAGRFSSTRKAVRFAGLDITVYSSDGKRSPGHLSRQGPPVLRWAVYEAGKTHARPAAPDHAYYAQVKDRKDGKRAALAEARKIVRRACHILAELGDDALATV

SEQ ID NO: 505557 - protein, 328 aa, unidentified
MRPESSSASSSAASQPVVGIDVAKKTLDCFIDSPAQRLSLSNDERGQADLVRHLVPLNVRLICIEATGRYHRRLAAELLDAGLPVTLVNPARARDFARAGGKLEKTDRIDAAMLAGFARSCPHRILQMPRPNQAELDDLVSRRRALVQMRVAETNRLADDLPKLARNQGRKLLRLIEQQIEDLDRAIARLIDSDDDWKNKSQIIDSVPGIGAGTAHQLIADLPELGTLSRTEIAKLAGVAPLNHDSGQMRGKRSIGGGRSAVRTVLYMGAFNAIQHNHRFADYAKHLLAKGKQYKVVVTACMRKLLVILNQMIKTNSFWNEKLAFKQP

SEQ ID NO: 505558 - protein, 351 aa, unidentified
MVVVGVDVHKSTHTFVAVDSVGKKLGHLTSAATTEGHHTAINWALTEFGGDLVWGIEDCRQMSTRLERDLLGAGQTAVRVPTKLMAQARSSARTRGKSDPIDALAVARAVLREPDLPAAGADPQSRELRLLVDYREVAVAQRTASINRLLWRVHEINPAYAPKPRSLSMNKHQKILATHLANHTSLLADIARAELDDIISLTARINKLATEIGKRVRQLVPTLLELPGCAELTAGKIVGETAGISRFRSADAYASYAGTAPIPVWSGNSAGRVRLPRHGNRQLNTALHRIALTQIRLEDSDGYTYYRNRLAANDTKTSALRCLRRRLIRTVYQRLTTDAHTHPAPTEQAAA

SEQ ID NO: 505559 - protein, 357 aa, unidentified
MTDIPIRIKKYTYFIGVDVSAYELDYAVMRGKDFLFHRERKNEPADIMDFIKELKLLPGFTVSRAVFCMEENGIYNLHLINTLKKIKGNVVNDNPLHIKRSFGIARGKDDKIDAKRLAQYVYVNRETLNIYNPKRPLLQQIADLFSLRHRLLGVQLALQTPLTSQATFIKKGIHEQTVRLCAKSIESIREDIADIDLAIDQIIAADENFSRLNKIMVSVPGVGRITSIQILISTNEFKNINNPRKFACYAGIAPFKKESGGVKSRARVSPIANRKVKALLHLCAMTSLRAEKDLKIYYDRKVAEGKPKMAVLNAVRNKLVLRIFTCVNQNRLYEKTYVSNSRSKKSIVTDQLVEEMV

SEQ ID NO: 505560 - protein, 429 aa, unidentified
MNKNEANPTEEYAALIGLDWASEKHDVWLWDVATGKSRHRVIEHTPEALADWLSELQSQYPGQRVAVCLEQSRGSLIYALMGHAFLDLYPVNPVTLAKYREAFAPSRAKDDPGDAKLLAEILRLHRDKLAVWKPADDQTRLLGFLNEERRKAVNLRTKLVLRLQAALKLYFPQAIQWAGTDLGAPMACDWLLKWPTLEALQRAKPQTIRAFYYAHNVRRPDLVEGLLATIASAKPLTQDAPVIGAHRLTVQMLAKQLRTLHSSIAGYDKQIAQLFKEHPDALLFESLPGAGAILAPRLLTAFGPDRTRHPDAKGMQTYCGVAPVIERSGKSRWTHWRWNCPKFLRQTFHEYAKSSIPYSAWARAFYDQQKQRGKGHNAAIRSLAFKWIRVIHRCWQTHTPYDEARYLQALELRGSPLCRLIAAPDREAS

SEQ ID NO: 505561 - protein, 414 aa, unidentified
MPNAYDAIANLDDRLTELANQHGAGLVYGLEDHRRYGLLFCQVLTERGREVRVVNPLWTSRQRAFYGQDKDDAIDGRSIAAVVLRRHHELPLATEFGEVAQAVREAERRLQDLDKARTRAVNRLHLQLSDSYTAVYEGFFGKLRSPFALRFFRRFPLPQDLVGHSVEMLASLLLELAGGKVGPHKGANRLIAMRGKAQTILETSAAMRKRPRSLALELKAELIGQLCDELLAIHDRVTRLNRMLRKTLLPATGQTITTVTGISTTLAATMIGETGSIARFRSPAAYAVYDGTAPARNSSGGRDRHKARRDCNHRLKRAFYLAARAAVQHDPIAQNYHQRCISRGLNYGEALKRVARRMSDLVYVLLKSGKAYDRSIVENAIERRREQAARAEPRRAKHSLVHSRPNNPNAPRSP

SEQ ID NO: 505562 - protein, 335 aa, unidentified
MYLGIDHHKHYSQVVVMDKDGITHLNRKINNDKESIETLKRRFNQPIKAVIEAGHNWGKMYDLLEESNIATEVAHPLKVRAIAEARIKTDSIDAKTLAHLLRTDLIPSVHVPSKEVREQKNLLRYRLWLVRLQTMTKNRIYNVLDRNSIDTKGLNIFAKKTREQIKNLSLKDIDKKLLKDHYDILEVIEQHIKDTESWIDSSLKDNQYIAILDSMPGFAKILSALAALEIDNVERFAHPGKFASYCGLIPSTYSSGGKTYHGRLICTCNSYLKYAFIEAAWASIRSSTYCRSCYEKIKESKGSNVAIVSLARRLSQIAYKCLKENRKYEERPYLQ

SEQ ID NO: 505563 - protein, 358 aa, unidentified
MQRNEISFKGQKILIGIDVHAKSWKVAIAPEVGAVKCHSQKPSAKELFDFLKKNYPDGEYKAVYESGFSGFSTYYALTEVGIDCIVIHAADVPTTQYEEVMKTDRIDAAKLARSLKAGQLRGNYVPEKQCIDDRSVVRIRRTIQKQLSGYKSRVKHLLHCHGVEMPERFSRVQTHWSRAFITWLKNDVELMSDTRMSLDLLIRQVEVIRGTLLEATRQLRKMSQTERYKRRHDLLRTIPGIGPVVSMCILTEVCDVKRFHNENEFAAYLGLIPTSHSSGEKTVHGEKTFRGNKQLGPMVVEAAWVAISWDAGLGAQYLQYKKRMEPQEAIVRIARKLSNIIFSVLKNEREYVPYQTGN

SEQ ID NO: 505564 - protein, 318 aa, unidentified
MSGEGVLVGLDVAKATLDVGLRPTGEAWQVANDEPGIAELVARLRRLKPALLVGEATGGFERPVVAALAAAGIPVVVANPRQVRDFAKATGQLAKTDRIDAAILALFAERVRPKPRPLADEAAQLLDALLTRPATPRDAGGREEPAGGCAPAAPPRDPAAHSLVGASAGRRHRGAGGADRSQPRVARPGRSAAERPGIGPIVSAVLLGELPELGSLSHKQIATLVGVAPLARDSGTLRGKRLIWGGRAPVRTALYLAALCGRRWNPQLKVFYDRLIAAGKPKKVALIACARKLLTVVNAMVRDHERWAVPAPSVQHSC

SEQ ID NO: 505565 - protein, 358 aa, unidentified
MRMVVYVGIDVHKKYCQAALMNDNGKLERELRFDNTTEGAKSLVNLAKSIDPEIKAVLEPSANFWIRIYDQLEDESVEVKLSNPLRTKAIAEARIKTDRIDAKTLATLLRGDLVAESYVPNHKNRERRAIIRHKASLMHMRVEIKNRIHALLDKHELTHSYSDLFGKEGLEWLRNQQLPTIDHQILQSNLQILETITTEIDNADIQIAKDAVNENQAKLLMSMPGVDYYAAMILLSEIGDVKRFPTPDKLASWVGLTPQVHQSGETNWTGHITRKGSKRARWILGQCAQSARQHDPRMRNFYERIERKHGSSKAIVAVAHKMVTIMHVMLTRNEPYRGQNIQLTEKKHKRLNNIANSA

SEQ ID NO: 505566 - protein, 429 aa, unidentified
MPEASLAASAEGVAAYVGIDWADQKHDVTLRSAAEPAKVEHQRIAHELNALSDWVGELHQRFAGKGKVLICLEQSRGALLYLLMGYDFLELYPINPSQVASYRETFSPAGAKDDQPDSELICELLYFHRDRLKAWKPDDELTRKLAFLNEGRRKAVDQRTELANEIKSQLKVYFPLALQILGHDTTTMLAADLLLQWPTLESLQKQSAHKLRKFFYAHNFRMESKLLERFALIKAAQPLTRDLAVIEPAALRVRLLAQQLKGLLPYIALYEKQIAELFDAHPDSFLYRDLPGAGAALGPRLLTAFGTDRDRFDKPTELLSLSGVAPVRRASGKKTGKKASVHFRQACPKFLRQSFHEFGACSIRYCPWAKACYETQRARGKGHHAAVRAVTFKWIRILFACWKQRQPYDPQRYQQALLIRGSQYATTAV

SEQ ID NO: 505567 - protein, 407 aa, unidentified
MRCVEAGAVNDGYGVYLGLDVGKEGHHAVGLAPDGKRLHDAALPNAEARLRQLFDKLARHGRVLVVVDQPASIGALPVAVARACGHQVAYLPGLAMRRIADLHPGTAKTDARDAYVIADAARTLPHTLRRVDVGDEALAELEVLVGFDDDLAGEATRVSNRIRGLLTQIHPALERVLGPRVHHKAVLELLSRCGGPVGLRKAGRRKLLSIAAVHAPRMGERLVEQIMTALDEQTVTVPGTQAAETILPRLADSLRDILRQRDQAAAQVERILDAHPLAPVLTSMPGIGVRTAARILLEVGDGTAFPTPGHLAAYAGLAPVTRRSGSSIRGEHPPRGGNKNLKRAFFLAAFASLADPTSRAYYDRKRAEGKRHNAALICLARRRCDVLYAMLRDKIPYQPRPTSPVPA

SEQ ID NO: 505568 - protein, 390 aa, unidentified
MGPTETRRRRPEAVGKVVCSSQARADRGRPSPPQSWEHRLLQSKGRHDLFDQIPNSCQGLVKPASYEEGIHQLMNVLATIGIDVSKDRLDVAVRPTGEYLTAANTLTGIEELTHKLTGFSPRLIVLEATGGYETNLTAALIKEELPVVMVNPRQVRDFAKAIGRLAKTDQIDADVLAHFGEAISPQIRILPDKQQHELSMLLSRQRQLVDMLTMEKNRIQNCPSQKVRQSVQAHIDWLNNQIKHIKKELDNFIQDTPAWRDKDKLYRSVPGVGPIVSAALLAYMPELGTLNRKKIAALAGLAPFNRDSGKLRGKRVVWGGRGQIRRLLYMATVASLRVNPVIQSFFQRLVEAGKPKKAALTACMRKLLTILNAMAKSNLPWSPVPVQPAP

SEQ ID NO: 505569 - protein, 354 aa, unidentified
MSRKTTNLEAVATIGIDIGKNTFHLIGLDEKGAIVLRQKLLRGQVVTRLANMPLCLIGMEACVGAHHLGRQLKALGHDARLMPARYVRPYSKGQKNDFRDAEAIAEAVLRPTMKFVAIKTVEQLDLQALHRVRERLVSQRTSVINQIRAFLLERGIAVRQGLRALRTEIPIVLAMTDKLSPRMIRMIEDLCTDWHYLDERIESVSDEIATLSEEDEGAKRLMTVPGIGPIISTATVAAIGRGDVFSKGRDFAAWLGLVPRQMSTGGRTVLGPISKRGNRYLRMLFVQAANAVLLHPQSWEKHGLKSWIEAAARRLNRFKLAIALANKLARIAWGVLQGGRNFEVRSMKSAAQAA

SEQ ID NO: 505570 - protein, 361 aa, unidentified
MRPPRSRPLPELEQLPEAVAQQRRPRIQDRASARAPRKRVYMSGFIGIDVAKADLFVAREGIAGSKNYPNTDRGHRDLIKDLEGAGSAIERIVVEATGGYERRLVTALGSRGLPVVVVNPRQVRDFAKATGQLAKTDKIDAHVLAAFGSRVKPDLRPLDTEEQEELRDFLLRHEQLIQMLVAEKSRLLQAEGGSRQTLRRKIKSHIRFLEREIELLDSDLDDTLKESPLWKENDDILQSTPGVGTRTSRTLLGLMPELGSLNAGQVGKLIGAAPFNRDSGKLRGKRHISGGRSRVRAVLYMATLVATRFNPVVKAWYQRLLAAGKPKKVALVACMRKLLVVLNAMIKTKTRWQAQVSPTTA

SEQ ID NO: 505571 - protein, 327 aa, unidentified
MKDRPVVYIGVDVAKDSLSIDAGEWFKGEIENSTEAIRGALKKLTKRCVDDQVVCFCFESTGPYGERLFLECCEASVPACILNPAKVRHYAKAMSEAAKTDPIDARVIRLFAENKRPEPTPPPSAATIQLRKLVLTRNALMKSVVQLSGTQDTVVGSPAGEVLAQAIAELRMKIKELDRLIAHTMAGDPRIAGLAAALVEIDGVGKLSAAKIVAMVPELGTLGRRRSAALAGLAPFTRDSGRCKGKTFISGGRAEVRRALFMPATVAIKHNPVLRAAYQNLRQNGKPYKVALTAVMRRLFQHMDAVAAQWLRDHAVGVTAAAIPAPT

SEQ ID NO: 505572 - protein, 430 aa, unidentified
MENIRLSKPNVEIAAFVGLDWADQKHVVTLQDANSNQRQRFTLDQTPEALQNWIQLLRDRFAGRAVAIAVEQKRGALIYALMHVDFLHLYPVNPQTLAQFRKAFYPSGAKDDPVDADLLLEILMTHRQHLRVWIPDDVLTRSIQLLTEDRRHLVDERTALTNQLTAALKMYFPQALEWFGDLHTARASAFLRRWPSLQELKRASSSAIRKFYKTQGYRGEDKLEQLIANIQKAQPLTQDGAVLLAGTMKVQALAAQIPSLTESIELYDQKIAALFSQHDDSTLFGSFPGAGASLAPRLLAAFGSDRGRFEFAADMQELSGIAPVTEKSGTGIWIHWRLACSKFLRQTFQEFAGCSILQSDWARACYDQLRKRGKSHHAALRALAFKWIRIIFRCWKTRTPYDEAVYCKSLKLRRSPLAADLPPDDKLALT

SEQ ID NO: 505573 - protein, 358 aa, unidentified
MKTKLRKIDYTNQVLFIGLDVHQKTWHATIIVGEIQRSLSFESSPEKFAKYLKKTYPGAICKVAYEAGCFGFWIKERLDALGLDTIVVNPADIPTSDKDQRQKTDKRDSKKIAWALRSGMLYGIYAPDKEAQEDRDLLRRRKDLVTKSTRIKNQIKAKLKFYGIEIPSRFDKLGTHWSKAFLLWLESLVFHSSSMKFVMESLLREIRFIRDEILIVTKQLRILLQKERYAENARIINTVPGLGLIAAANILLEIIDMHRFKTSNEFLSFVGLAPTEHSSGNSRRIGHLNRRCNASLRTIFIEAAWIAIRSDEALTLYYNNSLKRGTKTYAIIKVAKKLANRTRYVLLNKCEYSKGVAA

SEQ ID NO: 505574 - protein, 381 aa, unidentified
MTTPATCHVPESTTAGTLFVAFELSEKTWKLGFTIGHGHKPRERTVTARQQERVLDEIAQAKRRLGLPDTAPVVSCYEAGREGFWLHRFLQAHGITNQVVDSSAIEVNRRRRRAKSDGLDVRKLLSMLMRSHHGEHQVWQVVKVPSVEAEDQRHLHRDLETLKQERASTTTRIQGLLSSQGLRVTSLTQLPEQLDALRLWDGSPIPPGLRRRVLRVYAHHTFLSEQIAALEAERRAQLHASTDARIDQVRQLMLLKGIGINGAWLLVMEFFGWRQLKNRREVGGLAGFTPTPYQSGASTREQGITKAGNRHVRWITTELAWSWLRFQPDSALRVWFRERFGSGGKRLRRIGIIAVARKLLIALWRFLETGVIPAGAVLKEG

SEQ ID NO: 505575 - protein, 344 aa, unidentified
MSKVTIGLDIAKSVFHLVFMNQSGRVLRKKKLRRHQMLSYFSQLEPCIVVMEACGSCHYWCRELTKAGHEVKAIAPQYVVAYRKGNKHDYNDAEAIAEASQREGMRFVPFKSQDQQDIQLMHRIRERMIAQQTALSNQIRGLLSEYGIVYARGVATLVKELPLTLEEADNGLSMLARRQFQGLLNDLRELREHIKEMDKELKAFSQSQPVCERLMSMTGIGPLIATALYAGIGQGQTFNSGRHLAAWLGVVPKQHTTGDNPRLLGISKRGNTYLRTQIINGARAALRHIGDKTDKVSEWCRACLARMSFNKACVALANKMVRMAWAMLHYQQDYQPGLINKAAA

SEQ ID NO: 505576 - protein, 351 aa, unidentified
MIIIGCDFHTRYQEIAWLDTNTGETQELRLEHAGDQVRKFYAALPGPVRVGIEATGYSQWFERMLRELGQEVWIGDAAEIRASVVRQQKTDQRDAAHVLELLITNRFPRIWVPTPAERDLRQLVLHRVKLVQLRSKVQNQLQAMAMGQGVCRRKKLWSTRGRAELERLPLDRWAHRRRAELLQLLDQLDQSNGELHGAVEQQARQHPEAVLLMTHPGVGPVTSLAFVLTIGPVSRFSRSKKVGSYLGLNPSEHSSGGRQRLGSISKQGNSMMRWLLVEAGQTAARLDPVLGRMYQRLKFRKGSAIAKVAIARKLAVRLYWMLRSRFDYARLVRMSGSSSSAVVPEDSGSGR

SEQ ID NO: 505577 - protein, 379 aa, unidentified
MTQFAVSTTTEQTIYAALELSKNSWLLAIQVAGRDKPSLHPIKGGNAEGLVAKLDAARDRVAKATGQRPNVVLCYEAGYDGFWLARLLDARGIECLVIEPASLQVNRRARRVKTDRIDVESILHALIAWCRGERHVCSLVVIPSVAEEDLRRSHRERDRLVRERTAHINRIKGLLFGQGIRGINVKRYYKSLKPAQLITGDGRPLPERLGREIAREIERLAQVQVQIVESEGERDSAPTPCVATERKRRDLLRLNGIGPALSAILAREVYYRRFANRRQVASYIGLAPSPYDSGEGRRSQGISKAGNGLARYALIQAAWLWLRHQPNSDLTQWFHHRTEGQSKRVRCIMIVALARKLAIALWRYVETGLIPQGATLSAR

SEQ ID NO: 505578 - protein, 351 aa, unidentified
MSSSSISRDYAGKKVFVGIDVHKRTYSIVAICEDAIVKRWSMTADVEACRKSLLKFFPSAVIGSVYEAGFSGYRLHRELCSHGISNIVISPSSVQKSPNDRVKTDTLDAQKMATQLSKGLLRGIEVPTEERELKREVTRLRSQLVEHRVAITLQIKSKLFYYGLTGPEDCRKISEKFIDYLEQLDLKAELKLSFKILVEQWRHVTSQIKEVEKKIREQSRTDEKVTEIYESVPGVGLITARVLANELGDLRLRFKNERELFSYTGLTPSEYSSGDSIRKGSISRCGPSRIRWILTEAAWVCIRSDESMKAAYERLKVRRGAKRAIVAIARKLIGRIRSCFIQGCTYKLQPA

SEQ ID NO: 505579 - protein, 438 aa, unidentified
MSNKVFFNLDELFISVGIDVGADFSWMSIALPNQQFVGKPYKILHNSIDSLTTAVSKIKEAEELYSLESRIFLESTGIYHYPLFCYLRDKGFNCSVINPIITKNSTNINIRKVHNDRFDSKKAALVGLKPDLKVSLMPSDLALNCRNLCREYYDLMDNRSAYVNKLQGELRMAFPQYLGIFSKVTINTSLTLLETYTSPSAFLKADRQEIIDIIKSTARFGITYAQNKYNAIIQAATDANQFGYIIDSNIKRIRLYISFIRKYDEEINSILESLHELVDANEDADFVKQIHLIETFKGAGFLSAVSIMGEIGDFSAFSKPKQLFAYFGLDPAVKQSGKFEGTKVQMSKRGSAIARRVIHTLTLQSISISRNGEAKNPVLREYYLKKCDSKPKLVAMGAVSHKVCNMIFAILRDNKPFKIIAPQEHIKQYNAAKCDIAA

SEQ ID NO: 505580 - protein, 415 aa, unidentified
MKKHNNSPKKSEPTSKRAKSRGPVQRDPKEVLAELLGKLREKLDPRVVAAGAGEEDQRGELRPNFDRLTVGVDLGDQWSHYCILGLEGETLAEGQMRTTPQDVAGFFQALKGARVVLEVGTHSAWVREVICGYGHEVLVANPRLMEGSKRRKRKNDRIDANKLARLGRVDPQSLHPMQHRSAEVRQDLVMLRARDALVAARTELINATRGLVKSMGARLPRCSSPSFARKVEEAVPAEIQEALLPLVRMTAALSDSIQGYDEKIEELASEKYGHTTLLRQVKGVGPITALAYVLTLENPERFVKSRDVGPYLGLVPKQEDSGESQPQLGISKAGDTMVRRLLVGSAQYILGPFGPDTDLRRYGLRLCERGGKNAKKRAAVAVARKLAVLLHRLWVSGEVYEPLRHAMSVPIAAAA

SEQ ID NO: 505581 - protein, 389 aa, unidentified
MLHDHLSDGPAAIRTQFGAIFVSLELSRSNWLVTSLSPGKGEKMSKHSITAGDVAGLLKLFADLKRKALARTGQSYPIITIQEAGLDGFWLHRALQQEGIESHVVDPASIATPRRRRRAKTDRLDGETLLRALLAYKRGEPRVCAMVVAPSPEEEDRRRLCRERRTLIDERIAHVNRIKGLLFAQGISGYAPLRRDRRARLEALRTGDGRALPSYLKTQISRELDRLELLLDQIKAVEAEQDALLAAAGKGAGEQAAPDPVTMLLALKGMGANFTAVLWSEAFYRQFSNRRQLAAYAGLAPTPWRSGSIEQEQGVSKAGNPRLRSTMIQLAWLWLRHQGQSALARWFKAHSQRGRKTAIVALARKLLVALWKYVTAGVVIEGAVMKSAA

SEQ ID NO: 505582 - protein, 387 aa, unidentified
MFSVGIDVAKRSHQACVLNDSGQMVGHPFKFPNSRSGIDTLVGTLQELDSPATIALEASAHYWQGLYHYLVSQGFPVVVVNPLQTEAYRSTGVRKVKNDRRDAFVIADFLRIGRAQPNYVPGEVTMQLRELTRYRMDLEDRIGDAKRRILTMLDRVFPEYPGLFTDAFIASSRTLLKEAVSAADFARFDLAELTSILRQASRGKLGEEKAQEIQEKARESLGMAFLAPVARVKVGTLLEQIDLLKRQIREVETAITELMEQQPQYLTTIKGIGPVLAATLLAEIGDIQRFSSLESLVAYAGIDPSVFESGEFTGRRQRMSKRGSPYLRRALWLAAHSTRQWNTDLNDYFQRKLAEGKPYKVALGALCRKILARVYVVLKENRPYQVR

SEQ ID NO: 505583 - protein, 401 aa, unidentified
MSDNQKRFMGLDVHKQYVMVGAVNAAQEVVLPPRKVSLIEFEGWASKHLRPTDEVVLEATTNAWYIYDLLEPLVAQVVVCHPPQVKLIAAAFVKTDKKDTMILARLLAVGMIPAVWVPPEHVRDLRALISHRQRLISQQTRLKNRLHSLLHRHHLLPPGGQLFAAVNRPWWLGLSLSSSEKLRLRQDLTLLDQLAPLISEVETELNRLSLADPWVEQTPYLLQLPGIGLITAMTILSAIGQIERFPSAKKLVGYAGLGAKVHSSGQTHRTGGITKQGRKELRHVPIEAAWTAVRYDQHWQAQFDHLAYRIGREKAIVTIARKLLVVIWHVLSAQVADRKAQPQQVARYFIHWGRQLRVKSTMGLKASEFARQMLDRLELGQELERVPYGCVTYCLPPSALA

SEQ ID NO: 505584 - protein, 341 aa, unidentified
MSEVSIIGLDIAKHVFQAHGVDASGHAILRKKISRSKLLPFFAAHPRCLVVLEACGGAHHWARELLKLGHDVRLIAPAYVKPFVKRQKNDAADAEAICEAAQRPSMRFVPVKTEEQQAAAMVFRGRDLLVRQRTQISNALRGHMTEYGWIAPKGLAHLEKLRALLADPLAVPAGVRSVCMVLLDNLAMLDRQIALLDKEIMRRSREDAVARRLMTIPGIGPITATAITALAPPLGTFAKGRDFAAWVGLTPRQHSTGGKQKLGSISKMGERTLRRLLIIGSSAVVLQASKRGAPKGSWLEQMLARKPRMLVTAALANKTARIVWALLMKDEVYQAPAAAAA

SEQ ID NO: 505585 - protein, 323 aa, unidentified
MSIFVGVDVAKRSFDIATTLPNGKKRTKAKLPNDSGGFAQFSDWLERHAEPGTWIVMEATGTYHEALAEHCHTQGYRVCILNPAVIAKFADVELRRVKTDKADAKVIAAYSQQNAASLRQWEPEPPAQRRLRALVRRLDDLKEMRQMEQNRLDAARDAVQQSIRDIIGHITEELEKTKKAIEQTIDDDPDLRNRRDLITSIDGLGETTAALLLAELGDPLKYQSPSAIVAFSGLNPVVQQSGEFTGQSSISRTGSSRLRAGLWMSGAVSIKHNPVVKALAERLSSRHKAYKQIVCAAMRKLLHLVYGVVKSGKPFDPQIALAR

SEQ ID NO: 505586 - protein, 399 aa, unidentified
MDRNRTVAGLDVHKDSIYLCIMSHDEAIIFEKTYGVLTPDLRQMCQDMVDRGVTEAAMESTAVYWVPVWNELCDSMELKLVNPYFIKQLPGRKSDVKDAQWTAECLLKNLIRGSFVPDPIVQDMRKLNRRIFDLQEDITYHTNKLDAALQRCGFRLSNYVCKITGKSYRKAVASIAEGETDPETILKCIHGRVVNRHGRDTLLAAVTASFSQTDITVIRQYWELIAIYIRQSEECQSQLTALCESNFPTEYKRLQTIPGVKERAATAIIAETGVDMKMFATAAALVGWCGLKPRNDVSNGRYKSRKITHGNKYLRKILIEISWTASRTRNCFFSNFSYIQVTQKHKSKMKIQVAIARKILVAVWHMLSKGEDFIDIYLKRLEEQRLMEDKLKSLELKMA

SEQ ID NO: 505587 - protein, 366 aa, unidentified
MKKISTVEVFGNEILTGQKLTIGLDLGDRWSFYCVLDEAGKILLEQKVATTPEAMKQTFGKIPRSLIALETGTHSPWVSRLLTELRHELIVAHAQKVELITKSNRKDDRHDARTLARLARIDPQLLGPVRHRSAKAQIHLTVIRARPELVSARTALVNAARGLVKSYGQRLPKCGTQQVSRELGAGLPAELREVLEPLLKEVESLNERIQEYDERMEKIAKEVYPEVSLLKQVKGVGTQISLTYVLTIEDPYRFPKSRAVGCFLGLRPGRRNSGESEPQKGISKEGDRYLRTMMVQGAHYILGPFGEDSDLRRWGLKLAERGGKNAKKRAVVAVARKLAVLLHRLWVSGEVYEPLRNSQKAMRAVA

SEQ ID NO: 505588 - protein, 359 aa, unidentified
MLKYSMGLDISAKTIYACISIIDAAQKVTVKSSCKIDNTLSGFKQLDQWANKHRKLKDIPLVVNMEATGVYYENCALYLFKQDYSVSVLLPNKAKKWLQSEGLKSKNDKIDAQGLSKMGAEKALELWQPAAEYYYQLRAMTRQQQSLQEFKTAVNNQLHAEEHGMYKNKMVIRQLKQQIKFIEKQIADLETAIEAHIAADEEVAAKVENICKIKGLGILTVAVIIAETNGFALFKNGPQLVSYAGYDVIENQSGDRKGKTKISKKGNSRIRRILHMPAFNMVRYNQTPFVDLYKRTFEKHGLKMKSYVAIQKKLLVLIYALWKNNTAYNIEHKNKYTRELEQELPLGLASIEARFENAV

SEQ ID NO: 505589 - protein, 335 aa, unidentified
MQIVTIGLDIAKNVFQLHGVDAAGDVVLRRKLRRSEVRVFFSRLTPCLIGIEACATSHYWARELVSLGHSVRLIPPSYVKPYVRRGKNDAADAAAICEAVARPTMRFVPVKTIDQQAVLVLHRSRDLLVKQRTMLINALRCHLAEFGIVAAQKRTGLAELVACVEEGVDDDFPELLRRGLKPLIHQLKQIQAQILQLEKEIETWHRSNSISCRLATIPGVGPIIASAIAATMLDPAHFRSGREFAAWLGLVPRQNSSGGKERLGRISRQGNRYVRRLLVIGATAILRHDRHRTSGNGWMRALLERKPARLVTVALANKMARTAWALLARNADYRV

SEQ ID NO: 505590 - protein, 319 aa, unidentified
MQTILNNCCGLDVHKDSVVACLIKSRTPLALSSSQEDVIKEMRVFKTFLDDLIQLRVWLEAEGCCHVAMESTGVYWFPVYDALESACGGKMELLVTNARHMRNVPGKKTDIKDAEWIATLLRAGLLRGSFIPPLNVRELRQVTRYRKNVVEDISTQKNRIEKTLQQAGFKLSTFLSDIFGVSGRNLIRVLIQKGKLTPIDVENETKRISQEKKNEIKLAINGSLSERQRQFLQLQITMLDDLLGHLTVIEQSIAELSKPFMNEIDRLDTIPGIAITAAASIIAEIGVDMNKFPTAEHFCSWAGVAPGDNQSAGKKKYPS

SEQ ID NO: 505591 - protein, 346 aa, unidentified
MQAVTTIGLDIAKSVFQVHGVDATGKVIIRRQLKRHYVLAFFQKLSPCLVGIEACATSHHWSRELKAIGHAVRLMPPAYVKPYVKRQKNDAADAEAICEAVTRANMRFVATKTPEQQSCLMLHRTRHLFIRQQTAVINAIRAHLAEFGIVARVGRTGVEELLDVVADSAGSDDRRLPEVARVCIAALGVQLRMLKSQILEFDCRIMAWHRSNETSKRLDEIPGVGPALATALVASVADPKAFRSARHFSAWIGLVPKQHSSGGKDRLGSISKQGDRYLRSLFTAGALAVIRYAKIHGTKHRPWLTAMLARRPTKVAAIALANKIARMAWAMMAKGERYREPAALAA

SEQ ID NO: 505592 - protein, 337 aa, unidentified
MEREYVAIDLHARRSLIVRQNENGEEVSAVRIDNDPVALSLAVAEAGPNPEVAIEATYGWYWAVDALQAQGANVHLVHPSGLRWDDRRVKNDYRDCCEMLKRLRLDELPEAWIAPVGLRGLREMVRTRAKLVALRSGLKVQVHAVLAKHGIYPPVADLWGLSGSEWLDAVDLPAPYAFKVHGLLELIDTFGPQIDDYDHIIADWLRGDVGYHAIQHLNGVGPIMAAIFVAEIGDVHRFPNPEKLCSWAGLTPRLRESDTKTRMGHITKQGSVLVRWAAVEAVSHVRGTAKIKRDYQRIADRRGKRIAKVAAARRLLTLVYYGLRDGEIRSLTKANTG

SEQ ID NO: 505593 - protein, 374 aa, unidentified
MTSTPEQAPAALAVIGGVDTHKHTHYAAAVDDQGRLLGHQEFPASDPGYRQLLNWLRSHGQVQAIGVESTGSFGATLTRALTAAGERVIEVNRPNRIARHMDGKSDRLDAEQIARAVLGQTSTAVPKAKSGMVEVIRTLRVTRASAVKTRTNTFNTLCGVMIGAPSPLRDELVVLAKRTLVNRCLRLRPETEDLLSLAHEPDRMLMAGVKTALRDLARRWKALDAEIKALNNQIHALVTTAAPELVELHGVGVEIAGQMLVTVGDNTGRIRSEAAFAKLCGVAPQPASSGRTSGRHRLSRGGDRAANSALYIVTIVRMRHHQPTRDYVERRTAEGLSKREIIRCLKRYIAREVFNNLPRSNTVEPVLDVVQTAA

SEQ ID NO: 505594 - protein, 368 aa, unidentified
MGHKSSKLYVGMDVHKESIDLAVAEEGGELRHHGQIGGDMNALWRAVRKLESSGRELVFVYEAGPCGFGIYRGLAARGHVCWVVAPSNTPRRVRDRIKTDRRDSLKLAGLARAGELTPIYVPDVRDEAMRDLVRSREDAVVMQRQARQRLAALLLRNDVRYAGKTGWTAAHRRWLAELRLPQSAQRLAFEEYVQAVEEASARVQRLSQCIEQELAHWRWRSVVVALQACRGIQLIHAVRIVAELGDLSRFRHPRQLMGYLGLIPGEDSSGEHRHQGAITKAGNSSARRALVEAAWAYQFSAKVSALIARRQTDVPKAVLDIAWKAQVRLCARFRRLAARGVNRNKIVVAIARELAGFVWAIARQVKPV

SEQ ID NO: 505595 - protein, 394 aa, unidentified
MGKMYVGIDIAKDRSVAHGIEEGGRSLFELTFDMDGDGFAALLKAIEANSGTPGDVVAAMESTACYHINLYSFLSAKGIEAIIINPLLIANYAKLSLRRTKTDKKDAKTIAQFILAHRDSVTQLAISQDTQDMRDMARERESLCHQISAAKTEIQRVLQTTFPELAAMTNPLTKVMLHFIQRFPSARLVSIAKPSAIEKTLKEKPCSCRLRFTPKELIEAARTSIATVSPAKELILSGKIETLVHLQKRRDELTKALTKYCESTIVEDLRIVTSISGINNIMATALLAEIGQISNYLSHKHLIAFAGIDPTVYQSGKYEGASRISKRGNRHLRRVIWLMTISVIHHNSVFKNYFLKRRTEGQPFKKAVFATAHKLMRVIFAMLSKKTSFVAECV

SEQ ID NO: 505596 - protein, 366 aa, unidentified
MEKIYIGVDFHARQQTICYLKTETGELVIAELKHQDKEQVRAFYQQFQGPVIVGLEASGYSPWFEALLEQLGGEVWLGHATEIRRRARWRQKNDRRDAELIWDLMVHDEFPRLHRPAVQSREVLRMLRYRQKLIKLRTMTKNSLQAIALQAGLAKGKQLFTRAGQEEFQVVAMSPVLHWQREHWLALLQPFNQQLLETMVWFKAQSKDDVGIQRLRTHPGIGLLTSLCLLHTLQPVSRFRNARKVAAYAGFDPVERSSAERQHFLGISKAGSRLLRYLLVEAVQTAVRYDEDLKRFYQRLAARRGRPKAKVAAARKLLIRAYIMMRDEIDYAEFRRRAVAVRLARTGHGPTNVPAVLIGQPASPGA

SEQ ID NO: 505597 - protein, 475 aa, unidentified
MICLVAASGDQGGSTPLERLVNQSAPGPSLPHFHQEQAMRRKKKNANKSINLQVLPLVHPNAAGIDVGAKEHVVAVPCDRDPKPVRTFQAFTPDLHELAAWLKRCGIETVALESTGIYWISLYEVLEQYGFEIRVVNARHVKHVPGRTKTDVLDCQWIQKLHSFGLLNGSFRPDPQIRKLRTYMRLRDNLVVASSQAVHHMQKALFEMNVQLSNVISDIVGETGLRIAEAIIAGQRDPMQLAALCSTRIKASRETVAKSLHGNWEEALLFALKAALETYRFIQTKIQECDCCIQQHLAQFESRAEAINSPQDLKAQLHRVCGVDLTKIPSIKEQSAQIIISEVGLDMTQWKTEKQFCSFLGLCPDNSISGGKVLHRATRKVYNRAADTLRLCAQSLTHSKSALGAKYRRLRARLGAPKAIVAMAHHLARLVYRMLRYGQNYVEQGIHQYELKFQLQRVKWLRKEAKSLNLQLVPA

SEQ ID NO: 505598 - protein, 387 aa, unidentified
MSQPNDLSRSLVPFEQEATLVAVIELSQSSWLIAGTVPGIERQPLKKIMPDETALLRLLHRWRDEAGQGGRAIARMAVAFEAGRDGFWLARWLAKHGVEVHVIHATSVAISREHKRAKTDRLDTAMLMRVFLGWLRGERGHCGMVAVPTIEEEDAKRPSRERESLVGERTRVVNRMKAALARLGIRGFKPELRKAPQRLDALRTPEETPIPPNMLDEMRRDLARLGVLREQIAEIEQARLQRLEQAPPTGPNAMVRLLASVVGVGVETADMLVQEVLSRNLRDRRAVARYAGLTGSPDESGSKRREKGLAKSGNARVRRGLIQLAWRFLLFQKDSALAQWFQSRTEGVRGARKTKMIVALARKLLIALWRMVTFGEVPQGVVLRQPA

SEQ ID NO: 505599 - protein, 358 aa, unidentified
MTGSSDYESVQVFIGVDVGKDTHHAVAVNRSGKRLFDKALPNDENKLRSLISDLKQHGQILLVVDQPATIGALPVAVARSEGVFVGYLPGLSMRRIADLHAGEAKTDARDAAIIAEVGCELSMICGFDDDLAAQATQASNRIRGLLTQIHPALERVLGPWLDHSAVLDLLQRYPSPEKLASQGEKRLASQLCKLAPRLGKRLAADITQALAEQTVVVPGTNAAVVVLPRLALQLITLRKQRDEVAMEVEQRVLTHPLYPVLTSMPGVGVRTAARLLTEVACRAFASTAHLAAYAGLAPVTRRSGSSIRGERPSRRGNKTLKRALFLSTRPDIQGLLHTQNEPGKATQPGAYRPGKAAL

SEQ ID NO: 505600 - protein, 346 aa, unidentified
MEISTIGLDLAKNVFQVHGISATGEVVLRKALRRSQMLPFFQKLPPCLIGAEACGTSHHWARELTRLGHEVRLMPAAYVKPYVKRGKNDAADAEAICEAVTRQTMRFVPIKSREQQAALSLHRVRSLLIKQRTQLVNMMRSVLAEMGIAIPVGIVKALQMAREIVNGEAELDLPAEATNVVALLAEQLLQLHTQLRKLDLRLATLQRSDDRAKRLATIPGIGPIGATALAASVTDPGQFSSGRQFAAWLGLTPRQSSSGGKDRLGRITKMGDRYLRQLLVIGATALVRYAREKPGTVDPRFVALLARKPARVASVAIANKMARIAWALMARGGVFERGHAPMLAAA

SEQ ID NO: 505601 - protein, 358 aa, unidentified
MRIIGVDLHTRQQAVAMLDTETGELIEKTLKHDGDEVREFYSALPGQVLVGIEATGSMHWFLELLEELGIDHQVGHPSEIRKAETRKQKHDRRDAALLLKLQVENRFPAIWMPSTELRDLRTLLMHRHQWVRMRTRVQNALQAIALGHGLRRGKTLWSQLGQHTIESLPLAPHAAHRRTQLLALYGELQAQIDELDEQVMDHAQQRPGAKLLMSHPGVGPVTALATEVFLGDPARFADGKAVVSYVGMIPSEYSSGGQQRLGGLSKQGNPFLRFLWCEAAVHAVRRDPELQRFYRRKLAQKGLGKARVAAARKLGIRLWIMLRDQIDYQEFCRRGQLRQKNGGACAGMPEVGHSPAMQ

SEQ ID NO: 505602 - protein, 447 aa, unidentified
MKRKQEPRQALSVVYPDSAGIDVGSREHFVCVPADRDAQPIRPFAAFTEDLFALGKWLKSCGIRQVAMEATGVYWIPLFEVLERMGFEVVLVNGRQTKRPAARKSDVLDCQWIQQMMMFGLLSGSFRPADALCAIRAVVRLRARLIRDGQRAVQQMDKALVQMNVQLGRLLADLAGKSGQAIIRAIVRGERDGATLAALCDRRVRSSPEVIARSLVGNWRDEHLLELKQAVATFDLIQAHIAECDSTIAQAVAALQRLPDPPPEARSRSRKTKRHTAAQHSSLRTALFQAMGVDLTAIPTIEVDTALVIFTEVGPDLSRFPTSEHFCAWLNLAPGTRISGGKRLGRAPMPAINRVGEALKRAAVNARSSPTFIGAAHRARLSRMTKACAVKATAHQLARLIYAMVTQGKAYVEYGIDRYESEHREKQLRQLRRKAAQFGLALVEKAA

SEQ ID NO: 505603 - protein, 406 aa, unidentified
MNGPVITVDVSKGSCHFQPYIENGKPMCKPKVLKDTIEGFDNLAKTMGKLMERSSSSTVSVVFEATGVYHRCLQKYLDDNKIPYYIISPLMSAAYRKTNINSNKTDDLDCGHIAKCFYGEQNLRVYKKQANIYEELRHTNRYYESELNFLRQRKTSFRALLDIIYPLIDKCFKGHSSLYDEVPMTVLKLYPHPKLLLRHKEETIVNRVTSKVNHDKKFVEKIVSLMYEGASRCYSGCDEDDKEVNRLKETIISLKEQVAKCDEILKELIEQARKAPYFKYVVSITGVGLNLASRIVAEIGDITRFENRKAITAYAGLNPKIRQSGDIDGTHLAISKKGNRHLRCLLYLGATCNYRLKKHDPLYEFNQKKRQQSTNPLKKKAANIATAHKLLVIIYALSKNNQEYNS

SEQ ID NO: 505604 - protein, 333 aa, unidentified
MKANKWIGVDIHKKQITVCILRGKEKENKVYERTLEGIKEFLKEVDNETIIGVESTTWTRDFAIKCLDKAKDVIIFNTIELSKIMSKVKKTDKIDAGCIALILKRFDKEELSKCMIKSKEYAEIKGLLKIRESLVEKKRRTKNEIISMLDYWGCYREERFRFNEKDKKWIETQKDLPESIKKEILKLIELIEIYENQIKEIEMELNKLLEKDKKYKKLLEIKGIGRITGAYVVSKIENINRFTNSKKLVSYFGLAPRVSISDGKGCNGRITKNTDKDLLRVLVQSAWIMIRYNREMLMFYNRLKSRTCKQKAIIAVARKIVIMIFYVLKQAEA

SEQ ID NO: 505605 - protein, 359 aa, unidentified
MAVIEKRERRIVGGVDTHKDLHVAAVVDDQDRVIGTQSFATTRQGYRQMLAWMRSLGDLQRIGVESTGSYGAGLLRFMQQAGIAVLEVTTPDKQDRRRRGKNDDLDAQNAAHAAFAGRRTVTPRSRDGMTESLRVLMACRKTAVTARRVALQMIHNTIVCAPDGLRDQLRSMTRMQLIRTLASWRPDLTAYRDVESAYRIGLKSLARRYLELHDEIADLDAMIVAIVDELAPNLVARNSIGHTGAAQLLLTAGDNPERLRSEASFASLCGVSPVPASSGKTVRHRLNRGGDRAANSALHIIAIGRLRTEQKTKDYVARRLAEGHSKLDAIRALKRYLAREVFTLITQRRKEINATQIAA

SEQ ID NO: 505606 - protein, 345 aa, unidentified
MRSMYYIGLDVHKKTISYCVKDGSGQIHSQGAIPATRLDLDRWMKTLPQPWTAAMEATIFTAWIYDHLLPHAAALKVAYPLMLRAIAAAKKKNDRIDAHKIADCLRCDFLPECYMASTEIRKRRRTLRYRNLLVRQAVQMKNKIAGLLMEAGVSYNKQKLHKVGYFCELLATNKDIDDGLRPLLRLCRETLVRLGKTESALVRSLGRDPLLVERVERLMTIPAVGPITALTWVLGVGDVRRFSSIKKAISYCGLCGAEKSSAEAIKRTPLSKQRNKHLQSVLIEAAKLAPRRSPDLALVYDQEKQKGNANRATLAVARKLVAYLVAVDRRQKEFLPVQRENRTAA

SEQ ID NO: 505607 - protein, 347 aa, unidentified
MDQQSLYVGLDVSLETTSICVIDDAGTIIWRGKCSSDPDTITVIVRRHAPGAVRVGLETGQLSNWLTLSLRRRGVPVVCIDARHAKAALSLQINKTDANDAFGLAQVVRTGWYREVAVKSMDAHTLRMLLVARSRLVSQRQATANTIRGLLKTFGLVVVRGSKGLFPVRVREQIAGNPALIAIIEPLLAVWYAIRDQVRMLDQQVLARARNDQVARRLMTIPGVGVVTALAYTAVIDDPARFRRSASVGAYLGLTPRRYQSGEIDATGHISKCGDSLLRGYLYEAAAVLLYRDGRTSVLKSWGLGLAKRIGMRRAKVAVARKLAVIMHRIWSDHSEYRWTATRPITA

SEQ ID NO: 505608 - protein, 422 aa, unidentified
MLAESHDDEQIIARVAALDIAKAELVCCVRVPASAGGKRRLQEVTTHSTMTQALTELANRLVEIGVQRVVMEATSSYWKPVFYLLEAHGLDPWLVNARDVKHLPGRPKTDVLDAVWLCKVAERQMLRPSFVPPWPIRRLRDLTRYRTDLVSARTSEKNRVEKLLEDACIKLSVVASDIFGVSGRAMLAALVAGERDPKVLAQLARARMRGKIDRLEQAFDGHFADHHRFLLSRMLARIEGLDVDIAAVDAQIDVQLAPFAEAAARLDEIPGIGAVAAAAIIAEIGVDMSRFATAGHLCSWAKFAPGINSSAGKSQGSASSGHGNPYLARVLGEAAVGTTKTDTFLAARYRRIARRRGQPRAVVAIGRSILVIIWHLLKDPDARYHDLGADHYTRHVDPTAKKRSHIRQLEALGYTVTLTPAA

SEQ ID NO: 505609 - protein, 390 aa, unidentified
MIDDITHVALDAHKKEHKVAMLLPGRDEPEEWTVANERREIRRMVRRVKKRAAGPVRFCYEAGVCGFALQRQIEAEGAACMVVAPSLIPVKPGDRVKTDRRDARKLAKLSRAGMLTEVHPPTEPEESVRDLCRCREGAQRDLTRIRHQLSKFLLRRGLIYAEGKQWTQKHVRWFGALEFEHPQAQRVFTDYVQELDRRAERVRGLEQALTEVAEEPAYKERVGWLCCLKGVKTITAMTILSELHGFERFGSARGLMSYLGLAPSESSSGETRRQGGITKAGNGRVRRVLIESGWHQGRSAVTSQALRRRRAEQPAWAVGIAERAQRRLYRRYWGLVRKGKSPQKAVTAVARELAGFIWSMLCGRHATQPEEAAAARAAPEKVSSEQHSTN

SEQ ID NO: 505610 - protein, 349 aa, unidentified
MLADQVDHVVGVDTHRDEHVLAVVVAPSGAVVAQRSVRASARGYAQALRFVEQYSNGRRVWAVEGVGHYGAGLARHLSGHGETVLEIGRGPRDEQRLRGKDDQLDAIRAARTALASRTLTLPRAGERREALRLLLLARRSAVDVRRDALVQLRSVIVTCPDRLREQLRQLPAGRLVVRCSRFRRSSACTLDELASRLVLRSLARRVEAATVEAAELEREIHAHVRALAPGLLEEAGVGPIVAAQLIVTWSHHGRVRSEAAFARLAGVAPIPASSGQTIRHRLSRGGDRQLNCALHTVILHRRQHDPTTKDYIARRVAEGKTTRDAVRSLKRYLARHLYRVLDSQAPHMA

SEQ ID NO: 505611 - protein, 411 aa, unidentified
MEKVYDKCCGIDVHKKLIVACFRNGNKQEVRDFGATTRELLELADWLKEGGCEMVAMESTASYWKPLYNILESSDLNAMVVNAHHMKAVPGRKTDVKDAEWIADLLQHGLLQPSYIPAKDQRELRELVRYRKSLVGERGRELNRLQKMLEGANIKLSGTVSDINGKSARSILEYLITGASIDSEKYDEMYEQKVIAHNLKASKDQIIDDLNGVMTPLQRRMMKELLIHLDELNAHIKNLDDEIDNFMKPDEKKAVAVIEDVTGIGHTSAQAIISVIGTDMSRFPTDAHIASWAGLCPGNNESAGKRKSGKTMKGNALLRSTLVTCAHAATRNRGSYFYAQFTRISAHRGKKRAYVAVAHSMLVAIYHILKDGVVFKDLGADYYNQFNKERKINAYLKKLKALGWEASVVAA

SEQ ID NO: 505612 - protein, 341 aa, unidentified
MTEVSTIGLDLAKNVFQAHAASASGAILFRKKLRRDQVLAFFAAQPRCLVAMEACASAHYWAREIAKLGHEVRLIAPTYVKPFVKRQKNNAADAEAICEAAQRPTMRFVAVKSEAKQASAVVFRTRDLLVGQRTQIINAIRGHLAEYGLIAPQGPSHVDQLIAQIEDPSSGIPDPARSCLAVLVETLRALQGKIAALDTEIAARAKRDDGARRLMSIPGIGPLIATAIEALAPPVETFRSGRDFAAWVGLTPLQRSTGAQERLGKISRMGERTLRRLLIIGASGVVRWARRKGAPAGSWLARMLARKPPMLVIVALANKMARIAWALIAKGGSYRAPAVAA

SEQ ID NO: 505613 - protein, 357 aa, unidentified
MTSNKKYIGMDVHKESISIAVMNSTGKFVMECVIETKASMLLQFIAGLRGDVRVTFEEGTWAAWLYDLLKPHVSEVVVCNPRKNALLKNGSKSDRIDARKLAELLRGNQLKPVYHGEQGLRTLKELARSYLTISKDVTRVMNRLKALYRSWGIACAGTHVYAPRHRSEWLGRISEAGVRRRAEHCYRQLDVLRLLRQQIRRDLLLESKKHQAWRLLGLIPGIGPIRAALLIALIQTPHRFRTKRQLWTYSGLGLETHDSAQYRVVEGQLQRSKKPVTLRGLNQDHNHDLKDIFKGAATRVSSSSHGPLHDFYEHLLAQGRKPTMARLTLARKIAAITLIVWKKEVHFDASYLTSQAA

SEQ ID NO: 505614 - protein, 366 aa, unidentified
MDYFAGLDVSVKATSVCIVDDTGKVVREVKVTSEPEALLSVLKNPAYHFKRIGLEAGPLSQWLFSGLAEAELPVVCVETRHMQAVLKAQINKTDRNDERGMAQMMRVGLYRPVHVKTLRSQKLRMLLTHRKLLQSKAIAIENDLRGTLRNFGLKVGMVGKVRFEARIEELVENFPDLAELVEPLLIVRRALREQTVILHRRLLAIVRDDEVCRRLMTTPGVGPVVALTYRATVDVPARFRKSKSVGAVFGLTCSKYQSGEIDWSGRISRCGDEMMRVMLYEAAQSLLRSKKWSWLKAWAMQIARRRGMKKAIVALARRLAVIMHRIYGPAVRCKGIRTEWSLWSALIYPASRGSLCSGPSWLSAHT

SEQ ID NO: 505615 - protein, 364 aa, unidentified
MKEKKKAVTRYVGIDLGKRTYQIAIVERGRVQKSNGRTCVSGRQLLYKKLCRNDKVALEAGNLAFLIAKELEAVVGCHVYVLNPSHLPLIYGSMKKTDKEDSLKLAHILEDFQEDRLPVVPVPSDKEMNRRKLLGGYRRAQQSRSRDINKLHALFLAQGITTIRRQDLSTCEQRKESIKALNCFELEEAKYLITCLELHEQRIETMFRQIKKESSGDEVIQRLQSVPGVGPMVAFAFVAHVAPDRFDGPGQVSNYLGLVPRVYMSGDTVRYGRITKRGNGYLRALLVQAAWALIRTKQGGKLKERFLYMTIENSKNKKKAIVAIARRIAELLYILMRDGTGYESRPFIREKKPVEEFVQLAISA

SEQ ID NO: 505616 - protein, 447 aa, unidentified
MAQGNGLTRGDRNRNRKLGELRAVVRADRAVLAIDLGEDKQVAVVMDHDNRVLARTTVRAKAHRLGGLVEWGEKVAGKQGFAGLVVACEPTGHRWMALMALAESRGHGFVGVQPLAVHRARESDDYTYAKTDHRDSYLIGKLAARLECYLPEQATEEWAQLRHLGARRAELITAVTGYRQQAGDLLGCAWPAALDVARRPLESVTWQAAMMVVLSRCGGHPGRLRRMGYEKFLAAVRRELPRWGGQKLCHAIVKGLWDALADPAGVTAQRPGALERLHMVLEDWLALRARLAGTEKRMLEVLDSLGLTELAGSIDGVSPLSAAVILAESGDPSRFSSGRALVKHAGLNPSEHSSATMTGQSRISRRGRPGLRTAAWRAVWAGLRHNTVLQAKYRHLTTREESRLAAGQARVACAAAILRWLRAVITAGTAWDPAIAAGHAAPEAIAA

SEQ ID NO: 505617 - protein, 348 aa, unidentified
MNILAMDLGKNKTVVCFYDSNNCKHKYDKAVTSPSSIHDIIVKYSPDRVVFEVCSAAGWVRDIASALGIAVQVANTNHEAWRWKNVKNKNDRSDALKLAQLSAMNQLPVVHIPKRPVRQKRTLIQYRHGLVKRRTQIKNNIRAILDKEGCKMADRRSGWSVGSIKRLTEMSLHLEECGIDNLWRGQLKVELEMLDAVERCIAQVEKKLDALGENDKDVQLLQTVCGIGPRLAEVIAAFIDEPQRFKSGKQVGCYAGLTPRRYQSSDTDRQGKISGAGNKVLRSLLVEVSWLGLRHNKWMNETYHRVLRGSVSRKKIAITAVARKLLVRCWAMLRDGRTWSDSAVKQAA

SEQ ID NO: 505618 - protein, 318 aa, unidentified
MDHEQIFVGIDVSKKHLDINIRPGDDSFRVSNDDPSIADLVRRLADLNPQLILLEASGGYEMLVAAALRQAGLLGQIINPRQVREFARSTGKLAKTDKIDARVLAQFAHLLQPPLRPWPEAQQQELSALMTRRRQLVEMVVMEKNRLGTAWAPKVRKSLQAHLQVLQEQLQELEQDLNDFIRRSPMYVEKDQLLQSVPGVGALTSQSLIAWLPELGTLNRKQIAALVGVAPFNRDSGQMRGRRTVWGGRKQVRPALYMATLSACRCNPAIQAFYQRLLHAGKRKKVAITACMRKLLTILNAVLKYRKPWTYTPVFLDN

SEQ ID NO: 505619 - protein, 412 aa, unidentified
MAMEALVERCAGLDVHQASVVCCVLVGPPGCRPRKLLRTFGTTTHELGKLRAWLAEQGVTHVGMESTGIYWKPVYAALEGHFDLTVGNAHHIKNVPGRKTDVKDAEWIARLVRHGLIGKSFVPPPPIRDLRELVRFRRALVEARTAERNRLLKLLEGAGVKLAGVASDVFGVSGTAMLKALAEGAAEPAAMADLARGRMRRKLEALAAALDGQVREHHRFLIAVQLRRLEAIARDLGELDARIEAQLEPFRAQHRLLMQIPGVDRVVAAGIIAEVGVDMDVFATAQRLAAWAGVAPGNHESAGRRKGAATRKGNVFLEATLFAAASAAVKTKGSYYRDKYHRLRARRGPVRALVAVAHKLLIAAFHMLRTGSPFRELGEDFLDRVSRKRSTTKLVRRLAALGYDVLLVPKAA

SEQ ID NO: 505620 - protein, 353 aa, unidentified
MDRITRVGVDLAKNVMQIHAVDSAERVVVRKAIPRERFVSWFANLEPCLIAMEACGAAHYWARKLHALGHEVRLIPPQFVAPYRKGGAHVKNDALDAEAVCEAASRPHMRFVPVKSPAQQSVLVLHRMRTGFVEERTALVNRLRGLLAEFGVFLPQGIRRLHEHLIERIEDGSNELTGPARLALLRGCEQWQVLDEQIAWFDRQIAEHANRDPQAQRCMDVCGVGRLTASAAVATVVDARQFRNGRQMAAWLGIVPKQKSSGGKQRLGSITRQGNDYLRTLLFQGARSAVLTAHRRGDRLSRWIVQLQARVGYYKTLVAVANKHARILWAVLAKGERFDPSYAPARTGGATGA

SEQ ID NO: 505621 - protein, 343 aa, unidentified
MKVTTIGFDLAKNVFQVHGVDERGYIVVRKQLRRDQVAIFFANLPACLIGMEACGSAHHWARKLQGFGHRVRLISPQFVKPYVKSNKNDAADAEAICEAVARPNMRFVPIKTMEQQAVLSVHRVRQGFVKARTAQANQIRGLLTEFGLVLPQGITNVMRGVPQLIDVATDLPASMRQLIARLLENMKVLDRQVKELEAQIKAWHQGSELSRKLEKIPGVGPLAASALVASIADARSFKNGRQLAAWLGLVPKQDSSGGKAKLLGMSKRGDTYLRTLLIHGARSAIVAAQRKGKPNVWLSELLTRRHPNVAAVALANKNARTIWALLAHEREFRPDYVPRPAIA

SEQ ID NO: 505622 - protein, 355 aa, unidentified
MSQEKYIGMDVHQATISVAVRDSAGKLIMECILETKAATILEFIAGLRGSLSVTFEEGTSAAWLHDLLKPHVSHLVVCDPRRNALLKDGSKSDRIDARKLSELLHGNQLHAVYHGEHGLRTLKELGRSYLTITKDLTRVMSRIKALYRSWAIPCSGTTVYAPRHRVEWLAKILEPGVRLRAERLYQQLDLLQPVRQEARRHLLLESHKHPAVKLLQQIPSIGPIRAALLVALLQTPHRFRTKRQLWAYSGFAVETHDSGEYRLVRGKLVRNRERITVRGLNPNHNHDLKNLFKGAAISASARPGPLCDFYGALVEKGMRPTLARLTLARKIATITLTLWKKGVQFDAKQLNRQAA

SEQ ID NO: 505623 - protein, 318 aa, unidentified
MGSFVGIDISKETFHAALISDRAEAKKVFPNTQGGFEQLAAWLRNRRARDVSICMEATGAYSESLAYYLHDHGMRVSVVNPARIKAFAQSELLRTKTDAVDAALIARFCKSQTPEPWAPPPLEIRALQALIRHYEHLKTTRVQQSAYEQSSEVPVVKASIQQIIAALDDQIAQVERQIRKHFDDHPDLKRKRDLLTSIPGIGEATAGSVLAEIPHLDRFESAKAVAAYAGLSPRHRHSGTSIHGRPRLCKTGNSRLRKALYMPALVALRFNPVLRSFADRLAAVGKHKRLIIGAVMRKLLVLAYGVLRSGKRFDANYA

SEQ ID NO: 505624 - protein, 317 aa, unidentified
MSKAECFVGVDVSKAALDVGVVPELTSWTVRNERQDIPVLIARLRALAPTLVVLEATGGLEIPLVNALAVKAFPVVVVNARQIRDFAKATGRLAKTDRIDAEVIVQFAEAIRPPLRPLKDEQTQRLHALNTRRRQLVAMIRSEQNRLTSAPKWTQKEIQIHLKWLKKALDKMDKDISDLIKGSPIWREKEALLRSFKGIGPVTSATLLAALPELGAIGSKALSALVGVAPLNRDSGQFRGKRSVWGGRDNVRSVLYMATMAAIRFNPVISAFYNRLREGGKPHKVAMTACMRKIIVTLNSMIKNRTRWRPPVSEKCF

SEQ ID NO: 505625 - protein, 372 aa, unidentified
MTSMPEPTPIDRARDEREEVVLGVDTHKDLHVAAVLSGLGALLATRAFPTTAAGYRGLVAWARSFGALRRAGVECTGSYGAALTRHLQAEAIEVVEVNQPDKATRRKRGKTDAIDAEAAARAVLSGRATATAKTSNGPVEAMRVLRMARNSAVNASTKAINQLKAVLVGADPALRDSLAGLGPATLVRRCAELPDPTPGSGLSEVDRAVVFTLRTLAARIMALKAEAYQLHKQLRTLIAAHAPELLERRGIGPDSAAALLIAAGDNPERLCSEGSYAALCGASPVEASSGKTQRLRLNRGGDRQANAALYRITVSRLRWDSRTQDYLRRRLTEGKTRREAIRCLKRYIAREIFTLITPKAATALANQTANAA

SEQ ID NO: 505626 - protein, 340 aa, unidentified
MQITTIGLDIAKNVFQIHGIDAAEKVIVRKQLRRGQVTAFFEALAPCLVGMEACATSHHWARELTKLGHEVRLMPAKDVKAYVKRNKNDAADAEAICEAVRRPTMRFVRIKSAEQQSQLMLHRARDLLMRQRTQVINALRAHSAEFGITAAQGREGIKELLAMVAHEEGSRLPSDAHASLTVLATQLQAVQTMIGSLEKRIVAQHRSNEASKRLETIPGIGVIGATTIAAVVPDPRVFRSGRDFAAWIGIVPRQDSTGGKQKLGPISKQGDQYLRRILIVGAHAVRRARQQPETYPWLTQLLARRPFKVVAVALANKMARIAWALLAKGGTYRAPQLVAA

SEQ ID NO: 505627 - protein, 342 aa, unidentified
MNIPVRIGMDTSKSVFQLHGVDENEVVVVRRQFRRAEMIRYFERLPPVLVAIESCGSSHHWGRLLQSFGHEVKLIPPQYVKAYVKRGKNDAADAEALCEAVTRPSMRFVPVKSKEQQAACMLMTVRERLVSVKSQLSNAFRSYAAEFGIVGPAGRQNVTALIKRVLEDDSLPEMARDLFRLQAEEYAAVEARLAKIEAKLMKWHREDNVSRRLATIPGVGPIGSSMLSMKAPPPETFRSGRNFAAWLGLTPKDHSTGGRQRHGGITKAGDSVLRSTLIVGATALLRHIRKGRHKPTPWLASLLERKPPKLVAVALANKFARIAWRLMISGGVYNRPAAAMPI

SEQ ID NO: 505628 - protein, 456 aa, unidentified
MVVKMNVEGKEHGNYSLLRLVSVGNKNTLTGGVTAMRKKNDNRQVEKRQRITGATLVIGMDIGCEFNAMCLMNKEGTVLGRYPKIYNSRKGFDYFHGIVEGMKKKYGFTDVLIGMEPTGHYWRKIAFFAMDKNHEVRFIRTTALKHQRELDESSSAKNDMRDAYTIGNIVREGKYIDTVIEDGVFRQLRTLAHTRERIQRISTGAKHALKGVLEDYFPELKSIFWSMKAKGLLALLEQCPFPGDVLTIGPDTLTEILAKSTRRKKKAREKALMIYEAARQSVGLKCIGEADRHRAATFLSEIRHSEGQLKEIELQMKTLLQKIPFAEYILSMPGIGVLTCGVFLGELGDPYNFRDPKQIVKYAGYDPKEHDSGQSIGRKIISKKGRWLLRKYLYFMAMRVVHRSPFFKEYYENKQKTMAKKEALCAVVIKLVKVIFALLRDKRTFTEKQRCLKQAA

SEQ ID NO: 505629 - protein, 414 aa, unidentified
MPLTRWVGRAIGLDVHRDFCVVAICEDGKVRSAGRVPSTPDGLGALAESLLATDRVALEVTGSCWEVARVLGPYVDRVIVVSPDDTGISSARAKTDKLDARTLAGLLWKGELDAVWMPDERCQVLRRRLARREQLIRGRTRAKNEIQAVLARRLQPKPGFADLFGVTGRRWLADLELPVEERESVDAGLRQIAFLDAEIAAVDKLIARQALDWPEIRRLMTVSGVNLICAASFLAAIGEPSRFMTSRKLVAYLGLDPKVRQSGEAPARSGRISKRGSANARWALVEAAWSVVKQPGPLRAFYERTRARRGHGKAIVATARKLTVLFWCMLTRSEDYAHQRPALTKKKLRQLELTAGAPARSKKAAGIWSTNRAILHAERALAEQAEVSYKRMVTDQQAGRPSRKVGASATPERA

SEQ ID NO: 505630 - protein, 324 aa, unidentified
MYAALDLHEKSIQCVLKDEDGRVIKESKMGKDEDRILKFLDGTRAKVVMESGYNHQHIYDVLKERGYDVTVAHPLMVKAIAYARVKTDKVDARTLADLLRADMIPEAYVPAGDVREVRDLVRRRHYMVKLRTMLKNKVHAEIATRWIKYDGNVFTEDGKVFLRSLSIDAVDDYLDTIEFLSRKIRELDEKVKKVAESDRYAKLLVTIPGVGWYGALLISSEIADVNRFPDYEHLCSYARLSPGVRQSGDTQHTTKGLGDSMLNWMMVQCTRVHVRRCESSAITRFYQQVSKRRGEKIAIVAAARKLMRAVYIMLKEEQAFRLDG

SEQ ID NO: 505631 - protein, 431 aa, unidentified
MLKINPLSTLYVGIDVSSKSNYVCALDFYKNKYINSSFANNQPGAEELALKILECLKEHPDITTIVAALESTSVYSIHIANYLSSCEELMRFKPYVFVLNPKCTANYKKSYIGLGKSDPIDAFVIADYARAGNIESEPWRGSQFLALKRLTRHRLHLVECMTREKTYLVSNLYLKFSELQMLEGDDQPFCDIYGATSSSVLMEYFSPEEILDSSEEDLIAFLAKKSRNRIKDISKTADLLKKAARDSYRLDKALYEPLNVSIASSFNCIETFKREIKVIDNAIEKEIKGLNPNAFIILQSIDGIDPVFAGGIIAEIGDITAFHSSDALAKYAGLTWKSNQSGDFDGEDTPMIKAGNRYLRYYLGEAANSMRKHNVEYGTYYRKKYNEVPKHQHKRALALTSRKFVRLVYGLLARNQLYSGVSLDTSIKDSN

SEQ ID NO: 505632 - protein, 350 aa, unidentified
MILVGCDFHSRYQQIACVDAETGDLIERRLEHENGEAFEFYRSLTAPARVGVEATRGLQWFARMLNQLGHELIVGDAAKIRTMVVRRQKTDSRDASHLLELLMNDRFPEVWAPSSSENDLRQLLWHRQKLVWIKVSVKNQLHGLAMSQGVCRRSKLWNAEGRKQLANLTLDPWAGRRRDELLRMLDQLEESIEQLSAAVEEAGQDREDVRLLLTHPGVGRIVALAFSLMIGPVDRFPSSKHLVSYLGLNPREHSSGGRQKFGGISKQGNRLMRTLLVEAAQTAARVEPNLRRHYRHLRFRKASAVAKVAIARKLAVRLYWMLRSKTDYAELVRMQGSPGANLVDLHPSIS

SEQ ID NO: 505633 - protein, 326 aa, unidentified
MQGKDASEQEATVKCNAGIDVSKNYLDVHVLPGGQSVRVVNTDDGIRKLKRWFARFDLALVVVEATGKWHRRLQRSLHASGFAAAVVDPYRVRMFAKAQGIFAKTDRLDARVLALFATVMTPTVRPPASEALQNLAELVAARDSAVAEGTALKNQLAATNGKFLQRHLERRIARNAKDVATIEREIMACIKADDGLARRYVILTSIPGFGPVVAATLVACLTELGSCSRTQIAALAGLAPIADDSGKREGVRVIWGGRPTVRRALYLAALSAARFNAALKPFFERLIAKGKPPKAVLIAVARKLVVLANTLISENRAWEPHVPKHA

SEQ ID NO: 505634 - protein, 475 aa, unidentified
MNIKGTKKKNQVITANIFEQQELLKKAEVIREKLTASTWHELETNGKFGKNEKLSFVSDDMLILGCDVGSDTHYVRAIDTRGRELSKSAFPFSNTLEGFQGLMDWATKLAASNDKEQIILGLEPTGHYWFCLATWLIGNGISVVQVNPYAVKQTKEVEDNSQLKDDRKDPKLIANLVKDGNFGMPYLPEKLYADIRRLSMLRDQINEDRIRDLNRLHREMKIYFPEYKDAFGKIDGAFCLEVLKVAPFPEDLVTLGAEGIRQIWHEAKLRGRGYVNATSIFENAKKSIGIQDGTESGKLAVKWFVRRMIESNEQLADIESRLHQMCMEIPYAENILAISGIGENTLSGILAEMGDISRFDDVKEIQKLSGLGLVACSSGKHKGETKISHRGRKRLRYWLFQAAKSAVAHADEFKELHAYYTTRKDNPLKKMQSLIVIACKILRVIFAILTKGMTYDPKKMLRDIVRPNEQSVQVA

SEQ ID NO: 505635 - protein, 484 aa, unidentified
MRPQITNTNVQTFDVHELSFESAGALGFINEYSGLAVAPARLYRLRRTQTRTSLFVTLAPKEVAMKPNTISDFAALVGIDWADAKHDICLQPAPGGLREFRVLPHDSVAIAEWAQALHGRFPGRIAVCLELAKGPLVYALQKYDFLVLFPINPSTLAKYREAFTPSRAKDDPTDAELALDFLACHPERLQPLQPQSAAMRTLDALVRERRQLVDDQGRLTNRLCVALKQYFPQVLAWFPSLDTLLCCAFLTRYSTLKQAQCARRTTLTKFFHEHHLRNPALIATRLAAIKAAQPLTEDPAVVLPNKLLVLALVDELRASLAAIARFDAAIAELAPTLPDYPLFHHLPGAGPVMAPRLLVAFGEDRSRYPDAACLQRYTGIAPVLERSGKQSWVHWRWQCPTFLRQTFVEWAGQTIPHSFWAAAFYRQQRAKGASHHATLRALAFKWLRILHRCWQTRTPYDEAKYLNALQRRGSPLLKTTAPSA

SEQ ID NO: 505636 - protein, 419 aa, unidentified
MSFKIIRKNCCGLDVHKTWIYACIGIADSHDRVEYKQARFSSFTKGLNELCDWLAKYNCTDICMESTGKYWIPVFNILEKHNLWVTLSHPKYTKPQTGNKTDRKDAKWICDLYMCGMVKPSFIPPADIRQLRDLVRYRFKLTCMITGEKNRAHNCLTVSNLKLDDVFSDIFGKSSRSITEQILQHPGEFFDVTPFVDDRCKTPIEEIQAAVDGAISPEQAVKLRQCLEHIDELEKHKSEIEREIFRLSDKYEVALNLIRTVPGFDKNPLTAIQVLSEIGSDMSVFPTAKNLVSWAGCCPRNDKSDRKIKSTRISRAGTYFKPVLVQIANALIKSKKHPEFTNRYRRIKARRGHKKAIIAICRMILTAIWHILTDLKPYTAKGFLEPRPVSKEKVLTASQALNLLKQRGYVIKDEPIFIS

SEQ ID NO: 505637 - protein, 321 aa, unidentified
MTSTTTTAIFVGIDVSKAHLDIAVRPTGEAWQVVNDEEGIAHLVERLQALHPTLLVLEATGGLEVAVTAAVAAVGLPIAVINPRQARAFAQSLGKLAKTDKIDAAILARFADAIRPEVRVLPDEQAQQLQALLTRRRQIVDMLVAEKNRVYLVHTRVRQRLQEHIDWLNEELADLNDQLREKLQESPVWRDKDDLLRSMPGVGPVLSTTLLAELPELGTLNRKKIAALVGVAPFNRDSGWLKGTRAIWGGRASVRTVLYMAVHSARRHNPVIKTFYDRLIQAGKLPKVALVACMRKMLTILNAMVASGKSWQPALAATKSS

SEQ ID NO: 505638 - protein, 311 aa, unidentified
MSAYDVYIGVDVSKEILELSPFDAKSAEVPNTDKGVGVLVRRVKALGRTAMVCCEATGGYEKRLVSACIEAGIPVAVANAKWVRRYAQSKGVLAKTDKIDAGMISEYAEKIRPRLRAGRAAWQEDAKALLARRNDLVSMATQEQNRLGPSPSACVRKYIQEHIRTLKAQVKKIDAELSRLRKDNEPFAAGVKRICGIKGVGKLSAMSLLAFVPELGEVSGNEAAALVGVAPYNDDSGKMRGKRHTACGRSRVRRTLYMAALSASRSNPVLKAVYKRLVANGKTHKVALVALIRKIVNLANRLMADPEFKLA

SEQ ID NO: 505639 - protein, 361 aa, unidentified
MNTGQSNKLDFKGQNIYAGIDVHLKSWSVAVLSEHSVLKKFRQDPSPESLQKFLTTHYPGADYYSVYEAGFCGFWIHEKLTSLGINNIVVNPADVPTMSKEKLRKSDAVDCGKLARELRSGTLKGIYVPDVATLEMRSLIRLRNRIVKDTTREKNRIKSFLRFHGIDIPEEFTVHSVGNWSKRFLAWLREVPLSTEYGRQALDIHVEQFVRLRGMLLEQTRMLRALSRGEVLKEPIRLLTSVPGIGITTAMSLMVEIDDIGRFCGSDALASYIGLIPMCHSSGESQANGNITVRKHAMLRCYIIEAAWIAIRKDPAMTLAYEGYRKRMNAQKAIVKIARKLVNRIFFVLKHKQEYVPCVVN

SEQ ID NO: 505640 - protein, 370 aa, unidentified
MGHCSEIFVGIDVSKARNAIAVADGGRGGEVRFLGEVDAAEESMRRAVKRLTAKGERAHFCYEAGPTGYGLHRLITSLGHACTVVAPSLIPRKPGDRVKTNRRDAISLARLLRADELTAVWVPDERHEAMRDLVRARAAAVETQRVHRQQVSSFMLKHGRVFPRPKAWSMRYLRWLQEQRFDHPAHQIALQEMVEAVRTSKERVQRLEAAIEEFVPQWSLAPVVQALQALRGVDLIVAVTFVSEIGDLNRFDNPRQLMAYLGLVPSERSTGETVRRGSITKAGNGRVRHMLVESAWTYRHPPKVGKAKLYKLEQTSPRVREIAWKAQARLTARYRALSAKGKKTTIVCTAIARELVGFMWSIGREVRPAG

SEQ ID NO: 505641 - protein, 305 aa, unidentified
MQATVVVGIDVSKRTLEVALSSGGGFSVTNDEDGISELLARLRPSDVALVVLEASGGYESPAYQALWEAGVPTALINPRDAYHFAQANRQLAKTDQLDARGLCEFGLRMQPEPLPPPEAADEELKALAVRRRQVVKMLAAERTRVQQAPRSVRSSVKRIVRALERELGAVDHQIEQRLRDNPRLAHRCAQLEQVPGLGPVTGAILVSRLPELGLLGPKQVAALVGVAPYDHQSGEWRGRSSIFGGRAEVRSALYMATLSAIRCNPVLRSFYRRLRAAGKPAKVAIIAAMRKLLVILNAMLKANLP

SEQ ID NO: 505642 - protein, 348 aa, unidentified
MAIVGGFDVHRAQITFDYVDTDSGQVTAGQIRPATRPALRNWLQRFEGRDDVAFAVEGCTGWRFVVEELVRARVEPHLAEPADTATLRGRKKRAKTDRADARLLRELLAQHRLPESWAPPSHVLEVRTLGRLYVALMDERRAWQQRIHAALFHQGVPRVQGLLTGEGRHALAAAQLSPAGRQMVETALTAIDSLTEQIKPLRAQLAGIGRSQPGAQALLAHYGIGALCAAIIWAELGDCRRFRSSDQAVRFTGLDVTVYSSDGKRSPGRLARQGSPELRWALFEAAKSAARTTAPDHDYYVELRDRLGGKRPALSVARKLARRCHHTLRELGDEAWSEPAIHSEQEAA

SEQ ID NO: 505643 - protein, 356 aa, unidentified
MGIFLGVDLHTGNQSICWIDTAQGEIHEARLDHQRDDIRGFYEGLPAPAVIGVESTGYALWFHKLVEELGHTLLVGDALAIRQLARRRQKNDRRDASLVLDLLIRGDFPAVHVPSAASRQVITLLRYRRRLVRIRTTLKNGLQAVALNHQLRLGARLFSAQGKLQLSSLPLTGASAIEREHSLQLIMVLDQRLGKVDQELEACAQKDARVQRLRTHPGVGVQTALAVVHFLEPVSRFRRARQLSSYSGLDPVEHSSGDHQRYGHISKQGNRLLRFLLIEAAHQLVRRGQDPDLRRFYYRLWARKNSSVAIVAVARKLLLRLYRMLCEQIDYEEFRRRGRDAGSARSVPSPAFAVTD

SEQ ID NO: 505644 - protein, 386 aa, unidentified
MSVVVIGVDPHKRSNTIEVMDPDGSVLAGGRFDTEKQGYRSMLAQGRRYPQRRWAVEGANGVGKHLAQRLVADGETVVDVPAKLAARVRVFSTGNGRKTDPTDAHSIALAALHAEGVRPVAADDALVALKLLADRRDELVAARTQAVNRLHRLLTELVAGGAKRDLSAAKARALLATVRPRDTVGRTRRALALEQLGELVAADRKLKAIGRRITDAVTDTGTGLTGLFGIGSAGAARILGDVGAIDRFPTKAHFASWTGTAPIEASSGDQIRHRLSRAGNRRLNHVLHIMAVVQVRYDTEGRVYYLRKRAEGKTALEALRCLKRRLSDVVYQLVLDQQQREAGPGGHSGATTESSATGPTPATSSSDKSLPGPAEQQSTPVVIPAS

SEQ ID NO: 505645 - protein, 343 aa, unidentified
MQTMTTIGLDIAKSVFQVHGVDAGGQVIVRRQLKRRYVLTFFQKLSPCLVGIEACGSAHHWSRELQALGHTVRLMPPAYVKPYVKRQKNDATDAEAICEAVTRVNMRFVPTKTAEQQSGLVLHRARHLFVRQQTSVINAIRAHLAEFGIVAPVGRHGVEELLDVVTDPNDKRVPDIARACLSALGDQLQSIKKHVLEFDRLIRAWHRSNEMSMRLEAAPSVGPVLATALVAAVADPKSFRSGRNFSAWIGMVPKQHSSGGKNRLGNISKQGDRYLRGLFVAGALSVIRYAKVHGTKHRPWLTALLARRPTKVAAIALANKIARMVWAMMATGERYKEPVALAR

SEQ ID NO: 505646 - protein, 328 aa, unidentified
MGIDIAKASFDFCLLSSHGALLWRGHLSNDASGIKQFLAELKTGRWKVSLIHFALESTGVYGKALINALHQAGLALSVLNPAQVKFFAISVLRRIKNDRVDAQIIARFCLERKPLATRPLRPIEEQLKLLVHERESRVSEQTRERNRAKNDPFQIQLPWLISRQRQQRLNQLQKELTQLDDAINKLIASDQFLKAQSQLLCSIPGIAQTTAAKLLSELAAKEFHSARQLAAYAGLTPSQFLSGGSCYGKTHLSKIGNAFLRKALYLPAAVARRWCKALKPWVILLEKRKLSDLAIRGAIMRKLLHIAFGVLKHQKIFDPSLVGRPKAV

SEQ ID NO: 505647 - protein, 317 aa, unidentified
MTQISTTTAGIDTSKSKLDVALHGRTEHWQTANSLPGWRVLTAKLSEAGVCRVGIEATGGYERGVVEHLRAAGFTVLVLQPAQVKAYGRAHLRRAKNDMLDAVLIAAFAAAFHKVRPAPDPRLMELAERLTFLEQIEEDIKRCKTRLEHIDEPGLRRLVLGDMTRLKARRLAQIRHLVRQLRSHSDLAARFDLVLSIPGIGERTALALLIRMPELGRASREEVASLAGLAPFDNDSGQQKGQRHIAGGRARLRRSLFAAALPAAFRWNKALITLYTRLTAAGKAHNAALIACARKLLIYANTVVARGTPWIDSPAIA

SEQ ID NO: 505648 - protein, 366 aa, unidentified
MIVIGADTHKATHALVAVDAGTGRIRGGREIKAEEPGHLAAVRWARELDDDRAWAIEDCRHVSRRFEQALLAAGERVVRVPPHRMGASRKGEREPGKSDEIDALAVARAVVKDGVECFPVAYLNDQAMEIRLLFDHRADLVAERTRIVNRLRWHLLELSPELERSCKRGSLSKSRVLDRVERGLRKLPAGARVRVAREQVRELRRLSREIDALHCELGALVRAHRPQLLAELGCGALTAAILIGRTAGNERFRSEASFALQSGTAPIPCSSGQRIQHRLNRGGDRHLNHALHIIAITRAQRDPATKEYLDRKEAEGKTPKGALRALKRHLARHFHRLLAEPAADQQRAAVDPNSTGVAPSPMVCIS

SEQ ID NO: 505649 - protein, 415 aa, unidentified
MEVVYSRCAGLDVHKKTVVACAITPKSSGGCHKEIKTFGTMTSDLLHLSDWLMARECTHVAMESTGEYWRPVFNILEANFQVLLVNAHHIKNVPGRKTDTKDAQWIGELLMHGLLRASFIPPIEQRDLRDLIRHRTNFIRERATLVNRVQKVLEGANIKLAAVVSDVMGVSARMILDAIVKGETNPQLMAELASKRLKDKREQLIQALDGKVRPHQRFILAELLCNIDAIDETIERFNQQIKEYCSPFEQAVELLDTIPGVARPTAELIVGEIGTDMSRFPTAEHLAAWAGVAPGNCESAGKRLSSKIRKGNNNLRVGLVQAAHAATRTKGYLAAQYHRIAARRGKKRAIIAVAHSILKIAYYLILRQETYQDLGGDYFDKQKPEAIKKRLVKRLQKLGYEVLLTQLETASPTLA

SEQ ID NO: 505650 - protein, 345 aa, unidentified
MRKLIAGMDLHSNNVVIGLMDMDGKRVAHQKVECQLSEVVRFLAPYKKRLEQVAVESTYNWYWLVDGLQALRYPVVLANPAGMEQYSGIKHADDTNDAFFLAELLRLKILPTGYIYDPRLRPVRDLLRRRLTLVHQRTALMLSFKSLYTRTTGQEMTLSRLKELEIKQAQDLYDHPANQLIAGMQIKHIEQLTESIEKVEKAVLDCARELPFYSKLTTLPGVGKILGMTITLEVGDIKRFAEAGHFASYCRTVEAKRTSNSKKKGENNSKCGNKYLAWAFVEGANFARRYDPQCRRWYDRKVAKTSNVIATKALACKLAKAAWHVMAEGTDYDSQRMFGQAASTG

SEQ ID NO: 505651 - protein, 361 aa, unidentified
MVATTPALERRARDDPGFNPGESEGLRSILHNPNSCKVLETGLQGRDRKMAQRVVDAGLDVSKAWLDVVLWPTRETTRVSRDAAGLSELAGWLTLHEVGRIGIEASGGYEREVIDTLPALGFQVLLLNPLRVRRFAQAKGRLAKNDRADARTIAQFVSVMIDAPQPTRCRELDPLVEHLTLRSQLLDWITDCANQLEHLKSAELRASIKHQKANFEAIVRTVEVKLATLIADHGDCCALSRRLRTVPGVGPVLAQTLIAMLPELGTLSGRAISSLVGLAPFDRDSGKYAGERHIKGGRAAVRNVLYMATLSATQHNPLIAAFAKCLTGKKFKVIMVACMRKLLVMLNAMVRDSMDWKASAA

SEQ ID NO: 505652 - protein, 337 aa, unidentified
MADTTDATTAVHWVAIDVGRYWNAVLIETATGQLHRFKMANSADDFDRLIAFIHGLGGRARAALEPTGDYHRAVAHRLALAGIEVVSISSVAQSRYREAMFNSWDKNDPKDARVILEMLKQGRVQRYVDPMIAGHHDLQELSKTYYQVSRARTRVQHSIINHHVPLYFPEMLKYWTCTRSDWWIRFLIQFPTPTHVRRLSQDEFVAAAWETVGRRVHKQAKLEEIWAKAARSAALPHAPDSLAVETFRMTLRHFQHLSELRAQIEQRAEAFLCDHPDYRHLKSLPGIGPIIALTILAETGDLRRFAHHRQFLKYCRVRSGQDSVGSSPRTGTTVQTR

SEQ ID NO: 505653 - protein, 409 aa, unidentified
MERIIERGCGLDVHKKSIAACVRLPGAEGQRTQEVRTFGTTATELLALRDWLQGHGVTHVAMESTGVYWKPVFYVLEEALTCVLVNPVHMRQVPGRKTDVQDCAWIAQLLEHGLLRGSFVPPVPMRELRDLTRYRKTIVQERSRAINRLHKVLEDADIKLASVATDVLGVSGRAMLDALVGGTTDPDALADLARGALRKKLPALRQALSGRFRAHHAFLLSQILAHIDYVEEAIEAISQQVGLLLAPFTEDLERVSTIPGVKQRTAEVVIAEIGVDMSVFPSAGHLASWAALCPGNNESAGKHRSGKTRRGNPWLRTALTEAALGAIRHGRGALAARYRRIMRHRGHKKAVIAVAHAMLVAIYHMLTRHTPYQDLGDDYYDRRHAERAKHRALQTLERQGYRVSLEPAV

SEQ ID NO: 505654 - protein, 417 aa, unidentified
MRIVRPICCGADIHKDLIVATIATTNQDGITEYIQSSFSSQNFDLNRLKAWLIEHHCFEFAMESTGKYWIPVFNVLEDEIKVFVVHPKYTKAIKGKKTDKKDSKWIADLFKHDLLKFSFIPPKEIRELRELSRYRIKLIAMRSSERNRYQNSMTISNIGLASILSDPFGKSSRAVMKEVIRSSSVTEEKISKLLERNARKKVKEVLQSLDGSHIESDQRLKMNIASQHMDQIDSHVRRLETEMAIRCIPHATLINLLLDIPGISYLSAMTIIAEIGTDMSVFETSKQLSCWAGLAPANNESASKKKSVRISKAGSYLKPLLVQCALAAINSKSNPYYRIKYNRIKKRRGHKKAIIAIARMILVNIYHILSTGEVYSPCDMEQIINPKPVKKVMTIQNAIEFLQSQGFDTSKLISSSS

SEQ ID NO: 505655 - protein, 392 aa, unidentified
MVVSVGIDVSKDKHDCFIVSAEGEVLADVFTVPNNMDGFHCLLQRIRDCTAPQDKIKVGLEATGHYSCNLLGFLLDNGLATYVLNPLRTNLYRKSLSLRKTKTDRVDARTIATMLLSDVGLKPYTSTAYHNEELKSLTRYRFDKVKERAKLKSSVSRLVCILFPELEKLVPTLHMVSVYALLEEFPSARKVAAAHLTRLKALLETASKGRYKRDMALEIRDAARNSIGSWMPAKSLELQHTIRLIRELDNEIAEIEGQIQAIMDELHSPITTIPGLGFRMAAMILAEVGDFTRFDSPDKLLAYAGMSPSTYQSGQLKNCYPHMEKRGSRYLRYALYNATKYVCHWDPAFADYLAKKRAEGKHYNVALSHAAKKLVRLIFAMERSQKPYFPTS

SEQ ID NO: 505656 - protein, 529 aa, unidentified
MPMNPGRCPDTLSKVIHSRAERASKAERSEAVNNFAAMHFESNLRSGQNGSGRKVPGRTRSACPDPARIEPRTPVGPGAFVTKSERTTPCEGLRIRTTHDKSQGPRASKTMNEPICWESITHYAGFDWAKDHHDVVIVNQQGKIVQDLTFDHSAEGWAKWKEVVAAYPHLAVAIETNQGAAVEQLLQSGVVVYPVNPKSAERYRDRKAPSGTKTDFLDAWSLGDALRVDGHGWRALKPLDPLIHELRLLCRDEVELIGKRTELVNQLQAALHEYYPAALKAFDDWTATPSWKFVQQFPTPELLQKAGRGKWEKFLHVHHLYRPEINEKRLEIFSKAHEFCSSAAVTRAKSRLALAVIKLLQALEIQLEDYRKEIRRLFNEHPDHDLFGSLPGAGEKLAPRLLSEMGSDRSLFESAQALQCYVGTAPVSFQSGQVHQVYVPFLCNKSFRHAVHLWADLSRKFCSWAQVYYQQLRAKGKTHATALRCLGQRWLKILWKMWQTKTCYNPDLHMANQLKHGSWVLTIKAGGTK

SEQ ID NO: 505657 - protein, 491 aa, unidentified
MVLILRQSHWRAVPRERDRIPFERVQTSFTQIRPLGGDALKSIQNVMPRRRKTKIQKIVAKINPHAAGVDIGAREIFAGVSPDKVDQPVRRFETFTDSLRALVAWFVSLGIKTVAMESTSVYWIPLAELLEEAGITVCLVNPRHVKNVSGRKSDVMDCQWLQYLHSMGLLEAAFRPEAKVRALRAVWRHRDALVRLSTVQIQHMHKAMDQMNLQVHHVISDITGCTGVALLEAILAGERDPQVLAKRRDPRIKVPETILAAALTGDYRQEHLFCLKLAYEAYQFFLRQIAQIDQEMMGQLKELSPASVQSQPDPKPLKRSKSRTPGPSSSHLLEAICGVDLLSIPGINIMSAQTIVSETGADLHAFPTASHFCSWLSLCPNNKITGGKCLSSTPRPGNNRVSRALRNAAQGLHHAKNELGEYYRRMRAKLGGAAAVVATAHKLARIVYAVLRSKIPYDPTLHLRDNPQALRRKLSRLNSLAKELGFVLSPQ

SEQ ID NO: 505658 - protein, 315 aa, unidentified
MSDMPCFVGIDVAKAQLDIALRPSGERWAVPNDTNGVTTLVERMQTLQPTLIVLEATGGLERMVTSALATAGLPVVVVNPRQVRDFARATGQLAKTDALDARALAHFADVIRPTPRPLPDAQTQELRALLGRRQQLIGMRTAEQNRLAGTNARLAKDIEAHIAWLNAGIATLDDDLETMLRASPLWRENDDLLQSAKGIGPVCAHTLLLELPELGTLTRQQIAALVGVAPLNCDSGTLRGRRTIWGGRAHVRTVLYMGTLVATRYNPQIKVFYERLLAAGKVKKVALTACMHKLLTILNAMLKHRTPWQPQEVQN

SEQ ID NO: 505659 - protein, 412 aa, unidentified
MEVLHPRCAGLDVHKETVVACVRIASGGEVSRAVRTFETTTARLIELAEWLEANGCTHAAMEATGVYWKPVWQVLAAGGFELVLANAAHVKNVPGRKTDVNDATWLAELLAHGLIRASFVPGPEIQELRGLLRTRKQLVREKASHVQRLQKTLEEANIKLESVLSDVMGRSGRAMIQALIAGETDPAKLAALAHPKVRAPQARLREALRGRVKRHHRFLLDLHLQQIDALDAGIAAIDREVDAGLASFRDAVKQLSTIPGVSQLSAQVILSEIGIDMSRFATAAHLRSWAGLCPRNDESAGKRRSTRLRTGAPWLKATLVQCGWAAARTKATYLNAQFVRLRTRRGPKKAVCAVAASILTAAYHMLKDGTFYQDLGATHFDRRRPDAQARRLIKRLADLGFSVQLKPVAAVS

SEQ ID NO: 505660 - protein, 349 aa, unidentified
MEYYAGLDVSLEATSVCVVNAEGKVVREGKLPSEPDAIELFLAEWGLHLKRVGLEAFSFSAWLFTALDDKGLPVFCIETRHTKAALNAMINKTDRNDARGIAQLMRTGWFRPVHVKSHEAQTLPVLLAGRKALLGKVIDLENMIRGLIRPFGLKVGVVSTSKFEARVRELVIGLAALEQIVEPLLAARASMRLQFARMHKMALAAARDDKAVRRMMTVPGVGAIVALTFRATVDNPARFKKSATVGAHFGLTPRRYQSGETDWSGRISKCGDDMTRSMLYEAAIAILTRIPKTFKLRLWGLRLVKKKGLKKAATAVARALAVLLHRIWADGTTFRSGAGMKGGRIAKAA

SEQ ID NO: 505661 - protein, 347 aa, unidentified
MRFYNRQHRHYCGIDLHVKTMYVCILDAAGQVLVHRNMKSTPEAFLETIAPYRDDLVVGAECMFTWYWLADVCAAEGIAFVLGHALAMKAIHGGKAKNDKIDSHKIGSLLRGGLLPQAYVYPAAMRSTRDLLRRRLHLVRKRGQLLAHVQNTRAQYNLAAFERRLAYPANREGVAERFSDPSVRKSIEVDLTLVETYDGLITDLELTIVREAKRHDADAFHRLRSVPGIGKVLALTILYEIHDVTRFDRVQEFASYARLVKCVHHSAGKKLGTGGAKMGNAHLKWAFSEAAVLFLRHTKDGKKILAVIEKTHGKGKALSILAHKIGRAVYYMLSRGTVFSMEKFRAA

SEQ ID NO: 505662 - protein, 427 aa, unidentified
MDGCDGIRLEKFRQFRKAIRGSQEHLIVGIDIGKEKHHAFFGTATGKTLLRRLIFDNTIEGFDKLLKQTESLQDAHNLPHVVFGMEPTANYHKPLGEHLILCVKMVVLVSNVAIKRNRELLDGRWDKHDVKDAANIADLISQGKCLFYEHPAMKMRDLRNLLSLKRKLKKLEHGYRVRIRNQLLAQYFPELDRYSGRPDTEAIVRWCLDPSRIAGFESDQFMDMISPGRCSNAKRSHLATVQQLAIASIGCQMGEGADHEAQVMVEGLRHTRAAVQRTEAKIEELCKKFPEYPFLLTIPGFGPDVSAKVLGALGDPYRFSSHRQVLKTAGLDLSADHSGKSAHHAVPVISKQGKADLRYALYQAALIASTRNKEFITYHAGQLQGREKEKGIKPKRFVKLSAKLLVIAWTLMKKREAFDYRYLKQAE

SEQ ID NO: 505663 - protein, 428 aa, unidentified
MVRYIGMDVHREFAQLAVLEDGRLRDEGKIGVTPEALRAWAEGLHSDDQVALEATGNSDAIANLLTPLVGRVVVSNPSKTRAIAEAKVKTDKVDARILAQLLAADFLPPVWLPDERTRSLRRQVMRRAHLVRQRTRIKNQVHAILARNLAPTPPVTDLFGKTGRHWLSRQELPVDERTTVSALLRQLDFHAGELAIVDKELAREALADPMVARLMTIPGVDAIAGISIVAAVGDFTRFDDPNKLVAYVGLNPRVRQSGNSAPVHGRISKAGRAHVRGVLVEAAWSASRAPGPLRAFYQRVKARRGFQKAVVATARKMTVLAWHLVSKDQDYAFARPSLVTHKRRKLELAAGAPSRRGNYGLPGAAYNDKQRRNEEKLAVEQAEHAYEVLVAHWQPKRANTGVTTAVCGPDKMSSGGRGRQQRDATFKP

SEQ ID NO: 505664 - protein, 420 aa, unidentified
MTTSKDSRILSVIHSVCCGLDVHKKVIVATLISTDGSGQDVSRTMEFGTFTDDLEKLRSWLLEHECRIVAMESTGIYWRCVHNILEADVEVILVNARHVKNVPGRKTDIGDSRWLAGLLRHGLLRGSFIPAKEIRQWRELSRVRRKNRDTLGDYKRRVHKLFESANIKIDSVVSDLFGVTGRNLIMLLMTGPKEIRIEDIELCAKGRLQGKISELHRSIQGFYEEHHCFQLTSLMQVIAALEMANDSIDARMRELMQEHNDLIRRMDEVPGINELSAQYVLSELGPDLATFAHASALASWTGLCPGNNESAGKRRSGRSPVRKHHLKTIMIEVAWAAVKKKGTYYRDKYWRLRYRLGPKKAIVAIAHRIVKALFFIIKKGEEYRELGDQYLAAKSQKNKLTRIRRDAEELGFNLVPIVVG

SEQ ID NO: 505665 - protein, 460 aa, unidentified
MKRNEMRKAQRIRSHLKQVNLFAAGIDIGSRSHFVAVPEELDEQPVREFAGFTGDLHRLADWLVEIGIQTVAMESTGVYWIPVYEILESRGLAVLLVDARHVKNVPGRKTDVLDCQWIQQLHTYGLLRGAFRPPEEMVALRSYLRQREGLIASASDCIRHMQKALRQMNLLLENVVSDITGVTGLAIIRAILAGERDSKQLAKLRDKRCRSDERMIAGSLEGHYREEHLFALQQAVERYDFYQQQIEACEGIIERHMRKIEDDNDDDQAVPPASKPKGHSKNGFDFDVRSHLYRLTGVDLTEINGMSESNVLTVVSETGLDMNAWPSEKHFTSWLGLSPGNKITGGKQLSGKTRPSPNRAAAAFRLAAYSLANSKTALGAFYRRLRNRLGAPKAITATAHKLARLFYRLLKNRTPFIDLGQDYYEQQYQERATRNLKKRAAALGYKLIPESTDGLQVSMC

SEQ ID NO: 505666 - protein, 406 aa, unidentified
MEVVYERCCGLDIHKASITACVNIKGKKEIKTFGTMTEDLLQMTAYLKEHDVQMAAMESTGSYWKPIFNILEVEGINAILVNAAHMKAVPGRKTDVKDAEWIADLLRHGLLKASFVKPRDQRELCELIRYRQSMIEERAREYNRMGKVLEGANIKLTSVASRMDTVSGMNMVRALSKGVVDPELLASMAKGTMRSKQDDLKRALNGLIQPHQQMILKSMLSHIDQLSELITTLDAEIEVRMSQDVELVDALDGITGVGKVSAQTIIAEIGTDMSLFPSANHLASWACISPGSNESAGKKKSGKTQKSNSTLKKTLVQCGRAAANSKDTYLNAQYRKIAARRGGKRAAVAVGHSILVICYHMIKNRTRYNDLGADYFQNRNKDAIVRQSVKRLQALGFTVSLEEEVA

SEQ ID NO: 505667 - protein, 361 aa, unidentified
MVLERTSVGLDVHARSVVAGVLDSETGELWSRRLPAASEAVVSWITSLAGPVAVAYEAGPTGFGLARALAAAGVRCVVVAPSKLERPAGDRVKTDRRDAERLARLLHIGELPAVRVPTELEEAARDLVRAREDARSDLMRARHRLSKLLLRQGLVFEGAAWTQAHGRWLASVGRELHQPGLRVAVDEAHGAVLAVQARRDRLDAAIGELAATPTWAPLVGRLGCLRGVGVLTGFGLAVEIGDWQRFTGATVGAWLGLVPSEQSSGGRRSQGPITKTGNSHARRLLVEAAWHHRKPYRPSRELRARHAGQPAAVRERADRGNHRLHQRWCRLDARGKRSTISVVAVARELAGWCWSLAVLDA

SEQ ID NO: 505668 - protein, 324 aa, unidentified
MADNMLGIDVAKGKFDVVLVRADGKRQWRTFANTAEGFGALLGWLGKQQALPVHACLEATGTYGLALATFLHQAGQQVSVVNPACIKAFADSELKRTKTDKVDAGLIARFCRAMQPALWQPPAPEVAQLQGLVRRLESLQQMAVQERNRLAAPGLAEPVRESVARTLAMLQEEMKRLRGQLDDHVDGHAALKQQRELLTSINGIGRTTANLLLGELSGCDFQKAREVAAYAGLVPQERQSGSSVRGKARLSKKGNRRLRKALYWPAIVAIRHNPVLAAFARRLREAGKPKMVVIAAVMRKLLHLAFGVLKHQRPFDPNWIACHT

SEQ ID NO: 505669 - protein, 377 aa, unidentified
MSKLRFVGLDVHAETIVVAVAETAGEVRSLGVIPNRLESIRKLVHKLGPVQHLRACYEAGPTGYVLYWQLTQLGVECAVIAPSLVPTKASDRVKTDRRDAEKLARCHRAGELTAVWVPDAAHEALRDLVRAREAAKKDQLRARHRLGKFLLRHGQQRPEGIKVWTKKHREWIKSHVRFEQPALEATLADYLEEVDHVGNRITKLETAIDEAIQQAPPAIRAVVEALQALRGVAQTVAVSIVAEVGSLSRFPSPRALMGYSGLVPSEHSSGNRVQRGGITKTGNGHLRRVIGEAAWAYQHRPNVIGFLAQRQKRLGIGEESKKIAWKAQQRLHKRYKALSARGKNKNQIITAVGRELLGFIWAIGVSVEKQHQVTAAA

SEQ ID NO: 505670 - protein, 421 aa, unidentified
MKRADTRKVRGVRDDALIVAIDVGMEMNRGYCTTPDGRSTKPFKFDNTREGLDTLWGMIMASKNRFKCNEVIVGYESTGPYGEPMVHYLMKKPVKMVQVNPMHTKRVKELNDNSPLKTDDKDPRVIADIILLGHTLSIVIPEGDAAYLRRLNNSRERHVRERTALVNQLQQLVFLLFPEFKKVIKDIKCRTPLYLLKRYPTPEAISVLEMHALGEEMRKKSRGKFREHHADMLITLARNTIGIREGVSGLSMDIRHILVQLEMLRNLIAEIESEMEIALGRIPYSSKLLSIKGLGVVSVAGIIGEVGDFKKFGTQSEIMKLAGLDLYEISSGKMKGQRKISKRGRSLLRKILYYAAIQTIRKNGILHDYYTRLTDRGMKRMMALVAVSRKLLGIIYAIVSDDSEYSVNFESMKRQVIKKAA

SEQ ID NO: 505671 - protein, 443 aa, unidentified
MSRGKRTLEIAYPNAAGVDIGSASHFVAVPADRDEQPVREFASFTADLQALAQWLKDCGVEIVAMESTGVYWIPLYELLESQGFTVHLVNARHVRNVSGRKSDVLDCQWLQQLMSYGLLSGAFRPKQQICALRALSRQQSMLVRYQRQHVQHMHKALSQMNLQLDNVISDVTGETGQKIIRAILAGERDPHRLAQLRGQRIRAHEQELAKSLQGTWRSEHVFALKQAVDLYDAYQQKLQECDEEIARALADLACHPAPPPPALSRGRKSKGEPANLRNAVIRACGVDLTRIPGIGTGTALKVICEVGIDLSRFKTIKHFTSWLGLCPGTKISGGKVLSGASKRIANPLAQALRMAAVSLRRSPTALGAYYRRLCARLDKAKAIRATAHKLARLIYILLTRGEQYLDQGEAYYEERHRERVIYHLNKKARAMGFTLTPTQPIPT

SEQ ID NO: 505672 - protein, 522 aa, unidentified
MSQIASGMSFPAIKGQQANDEYYIVMCPLKRLKRIFSFDEGQLPVDKRAQRIINEERIPDIANYILDNRDNYVFSALTACIDGLSELVAIGDSKHEQKIGTLIIDEDAELYITDGQHRNAAIQEALKQDPTLGNETISIVFFASKSLEERQKIFKDLNLYPVSSQIRHPSAMIEFELTIKREKTKMKITTIGLDIAKRVFHVVCCNKEGRLLKKKMLKRAEVLAFFHSHPQCLVAIESCATSSYWAREIQGCGHEVKLVPPQHVKAFLVGNKNDYNDALAIAIAARQPHIRSAGIKSVEQQDNQAQHKARALAVGQRTALCNQIRGLVAEYGICIPQGVHTLRKHISIWLQDGNQQLSIQFKALLLQLNEQLHTLDSSIDVYDKAIMQYAKNNAICQRLLSVPGIGPMISSAYFNEVGNGRAYRKGRDVSASLGLVPKQHSSGGKDVLLGISKKGNRYLRCLLVQGAKAVVSRAKSKDDKLSLWINHLVCTRGHNRACVAYANKMARMAWAITVSGEEYSPV

SEQ ID NO: 505673 - protein, 347 aa, unidentified
MVIVDSARMVVGGVDTHRDVNVAAVVDMNGGVLGIESFPTTGDGHKLLASRMAGFGTIERVGIEGTGVYGAGLARHFARASVMVIEVDRPNRQKRRQRGKSDQIDAVEAARGALSGRCEAIAKSGDGHAEALRALLVAKRSARSTRIRTIVQLRYLMFTAPDELRARLGGLSAAQLVSEAAKLRPRPGGDVVMHGVKTTAVILARRVQALDAELAVVDAQIEPLVKAAAPGLLNVFGVGVDTAAVLLVTAGDNPERITSEAKWAMLCGVAPVPATSGLMDGRYRLNHAGDRQANNAIWRIVITRLGQHEPRTVAYMERRLEQGKSKRAIVRCLKRYVAREVFHALPR

SEQ ID NO: 505674 - protein, 411 aa, unidentified
MQHDTTALIGGVDWATDTNEQCIVDATGSIVARRNTTHDAAGIRRLVEGFVRHGVQQVAIERPDGPVVDALLTVGIEVVVITPRQVKHLRARYSAAGNKDDRFDAYVLADVLRTDGHRLTPLTPDSPQTLALRSAVRARTDLVEARVALCNQLRAHLRVVFPAVVGLFADLDSPISLTFLARFPSVDKAAWLGQRRLGAWLAANGYCGRQPARVLLERLQTGPEGLTGDAAAAAAHTTLAYVATLIAVRGQIAALEAQIREQLALHPDAHVFTSLPRSGQVRAAKLLAEIGDARGRFPTEASLAALAGAAPSTRQSGRHHVVTFRWACDKKLRDAVIDFAADSRRASPWAAAIYDRHRTTGKTHQHATRILARAWLRVIWRCWQDGTGYDSARHGGARPFLTPNEAIDQAA

SEQ ID NO: 505675 - protein, 466 aa, unidentified
MPKRKPKEGQTESTRWKLSGSATLPQINPNTAGIDIGGASHFVAVPADRDEQPVREFAAFTGDLYRMADWLKSCGIESVAMESTGVYWIPVFQVLEERGFDVKLVDARQLKRVPGRKTDVSDCQWLQQLHSFGLLAGCFRPDNQVCVLRSYMRQRAMLVTYASQHVQHMQKALVQMNLQLQYVLDDITGATGKRIIHAILNGERDPHKLAALRDPNCKNSAATIAKALQGDWREEHLFALRQAVDLVETYEAKIAACDQQIHAHLQTFQDRSDGQTPPHGKPPRADRHDFSFDATAELFRMTGIDLTEVDGLQANTILTVLSETGLDPTKWPDSKHFASWLSLAPNNRVSGGKILSRKTPPNANRAAAALRLAARSLHHSKSALGAYLRRKAAQIGMPKAITATAHKLACIIYSMLTHGTAFVDFGPDYYERAYQQRVVSNLSRRARDLGYTLVKIPQAQLQPTLS

SEQ ID NO: 505676 - protein, 350 aa, unidentified
MEQIYVGIDIHRKFSLLHVQNQKGEKLDTKRLNHDDVESIREYFMKYPHASVVMEASCGWMWFTDLLQELGFNVHLAHSSGVKAISSSHKKTDKEDAQILANLLRSNFLPEAYLSPKEVRDDRELFRHRAAMVKLRTNIKNKVHAQLIKLNFQPNSSDIFNIKGRAIIEKYQLSDVHQTVLDGWLSIIDFLELQIKSMEDIIKDRLKKDPRSVILQSMPGIGYLTAYAMISEIGDINRFRSAHAFCCYCGLVPSTKQSADKTRHGKLISGHSCLKLSFVESTHVAIRKDKYFKDIYERQVKTKSKCRSVIVCAHKMGLIVYKMLKENRTFIKNKTQNDEKKVGSNVSMTD

SEQ ID NO: 505677 - protein, 394 aa, unidentified
MIYAGVDIAKTDHVIGAVDERGAEMCPPMPFKNTEAGLERAVAWLEGLAGSPSDVVVGMEATGHYWMACYSFLVARGYSVAVINPMQVKAVRKLKGLDKVKNDRVDAGLIAEALRIGQYDETRLATDEVASLRSLSRYLQSLRGMVAELKTQCICLMDAHFPEYAGIFSDMFGSGSRAVLSKSPLPFELARRRADSLARDIAEASRRGGKSAGYAAKIKAAARSSIGVRLGQEAASFQVKSLIRQIEFADSECAKVEARVRALLDEVEPLVLTIPGVSYATGAQIVSEIGDVSRFRNAPALVSYAGLNSSVSQSGQFDSGGGPITKHGSPYLRRALWLAANRARQYDPGLRAFYDKKRAEGKPHRVAVTAVARKLCHIVFAVMRDQVPYDPGRE

SEQ ID NO: 505678 - protein, 387 aa, unidentified
MPQPNDLSRSLVALDQNSTIIAVVELSHSSWLVGGIVPGIERQPRKKLEPNPERLLALLHRWQDEAVRAGSTITRIAVAFEAGRDGFWLARWLEARGVETHVIHASSVAVSREHRRAKTDRLDTELLKRGFLGWLRGERGHCSMARVPTIAEEDAKRPNRERDCLVGERTRIVNRIKSTLARLGIRTFKPTLRKAADRLATVHTPEGMPLPPNTLAELQRDMARLGLVVSQIRQIEEARQKRLEQQHETGPHAMVRLLARIVGVGVETADMLVHEVLSRPMRDRRAVARYAGLTGSPDESGAQRREQGLARAGNARVRRGMIQLAWRFLMFQKESALTLWYRARTADSRRGTRKTMIVALARKLIIALWRFVTTGEPLEGVVLRPAT

SEQ ID NO: 505679 - protein, 343 aa, unidentified
MVHYVGLDVSLKQTSICVVNQAGSVVREDAVDSDPEAIAAFVRSKALGAVRIGLETGPTSTWLWTELKRLGLPVICIDARHAKAVLKMQINKSDRNDAAGIARIMQTGWFKEVRVKDLDSHSVRALLSSRALLVKIKRDLENQIRGLLKNLGLVIGRAKFNVFATRAEELIADRPELVAAVRPLLDARKAIEQQIGDLDRKVLKLARYDVQVRRFMTAPGVGPITALCFKATIDDPTRFKRSRSVGAYVGLTTRRHASGEVDWSGRISKCGDAMLRTYLFEAANVLLTRVPKWSALKAWGIRLAKRNGLRKAKVAVARKLAVILHRMWIDGTEFSWSTKKAAA

SEQ ID NO: 505680 - protein, 318 aa, unidentified
MLIHYIDIAKRNFVIAVSSLSKTKTETNNPKGIAHTIEYLKKHKVALVVTESTGGLEIPAAKAIRRAGIAVIIANPRQTHQFAQSQPLTKTDAKDAKMPAFFAQMTAQKEDSQTMPYQPPTEAEEVLEALVNRRNQPADMRTAEKNRLHQVHETQVGSVKQLIAHFDRLIDELDKQIDNHTHTHFDGKDQVAEQIKGIGSITTATLMAMLPELGRLSHKRIAGLAGIAPHPREGGETKFKSRCFGGRSAVRKALYMATVAATRFEPLIRDFHQRPLSEGKPYKVAVTACMRKLLTISNTRMRDYFAENDTAENGIRTA

SEQ ID NO: 505681 - protein, 400 aa, unidentified
MISVGIDVSKGKSTVCILKPYGEIVSKPFNITHTQKDLSELSSMLFRLNDEVKIVMEATGIYHLPVLTYLQEKGFFVSVINPYLMKSYRNESLRKAKTDKIDSRIIANYGIDHWFKMKEFQTSGEIYEELKLLGQQYRHYMKLHLLSLAELTHLLDLTMPGIKNLLASWNETNRKDKRSDFVERFWHYDVITSMSEHEFTEEYILWAKEKKYVPSQEKAKVIYTLAQESIPTLPSETSSVKMLVTEAVRVLKEVDATLGLILSRMQEIAKTLPEYSVVREMGGVGNTLAPKLIAEIGDVRRFRNGKALVAFAGIDPPPYESGQFVGCNRKISKRGSASLRKVGYETMRSLKMRSRPEDPVYRYVVKKESEGKSKKSAKIAGLNKFLRIYYARVTELYKNI

SEQ ID NO: 505682 - protein, 377 aa, unidentified
MKRIKFVGLDVHAETIAVAVAEQDGEVRTLGVIPNREESIRKLVKKLGPVEQLRFCYEAGPTGYVVYWQVTTLGAKCEVIAPTLVPVKSGERVKTDRRDAVKLARNYRAGELTAVWVPDAAHEALRDLVRAREAAKKDQLRAKHRLSKFLLRHGRRPASGVKPWTLNYMAWVKKEVHFEQAAQEATLLDYLHEVEHAETRITRLDQAIDEAVKSTTPKMRAVIEGLQALRGLAQVAAVTIVAELGEISRFSEPRQLMGYGGIVASEHSSGESTRRGGITKTGNAHLRRVVVEAAWAYRYRPNVGAALRKRQEVVSEGIREISWKAQHRLHTRYRKLTARGKEKGKVVTAIGRELLGFIWAIGVKVEAAQKEIERRAA

SEQ ID NO: 505683 - protein, 316 aa, unidentified
MKKHSTVCAGIDTGKRKLDVALAGADERLEVANTEQGHGKLTAWLRQHQVRRVGIEASGGYEQAVVSRLRRDGFVVIVFQPMQVRAYARFHGLRAKNDKIDAVLIADCTAAAKKIHAPPDPRLVVLAAHQTLIDQIIDQIARCKNYRESSRDAQRQFWNDEIKRLRGLFKQQLKNLVAAIRRYRDLAERLDLIASIDGIALRTAVAILVRVPEIGRISRQQIAALAGLAPYDKDSGDQSAARHIEGGRQRLRNNIYNAAFAASFHWNAELTALYRRLTAAGKGHKVALVACARKLLIYANAVVARGTPWVSRAVAP

SEQ ID NO: 505684 - protein, 336 aa, unidentified
MTYVGMDLHKNFLQIATMDDKGNLLQNTRIDNDLEAVNKFFQNMPDDHIKVVMESSSVWYNIYCYLRYERNLDVILSNPLKTKAIASAKIKTDKIDAKVLADLLRGGYIAECYVPDKKIMQLRDLVKHREFLVRLRTKMKNRIHAILLMNGIRITGAKQPFSKIYVQHLKDLQNYRIDGYIRLIDSLNCEINCVSTMIHRFAQEDRMASLLTSIPGIGYYSALLISSTIGDINRFPDSHHLCAYAGLVPTTYSSGGTTYHGRITRTGSRYLRWVLAECVHSHIRYQKDSNITRFYHRIAKRRGNAKATVAATSKLLRIVYWVLKEQREYRHITVKE

SEQ ID NO: 505685 - protein, 384 aa, unidentified
MNKHSMIFIGLDTHKEFHEVAYCEEQRGASAVHYGRIPSSKVSVKKLIRQFESKYPGATIHVVYEAGPCGYWIYRLITSLGHCCYVVAPSLIPKKPGERIKTDRRDALKLVKLLKSEDLTPIYVPEPEDEAVRDLSRAREAAMKDLKEAKYQLKALLLRNNIRYEGTANWSKKHLRWLTELILPHPAQQIVLQEQLQTIEERIRRLERLDNELTHHVHQWRYYPVVKAIQAMRGVRLLVAVGVVAELGDLNRFDHPRKLMAYLGLVPSEHSSGGKRHLGAITKSGNGRARRLLIEGAHSYRYPANVSTNIQIRQEGLPKDIVDIAWKAQLRLCKRYQRMSKKGKHYNLIITAIAREMAAYIWAIVREVVLTPVNPKLRLSRVPA

SEQ ID NO: 505686 - protein, 354 aa, unidentified
METLSHHQSLRLYVGIDVHKKQWSVSIFTDAAHHRTFSQPPSPAALRTYLDRNFPGASVICAYEATKLGFWICRELKSFGFDCLVVNAADIPTSDRDSSSKTDPVDSRKIAKALRAKLLTSVHVPDIVTEGDRQLFRYRKRLLADQTRVKNRIKDKFLFTGIVIPEQFDNTNWSKAFLRWIRAVEFPDPSTTLTVQRLLEQYEFLHRHFLKVSIEVRKLQRTARYKKQAKLLRTIPGIGPLTTVELLCEIENIHRFENFKKFNGFIGFRPFSHSSGEHDWKGALTYRRHKALRSSLVECAWSAIQKDPVMSKRYNELKQRLTGKRAIVVIARKLISRIYAVLKNETPYQLDYVN

SEQ ID NO: 505687 - protein, 355 aa, unidentified
MSNEKYIGLDVHQATISVAVMDSQGKVVMESILETKACTLLEFFGGLRGSLFVTFEEGTWAAWLYDLLKPHVTEVLVCNPRKIPLLKQGNKSDKIDARKLAERLRLRDLKPVYHGETGIRMLRELARSYLTVVKDLSRVMNRLKALYRSWAIPCAGRDVYYRRHRRAWLEKIPEAGTRRRAEQLYQQLDLLQHLRQQARRELLAESRKHAITAKLRKIPSLGPIRSALAVALIQTPHRFRSKRQLWTYSGLGLETRDSGEYHYVQGQVRRRKKQATIRGLNKDYNHDLKGLFKGAATRASVKPGPFQEFYQRSLAKGINPTMVRLTLARKIAAITLTLWKKGEDFDINKLNSQVA

SEQ ID NO: 505688 - protein, 341 aa, unidentified
MSESALIGIDLGKHTFHLHGQDKSGREVFRKKCSRAQMMQFFGNVPSCVVVMEACAGSHFVARQLMAMGHTAKLISPQFVKPFVKGNKNDFVDAEAICEAASRPSMRFVTPKTESQQTLSVLHRMRESLVHDRTKTANQMHGFLLEFGISLPKGLAIMKRLASVLAEHELPVRLTVLLQRLHDHFVYLDEQIKALDKELAGQLANDDLGSRLLSMPCVGPITASLLAVEMGDGKQYRCGRDFAASVGLVPRQYSTGGKANLLGISKRGDKHLRQLLVQCSRVYMQRLDHQKGALADWVKTLLSRRHSNVVACALANKLARIAWAIAARHTQYEAGPDALNA

SEQ ID NO: 505689 - protein, 356 aa, unidentified
MSRDIKYIGMDVHKEAIVIAVLNESGKLVMESVIETKASSILQFLHGLRGELHVTWEEGTWAAWLYDLLQPQVPHIVVCNPRRNALLKEGSKSDKVDARKLADLLRSGMLRPVYHGENGLRTLRELGCSYQTLSKDLTRVMNRLKALYRGWGIPCAGTQVYAPRYREEWLSKIPQAGVRRRAELFYQQLDSLQVLRRTLRPEFLAESRKHKAAKLLRQIPCIGPIRAARLIGLMQTPHRFRSKRQLWTYSGLGIETHDSAQYRYVGGQLQRSKKPQQLRGLNQNHNHEMKEIFKSAATRASCGTGPFHDFYAALLAKGMKPEMARLTLARKIAAITLTLWKKEERFDAEQLKTQAA

SEQ ID NO: 505690 - protein, 315 aa, unidentified
MKEELVYLGIDIAKSYLDAAIGSEKRRFFNDTVGHRQLIRWIKQTESAVQVICESSGGYERKLVQALARARVKVSLVQANRVRQFARAAGILAKTDRIDAEVLCEFGGVMRPQTVSAATLEQEHLRELESQRRHLTHLLVMEQNRGARVSDAAVVRLNRDLIAQIKKQIDKIDLLIKAHIEQSHELSAKVEKLTAISGVGLRTAALLLAQLPELGQLNRREVAALVGVAPFNRDSGKMRGKRTIYGGRRFVRHGLYMAALVAARHNPILRKFYLRLRAAGKPAKLALTATMRKLLIALNSTLKSDLSYAGNQDSY

SEQ ID NO: 505691 - protein, 371 aa, unidentified
MTEAVKYVGLDVHKETIAVAVADGERGGEVRFVGTVANEDDAVRKLVKRLKGPGVTLSVCYEAGPCGYGLHRLLTQLGQTCIVIAPSMMPRRPGDHIKTDRRDALTLARLLRAGELTAIWVPDEAHEAVRDLIRARRSAQEDAIGAKQTVRSFLLRHDRRFGGRAAWTKMYWRWLSEQRFDFPHQQLAFEEMQKRVLEAQARVVRLEAALAEAVDAWCFAPLVRNLQVLRGIRLVSAATLVAEVGDLTRFDNPKQLMAYVGLVPSEHSSGARTKRGRITRAGNAQARTMLIEAGWSYRLPAREERRYRERVIDLPEEIQAIGWKAQVRLCQRYRRLTATGKPQPKVTTAIARELVGYAWDIARRVSPALAS

SEQ ID NO: 505692 - protein, 344 aa, unidentified
MNYVGIDLHKKTIVLCVMDQDRKVTARRTFACCQTEAVRDFFRGLVPFRAVVEATASYEWLVELIEPIAEKVVLAHPGKLRVIAESAKKTDKLDAAVLAEFLARDMIPEAFRPSPRQREHRALVRHRRHLKQSVTALKNKMRRVASDYNADRKDLFTAAGWAALQAVKLSDADRFVLGQLHAGWRHLEGQLKALAERLKAFAAAAPAKEAEARAKLATIPGVGPVTVDVVVSELGDVKRFHSVKAVCAYAGLVPAVRQSGGKASKELGITKTGSPLLRWALVEAAWRVVRQSAAWRRVYEQVKRKAGGKKAVVAVARRLLVVMAAMLRDGTNYNSLKVGEACPA

SEQ ID NO: 505693 - protein, 367 aa, unidentified
MKKNNTSQQSRKGAKGGITMGMDLGDKTSRYCVLDGKGEVVEEGSVATTKKELAQVLGAMGRWRIAMEVGTHSPWVSRLLKSLGHEVIVANARQVKLISASSRKDDRLDAQTLARLARVDPELLRPIRHRREKAQQHLMKIRVRARLVDARTSLVNAARGMTKAVGERLPACDAGSMGTAQMVDLPTGLQETLKPLLEQVESLTQKIKECEKEIEQIAGTEYAETYVRRQVSGVGNLIALTFVLTVEDRERFQKSRDVGCYVGLRPRRSDSGQSQPQLRITKEGDNYLRKMLVQGAHYILGWRGPDTDLRRWGLKLAERGGKNAKKRAIVAVARKLAVLLHALWVSGEVYEPLRNSHARQRLKQRTA

SEQ ID NO: 505694 - protein, 351 aa, unidentified
MLIIGVDYHPSFQQIAFMDRETGECGERRLNHSDGEAERFYRELKQQGVSVRVGMEATGYSRWFERLLAELGIDVWIGDAAKIKTKRVRKQKTDREDARLLLKLLLEDNFPRVWVPSPENRDLRQLLWHRHRLVQMRTRIMNQLQALAMNEGTRRKNRLWSAQGRAHLEKLPLAPWASRRRQDLLELLDRMNPTIAELTAAVEQEAKKRPDVLRLMTHPGVGPLTALAFVIIIMTPERFPCGKQIGSYVGLIPCEDSSAGRQRLGHISKQGNALLRFLLVEAGQAAVRCDADWRRRYLHLVMRREPRIAKVAMARKLAVRLYWMWRNGWEYSQSIEFSSHAGQLVTGHGVK

SEQ ID NO: 505695 - protein, 347 aa, unidentified
MVTLGGDCHKRTHTLVAVDDNGQQLGAKVVPAVSAGHLEALDWARQWAERRWALENCRHLSRRLEADLLLAGEVVVQVSPKLMAGARRSAREWGKSDPIDALAVARAALRESDLPVARLEGKSREVKLVLDHRDDLVGERTRVQNRLRWLLHELDPNLDVRERSLDRKVVLKRVAKVLAGHRGVAADIAVEQLERVGQLTKRINELEGQIRALVSDLAPTLLELEGCAALGAAKLIGETAGITRFKTPARFAMHNGSAPIPVWSGNTGRHRLNRGGNRQLNVVLHRIALTQMRLGGRGYDYIQHRRAGGDTMREAMRALRRRISDEVYRRMWQDSMRTTRDRAQAAA

SEQ ID NO: 505696 - protein, 576 aa, unidentified
MKYKHARKQNQRIQQITESTLVVGADIAKKTHVARVVDFRGIELGKDCVFGNDHLGLSKLVTWMKELQQCHHKTEIILGIEPTGHYWFPLAEFLNRENVKVAVVNPHHVSKSKELEDNSPTKNDYKDAKVIADLVRGGKYSEPKLPVSVYADLRILMNLREKVMVNFGQVQRRIQNWLDRFFPEYGEVFKDWEGKASLITLSEFPTPSEIVGLGASAIARRWKEDVKRAVGPKRATQLLETATTSIGLTQGLSAAKIELRTLLEQYEMFAKQLEDIMTEVERLLAQIPGTNEMLTIPGVAVVTLAGFLAEVGDLSGYDHGQQIIRLAGFNLKENSSGKKKGKSTITKRGRSRLRALLFRAVMPMVAKNTEFMDEAVRIVKEYFEKKHKITPGIIAGLHTFGSKLNFNPHVHMLVTMGGMKKNGEWKSYDFVPFEMLRKQWQTVVLKLIRRNLIERVKKQVQARLQKAYSKNGEGFYMHAPKQKGNVKVQLGYIGRYIRRPVFAVNRIVEYDGEYVEFCYHDKTDGQEKTERVTVEEFISRLIRHIPDENFKTIRYYGVYSRRIKAHFNMKVSICKN

SEQ ID NO: 505697 - protein, 339 aa, unidentified
MEQISRIGMDTSKHVFQLHGVNALGVTVLRKKLRRKEMVAFFEKLAPTVIGIEACGASHHLARLLSSFGHTAKLIAPQLVKPYVKRGKNDAADAEALCEAMSRPTMRFVPVKTAEQQATLMLVGVRDRLIRNRTQLANAIRGYAAEFGLTAAKGMAHLVPLLERIEGDESLPALARELFAIQAEEYVRLQAQIDDIDAKLTAWHRADDCSQRLAKIPGVGAIGAALLKMKTPDPVQFQSGRQFAAWVGLTPRDHSTAGKVRLGGITRAGDEGLRSALVLGATAVIQQALRSGKASPWLAELLKRKPAKLAAVALANKTARIAWKMMLTGEAYNAKSAAA

SEQ ID NO: 505698 - protein, 347 aa, unidentified
MRFYTKQHQFYCGIDLHARSMYVCILDQAGEILLHQNMKASPEAFLRAITPYRADSVVAVECIFTWYWLADLCAREGIPFVLGHALYMKAIHGGKAKNDKIDAHKIAVLLRGGMLPQAYVYPAEMRATRDLLRRRMYLTRKRAELLGHVQHTKSQYNLPEIGKRLAYKANRTGVAERFPDPAVQKSMEVDLALIDSYDHLLGDLELHIVKAAKQHDAQTVYLLQTVPGIGKILSLVLLYEMHDLARFPSVQDFASYCRLVKCAKESAGKRYGTAGTKIGNAYLKWAFSEAAVLFLRDNPAGQKYLARLEKKHGKGKALTILAHKLARAVYYMLKRGVVFNLDTFLHH

SEQ ID NO: 505699 - protein, 341 aa, unidentified
MNKLDFSGIEVSAEELVVALQREGERKALKSFPNTPSGHQAIIRHLSGAGRAVRVCLESTGLYGLDLALALHRAGIEVMVANPRAVRHFAEALMKRSKNDRIDARVLLEFAARMPFHAWQPPAPAALQLHALARRLQALTEMQTAEKSRLNAIQATDTTPAALRRDLDRSLRSLRRSIARLSGEAVKIIDQDKELKLRFDLLLSVRGSIAATSAIQILAELGVVSPDLEVRQWVAYTGLDPREYSSGSSVHKKVRISKAGNAHLRRALYMPALVAIRHQPHLRAFYQHLRAQGKLKMVALVAVMRKLLHAIYGMFKHQKPFDGSKVYSLPSSKISTEEVAA

SEQ ID NO: 505700 - protein, 410 aa, unidentified
MQRVFRVCAGIDVHKKMLAICLLKAGSAGTVSKEIRTVGTTTRELLSLLDWLVTEHCESVAMESTGVYWKPVFNLLESSIPVVLVNPQHIKALPGRKTDIKDCEWIAELHLHGLVRASFIPPREIRELRDLVRTRTKLIGERSQHINRIQKVLEDANIKLSSVATDVAGVSGRLMLKAIIAGECNPNVLAEMARGRMRSKRPELREALTGHVRPHHRLLLQTHLNLIDSLNAAMDALTLQIEERMRPFAKIRDRLDAVSGIGPDVATVYISEMGVDPLPWPTYGHAASWTGLCPGHHESAGKHKSGRTRKGNRWLKQAFVQAAWCAQRANGTYMQAHYRRIRSRRGPKKAAVAVAHSLFVRCFMLVATGAEYHELGPTYFDERRKETLTRRLVGKLKDLGYDVSLTTNAA

SEQ ID NO: 505701 - protein, 364 aa, unidentified
MKRKVYVGMDVHKETIRIAYLTSNSKEILKEQQIKHNEVQIKKFIKKLKTEWNEIYCCYEAGVTGYPLYRYLKSLGVNCILVAPGKIPRQNTDKIKTDKRDAIKLARLMRSGELESIHVPSEEDEAVRDYLRSRDSLRLDLGRNRQRLMKFLLRKDIKYSTTKYWTVSHYKWLNNLHFNNEILQETFNDYYSRVRVQEENLKSMDKKIQEIAESEPYREKVGILRCFRGVDYLTAMFLLCEVNDFKRFKTAGSFMSFLGLVPGEYSSGSKRKQTGITKTGSPRLRRILTEAAWQHRFPGTGSKIITARRSGQPALVVALAEKASLRLHKKFRNLQLRGKTPQVMITAVSRELSGFLWAAMNLVA

SEQ ID NO: 505702 - protein, 404 aa, unidentified
MYNAVGIDVSKGKSTVAVLQPGGTVIRKPFDVSHTSQNLNELADYLSSLDGTTKIVMECTGRYHEPMVKALSEAGLFVSIVNPHLIKNFGNNSLRKVKSDPADARKIARYTLDNWTELRQYSGMDNTRTQLKTLNSQFSFFMKQKVAAKANLIALLDNTYPGVNKLFDSPTREDGSEKWVDYSYSFWHADCVRKIGLKAFTERYMSFCKKHHYIFQQDKPEKLFNASKELVAVFPKEKTYKLLIQQSIQQLNLASEHVERLRREMNELASTLPEYSTVMGIYGVGKTYGPQLIAEIGDVSRFTHREALTAFAGVDPGVDESGQHKSKSNRASKVGSARLRKTLFQIMTTLLQNAPEADPVYCFLNKKRSQGKPYYVYMTAGANKFLRIYYGKVKECLRNLEQTE

SEQ ID NO: 505703 - protein, 433 aa, unidentified
MPTTHPYDLVIGLDRSDRKADLHLIDTRTGNVQKQTVATSPEALHDWLVQLRRDHPQARVAICLEQPAANLIVFLETYSWITLYPINPISLQKFREAFVTSRAKDDGKDAQYLAELLLSHPDKLKAWQPDDSQTRQLQQLVLHRRAVVDQRTGLTNRLKALLKQYFPQALDLCGEDLWRPLATAFLLKWPTLQSLKKARKESLKQFYYLQGSRSQTLIEQRLERIDKAVPLSDELALLQSYTLRVQLLCKELQLLLKTLQQFDQQIAKVFQQHTDRPIFEAFPGAGPVLAPRLLASMGSERERFAQPENLQSFSGLAPVTKQSGGTCSIHRRYLCPKFLKQSFHEYAKESILHSRWAAAYYGQQPNKGCGHHTAVRALAYKWQRIIWKCWQTRTIYKEAIYEAALKKNKSPLIGLLDQIELGKSPVKSRAKKS

SEQ ID NO: 505704 - protein, 414 aa, unidentified
MKQVLYVGLDVHKESIVVATAPQGDTEAQLYGKIGGTLDALDKLIKKMEKPDLELRFVYEAGPCGYVIYRHLKKRDYECQVIAPSLIPTKASDRVKTDRRDARQLARLFRAGELTAIYVPDEEDEAVRDLVRARDRTMIDQGKARQRLKGFLLRLGHRYLGRGNWSAEHLLYLASMKLSHAAQQIAFQEYLEAITVATERLERLTKAMEAALTAWKREPVVRAMMSLRGVALINGMTLVAEAGDLTRFDSPSQLMSYFGLTPSEYSSGEKRQQGAITKAGNGACRRALVEAAHHYRIAPRVTPRMQERQEGQSKEVRAIALKAQQRLHSRYRLLTGRHKRTVIVVAALARELCGFVWAIACQVSAPDKVQWRQKAIVKENMADVPNTPAQPNTSKLATATKKQYPLNSEKVFKK

SEQ ID NO: 505705 - protein, 379 aa, unidentified
MGDCSEAFVGFDTSKLRNAVAIADGGRDGEVRFFGEIENSEAATAKLVRKLAAQYQRLTFCYEAGPTGYGLHRQIESLGYECIVAAPSLIPKRPGDHVKTNRRDAVNLAKLLRAGELTAVWVPDRHHEAMRDLTRARETAMLDLRAKRQQITSLLLRQGRHYQEGNQKRRKPWTKIHKGWLMRQKFDHAERRLVFEEMMLAMRQAEERLARLEQAIRVAVPDWSLAEVCTGLMAMRGIDLVSSAGILAEMGDLNRFPTPSELMAGLGMVPSEKSTGETIKRGAITKAGNRRARRLLVECAWAYRHPPRVGVTKQAKVAAAPRAVREIAWKAQHRLYGRYRALIRRGKLKNVATTAVARELAGFIWAVNREITSAGAAAK

SEQ ID NO: 505706 - protein, 312 aa, unidentified
MAQMVITAGIDVSKAWLDVALWPTKAELRCRAQCRRYHRLGAWLSEHGVMRVGLEASGGYEVEVIDALQARGFEVARFNAQRVRLFAKAKGRLAKNDRADARTIAQATAVLLDAAPPQRRRDLEPLVEHLTYRRRLREWIVDCTNQLEHLKDKALRRKLIARRAAWQNELAAHDRTLASLVAQHDEWHDLEQRLRTVPGVGPVLAQTLLALLPELGRLSRRAIASLSGVAPFDDDSGKRAGERHIKGGRAVVREALYMAALAAKRYNPAIAAFANRLAGKKPKVIIVACMRKLLVILNAMLRDGTDWQAKAA

SEQ ID NO: 505707 - protein, 364 aa, unidentified
MDKLTHIGLDVHKETIAVATLRPDGIDCDERVIPNTPEAIRKLLSRQTDRSFVRTCYEAGPTGYDTHRLITSLGIACDVIAPSLIPKRTGVRVKTDRIDARKLAHLHRAGELTPVRVPTPAEESVRDLIRVREDLKCDRRVARQRMKSFLLRHGKRYAKPRADWSWRFGLWLTTQKFDEAATQSAFDHLMSACSVRDSQLAAIDKEIEAAALTEPLAQPVARLRVFRGIDTLSAATLVAETCDFNRFPTAASFMAFTGLVPSEHSSGATTRYGSITKTGNPHIRRVLVEASWSYRYRPAVRDKLKKRQESLPPELVAYSWAAQCRLHATYKKLAYKKNVNKAVCAVARELAGFIWGAMTENMEG

SEQ ID NO: 505708 - protein, 372 aa, unidentified
MIVVGTDTHKQTHTCGAVDALTARARGELTAAARRGSFGKLLVWARKLDRERVWAIEDCRHVSGAFERFLIARGERVVRVAPKHMAGARRSARERGKSDSIDAFAVARAALKEGLENLPGAHLDGRALDIRLLSDHRDDVIHARTQDQQRLRWHLHDTWPEFEIPSGALDTEKWLGKASRRLARAQQTVRVRVARELVRQIAAHTTRINELERELARLVADYAPQLLAEPGCGPLTAAKLVGEIAGADRFATDAKLARTSGTAPIPASSGATHRHRLDRGGNRQLNCALHRLAVNKGKWDPAAAAYLERKQAEGKSRKEALRCLKRYLARRVWKLLYTPPATAAPAAALPVATETTDRVEIVGAPSRMICLG

SEQ ID NO: 505709 - protein, 390 aa, unidentified
MIYVGIDVAKDKHDCIIVDSDGVIRFPTFTIPNNKQGFRELLTNLKTCGSDFAQIKVGLEATGHYSDNLLEFLIANDLPTTVINPLHTNLYRKGLSLRKTKTDTVDAHSIVTMLRTECLKPYSKTSYHVRELKSLTRYRFSLVQDCARLKSSYARLCVILFPELEKLVPSLHMASVYALLSEFPSARAISQCHLTRLSNLLTTASKGRYGKEKAMEIRNAARDSIGSYSDVKSLELQQTIQRIRMMEDQIKQVEAEINPIVDEFHSPLLTIPGISYRMAAILIAETENFSNFDSAEKVLAFAGLEPSVYQSGQLTSTHAKMVKRGSKYLRYALFNAAKYVCHWDGGFGQYLAKKRAEGKPYNVAVSHAAKKLTRVIFHLVKTNQTFISQA

SEQ ID NO: 505710 - protein, 383 aa, unidentified
MRTVCGLDVHKDSVYLCILSSTGEIYEKKFGVLTTELIEMRDLMLSHHVLEVGMESTSVYWIPIWRVLEPHFKLKLINPYFIKQLPGHKSDVKDAQWIAECMLKELVNGSFVPPERIQQLRQYDRRIYDLDDEIIRKLAKLDAAVQRCNIRLSNYVSNTDSVSYKAVIDKICEGVTDPNVLVEEIHGRIINHHGKKTIIASLTGSITECDIDIMRQLKAEIDLAEQHKQQCMDKMLAICENEYSTQLHNLQTIPGVKMRAATSLIAEIGTDMSHFETANHLASWSGLKPRNDQSNKTIKSRRITYGNRYLRRTIIQCSWGASRTKNCFFSRFSYHQTQVRKKNRMKVQVAIARKMLICAWNILKDGVSYKDFNNIIEASVING

SEQ ID NO: 505711 - protein, 355 aa, unidentified
MNSEKYIGLDVHQATISVAGLDSTGKLVMESILETKAATILEFFAGLRGTLSVTFEEGTWAAWLYDLLKPHVAKLVVCNPRKNALLKDGNKSDRIDAHKLAELLYLNKLSSVYHGETGVRMLRELARSYLTIVKDLTRVMCRLKAVYRSWAIPCAGRDVYYRRHRSEWLGKIKEAGVRRRAERLYQQLDMLQYLRQQARRELLAESRKHAITVKLRQIPSLGPIRSALAVALIQTPHRFRTKRQLWAYSGLALETRTSAEYCYVKGGLRRSKKQISIRGLNKDHNHDLKGLFKGAATRASVLPGPFQDFYQRSLAKGIKPTMARLTLARKIAAITLTLWKKGENFDADKLKSQAA

SEQ ID NO: 505712 - protein, 310 aa, unidentified
MIIASGFVGIDVSKHHLDIFDAAVGVAARVANTAAAVAELAHDWARRDAFVLFEATGRYDLDLRHALTAAGVRFARVNPARARDFARAAGFLAKTDAVDAKMLAAMAQCLQLPAEKAGLAARERLAALNRRRDQLVANRQQERTRQRECSDPFSRQSIAAHLAWLDAAIEAIQAQIAAAIAAEPELEHDRRLLSSAPGVGPVTAATLLALMPELGRRSPKQLAALAGLAPFNNDSGTRRGQRSIRGGRKRVRDALYVAAFVAARHAPRFKAFFKTLFEAGKPRKLALIAVARKLLIVLNAILRDRQPFHA

SEQ ID NO: 505713 - protein, 371 aa, unidentified
MEHTRFVGLDIHKERISVAVAESGRSGAVEYHGEIANDSAAIGKLCERLGRPGKPLAFCYEAGPCGYGVHRQLTNLGHRCDVVAPSLIPVRSGDRVKTDRRDATLLARLHRAGELTPVWVPDADHEAMRDLIRLRSVVRQIVTRARQHLQGFLLRHGRKHGGGTAWRMAYRRWLSTLAFEHPAQQIAFQDYVDAVMDAERRLKGVEEQIIGLLPEWNLRAVVDALQAMRGIALINAVVLVTEVGDFTRFSNPRQLMAYFGLVPGERSSGQTVRRGGITKTGNAHARRALIEGAWAYRMRARIGRHKVDRIEALPKVIRDIGWKAQVRLCSRYRRLSARGKTANVVNVAIAREMVGFIWSIACTVQSTPRQA

SEQ ID NO: 505714 - protein, 375 aa, unidentified
MKNIRFVGLDVHAESIAVAVAERGGEVRSLGTVPNQESALRRLIRRLGKREELRVCYEAGPTGYVVYWWLVGLGVHCDVVAPTLVPVRAGDRVKTDRRDAVKLARCYRAGDLTSVWVPDPAQEALRDLVRAREAAKKDQLRLRHRLQKFLLRRGVRPPQGSRAWGTVHRGWLHTVRFQYPAQDTVMLDHLCEVEHAEERLRRLDQAIEDSISTAPEHLRELVAGLAAMRGIARPAAAMIAVELGLMSRFAKPRQLMGYAGLVSAEHSSGGSVRRGAITKTGNAHLRRILVEAAWAYRHRPGIGRELAKRQKGISRAICETALKAQHRLHRKYVRLSSRGKPHQQVVTAVARELLGFVWAVGLQVERELQLQKAAA

SEQ ID NO: 505715 - protein, 404 aa, unidentified
MDVIYARCCGLDIHKKTVVACLISSAPGQQPQKEVRTFRTMTTELLTLADWLHAAECTHVAMESTGVYWRPVYNLLEGLFTLLVVNAQHVKAVPGRKTDVKDAEWIAELLRHGLLRGSFIPSKPQRQLRELTRHRTTLVQDRARVINRLQAVLEDANIKLAAVVTDIRGVSARAMLEALITGERDVTVLADFARGRLRAKRDQLEEALQGYCTPHHSFLLTEYLSQIDYLDEAIARVSAMIAQHLEAEQEAIALLDTIPGVSQRTAEILLAEIGTDMARFPSAKHLASWAGICPGHYESGGKRLSGKTRKGSRWLRQVLVEAAHVAAKTKQTYLAAQYRRIAARRGKKSALIALGHTILIIVYHLLTRKQPYQDLGAAYFDTRDQRRIEHRLVRRLERLGYCVS

SEQ ID NO: 505716 - protein, 408 aa, unidentified
MKGYLLPDVTVSGIDGLVQQKEIAMQRPTNVSQIGMDCHQKFSTVTARDGEGQIVWRQRLEHADRPALRTQLRAWPPGTPVVLEGTFGWGWMADELLAAHLDPHLASSRKVAAWRDARGLAKSNRTDADLLAELYAERTRWWEVWLAPPAVRQQREWLRSRMALVRIQTGLKNRMHAVLHRHGIVPESSDLFGVAGRHFLQRLVGAPNEQLPASGRATLRGDLQLLDHVRRQIAQATREFRRQVVQHAGAETLRSLPGISYVLAYTIAAEIGVLERFRTNRHLVSYSLLAPRAADSGEDDGLAPRGRHVGKAGRRTLKWAWIEAAHGAVHSGGLWRKTFDARTNGGRRDRNRGYIAVARRLCVTAAACWRKGVPYSPVPPARPGSRRAACAARPGTGQPDTAMVPAAQ

SEQ ID NO: 505717 - protein, 348 aa, unidentified
MLADQLDYVVGVDPHRDSHALAVVQVLTGAVVFETTVAASSQGYVQALEVVDEHASGRRVFAVEGTGSFGAGLTRFLSGRGERVLEVSRLRRERCSGGKTDALDAVRAARSVLGQERPATPRAGGERQALQALVAAREGAVNAKCAGLAQLRDLLVTTPEPLRSELRPLTQAPLLRRLAATRPEGRRDPELRGSMLALRSVARRVLQLQAEQRELGRQIEALTRKLAPQLLDQPGVGPHAAAQLVLSWSHPGRIRSEAAFARLAGAAPIPASSGQTVRHRLDRSGDRKLNRALHLILVTRKRTHPPTRAYIERRIQEGKTRREANRCLKRYLARNLYRLLEHGPPIAT

SEQ ID NO: 505718 - protein, 324 aa, unidentified
MIDGILGIDVCKNTLDVSISSYTKVRTKSFTNSPDGWRHLLDWLIAQKIQRVHACLESTGRYSLGIACALYGADHVVSIINPAQIRDFVRTKLGRNKTDGVDASHIREYCELFKPSPWAPPSEAHRRLGELQTIRSGIIAGLTEWKNRKNSGIVDAEAQALADATISHFTSQLGAVDKAIALTIDNDCDLQSKRDLLLSISGVGETLAGVVLAELPGPDVLRSSAEVVAYAGLNPRRHQSGTCIDRATRISKIGNAVLRAALYMPALSAMRYNSAIVALVTRLKSRGRLKPKQIVVAAMRKLLVLCFGVLKTGRPFDAAIAMGG

SEQ ID NO: 505719 - protein, 428 aa, unidentified
MASVTDAIAPCTWVAIDIAKGVNVALVEHADGRQQRFRFTHERGDYDRLVEFLRGCSQPCRVALEPTADYHRTIAYRLISEGFDLVLVSSVAGARLREAVFNSWDKNDPKDAQVIMRLLKQGMTQRYCDPLLMHTHDLQELAKTYHHISRARTRLQHVLLTHYVTLYFPEIERFWSPQRNEWFIRLLIQFPTPASIAALSVEEFRDRIWKSMGRRVHKEAKIQEIHALATRSIALPIETDSTAVSTFRLQLERYLQLCQTRDALERNADALLSENPDYQRLRTIPGIGSIIALIILAEAGDLRRFGHHRQFLKFCGLDLAKSQSGAFRSRDQLSKRGNARLRCALWMAAMSAARMRETAFRDKYRRYIARAPEDLDLNRKARTAVAAKMARVVYALIKHGQPYRHCFDAGLPSGSIPLTRAVEAFGTS

SEQ ID NO: 505720 - protein, 315 aa, unidentified
MEDSQVFVGIDVSQSCLDVAARPTGEVWQVPNDADGISDLAQRLVGMSPFLVVLEATGGLEWALTAELAAAGLPVAVVNPRHVRDFARAVGILAKTDILDAQVLARFGQAMEPEPRPLPDAEAKDLQAMVSRRRQLVEMITAEKNRPRTVIARIRPQVEEHIRWLEKSLTDLDQDLDGFIRSSPMWRTKERVIRSVPGVGPVLSATLLANLPELGELSRGQIAALAGVAPFNRDSGTLKGKRTVWGGRRRVRAALYMAALVASRYNPVIKDFYQRLCSLGKPKKVALTACMRKLLVILNSMVRHGREWQLNLQTP

SEQ ID NO: 505721 - protein, 352 aa, unidentified
MDTQLTAELPKLYIGIDIHKRSWKVHCSTDLFSGKSFSMPPEPELLQKYVIKHFPDHGVSTAYEAGCCGYYAHRCFESYGWQSLVVNPADIHRKGKERYTKTDRIDAQLISRELKDGRLESITVPEKQREELRSLFRRRNDLVKDFRRVKSYIKMQLLYFGVKIPEEFDNDHWSHRFRYWLDDLEFSFPTAKATLDSRMRYFRFIDQDLRLVSNQLRAYCRKHYKKDYYLLKSIPGIGGIVACGILSELGDLRRFNSVKHLAGYVGLAPGIYQSGANSKSLGITPRAHRLIRSYFVEASWQAIRTDPVMQTYYRKHTGKDVKKIIIKVARKLLSRTLAIIKTEIPYEIGVIK

SEQ ID NO: 505722 - protein, 365 aa, unidentified
MEYYTAIGIDVSDKTSKICIMTKIAGERRIIEETTVATTKEAFSEYLATKDRKVAVTFETGVHCRWMAQLIRGMGFKVNVANPAKLRALTHSNSKNDRNDARELARYTLADVEMLHPVYLRPETHQQMIRLLEARLALVETRTKLINEMRGFAKSMGFRIPKKDAAYFHLLDRTGWPKDLEAVCWPMMGVLKTIHVKIAAIEKQMHELADTPEFAADVERVRQVVGVGFFCSVAYVAILGGNYARFEKARDVGPYLGLVPRQDQSGDIDKQLPITRAGSTLLRTLLTEAAQVVLKDGVRMTDLKLKGLRIAERGGKNARKRAVTATVRGLAVTMMALLKHPEREYTPLSEANQKFIEQMETIKTA

SEQ ID NO: 505723 - protein, 375 aa, unidentified
MQNKVRFLGLDVHADTIAVAIAEPNGEVRSLGTIANRAESIRKMVKKLGAVDQLRACYEAGPTGYVLYWQLAELGVHCEVIAPTLVPVKAGDRVKTDRRDAERLARSHRSGDLTAVWVPDAGSEALRDLVRAREAAKQDQLRARHRLSKFLLRSGQRPAQGFKAWTQPYMNWVKQIRFTQVAQESTRLDYLTEVEHMGERVLRLEKAITEAVKLASPELQEVVKDIQALRGIAQISAVTIAAELGNITRFEGARQLMGYSGAVPSEDSSGKRLKRGSITKTGNAHLRRIVIEAAWSYRLRPGVGPALRKRQEGVPEEIKEIAWKAQNRLHKRYMKLSAAGKDQRKIITAVGRELLGFIWAIGTKAEAAIKQQKAA

SEQ ID NO: 505724 - protein, 315 aa, unidentified
MQTPVDIGADISKDYLRVSCATGSLPSIGLANRRASLLAWLKRLPAGTRIGMEATGTYHELLATLAHRLGLVVYVLNAKHVHHYAQATAQRGKTDRVDAELIARYVAKEHSHLHIWHPASPAQRQLQRLMRRRGKLTRARAALRSTLQGVPSLRTDVRVLLKHFDALIAKLDTQARALLKASVEREQAFQRLDAIPSVGSAVGIGLLAALERWSLPRADSFVAFIGLDPRPDDSGKRSGRRRLSKDGDPELRRLLYTAAMSASRTRVWAPVYQRALARGLSRIQALVILARHIARTAWSVYTHKTQFDPARVHSS

SEQ ID NO: 505725 - protein, 360 aa, unidentified
MEVGQTMADHGVVGGVDTHKDLHVAAVVDELDRVLESRCFATTRHGYQQMLTWMRSFGQLRRIGVEATGTYGAGLLRYMQNAGVEVLEVTTPDTHDRRKRGKNDDLDAQNAAHAAFAGRRTVTPKSRDGMVESLRVLKACRKTAVAARRVALQMIHNPIVCAPDELRETLRRMTRMQLIRTLAAWRPDLTDYRSVVSAYRITLKSLGRRYLELHDEIADLDTMIVAIVDELAPALVARNSIGHGSAAQLLVTAGDNAERLQSEASFAALCGVSPVPASSGKTTRHRLNRGGDRAANSALHIIAIGRLRTDPRTKAYIAKRVAEGHSKLEAIRCLKRYIAREVFSLIRQRKREINQGRNAA

SEQ ID NO: 505726 - protein, 342 aa, unidentified
MYYIGLDVHKKTISYCVKDASGLICQEGKVGATRWELDIWIKTLPQPWTVAMEATIFTGWIYDHLKPHAAAAKVAHPLMLRAIAAAKKKNDSIDAAKIADCLRCDFLPECYMAPTEIRERRRTLRYRHLLVRQMVQMKNRVSGLLMETGVSHNKQRLHKVGYFPELLANADAVSASIRPLLLLSRESITRLQRTEGAIIRSLQRDPLLAERVRRLQTIPAVGKVTALSWALEMGDISRFRSIRQAISYCGLCGDEKRSADKVARTPISKQRNKHIQRVLVEAAKLAPRRNPDLALVYENARQKGNANCATLAVARKLVAYLMVVDREQRDFEPVRGLVGIAE

SEQ ID NO: 505727 - protein, 312 aa, unidentified
MENKVYVGIDVSKDKLDLAIRPDGQEWSEGQDDASLEQLVRKLKDIAPALVVLEATGGYEARVAALLATAGIAVSVVNPRQVRDFAKSTEKLAKTDRLDAHAIAHFAEAIQPQVRYVSDEEGREITALMSRRKQLIEMMVAEKNRMHTCLPKLLPNLKAHIAWLEQCLEELDKDVQDKIQNSAIWHEKDDLLRTVPGVGKVVSFSLLAGLPELGVLDRKKIAALVGVAPLNRDSGKYSGRRGIWGGRGDVRSALYMATLSATRCNPVIKSFYQALVARGKLKAVALTAAMHKLLTILNAMVAKSKPWCPPIA

SEQ ID NO: 505728 - protein, 267 aa, unidentified
MTYYAGIDVSLEYSSVCVVDGAGKIMREQKIASEPEALIAWFRGLGFELERIGLEAGPLSQWLYAAMRAAGLPVELLETRHVRDAFRAMPVKSDRNDARGIAQLMRLGWFRPVHCKSMAAQEMRALLTARKLVQSKLLDVQMSLRGLLRGFGLKVGATTPSRFAGRIRDLVEGNATLEVIAAALLVVHETLRRELAGFEKRVRSIARSDGRVRLLMSTPGVGAIVALTYAAAIDDPARFKSSKAVGAHFGLTPKKYQSGETDITVVP

SEQ ID NO: 505729 - protein, 379 aa, unidentified
MNAKTTLSSANRLSLPVEGMTCVMRWSPRPVRSTIAMCLLGGIIMKNVSLIGIDIGKHSFHIHCQDNAGRMVLRKKFTRAKLFEFLAGCSSATVVMEACSGSQYMARRIADLGHEAKLISPQFVRPFVKSNKNDFIDAEAICEAASRPSMRFVLPKTENQQMMSALHRLRESMVADKVKTANQMHGFLLEFGVSLPKGEAVIKRLSSVLADNLLPEQLVRLLLMLHEHYNYLLAQIHALDKKLEDSLLQDENASHLQSIPCIGLITASLLSCELGDGKQYENGRNFAASLGIVPRQYSTGGKNVLMGISKRGNKNLRRLLVQCARIFMIRLNNQQGRLADWVRELLTRRHSNVVACALANKLARIAWAVSYHKQPYAQF

SEQ ID NO: 505730 - protein, 392 aa, unidentified
MLYLGIDQHGKQLTVNLRDEEGRVLIARQVSTEWKRVRAFCEQLRQQGQAAGGFKSVLEVCGFNDWLVKMLRDEFGCADVVLVQPVSRSRKKTDRRDAAKLSELLWINRQRLERGEKPPGLRRVVLPSPEDAENRQLTAFRKRLGECRTKTLNKIRMILMRHNLQQECPTRTRHSQAARRWLEQLALPEIDRLEMKLLLEQWTFWDKQLVEVEKKICERHAKHAEAQLMATIPGARDYTALALASRVSGIDRFPRASSLANYWGIVPGCRNSGEATQRLGSITKEGSALARFLLGQLVLHVLRKDRPMKDWYQRIKRRRGAKIARVAVMRRLATVIWHMLHDRRSYQQVRDQEQARGAPRGVAGTCEESPPRRLAAVERGTAKRAKKQSARV

SEQ ID NO: 505731 - protein, 438 aa, unidentified
MRKKKNNASKRIHFQSLPLINPNAAGIDVGAKEHVVAVPPDRDPQPVRTFQAFTPDLHELAAWLKRCGIETVALESTGIYWISLYEVLELHGFEVRVVNARHVKNVPGRTKTDVLDCQWIQKLHSFGLLNGSFRPDQQIRKLRTYMRLRDNLVVERTQAIHHMQKALFEMNVQLSNVISDITGESGLRIIEAILAGERDPEQLAPLCSTRIKASRQTVAKSLHGNWDEALLFCLKTALETYRFSENKIQACDQCIERQLATFEIRTPLPNAGQSLRTQLHQVCGVDLTKIPGIKEQAAQIIISEIGLDMSPWNTEKQFSSFLGLCTNNLITGGKILRRATRKVYNRAADTLRLSAQSLTHSKSALGAKYRRLRARLGAPKAIVAMAHHLARLVYRMLRYGEKYVEKGIEHYEQKFRLQRIKWLKKEAKSLNLQLVAAQ

SEQ ID NO: 505732 - protein, 341 aa, unidentified
MFYVGLDIHCKHITMCILDNDGRIVQRQTVRQVDQMIRVLAELPDRFAVCYEASCGYGYFHELLTPLASRVVVAHPGLLRLIFRSKRKNDRGDAEKLAKLLYIDQVPTVHVPSAQVRAWRELIGYRQKLVQKRTRAKNGVRSLLRTVGIRPPKRPGLWTRQGMAWLRVCEFSESIHALKRDLLVEEIETLSAQLQRVEKELARFSKDNPAVWQLQSIPGVGLRTAEAVVAFLDDPHRFRHSKAVGSYFGLVPSQDQSGDTNRLGRITREGPAVARHLLVEATWQAVRRSPTIAAYFERLQRGDMNRKKTALVATAHYLVRVMWALLKQGTLWKETISNQAA

SEQ ID NO: 505733 - protein, 459 aa, unidentified
MSTFYLGCDVSKGYADFVLIDHKKNIVESNFQLDDTDAGHNKLEQILRSFFEKNPQATLYAAVESTGGYENNWFQALKMLGVRFAIKVARLNPVGVNHHKRAGLKRNSTDKISALAIAEYQINHADVIHYDEQDPYKSMKRLFTAYRMLRKIRTQLLNQLESLIYTANPELVKYRKDNTPQWLLRLLNQYPVAENLAKASIEELDCIPHIDSDRARALIEGAQSSVASATDQPTQVLIKVVTNQIFELDKSINALIKQANEYADVHEISLISSIDSIGLMSAIGLFIELNGDIRLFDNAKKLSSFWGTHPILKDSGDGSMVPKMSKNGRSKPRSILYMAVLNGIRCDGFISDTYKRELKKGKCKMSAIGVCMNKLARIIFGVLKNDTPFDPEINRRHQLRSRPKTSSFKTKSDKRRFQQEDQNAPISRRQSKKRKEREQSQSEQVTISEIKSSPLVEHS

SEQ ID NO: 505734 - protein, 351 aa, unidentified
MLYTGLDLHRSFSYITTMNDKGEIVGQKKLPSNGEIAGFLKEFDDTMEVAIEATPSWYWLYDCLEDEGFKVKLSHPLKTKAIAYAKVKTDKVDSATLAHLLRSDLLPLSYVPEKPVRLNRELLRYRARLVRVQTRIKNNIHTILAKNNVSHSYSDLFGKEGMAFLYSLSLPENYKIALEGYLSVLETLRHEIRLASKRVQALAEENQDAVLLMTIPGVGYYSALMIKSEIGDVKRFPSAKQLCSYAGLVPSTYASGNTCYHGHITKQGSRWLRWILIEAAIHAVKRPGPLRRFYFKVERKKGGKVAKVATARKLLEWIYHMMRDNKSFKEVERLAELQGKGEPVKKPGLVL

SEQ ID NO: 505735 - protein, 410 aa, unidentified
MTNTSIAQTESVLVAIDIAKSRHEVLMAIPGRKRRRRLTVLNRLEDFDRLIAALLEYNHPVRVAFEATGNYHRALAYRLGVAGFEVKLVSSVALARTREALNNSWDKNDPKDAQVILHMMQIGNEQFYHDPMLCGTNDLQELSKTHDIVSRAKTELWHRVLTHYLPLYFPEAERFHRSSRSDWFFAFLERYPSPHFISAMDQEAFIIDAWEVVGRKVSKERLLADIYQTAKTSVGLPISPDSDAARMFRLVLGEGRNLIAQRNEIEDRAVELLAQNSDYQLLTSIPGIGPINALTILAEAGDLRRFRHHRQFLKFCGMDLATIQSGSFRGQTKLSKYGNARLRRTLWMAGQVAIMQSANSFRDKFERYISRDRHNAHLRRKAYTAIAAKMARTVHGIIKRGEPYRPFFEG

SEQ ID NO: 505736 - protein, 430 aa, unidentified
MKSNTQNAKIEAITEKTLVLGIDVGSETHYARAFDYRGVEYSKKPFKFSNTEAGFVTFKAWVLDIKEKHGKDKVIPGMEPTGHYWFNLGKFLQDNEMKPVLVNPHHVKKSKELDDNHPTKNDRKDPKVIAGLVREGRYMIPYLPDGVYADLRTASNIRFQLQAELTRIQNRINRWFNIYFPEYKTVYGKPDAKSGILILKEAPLPEDILTLSIDGVNQIWRDAKLRAVGKARAKTLIEAAEHSVGSKEGAVSARMEIRMLLEDYESRNIRLQEVMGLIEGLVNQIPMAEKLLEIKGVGIKTVSGFLAEVGDIRRFNDPKELQKLAGLALVENSSGKHKGKTTISRRGRKRLRYLLFEVAMSLVAKNPEFRELHNYYTTRRLNPLKKMQSLMAIAAKLLRVFYAILTKGVGYDPKKMVNDIRRPAAYAQAA

SEQ ID NO: 505737 - protein, 340 aa, unidentified
MNTTRIGIDLAKSVFEVAISRTPGRVDERQRLARSRMHTFFAQQETAEIVMEACGSAHHWGRELEAMGHRVLLLHPGDVARYRDGNKTDRADAKALLEAARNEDIDRVPVKSVDQQALGALHRLREGYLRTRTARINALRGHLREFGVVISMGAKHVLPEARAALDRDVVPAYLRDALEELLVEIETLRAKAEGLRAELERLADRMPEAQWLMSVPGIGVLTATAFVAFVGDVRRFRSGRDFAAYLGLTPREHSSGFSRRLGSITKRGNTYVRMMLIHGARSALHAGKISKEPDNLRTWALAIEQRSGHNVAAVALANKLARVCWRVWRDQRPFERRLAA

SEQ ID NO: 505738 - protein, 338 aa, unidentified
MDTYAGIDLHSSNSFVGVINAEDQRLYGKRHSNRLDDILRALDPFQDSLKGVVVESTFNWYWLVDGLQEHGYAVHLANPSAIQQYEGLKHTDDKWDSFWLAHMYRLGILPEGYIYPKEHRAVRDLLRRRLLFVKHSTSHILSLQSTISRNLGLRMSGREIKKLKPEDIGGMFDCPNLVLMANNSLAAINFLKKIILDIEKNVKSQVKMRKEFLMLLTIPGIGNILGLTISLEVGDIGRFPAVGNYSSYSRCVESKRLSNGKKKGENNKKNGNRYLAWAYVEAAQFCRRYCVKAQSFYQSKAAKSKPVVAVKALSNKLSRASYYIMRDQVAFDEDKLFS

SEQ ID NO: 505739 - protein, 335 aa, unidentified
MYKYIGIDVAKSTLQVFIPQDDLDLELENNPKSLNKFYGKLKKIYKKEIDSIVFIYESTGSYSTILESYAEEKSIKCFKVGAYQSSSFSKVIKNRSKTDKIDARMLSRMHILAKDDDIKVPSRDIEAHKIRSFIKYYQSLVKEHVRISNYLEAAIFNLEDEYVLKQVKKRIANIDQEQELIIVKVMDIINVNKAYKEAYDNIISIKGLGQKSTIVLLYLFLRYPNASRQHITALCGLDPTQRSSGTSVQHKQRISKQGLSLVRAMLFMPTMIAVRYNEEMKLIYDGLLERGKPKMLAQIAVMRKIILLAHSLYKNNEKYDDKKYLKFKQKKEMEL

SEQ ID NO: 505740 - protein, 436 aa, unidentified
MPLSAMYCVRRCPVKPAIEPSFTALVGIDWSDRKHDFCLQAAGSSQREFGVLVHSPEAITLWAKALYRRFGGPIAVCLEIAKGPLVHALQRHEFIVLFPVNPATLAKYREAFVPSRAKDDPTDAQIALELLLRHRDKLQPLQPQSADMRTLATLVEQRRLLVGDKTRITNRLSSTLKEYFPQALDCFEHRDTVLFCDFLQRWPSLKHAKRARQATLRAFFSAHNLRRAPLIEERIHGIRSATALTDDAAVIGPHQLLAQALVVQLRVTLQAIDHFDAEITAVAKRLPDYALFAALPGAGSILAPRLLVAFGEQRERYASAAQLQQYAGVAPVLERSGNKCWVHWRLACPTFLRQTFVEWAGSTIPRSFWASAYYHRQRAKGCSHQAAVRALAYKWIRILYRCWQTRTPYDESVYLLALKHRGSPLIAAMATTPQNP

SEQ ID NO: 505741 - protein, 422 aa, unidentified
MHKQESLDDFEVLYERCCGLDVHKKQITACLITPGPDGRPKREVRTFGTMTEDLLSLHDWLLDNRCTHVAMESTGVYWKPVYNILEGSFKLFLVNASHIKAVPGRKKTDKLDAIWIARLLRVGLLKGSFIPEPEIREIRDLVRHRTTLIRDKARAVQRVQKILEDANIKLTSVATDVMGVSSRAIIDYLLAGKTDPGFLADLAKGRLRKKIPELQKALNGVLEPHHRLLLAQLLAQIDFLDECISSLNTEIEERLRPFAKQVQDLATTPGLKKFIPQIIIAEVGVDLSSFPSDKHFASWIGVCPGKNESAGKNKSGKTTKGNRWLKDALTEAAWAASHTKDTYLSALYHKLVPRLGKKKALVAVAHSIAVAIYHILTEGVPYYELGSDYFIKQDKKKLERRLVRRLEELGYKVTLEEVNSAA

SEQ ID NO: 505742 - protein, 404 aa, unidentified
MWEAFIDWADTHHDALVLDEKGHQRGSVRVDHTPEGLAKLNTFLETITGPDQKEQMACIIETNHGLLIAFLLEAGWLVYAVNPRTVDRRRSASGAKTDLIDAYLLAKTGRADLADLRRLTPDSEVVQELKVLTGDQDALIQMQTRLVNQLTATRVTSYPVALQLKASVQHHSTLIFLQTSPTPQAAMGASVQQITEVLKHAGHTTAEKVAPKIFEMLHQPQLTANAMTTRTKSRLMLALVAQLLPLVEQIAQYEKEIPPLFLKHEDNEVWSSLPRAGKRLAPRLLAEIGDERTRSADAGSLQALAGTSPVLFPSGNDAKAHRRLGCIKPRLFALHQFAWQSTQQEGWARDSYQRKRAEGKSHTVAVRALANVGARIIFAMLKSHEPYDPATFEAAQRLHARHVA

SEQ ID NO: 505743 - protein, 449 aa, unidentified
MKQQKSLEALSIIHPNAAGIDIGSREIWVALRPDLEGETTRPFPSFTPDLERLAAWLVENHVDTVAMESTGVYWIPLFELLETRGIQVYLVNARHVKHVPGRKSDVLDCQWLQKLHSLGLLSPSFRPDAEMCALRALLRHRAQLIQHRAPHILHMQKALQQMNLQVHHVLSDITGVTGQLILRAIVAGERDPKTLAAFRQPGCKADEATLIKALTGNWRDEHLFALKQSLALFDAYTAQLTACDAEIERRFAVVKPRWDAPDDLPLLPPVKANSKSKNKPADSTRQALFRITGVDLVAVDGISAGLAQVILTEVGTDMSRWFSVKHFASWLGLAPHNDISGGKVLRSRTLQTDNRAGQAFKQAAASVIRSHSAYGAFYRRKRALLGPAQALVATAHRIARTVYFLLKYKTAYHDLGAAGYEKQQHERELAALKRRAAKLGFDLTAKEAA

SEQ ID NO: 505744 - protein, 389 aa, unidentified
MQSFDANKSLVVLDQDSTLVAVIELSLSGWLVAGLVPGLKRQPRKKLDPDPDALLALLQRWRSEAIKAGRTIARIALAYEAGRDGFWLARWLKGRAVEAYVIHPSSIPVPREHRRRKTDRLDTELLMRAFLGWLRGEVKHCTMAAIATLEEEDAKRPNREHQTLTGERTRLINRLKSCLIRLGIRNFKPTLGKAAERLAELRTPEGVPLPDNTLAELYRDMARLDLVKEQIKAIERQRLQRIAKAPNHRPNVMVRLIAQVIGIGIETADMLVSELLSRNLRDRRAVARYGGLTGSPDESGSRRREKGLPRAGNARVRRGMIEFAWRFLKFQKDSPLAEWYRNQTQSGRKDVRKRTIVALARKLLIALWRLATQGVVPEGIALRKASATH

SEQ ID NO: 505745 - protein, 343 aa, unidentified
MQTVTTIGLDIAKSVFQVHGVDAEGNAILRRQLKRRYVLAFFQKLPPCLVGIEACASSHHWSRELQALGHTVRLMPPAYVKPYVKRHKNDATDAEAICEAVTRPNMRFVSTKTPEQQSCLTLHRTRHLFIRQQTSVINAIRAHLAEFGIVAPVGRQGVEQLLGVVSDASDKRLPDVARACVAALGAQLQRLKVQILEFDRMIRAWHRSSEASRRLDDIPGVGPALATALVASIADPKAFRSGRDFSAWIGLVPKQNSSGGKDKLGNISKRGDRYLRGLFTAGALAVIRYAKIHGTKHRPWLTALLARRPTKVAAIALANKIARMAWAMMAKGERYKEPAALAA

SEQ ID NO: 505746 - protein, 350 aa, unidentified
MKIIGCDFHTRYQQIAMLDDATGELTERRLEHESGEADTFYRGLAGAVRVGIEATGPIQWFQRLLAELGHELWIGDSAQIRASAVRQQKTDQRDAALILDLLLAHRFPRIWVPSPAERDLRQLLWHRHKLVRMRTMVGNQLHALALGQGLCRKAKLFTKKGRGELSGLSLGPWASRRRQELLTLLDQLGPSITELDRAVMEEASRREEAVRLMTHPGIGPVNALAFVLTIGPITRFRRSKQIASYLGLNPSERSSGGKQRLGSISKQGNSMVRWLLIEAAQHASRFDPALRQDYQRLKFRRGNAVARVAIARKLAVRMFWMLRSGADYAQLVRMQGSPGATLVSSTTPLG

SEQ ID NO: 505747 - protein, 353 aa, unidentified
MEKVESQAEVILGVDTHLDVHVGVVIDTVGRVQGTLAIATTLDGYKQLLTWAQAFGVLLRAGVEGTGSYGSGLTRYLETRGIAVIEVNRPDRSRRRSRGKNDPTDAESAARAVLADEARCTPKAQSGLAEARRTLSVARRSAVKAKTQAMNQLRALLVSAPSFIRDVVLKVKPEHCVAACAKLHLDDASPVLTSLKTTLQLLANRWTALHDELRVLDKELARLTKLAAPRLLARFGVGPQTAATLLVTAGDNPTRLRNEAALAALCGASPLEASSGKVCRHRLNRGGQRQANNALWTIAMVRMRSDARTREYVLRRTRGGLSKKEIHRCLKRYIVRELYPLILADLKDSMRPA

SEQ ID NO: 505748 - protein, 354 aa, unidentified
MQQPERAAEVIIGLDTHKDTHTAVALNALGARLGTTTIPVSREGYRQIEAWACSFGSVRAFGIECTGSYGAGLSRALQASGHRVLDINRADRSARRRHGKDDPLDAEAAARAVLSGQATTLAKSGTSSVEMIRHLKLARDSAVKARAQAMQMLKGLIVSAPAELREQLEGIRGKVTLVRHLAALRPGPMTSTTASAKVGLRALARRWLSLSKEIEGHDRDLDALAADHTPELITAPGIATGTAAEMLILVGDNPERIRSEAAFAKMCGACPVPASSGKTSRHRLNRGGNRQANAALHRVIVTRMRCHQPTIDYVRRRTAEGKTKAEIMRCLKRYVAREVFTHLCKPRQPVSETA

SEQ ID NO: 505749 - protein, 407 aa, unidentified
MHEKTVSVCARIVRGKELEIIEATFPTFTEDLENLGGWLRRNRIPRVAMESTGVYWRPVWNILEKSGKLDLLLLNPQHVKALPGHKTDRVDAARIAELTQYDLVRASFVPPPEIRQRRDLVRRRVHLQQDRNRVSNRIHRLLELQNIKLSSVLRKMTGATARSILEGLASKLTMKPEKLALLARHKRVRDRQPELAKALRCHPDDHFRFLLTELLEEQDRLTAKMRLLEERIAERMQPYAELVERLCEIPGIERLTAWMVISEIGVDMSRFPTAGHLASWCGLCPGNAESAGKRHSGRTSKGNRYVRRALIQAAWAAARISRRRTFFTTLFYRISSRAGTKKAAVAIAHRLLCVIYSMILTGSSYREQGADHFDRLHPERTRKRLTARLERLGFLVTLAPKPSPESS

SEQ ID NO: 505750 - protein, 435 aa, unidentified
MGGAIGGDNLFKREDFVYVGVDVHSKVHASVMVNHYGEQIGKATKFDAAIPAFDEWVEQVQKRAGGKGIVFGLEDVHGLGRSLARYLLDRGYRVKFANAYLTKRERPSINKHDSLDALSVARITAKYIHELPEADIDPLQWALLSTVTHRRGLVNEQNRLKNKLGNLLHQAWPEYRSFFSEPFDGVTALAFWEQYPSVYRMAEVTPAKLSEFLREKSHFYMGEKQAARIFAVVGQTEEPDCQFERDAIIRSTVKHLRHVQEQIADAEAQLARLIARTDHHLTDIPGMDVASAAELIALVGDVGRFKNVDKFLAYTGIAPGMSASGESEAKFRSKFGRRELLAFFHNFAAHQLVVAPRSGKPRNPEALAYYNKVLGDQAGLPKEKQDKRIRRKALLSLMRQQAKRMYRLMKVQKAQAVARRAAVAVEETQQETKAA

SEQ ID NO: 505751 - protein, 376 aa, unidentified
MERGSLMLNTTTFVGLDVHARSIKAVALDAMTGEVRSATFGYDAAEVAGWVSSVDPSAKCVYESGVTGFDLQKRLASLGVDCVVGAVSKMIKPSADRKRKNDRNDAEFLARMLSVGNVVEVWVPDDECEAARDLTRALDDAREDLKRCKQRLSKFLMRHGYAFSETTPTGRRKGNWTAAHWAWIRSIEFPEKADDDVLAYYIDATRQAMEDKKRLEKLVEAEASKPRWKKRVDSLRCLKGVDAMTAADIVFEAGEFSRFKNARSFAAWLGLTPSEHSSGESVRQGGITKAGNKHLRRVLVEAAWHYISASPHPKDLAKGQAPDPAARRHAAKGIRRLVKRREEMLGRGVHKNKANVATARELACWCWAIGRMAENG

SEQ ID NO: 505752 - protein, 348 aa, unidentified
MRIIGCDLHARQQTLAMLDTTTGEMVNLTLMHEGNGVREFYSQLPRPVLVGIEATGSMQWFLNLMDELGIECQVGHPATIRAAEPRKQKHDRRDADLILKLLAEQRFPAIWLPSKELLDLRALLLHRHQWVRIRTRIQNALQAIALANGLRRGPGLWSYDGQAKIAFLPLLPHASYRRSALQVMYRKMEEEIENLTQQVAEQAGQRSGARLLMTHPGVGPVTALATEVFLGDPKRFADGKALASYVGIIPREYSSGERQRLGGVTKQGSPLLRFLWYEAGAHAVRRDPELKRFYLRKLIPKGLGKARVAVARKLGIRLWIMLRDEIDYQEFCRRGQMQQSGAACGGDA

SEQ ID NO: 505753 - protein, 338 aa, unidentified
MNTVTLLGIDIGKNTFHLHGQDARGNQLLRKKLNRSQLLPYLTQLPTCKIAMESCGGSQWLARQIESLGHRVQLIAAQHVKAYVTGNKNDFIDAEAICEAASRPRTRSVPVKTLEQQILSTEHKLRKSWVDNRTGIINQVHGFLLEFGIIFPVGYAALEQVPALMENHELPIRLRNAVERMLLDIQRLTRDIKTIDVEIKQQLSEDAAGMRLLSIPGIGPLTASALLADVGDASTYKSSRDFAASLGLVPRQYSTGGKTILLGISKRGDKYLRCLLVQGAQALMIRIDKRNDALGAWVRKLLASKPPNKVACALANKMARIVWAVLARGGSYNVQQMV

SEQ ID NO: 505754 - protein, 344 aa, unidentified
MNYYAALDVSLRSVHLCVIDDQGELITETKLSSEVTDIIAYLDALGLEVSIVGLEAGTLAQYLTYGLQSAGFEVACMEARQVKAALSAMRNKTDKNDVRGIAQLLRTGWYSKVHIKSMESHRVRALLTSRRAVLSKCIDLENEIRGLFKIFGIKLPSKLGHGSFDAAVRDVIETDMTLSHSLLPLLDARLVLYHCFRELDNRTRHMANADSVCQRFMSAPGVGFITALTYKSGVDDPYRFKHSRTVAAHFGLTPRRFQSGEIDIDGHISRCGDRDVRCALYTAANALLTRSSKWSPLKAWGMKLAKTRGHRRAVIAVARKLAVILHRMWLDDVPFHWSTEVTRS

SEQ ID NO: 505755 - protein, 372 aa, unidentified
MATDSITWVGMDVHKNSIKVAVLLPDQADPVEWTEDTTVEAIRRLARRLQRLAPGEVRSCYEAGPTGYALQRQLRAAGVGCTVIAPSLTPIKPGLRIKTDRRDARKLAEYFRNGELTEVHPPSETDEALRDLCRCRDDVRVDLLRARHRLSKFLLRRHVIYRQTKHHWGSRHVAWLEQLRFDDAMSQATFDSYFLAVQQLEERQHQLDQRLAEFGAQEPYRERVAALRCFKGIDTVTAVCLVAELHDFRRFRSPRQLAAYIGLVPSEDSSGDRQRRGPITKSGNRHVRRLLVETSWHHRHRPALSAPLRARREGQPARVLAIADRAQERLAARYRRMSEHGKVHPKTIVAMARELCGYLWAVLHPAALATRG

SEQ ID NO: 505756 - protein, 417 aa, unidentified
MSDNVRFYADVDWATEAHQVCLIDAGGKVIDERAFAHGGVGLAEMCGWLETTSGAEPSAIVVAIETPHGPVVEILLERRFQVDAVNPKQLDRFRDRHTVAGAKDDRRDAYVLADSLRTDRHCFRRLRVEDPIVIELREWSRMAEDLQQERNRLANRVREQLWRYYPQALELGDDPAADWFLDLWAVAPTPAKAARLRESRAASLLKANRIRCIDAAEVVRILRQKPLVVASGTVEAATAHIAAVAARLKLVNQQIKQAHRSLDELCARLTESREQDAPGQRPEQRDVTILRSLPGVGRIVLATLLGEAAEPLRKRDYHALRSLSGVAPVTRRSGKRCIVLMRQACQLRLRAAVYHWARVAIQHDARSRARYAELRKRGHSHGRALRSVADRLLAVACAMLRTQTPFNPHRAAVADAA

SEQ ID NO: 505757 - protein, 403 aa, unidentified
MNITAEIRVSVDIGCHQHSVAIGLPGGDVLEEFDILHRPEGFKDFFDRIEHHRQRHGGEVAVAMEGYNGFARPLDSLVRMRGYRLYNINNLKLARFKEIFPAAAKNDRIDARKGLELFQLRDHLAVAKDVLQEVMATPRENDMLKRLSRRRRALVDEKSRLLSRLQSDLQAVCPGLLAITQDAENLWFLRLITHSDDLTKLPRLRRSTVMKIPGVGRKYAAIIQTWQENASFSHEAEWVGAMIIEDARRIVALRGKIKALESHCEALMQDSAIAQSIDSIPGFAVVCSSELAGEIGTVDRFASERSLALYLGMANLDNSSGKFRGSKAPKHVNKRAKGAMMTGVDRHRKCVPESQRYYEKKRAEGKTHNQAIRALGRQLCRIIFRMLKQNRPYQIRSSEDAPA

SEQ ID NO: 505758 - protein, 335 aa, unidentified
MDSTKYVGMDVRKDMISIAVMNSAGKVVMESILETKAVTILQFIQGLRGNLLITFEEGTWATWLYDLLKHHVTKVTVCNPRKNALLKSGNKSDRIDAQKLAELLRNGSLSAVYHGENGLRTLKELSRSYLTISKDLTRVMNRLKALYHSWGIAGAGTQVYAPCHRLEWLSKITEVGVRGRAEFTYQQLDGLQALRQGVRRDLLAESRKHQATKLLRQIPGIGPIRAALLVALLQTPDRFRTKRQLWAYSGLAIETHGSGEYRYLEGQVRRSKKPVALRGLLYRYSPIQVQGCDASRMVISPLLGEERWSYHVPSSFVHGCTAHDVVRDVLLGFVG

SEQ ID NO: 505759 - protein, 338 aa, unidentified
MDNVAVFVGLDYHQAFVQVCVMDRQGQRLGNRECANDWQAITRYVARFGSRVQAAMESCAGAADLCDELTTRAGWSVDLAHPGFVARMKQNPDKTDFQDAHLLADLERVGYLPRVWLAPQPVRELRQLVRYRQQLVEQRRSTKLRMRALLRDQRCAAPPGVNAWTCAWKTWLEKEADLSAQGRWIMGKHVQELDRLAQAIQEVEKRLAEATAEDPEVAHLQELRGIGPVTAWTLRAEIGRFDRFRSGKQLSRFCGLSPRNASSGNRQADAGLMRMANPQLRAVLIEAAHRLARCDEKWRSLALRLRNAGKPGSVTAAAVANRWVRWVFHQMQPIAAVA

SEQ ID NO: 505760 - protein, 344 aa, unidentified
MTIVEDACVITGGVDTHADMHVAAALDPLGGLLGVREFPATAAGYADLLGWLGGFGTVALVGVEGTGSYGAGLARHLAAAGVRVVEVDRADRQDRHRQGKSDPLDAVSAARAAQSGRASGAPKGRDGAVEAIRALMVAKRSARAERTQAINQARALIVTGPDELRARFAGKRAGGLAEAVAALRPRPGDAAGYSLRVALRELGRRVEFLDAQIGRLDDLIIPLVTARAPGLLSLYGVGPDTAALLLIAAGDRPERLRSEAAWAHMCAVAPIPASSGKTRRHRLNRGGNREANHALWRIVITRLGSHPATRAYLERRIKEGLSKKEIIRCLKRYVAREVYPYLRG

SEQ ID NO: 505761 - protein, 317 aa, unidentified
MHKRVCHGTVMDEEGHVVKRERFSNDPDSLSSFMKDIGEAKVVMESGYCWQPIYDRLEEAGYDVRLAHPLKVKAIAEAKIKTDEIDSETLAHLLRADLLPESYVPPKEIRDLRELVKRRAFLVGMRTRLKNRIHAELAKRDIDPGSPLFTKHGRALLASLGVDAVSQLLPVMETLDRQIGEISAVLKRAAVEDGRARILTTIPGVGYYTALLLVAEIGDINRFPDAERLCSYAGLVPSVRRSGGSTVHGHITKEGSRWMRWALTEAVHSHLRYDTELSRFHKRLASKKPGQVATTATARKMLKAIYCMLKAGEPFQP

SEQ ID NO: 505762 - protein, 388 aa, unidentified
MEARTVNALPPAAADHAAIRCLLAIELSKKSWVVAINTPLADKISRHTLPGCDWTGLLELIRRVRTRVVRELGRPVEMISCYEAGYDGFWLHRLLEGQGVHSLVVDPASVQVDRRARRAKTDRIDVERLLRSLMAYLRGEPKVWSVVRVPSVAEEDDRRLHRERDRLIAERIQHVNRIKGLCAIHGIYDYQPMRPDRTRRLEQLRTGDGGALPPRHKAEIARELQRMELVLEMLKEIDAERNAIASARMSAHTNAKKIQDLVKLKAIGPEIATVLTGEVLYRPFNNRRELASYVGLTPSHFQSGSTCRDQGISKAGNPKARTTMIELAWLWLRYQPDSAFSVWFRERVGNLKGRIRRITIVTMARKLLIALWRYLETGVLPTGAVLKV

SEQ ID NO: 505763 - protein, 349 aa, unidentified
MVVVGADVHKCKHTFVAVDEVGRKLGEKTVDAVTAGHTAAIMWARVQFGTELVWGIEDCRNMSARLERDLLSAGQKVVRVPTKLMAQVRKSARAHGKSDPIDAQAVARAVLREPELPIASHDEVSRELKLLTDRRDVLVAQRTSAINRLRWHVHELDPEREPRSLDAATHQQALGNWLDTQPGLVAEIARAELADIIRLTAQITALAKRLGARVRALAPALLALPGCAELTAAKILGETAAVGRFKSEAAFACHAGVAPIPVWSGNTKGQMRLSRSGNRQLNAALHRIAITQIRMQTSRGHHYYQRLITTGKTKAAARRCLKRRIAHAVYQALHADHQTRSQHTQPAAA

SEQ ID NO: 505764 - protein, 348 aa, unidentified
MGVFIGLDVSLSKTSVCVIDREGAVLWQGKVTSEPGPLIARLAEWAGTIDLAGIEACPLSEWLHRGLREAGIPMMCIETRHAQRFLSSRPVKTDRSDARGIAEMMRLGHYRPVHVKSPAAQSMRTTLAVRMQLVASQLQIEGTIRGLLKIYGLKIGAIHRNRFVGRVVELLEMAALPELSSAIQPLLRVREGMRTERRAIDRTLAGLSRRDDITRRLMTIPGVGPVTSLAFKATIDEVGRFGTSRALGAHLGLTPRVYQSGEIDRSGRISKCGDRMLRHLLYEAASALMTRTRKWSRLRAWGVAVAKRRGIKRATVAVARKLAVIMHRIWVTGGEFEFGNPAAAAIAA

SEQ ID NO: 505765 - protein, 313 aa, unidentified
MQNSFIGIDISKNTLDVHVLPENVSYSYPYETQKVKVLIRKLKKHKPVLIVMEATGGYEISIAVQLSAAGLNSAVVNPRQIRDYARAIGKLAKTDSIDAYVIARFAQDVKPEARQQLTIHELQLKELVVRRQQLIDMRTAEKNRLSRAHAPLVIKGIQKIISTLDAHIDAIAEELSTQIQSNPAWDQKVELITSVPGVGTTTAHMLLFCLPELGRLNRRQIASLVGVAPMNRDSGMLKGKRTITGGRAIVRKVLHMPILSAVTRWNKRLKKLYEHFIARGKKHKVALTACMRKLITVLNCILKNNQVYNPNFC

SEQ ID NO: 505766 - protein, 350 aa, unidentified
MVVGIDVHKHTHAAALIDDRGGQVAALSITNSPKGYRQLIDWLVDHDAASAVVGVESPGSYGRCLVTALCGAGFEVLQVPAWRTHRERHHRGPGKTDPGDALSIAHVVLRHRDELGPAQEPELVRALGMLELQRRRFVRDRTQAIQRLRSDWTQHDPVAEAAVLRCDRQRELRQLKRIRLGDSLTQRTAARCIRELANDIEELNHKIAALDAEIADLLAEHDNPFEDLLGAGTNLAATITAQAGDVRRFRNASAFARFCGAAPIPCGSGQTSGRHRLHRGGNRQLNAALYRIAIVQQRHHPQAKAYLDRKIAEGKTAREARRALKRHLANVVYRRLLTWANTTPAFTNLT

SEQ ID NO: 505767 - protein, 312 aa, unidentified
MFIGIDVAKAQLEFACRPDGETGTVANDDAGIRELVTRCQALAPTLLVLEATGGYEAAVVAALATAGVPVVVANPRQVRDFAKATGQLAKTDALDAQVLALFAERVRPTPRPLPDEAVQALDALLTRRRQLLGMLTAEGNRLLVAALPVRRDLQQHIRFLERRVREADADLHTAIKASPAWRVKDDLLQSVPGVGRVVSLTLLAELPELGRLTHKEIAALVGVAPLNRDSGTLRGKRLVYGGRAPVRAVLYMAALVASKCNPVIRAFYLRLRATGKPAKVALTACMRKLLVILNAIARSGTPWQPERPLVRT

SEQ ID NO: 505768 - protein, 375 aa, unidentified
MKYITKFVGLDVFRDRIAVAVAERGAGAARYLGVYPNTLEAVRKLLNRLGRPEELHVCYEAGVTGYGLARFLRGLKIECMVVAPSKIPLVPGPRVKTDRKDAVMLAERLRTGDLVSVWVPDEADEALRDLVRARKARMEDLKRAKQRVNMLLLRHGITKPEKTTPWSERYRAWLRGLELPQKNSQAVLQEYIIAVEEVEQGVRRLEQLIQDTAANSPHAPVIQALQALRGVQVIAAATIVAEVGDFTRFAHPEQLMAYAGMTPRESSSGDRVSRGGITKTGSPELRWICNQIAHSYRYSPKVAGDLARRLEGLSPEIQAIAWKAQIRLHKKLVRLMAKGKCRQVAVTAVAREFLGFAWAIGQKVCFETALGKRSA

SEQ ID NO: 505769 - protein, 398 aa, unidentified
MDLPVYYELETNNGNRDYRIQIGGHYMNYNTVYVGMDVHKESFTLCSCRYEDEKASHYQRTPASYKNVLRYLAFLRTIYGEDTRFVCGYEAGCLGYSLYHQLENFNVECVILAPTTMLEQRSKRRIKTDKRDAEIIARSLAQHNYSPVHIPTETDNQTKEFIRMRDDHKAELKKIKQQILSFCLRQGYQYDGSGNWTAKHVKWLRSLKPAGLYKEILDEYLLTYTILTDKLNRLDQRIEELASKEEYKESVSKLTCFLGIKTHTALSVIVEVGDFQRFVSARKFAGYLGLVPGQHSSGDDRNGLGITKAGNTHVRRLLVESAQSYTRGKIGYKSRVLRSRQAGNSPQVINYADRANERLRRRYYKMVLKDGKKYNIAKTAIARELACFIWGMMTDNIY

SEQ ID NO: 505770 - protein, 390 aa, unidentified
MLFIGIDVASKKHDVIIISEYGEILSESFTIENSSAGFKKLHTEISSHTELFDNVHIGLEETGIYSSNIRDFLHSAGFNVYMINPVLTHHSRMAYSLRNTKTDKLDCLAICRYIMHNFTHLKPYISTLYTTSELKSLSRLRLDKLHTLAKAKMEFTRLLQIIFPEFIKHFKQHSQWAMNLFSSYPAPAKIARMHLDTLVSIIKIKGDRVSAAQLIKNLAKKTIGDTSITNSLLIESIIDDINHYNKQIAIIDKHLDALMADFDFITTIPGVGNVIGASIIGEIGDISRFNSPSQLLAFAGLDPSIYESGEFKGKRCRISKRGSKYLRTSIFTATRVACVGKGKNNQFRQKYHKKKLQGKHHNSALCNVSKNMINTIFAMLNSKEDFIYIT

SEQ ID NO: 505771 - protein, 313 aa, unidentified
MDNIFVGIDVAKETLDLQTYPPAQPEQFQNDLRAIRKLLRSLARRKPALIVVEATGGYETALVAELADAGLPVVLVNPRQVRDYAKALGILAKTDKIDAGVIARFGHDVRPPLRPLPNGQERAMSQLIRRRRQLVKQHATEQCRIQQATLPAVLRSLRQTLRFLERQLEAVNKQLDALIHSSPIWLEKVQLLQTVKSIGEVTARELLVELPELGQLERRQITGLAGLAPINRDSGKMRGKRTTWGGRKNARTALYMPTMCAIRHNPVIRSFYKRLRQAGKIKMVALVACMRKLLTILNAILRDKKPCNPSPNA

SEQ ID NO: 505772 - protein, 313 aa, unidentified
MKEEKTFIGIDVSKEKLDVGVRPQVDFMTFANTEDGISLMTDFVKSKQPELIVLEATGGLEMAALRSLVVAKLPAVCVNPRQVRDFAKAMGVLAKTDKIDAHVIARFADSVRPEIRPLKTGETEILDAFNTRRSQLIIMLTAEKNRLTTASKWTKKDIEKSIKGLEKALAKINREVENLIKKSPHWRHMDKILQSVPSVGPVMSLTILADLPEIGTMNRRQIAALVGVAPLNRDSGKYKGRRAIWGGRARIRSVLYMCVISGICHNPKIKAFYNRLISSGKKHKVAITACMRKLMIILNTMIKNGTCWNESGC

SEQ ID NO: 505773 - protein, 344 aa, unidentified
MVTIGIDTHKATLAVSAVDEAGRERAAETFANDGEGHARLLRWARRHGPERRFGIEGSGSFGAALARLLVAADERVVEVPAVLTDRERRHLSRAGKSDPGDALAIARVALREQGLGPARLAGITEDLKLLVDAREQCLAERTRIANQLHAHLVVLAPGYKREIRNLSAARHLTAAARLVKRVGGVRAELARAEFNRLRALDAESGALEVRIRALVQISGSSLPTIRGVAALTAAKLLGETGDPRRIRSAPAFARISGTAPIPASSGQTSRHRLNRGGNRQLNRALYTIALTQARTDPRAKAYMARRIAEGRSWLEALRCLKRHLANVVWRTMLADAHHSAEIGS

SEQ ID NO: 505774 - protein, 365 aa, unidentified
MASISRGVPIHLGLDVHKDTISVGILPTDQQVPDVERITHDEASIRRLVGRLGNPRMLRACYEAGPTGFELARLLAGMGVGCDVIAPSLIPKAPGDKVKTDRRDCRRLARLHRAGELVCVRIPTVQEEAVRDLCRTRADMVEDLTRARNRLGKFLLRHGRVWRGGATWTLKHQAWLGSQRFDQPAMAQTFGHYLAVVEVRNTQLDAVEADLAGWCDRPPFAWQVARLAAYRGVTRLGALTLAAEVADWRRFASASQFMGFCGLVPSEYSSGNTVHRGRLTKAGNAHLRAQLVEAAWAYQHRPTVGVQIARRQQGLPPEVAARAWAAQQRLCAASGSRRARKNVKSIVAAAIARELAGFLWAEMTA

SEQ ID NO: 505775 - protein, 407 aa, unidentified
MVYVGIDVAKRSHVLSAVGADGETVIESFKFANADAGFKKLADRLAKAGIGPGSSLFCMEATGHYWVALFDFLSSRGFDAAVVNPIQTDAFRDVWTIRKVKTDALDVAMIADLARYKRYEPSALGDEATDELRALARYRMSLVERSTMLKNRATAILDRVFPELDGLFAGSFSQTQRALLKHAATPRQVLSTDVRTMARILGEASNGHCGRAKAEQLKAAAKSSVGVGFGSDTLAFELRMLMEELDFVRGQIDEVEAELARLLDATAGRWLLTVPGIGPALAATIAGEIGDANRFAGPGQLMAYAGMDPTRSESGETVASDGSMSKRGSAALRWALMQAADCARRYDPYFGECYAKKKSEGKHHYVALSCVARKLMGVCLALMKEGRPYEPAPPAHHKPGHLKEADS

SEQ ID NO: 505776 - protein, 390 aa, unidentified
MFFVGIDVSSVKHDCCILDGSRKMIRSFMILNSREGFSALSATLIELAAPEDIKIGLEATGIYGDNLARFLRRKGFNVCTINPLLCKKHQSATTLRKTKNDRSDAKNIALIVASEDLQPDQPLSYHIVELKSLSRARFLTVKDRSSLKNKVKRLVTVLFPELLDAFTDLFGASGMALMTRYPSAKTLAACNLDTLTELLRTASRGRFGREKAEALRKLAKESIGTFSDSAVFQLRLLLKRIELLNTQIEMYDDEIRRLMDQLDSPILSLPGIGYTLGAMILSEIGDIKRFSSPAKLLAFAGLEPSVYQSGKFNPASGKMVKRGSPFLRWALLQAATYAPAFSITFAAYYDKKRLEGKSPSVAHSHVAKKLVRVIFALLSKNASFIDSFAA

SEQ ID NO: 505777 - protein, 346 aa, unidentified
MNKTDYGGIEVSAEKLLVALERDGVRQPQREFTNTPSDHAVLCRYLLRAGRTVRVCLESTGVYGLDLALALSRHPGLQVMVANPRAVRHFATALMRRSKTDPLDAEVLREFAQRMPFQPWRPPSPAALALHALARRLAALTEMQKEEKNRLHAARVSETTPAAVLRDLQRSLRAQQRALQRLTREALKVIEQDPDLKLRFQLLLTTRGIAETSAVQILAELAVLSPNLQVRQWVAHAGLHPRQYSSGSSVHKKTRISKTGNRHLRRALYMPALVAIRHEPHLRAFYQHLLERGKLKMQALVAVMRKLLHALYGMFKSRQPFDGAKLYRLPEETCVLQPGFSTAEAA

SEQ ID NO: 505778 - protein, 430 aa, unidentified
MKSNTQNKKIEAITEKTLVIGIDVGSETHYARAFDYRGIEYSKKPFKFSNTEAGFVTFKEWILDLKEKHEKDKVVPGMEPTGHYWFNLGKYLQDNEMKPVLVNPHHVKKSKELDDNNQTKNDRKDPKVIAGLVREGRYMIPYLPDGVYADLRTASNIRFQLQSELTRIQNRISRWFNIYFPEYKTVYGKPDAKSGMLILKEAPLPEDILTLGIDGVDQIWRDAKMRAVGKARAKTLIEAAEHSVGSKEGAVSARMEIRMLLEDYESRNMRLQEVMVLIEELVKQIPMAEKLLEIKGVGIKTVSGFLAEVGDISRFNSPKELQKLAGLALVENSSGKHKGETTISRRGRKRLRYLLFEVAMLLVAKNPEFRELHNYYTTRRLNPLKKMQSLMAIAAKLIRVFFAMLTKGVDYDPKKMVSDIKRPAVYLQAA

SEQ ID NO: 505779 - protein, 422 aa, unidentified
MLTESHDEEQIIARVAALDIGKAEVVCCVRVPAGANAKKRLQEVSTHSTMSRALTELANHLVDLGVERVVMEATSEYWKPVFYLLEAHGLDPWLVNARDVKHLPGRPKSDKLDAVWLCKVAERQMLRPSFVPPKPIRQLRDLTRYRIDLVGARTAEKNRVEKLLEDACIKLSVVASDIFGVSGRQMMVALIGGERDPKVLAQLARSRMRAKIGLLEEAFNGHFDNHHAFLLTRMLGRIDAIDADIAAVDAQIEAQLAPFASAAARLDDIPGVGPVAAAIIVAEVGVDVSRFPTAAHLCSWAKFSPGICSSAGKSKGNGSSGHGNRYLARILGESAVVAGRTDSFLGERYRRIAKRRGKKRAIVAVGRSILVIVWHLLSDEQAVFNDLGADHFTRHVNSETKKRNHIRQLEALGYNVTLSPAA

SEQ ID NO: 505780 - protein, 320 aa, unidentified
MTILTSPTVIGIDVAKAEIVAYREDMQTTQHINNDRETLGRWLKALPAQSSIALEATSIYHLDTVELAHEMGHRVYVVDAYRLSHYRESIGQRAKTDPCDARLLARYLSSEQGRLRLWSPPPQAYKVLKSLLHRRAELINVRVGMTLSWSGEPLLKDELARQLKSFKQAEQAIQKLLHKVSKKAGITENIKRCKAIEGIGELTATGLATAFMRGHFANGDAFIAFLGMDLRAKDSGKKNSPRHLSKKGDTELRRLAHNAAMAACRSPVWKPYYESYLARGLAKTQALVILARKLCRVAFALMKNQSEYQPNLRLQGSPAT

SEQ ID NO: 505781 - protein, 451 aa, unidentified
MNNEPEIVLDDEHELVIERVAAIDVAKASGKVCMRMPHPSRPDRRMSKVRDVDATTRAVTELADDLLGEGIERVTVESTSDYWRIWFYLLEAAGLRVQLVNARDVKNVPGRSKTDKLDAVWLAKLTEKGLLRPSFVPPAPIRQLRDYTRFRVDLTRERARCWQRMEKLLEDALIKVSAVVSRMDSMSVRDMLEALIAGERDPRRLAGLARGKMRPKYKALVEALSGRFDEHHAELARMLLDQIDALGAQISTLTTRIDELLAALIDTPGPAADGSVRDRDGEVELMVTGLDAAERLAEITGIGPVSAQVIIAEIGLDMARFPTAAHLVSWAKLSPRTIQSGAIQRSGKAGKGNPYLKGALGEAAAVAARTDTFLGERYRRIVKRRGKLKALVAVARSILVIVWNLLSDPTARFHDLGPDYYTRRIDTERRARNHLAQLAALGYRVTVEPAA

SEQ ID NO: 505782 - protein, 354 aa, unidentified
MNTTQNSTKSKIVKVIGVDLAKDHCDVIGYDENGIICLRLDGCSYAKLREILANLPQAVVLMEACKGSMFHARSIADLGHEVRLVKGTDVKALRNVKHKNDLRDAAYIANLYFVPGIKYVYIKSQQQQSLQFLQNEYKSLQELRIQVGNQIHAGLEEFGCPVRKSSKFIKTRMVAHLEKHAELIPDDVMASFKRRREIWLNLLQQEEEAKRRLEQVAATDANAKRLMTVPCVGPQTAVGLLVHVGVDFGRFKNSRQFAASLGLVPKQNSTGGNNTLNHITKCGPKSLRSNLVQCAQLVLMYAEKWKGNFGDWVRKMRDSGKKHGVIVCAIAAKLARIIYRLMKDKVDYTPILSC

SEQ ID NO: 505783 - protein, 312 aa, unidentified
MAQIQPYVGIDISKDRLDIHIHPTGEAFSLAYDRAGLRKLLARPDLKRAVIGCEATGGYEERLLVALTEAGRPALCLHPADIRAFARLKGRRAKTDRLDARAIAEALPVAAADRMPLQRTKEQSELRELLTIRHTLVAATQVLKGHLARMSARPARAVLTAMLAAHQRQIKTLERTIAQHLSADRKAHRIRTAPGAGPVLAAEIIAFMPELGTLSSRQAASLTGVAPHPRQSGRSNRKGRCQAGRARVRRVLYMATLSVIKAKLAPLYPFYKRLREAGKPAKVAIVAAMRKFIVMLNAMLKTQTDWSPKMPA

SEQ ID NO: 505784 - protein, 482 aa, unidentified
MKHKQQEKTKEATCGPTQGHWQEMNRKQRREMTRKIQSEDISLEVIHPDAAGIDIGNESHYVAVPPTRDSQPVGRFGSTTAELKEMAVWLKQCAIRTVAMQSTGVYWIAVYDILEEAGLEVYLVNARDTKNLPGRKSDVQESQWLMKLHTYGLLRNSFRPSQEIRTMRTYWRQRNDLVQSAGRHIQRMQKAMTQMNIQLANVLSDVSGMTGQAIIKAILAGERDPHKLATFRDPRVKASEEEIARSLEGHWQEDLLFLLQQEQDGYEFCQKQMAECDQRLEQYLQQREDRSQGACLPEEKRKGRRKKKNGNKPRFELRTGLFRMTGTDLTRIDGVDVMTAITILSEAGWDMSKWETEDHFVSWLRLCPDNRISGDKIIGKGRLPTNNRVSTALKMAASTLRLSKTYLGAQFRRLRSRLDTPVAIKAMAAKLARLVYRMLRYGMKYVDRGAEFYEAQHRQLQIKHLKSKAAKLGFQVIQVPAA

SEQ ID NO: 505785 - protein, 389 aa, unidentified
MDPDDKHGTAEKMSDNLPQTIGIDISKASLDCHAYPVGAERQFANTAKGHKALIAWLRQWPIERIAYEATGTYHRALEAALTNWPCVKLNPERARRFAQATGTLPKTDRIDAILLARMAPTLQPPVRPARSAQQTHMAELIDARDGLVRDRTALKNREKNLTIAFLKRQCRQRLEQIDRHIEALDTEISNLITADAVLARRHQILTSIAGVGTLTANQLIATMPELGSLENKQAASLAGLAPIARQSGQWKGKSFIRGGRANVRQALYMPALVAARYNPDLKAKYQQLVTAGKPAKSPSPPSCERSSLPQTLCSKPIDAGRNLRLDHHGYSNLKHSWTSRSPDISGRLAPPLAPSDRPVSREKSWTRNPVPPAPASLCRDAISRRARRI

SEQ ID NO: 505786 - protein, 460 aa, unidentified
MRPDPVEIDAEAHEQVVERVAAIDVAKASGMVCTRVPHQAKPGQRSTKVWQVPATSNAILELAEQLVAQGIERVVVESTSDYWRPWFYLLEARGLQVWLVNARDVKHLPGRPKTDKLDAVWLAKLNERGMLRPSFVPPAQIRQLRDYTRLRSDLTGERARHVQRLEKLLEDALIKLSTVATDIMGVSARAMIDALIAGQRDPKVLAELARGRLRVKRAALVEALTGRFDDHHAELARILLDHIDALGGQIERLTSRIEELIAAIPAAHPPQGGATPTGGPPSDPATGEGTHQQATQPPLSALARLDEVPGIGPKAAQVIIAELGLDMGQFPTAAHLVSWARLSPRTIQSGAKHRRGTTGKGNPYLKGVLGEVAAAAAKTDTFLGERYRRLVRRIGKRKALVAVARSILVIVWHLLADPTARFHDLGADFYSNRIDKDHKTRNHIRQLQALGFIVTLTPAA

SEQ ID NO: 505787 - protein, 386 aa, unidentified
MAIPEKIRIEQDTLPQPTLFLAFELGQDTWKLGFTIGMAQPPRERTIPAGALETLQQEITRAKQRFGLPEDARVVSCYEAGRDGFWLHRALVAHGVQNHVIDSASIEVNRRQRRAKTDRLDVRKLLTMLLRHSAGEKKVWSVVRVPSVEEEDRRQLHREMQTAKQDRTRVINRIKGLLAGHGVQLTLQGDVDAQLDQVQQWDGAPLPSALRTRLKRAWQQVGFLTAHIQTLEAERRALLRRREDPVIAQVRQLFTLRGIGVNSAWLYVMEFFAWRDFQTPKQVGALAGLTPTPYQSGQSRRELGIAKAGNRHIRAMAIEIAWAWRRFQPDSALSQWYERRFGAGSARLRKLGIVALARKLLIALWRFVKTGVLPEGAVLKTAVPSR

SEQ ID NO: 505788 - protein, 391 aa, unidentified
MVCVGIDVAKDKHDCCILDSDGMVRADCFTIPNNMDGFKQLLQTIRNCTKKSDKIKVGLEATGHYSYNILGFLLDNDLAVYVMNPLHTNLYRKSLSLRKTKTDRVDARTIATMLLSDVDLKSYMDTAYHNEELKSLTRYRFDKVRERAKLKQSVSRLVTILFPELEKLVPSLHIASVYSLISEYPGAKQVSEVHLTKLTNLLTTASKGRYGKDKAIQIRDAAKTSIGSVMPAKSLELKHTIKLIRELTSEIDEIEDSIQQIMDELHPPILSIPGVGIQSAAMILAEIGDFSNFESPDKILAYAGCSPSTYQSGKLTNCYAHMEKRGSRYLRYALYNATKYVCHWNPVFAKYLAKKRAEGKHYNVALSHATKKLVRLIYALQKSGKAYLTAA

SEQ ID NO: 505789 - protein, 500 aa, unidentified
MKVIRNPKDFRIVYSRACGIDVHKNFIVCTACIPGSKPDQWKFITRRFSTFYKDLEECADWLSKLDCQNVCMESTGQYYIPVHDVLEKKLSNVRVVNPKWVKAVKGNKDDKKDSKWICQLFRFGMTKSSFIPGEEIRTLRGETRYRYKVISMRTSEMNRYQNALTVGGFKVDAVFSDVFGKSAQAIINLVLSGKEYTDKDILSLVHKNCKSSPEKILEAVNGIRMNDTQKKRLIIIKNHLDYLTDEIGEINKQIDCLVKEIPGMEAAIDHACMVPGIDKNLAVIIMSEIGTDMSPWPSQYNLVSWAGLSPGDNQSAGKKKSVKISRAGVYLKPALVEAAHAAVKDKEHPYYAIKYNTIKKRRGQKRAIIAIARKLLIAIYHMLLTGEKWNPTDLANVETPTDKRRKYIKKNLSNSFSQLENAGMLPEEIINYLKGQFLDLEASAESEDDSDSSDNDSSKGTEASADSAETNNSESPTEQPALDSDSQTDLTLVKDKSAAS

SEQ ID NO: 505790 - protein, 321 aa, unidentified
METVNFEQVIIRGCGIDVHKKTVVVTIDGEGLKRSTREYGTFTSSLTELKDWLLENGITHVAMESTGVYWKPVYHILEPSGIKVWIVNARHVKNVPGHKTDKKDSAWLCKLLLAGLLKPSYIPPKEQRELRDLTRYRKKLIQDIASNKNRIIRILEDCNVKLSSVLSDTSGVVSTKLINKLCDGKPITMSDIDEVYHKKIAATKQELWEACNGIVSEHHIYLLQTIRVNSRHIESLIHELNGKIKKMLLPYENALELLQEIPGLSRKTVEDLIAEIGLDMEVFPNEKHLCSWVGVSPGNNESAGKKKVDGQLTVTNKQNPH

SEQ ID NO: 505791 - protein, 464 aa, unidentified
MASPPSPRVPSRQSVSTLERICPDAAGIDCGASAHFVAVPPDRATPAVRSFRTFTADLRALADWLVACRVTTVAMEATGVYWIPLFEILEAHGLTVLLVNARHVKHVAGRKTDVTDCEWLRDLLMVGLLRGSFRPAEAIIPLRAYLRHRTTLLESASTYVHRMQKALAQMNVQLTQVVSDITGQTGLRILRDIVAGQRDPQHLAQHRDRRCHASPADLAAALTGNYRPEHLFVLQQNLALFDTVHTQLRACDTAIAAQLAQLTAPVAPPAHPLPAASRRRKPRPNEPTFNIRAPLHQLTGVDLSQIEGIGPYTALRLIGEIGTDMRRWPTVKHFTAWLTLAPNTRISGGRRLSSRTQPSANRAAAILRLAAMSLGRTQTALGAFYRRLALRIGKAKAITATARKLAILVYRSLADGLIYQDPGATAYTARQRTHAVRRLRRQASTLGLGLINLATGEIMDEVVS

SEQ ID NO: 505792 - protein, 309 aa, unidentified
MKQSVVYIGIDVAKAHLDVAWAQTVRRLPNQRSGHAALIRWIKQSTTPVQLICEASGGYEQALLESLEKSALKVTLVQAVRVRQYARATGILAKTDKIDAKVLAAFGSAIKPQPMSPRSVEQKRLRQYEAQRRHLSRILVAEENRLAQLSCAQLRTLSRSLMSKIKNQIETLDRRIGELIAQDQTLWEKAQKLTAISGVGARTAALLLAQMPELGQLNRRQAAALAGLAPFNHDSGSVRGKRAIFGARPALRSGLYMAALSAARFNPILSSFYQPLRTKGKPHKLALTAVMRKLLLALNQTLKPEPILA

SEQ ID NO: 505793 - protein, 410 aa, unidentified
MRYYLGVDWADKTHAVWVVDEQGAKVASRAVPHTAAGLSEWGRELDEWRAQGIELWAAIERPEGRVVDFLLDHGVVVYPVNPKALDRARDRFRPSAAKSDPFDARVLAEFLRTDHRHLQALQPSSEAAQELKYLTEDYRRHVRQQTRLVNQLTATLKAYYPRALEVSELTTALARQFLRAYPTPVAVTALTAKRWQRWASAHRLSDVRTHELWGILQRPQLPVPDHVVRAKARLMLTLVEELTAVVAAVGQYREAIDAFFAGLPEAQWIRTLPIGDHGVTAPTLWALLGDAPRRWESSQHLQGHAGTVPVTIRSGQQRVVRFRVACDKALRYVVDQVAFLSLGKSEWARAYYDQQRARGHDHHPALRALGAKWLKIIFVMWDRQIPYDEEHHLATMTRQQLRQRGQKKVA

SEQ ID NO: 505794 - protein, 419 aa, unidentified
MSKFSTSNKLRQVQPGTLHVGVDLALEKNMVVVIDEKAEQLDRFSFPQDRGGYDYFLRRLEGVRQKHQASVIVVAMEPTNYFWKLIARELEEKRITYHLVNAYTVKKHREGNQLDQSKDDPRDARQIAELSRTGHYTETRLQKGAYEELRQYATVYEQLIHAVRREGQVLWGLAGQIFPEISHVFKDLGGETSQALLQSCACPASICQMSEEEFIAKVRAAHTGKKLAVSKVRKAYQLASTSIGLTEGTQATQLAIRLHFSLLQTLKAHLEQVTTAMTTCLACLPEAPYLLSLPYLKAVSAAVFLAEVGDPKRYQTAAQWVKLAGIQPAPNTSGKKQRSRTPMSHHGRARLRTVLYFTCLRMVQHDPHFAQLYSNLQRRQKNPLTKMQALGVLMNKLLHILWAIIQNQTFYNPSFAQSI

SEQ ID NO: 505795 - protein, 451 aa, unidentified
MEKKNVKMDVINPNCAGIDIGSRSHFVAIGQELSDVREFGVYADDLVSICHWLDEYSITSVAMESTGSYWQNLYVELIRHGFEVVLANGKFTKNIKGKKTDVKDARWIQKLHSIGLLTGSFLPDEQTEKLRTYCRQRENWITLGAEATHKMQKYLKLLNFRLDVVVRDVTGLTGLTIIKDICEGNLDPESLAKHRHYNCRKTEEEIAKALKGNNREDFLFGLKQEYESYNFYQKKITECEKMINQFLKQQINTDPTKKKLKAPDKKHKRVNKNAIKGIDLNQASYQYFGGVDLMSIEGVSHSTILSIISEVGPDGFKEFATAKQFTSWLRLAPNNKISGGKLLSSKTPKGSNRLKIALRNSANAIGNLKDTHLSNFFKRVCYKKGRTVAVSATARKLAVIIWNMVVKQIPYKPPIEYLFLDEKRRLGLVTRIRKQIDKFALTNADLGFTTN

SEQ ID NO: 505796 - protein, 339 aa, unidentified
MWYSGIDQHKQFCVITTYGSEGPRVKQARVASTALALGQYFAEFPGPHQAVVESTGGWYWLADTLAGLGVELVLAHATRVKAIAAAKVKTDKVDSDTLALLLRADLIPRAHMIAPAQRGPRDLMRTRLRLVEKSVSAQNSIERLLEKFNVATVAELEAGYQLQASCHTAQLALLDTQIATLERALYPHLIPNDDVQRLLWIPGLGKVNAFTIYTEIDGIERFPSARQFFSYCRLVPGADNSAGRTRHRSGSKAGNRYLKLAFSHAGIRAVQYNPEIRAFFKAKARKKPIRIARTLVGLELARIVYHVLSSQEDFNGQFKGHALSHRKHAKWPRRASPPA

SEQ ID NO: 505797 - protein, 316 aa, unidentified
MVRGSEFVGVDVSKDALDVAVFEGPSWQMPNDEEGLPALVEQLGSRPVRLVVLEASGGLEVPIAAALASAKVAVAVVNPRQVRDFARATGQLAKTDRLDAQVIARFAEAVKPDPRPLPDAQARELDALVTRRKQVAEMIVMETNRLKQALPTLRPVIQAHIEWLRGQRGQLDAQLDQVVKESPLWLEREELYCSMIGVGQVTAHILIADLPELGTVSNKRISALGGLAPLNRDSGTIRGRRIIWGGRKRVRTALYMAAVAAARYNPIIRAYYESLLARGKERKVALVACMHKMLITLNAMARSGRKWEAVRVVRAA

SEQ ID NO: 505798 - protein, 386 aa, unidentified
MEGETFTPRDYDVFAGLDVDKKSIAATFSSPQGFIRSLHMPYSVDYLLNHVRKHFGDQKVAFVYEAGPTGYGLYDGLVAQGYRCLVAAPSMIPRAPGQRVKTNRLDSRGLSESLRGGQLKSIHVPSPIYRELRHLTQLRDTVVREAAAHKQRIKALLLLEGIGFPPATAGRQWTLRVKAQLRKLRCSRTVRFKLDQLLDSLEFCEKQVVSSTKEIRRFCKEDVELFQSIEYLMSIPGIGWIVASQLLARMGDWREIDNVRQLGSFLGLVPTENSTGDSVDRGSITRAGDGRLRSKMIQAAWSAIRQDGELREFYRSVCQRNPRGKGARIAIVAVARKLSTRIYAVLKKQRPYIVRKQVHSAPLTQEETSPQGTTRRCAEPGETDNS

SEQ ID NO: 505799 - protein, 409 aa, unidentified
MDQCAPYPLRGRAARDGVCVSVRVLRDVLRKADDMNHNVAGIDVHKKVLAVAVGKATDDALVFERKLFGTVGRSLAELAEWLKERGVKEVVMESTAQYWKPVWLALEGSFDLHLAQARSNLAPRGRKTDFRDAERMVRRLLSGDLTLSFVPSAEQRQWRLLARSKYQLRRDRVRLQNQLEGLLEEGRIKLSSVVTDLLGLSSLRILRALAAGENDAVKLAALADKRLRVSGEDLAEALRGSLTRIQRLLLNQFLTRLDVIDGQIRELDRTLAEEMEQYSDAIHRLSQIPGVGPDAAAQIIAEIGPKAAAFAAPEKLASWVGVCPGRQESAGESTSNRSPKGNRPMRRILTEVAFAAVKTKDSHFQEVFRRLVPRLGIKKAIWAIAHRICRLIWKLLHEGAVYIEQGARG

SEQ ID NO: 505800 - protein, 273 aa, unidentified
MATEVYVGVDVSKDSLDVAIGAARDIVTFTNDQKGVDALVKKLSQINPALTVFESTGGYELLATSCLAEAGLAVVIVNPRQVCDFAKSAGILAKTDAIDARVIARFAEAVKPDVRQLKDRQTSELTALVTRRRQIIEMIVAETNRLRLANKRNKKDIEDHIRWLKKRLDKIETDIGKMIQSSPIWRCKDDILQSVPGIGPITSASLICDLPELGVLSPKMIAMLAGLAPLNCDSGKYKGRRRIWGGRAAVCSGLYMATDVICNQTPLRSTVHR

SEQ ID NO: 505801 - protein, 310 aa, unidentified
MVCAGIDVSKDVLACCMGEEIRSFSNDPLGISELLRFASGADLLCMEATGRYHLALATAAFEAGTRCVVVNPGQAKQYLAFVSMRGKTDAQDARALARLGEAEGDRLRQFAPNPQWVDELRDIIVRRKGLVESRVSLEQVAQATGDPGGHLASAIEAIKRSQAALDKEMEKRLAHRPGYQHLKSIPGVGPVSAALALCALARGEFASSDSLVAFAGLDPRPSDSGQKRGRRVLSHKGDAQLRTAFFMAARAGARLPEWKDYYAAQRAKGLSSTEATVVLARKLLRVAWSVHKQEGPFIHKERPTGLDNPT

SEQ ID NO: 505802 - protein, 310 aa, unidentified
MESVFVGIDVSKDRLDVHVRPREETFAVARDGAGLSALVERLRGLEPARIAVEATGGFETVVTAALAAAGLPVVVVNPAQVRHFAQAVGQRAKTDPIDAALIARFVEATRPALRPLADEATRLLADLVARRRQIVEMIAAEKTRQRRAPAGRIERSIARLIAALEKELASLDGDIDAGVRGSPLWRDKEDLLASVPGIGPITARTLIAELPELGSLSHKRIASLAGLAPYTRQSGRWKGQSRIGGGRKSVRSALFLAALVAGRHNPVLKAFRDRLVGAGKPKMVAVIAVARKLLTILNAILRDQTPWQNA

SEQ ID NO: 505803 - protein, 424 aa, unidentified
MSLEFVFCTRFYEISAVDITLHILRKECMIMILVGIDIGKNQHTFSIIDKNTGEILSNPSCFPNNREGFLFLIKKLNTYSKSDLLIGMEDTGHYHFALLKHLLDSRYTVALINPTTTDLTRKLQGGITKNDPLDSLTICDVIGSNQRNKPYRITKVNRFDLYEQKQLTRHHHNLKEELNTYKNRLQKCIDIVFPEFNSLFRSKYGIVYMNVLKTFSSAEKIANSDIRTIRKCFEYNKRGKRISLSAEQLKAAAKTSIGMPSVAEEIQIRHLVCQIEMIEEQLSEIDKKIEEFSLQNNSPILSIPGISHFSGTSILAELGDICNYTKAAQIIKFAGVAPYHYESSQFNAQHTAITKKGSRYLRKTLYQIIFPVIYHNKVFNVYYNKKLAEGKGHRCAQGHCVRKLLRIIYHLLSTGQTFDPALLR

SEQ ID NO: 505804 - protein, 411 aa, unidentified
MQVTFGIDVSKSTSTVCELIGESKNELTITNNRPGFIQLLHELTAFSKHPQIIFEATGVYSRTLQSFLEDYGYDYVILNPLKAKKEMDMGLRHNKTDKTDAYHLALIQRLYHHPINQLQSQTYKQLNALSRFYDQLTADLVMAKNRLHQALQSTFPEIENLFSSAKGKNYWQIVVRYPHCDLVRREDKKQLINWLMSLKGIAFKHALRTADKLIELAYQAYPVVSCSSIEVEQVQYYAHRLLNLSDQRENLIARMVKLCLLAKSLPNHDLENLESIPGFAQTTAVRVLAELGDLRRFSNPNKINAFIGIDPGRYQSGEMDSNLSITKHGNAVARKLLYRAIGQIDNAAKTNPCHIADYYESKKLSSQTKGFKKIAIASIHKLIRTIYALIINDQLYDYNVATHNQKDFSRN

SEQ ID NO: 505805 - protein, 449 aa, unidentified
MSKSKRMNMEIVNPNAAGIDIGSRSHYTAIGQGSGQVKEFGVYAEDHLALIDWLNENEITTVAMEATGNYWQNLFTALQNAGFEVLLANGKFTKNIKGKKTDVLDCQWIQKLHSLGLLSGSFLPDHTTEQLRTYCRHRTNLLDTAASTSKKMSKYLRLMNFRLDVVVNDICGLTGLSIITLICKGENDPHKLAALRHGNCRKSEQEIAKALQSNKRADLLFALKQEFQTYNETQKKIEQCDKMIGRFMNDFFKKNPQLKKLKTTTKSYKRVTKNTPKNIDLNQVAYRYFGGVDLMEIEGVSHSTVLSIMSEIGPQGFKKFQTAKQFASWLRLAPNNKISGGKVLSNKIPKGSNRLKIALRQAANVIGNLKNANLHNFFIRISIRKGRSAAITATARKLAIIIWNMIVNKQEYKPINPYEFLDEKRKRIVKEMQKKIAKFDIQTNEFNSN

SEQ ID NO: 505806 - protein, 343 aa, unidentified
MKDTIYDHYIATDWSIKNMAIARMTKKSNKITAIDVPSDIENLQAYLKNLRGTKILTIEETTTSQWLYTELKEFVDRILICDPNRNKLLDEGPKTDKIDASKLVQLLKAGLMKEVYHSTDKFLYLRRMVSGYEDLVKAGVRLKNQRYALLRACGKSGDEKTGSTLDSQGEQFVLGCLDRQIEAYEEEKEGYEKEFEKLARIHPEIRHQKSLPGIGTINAVKIVARVVTPHRFADKGHYLSFTGLIKLEKTSGGRSYGKKNSRYSRQLKSVYKSGVLAAIQGNNPINDYYTHLIQEEGYPEHNARQKACRRLAILSLGVFKSGKKYQPYRRDHVKGDKEGTSGL

SEQ ID NO: 505807 - protein, 331 aa, unidentified
MFDHYIAVDWAQKNMAIARMTKSAKAPSVIDVPADIKELQLYLRKLKGKIILTFEETTTSQWLYTELKPCVNEILVCDPYRNKLLSDGSKSDKTDAIKLVQLLRGNLLRVVFHSGDEFIYLRKIVSGYEDLIKSGVRLKNQRWALFRAQGKDDLKEELNHPAERFVLQDLDGGISEYEREKEQYEKEFEILRKNNEIIRCLKSIPGIGTISAVKIAALVVDPKRFPTKGHFFAYCGLIKHDKISGGHSYGKRNPRYSRTLKSVFKTCTLVAISERLNNPIRSRYEYYINQKRYSEHNARQAICRWIATLALAVMREKKKYSPTRSLECKVS

SEQ ID NO: 505808 - protein, 374 aa, unidentified
MEKFSKYVGLDTHKETIAVAVADALGGKARYYGEIANRPVEIRKLVQRLCPDGEVISFCYEAGPCGYDVYHQIRELGHHCSVVAPALVPRKPGERVKTDRRDCEKLSRLDRAGELTPVWVPDREQEAIRDLTRAREDMKGLERTTKQRLNAFLLRYGRHYEGGKCRWTQAHFRWLEGLKFDHAVQQIVFQEYVDAIKQAEARVAGLAKEMERVLQTWNLAPVVEALMALRGIKLISAMTIMAELGDITRFDSPRQLMSFLGLVPSESSSGPTRRQGGITRTGNGHVRRVVVEAGWCYRFPARKTAHLQRHAEKCSDAVQAIAWKAQKRLCGRYAHLLNRGKLKVQVCTAIARELVGFIWAIACEVMNKHVVSAR

SEQ ID NO: 505809 - protein, 353 aa, unidentified
MDERVLKHEVILGVDTHLDLHVGVVIDEVGHVLGTLAAPTHAAGYLQLLKWARSFGDLQRAGVEGTGTYGAGLARLLGEQGVVVWEVNRPDRSNRRLRGKSDPTDAESAARAVLSGNASAVPKSQSGAAEALRIASVARRSAVKAKTQAINQLRALLVTAPDAIRVKLWKSKPEDCVAGCARLRPFGDTVLLQTLARMLRLLARRWLNLTAELRELDATLETLTKRVAKRLRTQFGVGPQSAATLLAVAGDNPERLRSEAALAALCGASPLQASSGKTIRHRLNRGGDRSANNALWTIAMVRMRSEPRTRAYVVRRTAEGMSTKEIHRCLKRYIVRELYPLILADLNDAATAT

SEQ ID NO: 505810 - protein, 344 aa, unidentified
MDHFAGLDVSVKETSICIVDDAGRIVKEVKVASEPEALLKVLGNPIHRFKRIGLEAGPLSQWLFSALAEAELPVVCVETRHMQAVLKAQINKTDRNDARGIAQMIRAGLYRPVHVKTLRSQKLRMLLTHRKLLQSKAIAIENDLRGTLRNFGLKVGMVGKVRFEARVQELVENQPDLAVLVEPLLIVRRALLEQIVILHRRLLAIVRDDEVCRRLMTTPGVGPVVALTYRATVDVPTRFRKSKSVGAVFGLTCSRYQSGEVDWSGKISRCGDEMMRTMLYEAAQSMMHSKKWSWLKAWAVQIARRRGMKKAIVALARRLAVIMHRIWVDGTEFRWTREQAAAAA

SEQ ID NO: 505811 - protein, 319 aa, unidentified
MPDGQSLQFANSPAGFAAIIELLAGQRAQGWEVLAVVEATGGYERALVEALCAACLPIAVVNPKRVRAYAKALGIRAKTDRLDARVIARYGQTVRPRPSETRDRDRLELAELLAYRDQLTGEIVARTQQKRLYTSPALLSRAETALASLRREQRELEREIARMLTERETLEGTAALVLSVFGVGTVAAASLLAFLPELGQLDEEIASLAGLAPMAHDSGQHRGRRHIAEGRSKVRRVLYMAVVAGLRRNAGLRTVYDRLIKAGKPGKVAMVACMRKLLVWLNAMVRDGVSWQPDATKRRRHQAANEDTAAPAAERPRAA

SEQ ID NO: 505812 - protein, 375 aa, unidentified
MNYNTVYVGMDVHKKSFSLCCYTNEKEQAEYPQKTAPHYSKVLNYLEAMRFHYGDDVLFICGYEAGCLGYTLYHELMDHNVKCILLAPTTIPQPTGRKKVKTDKRDAALIARCLAHHDYSPVHIPSEKDEQVKEYIRMRNDHKIALKKVKQQISAFCLRHGYRYDATVNQWTQAHLKWLRALKPEGLYLDILMEYLSTYDQLTDKIERMDRRIEELAGEPQYREGVKKLSCFLGIKTQTALSTMIEVGDFKRFSSAQRFAAYLGLVPGERSSSESQNRLGITKAGNSHIRTLLVEAAQSYTRGRVGFKSKALKERQYGNPADVIAYADKANERFRRKYYTMVLTKGKKVNVVKTAIARELACFIWGMMVGNLTER

SEQ ID NO: 505813 - protein, 310 aa, unidentified
MDMKAVGIDVSKDRLDVHVWPDGIAFAVARDGKGLAELIERLLPLTPDLVVVEATGGFETVMAAALAGAGLPLVVANPAQIRHFAQAAGTRAKTDPIDAAMIARFGHDMKPDVRPLPDEATQLLADLVARRRQIIEMIVAERNRERRATVRRIKKSIARLVRALEKELAEIDAEIDAGVRGSPAWRDKEDLLASVPGVGPVVARTLIAELPELGTLDKKKIASLAGLAPYTRQSGQWKGKSMIGGGRKSVRCALFLAALVASRHNPVLKAFRDHLRAAGKPKMVALIAVARKLLTILNAILRDQKPWQPA

SEQ ID NO: 505814 - protein, 338 aa, unidentified
MKLYGGIDLHSNNSVLNLVDESAKVELKKRVVNSLEAILLLLEPYHDAITGLVVESTYNWYWLVDGLMEAGYKVHLANTAAIQQYSGLKHGDDDSDANWLANMLRLGILPEGYIYPKEERMVRDLLRKRLQLVQQKTQNLLSIQGLYDRHLNKRLNSNKLKQLTAEQLTVDFFDPNVRMAVNGNLVVQQCLSQQINLIEKSLKAQLRLKDEFINLTSIDGIGLILALTIMLETGDISRFQQVGHYASYCRCVSGARYSNGKKKSKTNTKNGNKYLAWAFVEAANFAIRYNDTVKRYYQRKLAKAHMVVAKKTVAHKLARACFYVLRDQIEFDVNKAFG

SEQ ID NO: 505815 - protein, 478 aa, unidentified
MTTRFWWWLCQPRLRDYMSVKNRQRFFTYLVTLKLRCMKQKIKGMPVVHADAAGIDIASSVHYVAVSPAHNSPVRSFGTFTDDLQALVAWLTSCGVTTVAMEATGVYWVNIFLLIEQAGIEVVLVNAKHVNNVTGKKTDMTDAEWIRQLHSCGLLHASFQPDAFTRTLRSYMRHRKNLLEMGATHIRMMQKAMELMNIKLQNVIADITGKTGQAIINAIVKGERNPARLLELADGRIKANRDDIKRSLEGIWKEEHLFALQQSFDMYHMYQSQIIECDTRIETLVQSRVSQNEEVMQTEKKVSRSNKNNLHFDAKEILQSITGTDLTEIFGISDSAAMEIVSEVGFDMSKWPTARHFTAWLNLAPNTKKSGDKIISSRIQHKKNRAGQVFKMSAYAVQRSKNWLAAFYHRIKNRAGVQKAITATARKIAVIFYKMMTDKVMFNPVSLEDYSEDYKKHQLKRLEKQAKQFGLQLTPMFE

SEQ ID NO: 505816 - protein, 348 aa, unidentified
MQSTANLPVIGLDLAKSVFQVHIVDANSGEIQRRRIKRARLAQFFANCQPSLVAMEACASSHYWARRFISLGHEVKILPAQHVKAFLLRDKTDAMDAQAIWVAAQQPHIKGVPVKTSRQQTCMALHGMRRQLMEMRIMQTNALRGILAEFGIALPVGHKQLLKVIQDELAKAQEDHVLSADLVASVQEQLKRINGLQDDIDLISQRLRAMLQDDPKMQAVYQIPGVGELTATALIAAVGDFTVFKSSRQLASWVGLTPRQVGTGGKTQQLGISKRGDSYLRTLLIAGARAVIAKAAQSTWIQQLLQRRHCNVVVVALANKIARTVWAVMAQGQAFNPMKWNPHEQVVA

SEQ ID NO: 505817 - protein, 340 aa, unidentified
MNATAIGVDLSKSVFQLSLSNSAGRVVERKRLSRAQYERFLVQQPPAEIVMEACATAHHWARAARAFGHQPYLLHAQYVRPYVRRNKTDAADADALLRARRDPDLKPVAVKSSDQQALQGLHRIRQQWIATRRQRITLARGLLAEFGISLPAGAAGIVRRLHAVVDAVPAVLLSALMPILDEIGELEQRIKHLDRQLATIAKANPDIQRLMTIPGVGVIIATAMLGSVADIHSFARARQFAAWLGLTPREYSTAQTRRLGRISKRGDGYLRMLLSHGARSALLLAHRQAAKGDQTLTRLQRWVLDVEARTHHNKATIALANKMARIIRVTWTRAEDYQAC

SEQ ID NO: 505818 - protein, 379 aa, unidentified
MDHAITDTSAETVLRGALELSKNSWLLALQLPDRAQPSLYPIRGGDTEGLMAKLTAARDRWAKVSGKAPSIVLCYEAGYDAFWLARFLKAHGIECLVVDAASMQVNRRARRAKTDRIDVGMLLRALIAWGQGDRHVWSVVRIPSVDEEDLRRSHRERDRLVRERTAHINRIKGLLFGQGIRDINVKSKYKTLQIDKLVTGDGRPLPPRLASEITREIARLALIQEQITALERERDQAPTPCKITERKRVQLMCLTGIGPAIAAVMTREVYYRQFDNRQQVAGFLGLATSPHDSGDVERSQGISRAGRGQVRGIMIQAAWLWLKHQPKSAITRWFVQRTAGQSGRIRRIMLIAVARKLAIALWRFVEQGLVPQGAMLATR

SEQ ID NO: 505819 - protein, 387 aa, unidentified
MPQPNDLSRSLIALDQNSTIIAVVELSHSSWLVGGVVPGIERQPRKKLEPSPERLLALLHRWRDEAVRAGSTITRIALAFEAGRDGFWLARWLEARGVEAHVIHASSVAVSREHRRAKTDRLDTELLKRGFLGWLRGERGHCSMARVPTIAEEDAKRPNRERDGLVGERTRIVNRIKSTLARVGIRNFKPALRKAAERLATVHTPEGMPLPPNTLAELQRDMARLSFVVSQIKEIEETRQKRLEQQPETGPDAMVRLLARIIGVGVETADMLVHEVLSRPMRDRRAVARYAGLTGSPDESGAQRREQGLSRAGNARVRRGMIQLAWRFLMFQKESALALWYRARTADSRSGTRKTMIVALARKLIIALWRFVTTGEPLEGVVLRPAT

SEQ ID NO: 505820 - protein, 330 aa, unidentified
MYQVGIDISKTKFDACLLIDGKTKAKTFGNSFEGFNGLISWLAEHGATPAHVCMEGTGRLWEPLAEFLAERKYLVSVVNPVRIKGFAQSEMRRSKTDKIDAKIIARFCRAQTPTSWVPAPPEIKALRDMQRYVEVLKDNKARESKRLGSSAVIDERVHRAIQEHIAYLDRQIEALETEIFDLIEAHEKLNRDFGLLITIIGVGQTTAATFIGELAGATTFGTSRQIEVFCGIAPRLFESGSSVRSRSRMSKVGNARVRKALYMPALAAMRTNPVLRDFADRLRAAGKPGRVVVCAVMRKLLRIMFAVLKSGQAFDLNFRSARPSQVARVH

SEQ ID NO: 505821 - protein, 461 aa, unidentified
MTKRLFYIAVARSSPREAQNENHNERQRMTPAPYDLILGLDRADQKADLCLIETATGQRRPAVVDTAPEALCEWLAQLRQQHPTARVGLCLEQPAVHLIPFLEAYAWITLHPINPITLQKYREAFVTSRAKDDTKDAEYLADLLLNHHAQLPVWAPQDSQTRAVPQLVAHRRAVVDERTALCNRLIALLKQYYPQALTLCGEDLWRPLATAFLLKWPSLSAVQKAKPATVKQFYHLHGSRSQQLIAERLALIAKAVPVTDETAVIESFVLRVQLLARELQAVVRTIAEFDRQIAAAYQAHPDHALFASLPGAGPVLGPRLLASLGADRERFAQSAAQLQCYTGVAPVTKRSGGSERIHRRYCCPKFHRQSFHEYARESILWSRWAGAFYLQQRTKGCAHHTAVRALAFKWQRVIWRCWQDRTPYDEARYEAALRKSGSPIVALFDRVDLGKSPWKNPAKKS

SEQ ID NO: 505822 - protein, 378 aa, unidentified
MATTRSVLRHELTAKSGDLYLSLDLGDKRWHISIGDGRCGLSHYSVGAGQTDELADCIAKARARLHLSRKAIVHSCYEAGRDGWWLHRWLTEVGVDSIVVDPASIEVNRRARRAKTDRLDADKLLAMLVRHHSGERVWSVLREPSPKDEDARRTHRELQRLTHERVAHTNRIGSLLVLHNLRPNVVIGGRYWSVWWERHRAQVPSSLAAELEREVMRLQLVKQQVRAIEATRSQELLEGKQPLVAQLTRLRAIGAKGAWVLVKEMFGWRTFANRRELAGSLGLVPTPYASGDSQLEQGISKAGNRRVRGLLVELAWGWLRLQPSSALAQWFDRRFASGGKRLRRIGIVALARRLAIALWRYLKNGEIPAGAQLKPAGA

SEQ ID NO: 505823 - protein, 346 aa, unidentified
MKQVSTIGLDLAKHVFQVHGADNEGSVLFNRKLRRTEVLRFFERLPPCLVGMEACGGAHYWAREIAQLGHDVRLIPPAYVKPFVKRGKTDAADAEAISEAVIRKTMRFVPIKTAEQQADAMVLKTRALLVQQRTQSVNALRAHLAELGIIAAGGLPNVAALMTIVREAEDTRLPTAARFALTAIVDQIDALAIQINVLERTIVTESKRDESMRRLTTIPGVGAITAATIKALVPDPGGFKSGRHFAAWVGLTPRPRSSGGKERLGRISKMGNPELRVLLVLGATAVLRIARNDEKARPWLKALLVRRPFKVAAVALANKMARIIWALLNKGGFYDPPEPSPNVAAT

SEQ ID NO: 505824 - protein, 385 aa, unidentified
MRNKAFVPRDYDVFAGLDVDKRSISVTFTDHQGLSRSMRIPYNVEHLLNYVGKHFAGQKVAFAYEAGPTGYGLYDGLVAQGAPCLVASPSMIPKAPGQRVKTNRLDSQGLSENLRGGQLKSIHVPSAVYRELRHLTQLRDTFVSEAVGMKLRVKSLLLFEGIAFPPAPAGSQWSFMVRAKLRKLPCSTTVRFKLDQLLDSLEFSEKQVFKTTQEIRRFCQNDPELGQSIKYLMSIPGIGWIVASQLVARIGDWRNLETVRQLAGFLGLVPTEHSTGDKINRGSITHIGDGRLRSKLIQASWSTIRQDAELREFFRSVARTHPRNVASRVAIVAVARKLSTRISAVLMRQRPYVVREKVHSAPVTQEETRPQGTTRRHAEPGEQNS

SEQ ID NO: 505825 - protein, 349 aa, unidentified
MNFYTNTHPYYCGIDLHTRLLYVCIIDNENNILVHEKIDDSPDKLLALLKPYLGNIVVGVECMHCWYWVSDFCEEYNIDFILGHALYMKAIHAGKTKNDKIDALKIAKLMRGGNFPLAYAYAKEHRSIRDALRRRTHIMRMSAQLKAHVASTVSQYNLPALETRLDLRNSPDREKMRHFFPDEAVQKSMDLNLNIIETMVSELYKIEHYVKTQAQTHCATDLHILKSFPGIGKILALTILYEVGDIKRFPSVQKFASYSRLVKCKAESAGKTHGTQGNKIGNAHLKWAFSEAAVLYLKGNDNAKRYLAKLQKRMSKAKALSALAHKIGRCTYFMLKNQQVFDEERFLNG

SEQ ID NO: 505826 - protein, 403 aa, unidentified
MIFVGIDWSEQHHDVCVLDESGRVLAKARVPEGLEGVARLHAMVAEQAEEPAEVVVGIETDRGLLVGALVASGYRVYAVNPFSVSRYRERHTSSGTKSDPGDAKVLADLVRTDRHNHREVAGDSELGEAVKVLARAHQGLIWSRQRQVNALRSALREFYPGALEAFANLASADALAVLAVAPTPSAGRALTFARIRRALQGGGRSRNLDRRTTEVFEALRRPQLEAPPLVAEAYGEAVHSLVRVISELLEETARLEHELAERFEGHPDAEILRSLPGLGSVLGARVLAEFGDDPTRYRDATARRCYAGTAPRTRASGMRLVVVARVARNRRLADACYNWAFSALNSSPGARRYYDLRRARGNTHHQALRSVANHLIGVLHGCLRRRSPYREVLAWTHALNSAA

SEQ ID NO: 505827 - protein, 317 aa, unidentified
MANFVEPIMYGIDVSLRTLDIAQPDERVASIANTESAVADWLKTVPQGAGIAIEATSHYHELVLDQALEAGLTVYIINGKQLRHYREAVGPRAKTDVQDAHLLRRYLCHEYQQLTPVKPLNDKQKQLWRLLKRRAMLVKVRTQIHSSMKGDVQAKQLSQGVMIELNRTIRQLEKLMRELAVELGWGRWLAHCQSIPGIGPLNALALVVCFHRGTFRRVDQFIAYIGLDVRVRDSGQMKGKRKLTKRGESEIRRLLYNAAMSFARNPQYKPLYDRMRDRGMSSTAAYVALARKLARIAFALMVKDVDFEHNQMRMACK

SEQ ID NO: 505828 - protein, 414 aa, unidentified
MEQKMIYVGIDWADDHHDILITDDSAKTLEQFRIDHTCDGFALLHSYLVNHQTFPGLVLIAIETSRGLLVHELLQKGYTVYAVNPKAVNRYKDRHVLSKAKSDALDALSLGHLLRTDRHLFQPIKPLPEDYRLLSRLCEDLRKVVDERSRIVNQTISCLKEFYPKALEIFSLNSQIFIDFLKAFPDHGTLSACTKKTFLVFLKKHRYPYPAKAEELWKIIQSPALQPDRVVARTGRLRLGMLLDQLKNLKEHITHYEQEIQVILDNLPESTPVKNLPGVGERLAPELVATLGPNRKDGHHRFHAAEEIAKLSGCVPVVRESGKWRSVSLRYACVKPLRRTFHDWAFASINHSSWARAFYDYHKARNQSHCTILRNLGKKWIKILFAVWLKGTTYNETLHIQNLKARNVPWAMAL

SEQ ID NO: 505829 - protein, 342 aa, unidentified
MNVKQQIQQTFIGTDVSKLTLDVSIITVDGLHQHGQFENNIKGFKQLQTWLLSTNLFSYNNALFCMEHTGIYTRQFVQFLLMHEAKVWMESALHLKRSMGMTRGKNDKIDSYRIARYAMTNADNVKLVTLSSKSLLLIKDLMSNRDRINKSYQSIKVSIREMERIDKATGKELVKLNKAAINGLLKSKEAIEKRMMELINQDDELKNIFELVTSIKGVGQILATELMVYTQAFTRMNNAKQLACYCGVAPFTHTSGTSVKGRTGTSNFANMNLKSTLHMAAISSTRYVPDIKQYYERKVAEGKSKMSVINAVRNKILQRVIAVVNRGTPYVENYSEINLEYS

SEQ ID NO: 505830 - protein, 350 aa, unidentified
MIIIGVDFHPEFQQIAWLDTDSGEFQEKRLMHREEAEDFYGAQAAAGQKVRVGMEASGQARWFERLLAKLQFELWIGDAAEIQRQRARKQKTDRQDAQHILKLMLKDDFPRIWVPNWENRDLRQLLWHRHRLVQARTRVMNQLQAVAINEGLRCKKRLWRAGGRQQLESFPLARWASRRRSDLLELLDRLSPTIAELSQAIEQEAEKRPEAQRLRTHPGVGALTALAFVLIIGDVERFQCGKQIASYLGLVPLEKSSGNRRRLGHITKQGSSMLRFLLVEAAQVTVRSVPEWRSQYFRLMIRRGRKTAKVAMARRLAIRLYWMWRQGLDYGELVKFGSHAGQPVHRDGVM

SEQ ID NO: 505831 - protein, 439 aa, unidentified
MVNTKQKDEIEFAAFMGIDWADQTHAWALALPTHCGVEHGDLAHTPEALEAWAAELVHRFGGQPIAVAVEQSRGALLFMLTKYAHFVLFPVHPATLASYRKGFRPSGAKSDPSDADLLVDLLVHHREKLRRLNPDSEQTRTLQFLVEGRRKFVNDKTRYSNRLTAYLKIYFPQALDWFFEVTSQIAGDFLERWPTLRHAQKARPETLRQFFRKHNSSRSDSIERRVQEIRNAVPATQDAAVIDSCSTAVLAWVRMLRELRETIASYDQKIETLARQHPDFAIVDSLPGVGPALAPRLIAALGTQRDRYASASELQCYSGIAPVLATSGKQHWVHWRWACPKFLRQTFHEWAVHSLSCSAWAKAYYDQQRGTGKPRNTVVRALAFKWIRILFRCWKDRKPYCEEIYRQALHRRKQMTTSSPVQLQWKTCAGFSKIAGLTS

SEQ ID NO: 505832 - protein, 345 aa, unidentified
MQLTTVSVDLAKNVFQLHAIDQQGKTALRKQLKREQVVPFFANLEPCLVGMEACGGAHYWARKLQALGHTVKLMAPQFVKPYVKSNKNDVADAEAICEAVTRPNMRFVPIKTVEQQAILAVHCARQGFVKARTAQANSIRGLLGEFGVVLPQGIRHIVERLPDILEDHENALPGSLRQLMQRLMEHFKELDRQVVELEREIQQWHRSNEGSCRLAEIPGVGPLTATALVASVGDAKNFSNGRQMAAWLGLVPRQHSSGGKPTLLGISKRGDGYLRTLLIHGARSMVRVVESKTDPSADWLKGLLARRHTNVAVVAQANKTARIAWALLAHGTKFRPDYTPDVTVA

SEQ ID NO: 505833 - protein, 393 aa, unidentified
MFYLGIDVGKFSHSLCLIDDAGHHEIWQIKNDKSGFESLRQKLVSLNLLAGAELLVGMEATGHYFLNIYDFLLQLGLPSEQIALLNPLQVKSFRNTNLRGAKSDNVDAERIAVLLQFGNFDHCNVATDQIMNLRELTRLKSDLTANLGNLKRKIIAVIDRIFPEFAKIFQNKFGLTVVALLTDYQTPEEFAALSLEELTALIKSLSKRGINQDKIQKLHEAARNSIGISFGREGFKIELSILLIQLKSLEEQIDFLENKIMEMISEFNSPVFTIPGIGKTTGAAILAEIGGINHFASAIKLIAFAGLDPKLKSSGTYQGRTPISKRGSKYLRSALWYSAMVLCRVDEKFHKQYQDRRKLGKSHRYAVTAAANKLTKIVYHVLKNNCVYDSNLA

SEQ ID NO: 505834 - protein, 342 aa, unidentified
MSEFTTVGLDIAKNVFQVHGVDGEGEVVVRRRLKRSRVVPFFASIEPCRVGIEACATSHFWARELGALGHDVKLMPPAYVKPYVKRQKNDAADAEAICEAVTRPTMRFVPVKTTEQQSVMVLHRVRELLMSQRVRLSNAIRAHMAEYGLVAPIGRNGLQRLIETINDETDEQVPAEARLCLKMLVDQLQLVNVQVLENDRRIRASARATEVGRRLMEIPGIGPVIASALVATVPDPQAFRCGRNLSAWIGLVPRQNSSGGKERLGGITKQGNRYLRKMLVVGAMAVIRYAQRNGTRRPWLVQLMRRRTTKIAAVALANKTVRMVWAIMVSGERYREPVALAA

SEQ ID NO: 505835 - protein, 368 aa, unidentified
MGKFITYVGLDVHKKTIAVAFADQGDSEVRPYGVVDSNLSSLDKIVRKLVSRGGEPRFVYEAGPCGYGIYRHLKEQNIECMVAAPSLIPKKSGDRIKNDRRDAIKLARLYRSGELTAVHVPNSEDEAMRDLTRAREDSKNAERKARQQLGAFLLRHGLIYNGKSHWSLTHWRWISDIKMEHEAQQFTLQEYVNTVRSCSERVERVTEKIRLLAGQWRFGPVVEALQALKGVCLVVAATVIAEIGDLSRFDNPRDLMAFLGLIPTQHSSGDKIKLGRITKTGNGHARRMLIQAAWSYRLPARVSRRLRDRQEKLPEKIWKIAWKAQVRLCTRYRRLIARGKPTQVTTTAIARELAAFMWAIFRTVEVGA

SEQ ID NO: 505836 - protein, 329 aa, unidentified
MKTCTLGIDISKKSFDVALLSDDKWACKSYKNNQVGYNALMLWLTNRNAKNAHICLEATGVYGDGLALALHQEKYNVSVVNPACVKGFAQSELCRTKSDKADAKLIARYAMAMRPSFFKPEDEHVLLLRQWTRRLEGLTGMLGQEKNRLEVSCSEVAETILVGIGSLEVQIAVVKEKIKKLIDSNNELKKKSDLLQTIPGIGETTIAQLLAYIGSPERFESAKQMAAFVGLNPKQRQSGTSLRARTRLSKMGNSHIRKALYMPALTAIRYNPTIKIFSERLEKSGKVKMSIIGAVMRKLIHIIYGVLKTQTSFIPLHKPKSAKKKELCA

SEQ ID NO: 505837 - protein, 349 aa, unidentified
MTSLADQVDLVIGVDTHKHTHTAAVVQAATGGKVAELTVTTDPDGYEQLLRWADQHGASRVWSIEGAGGYGAGLTRHLTTAGERVVELDRPVRAARRNGAKSDPLDAVRAAREALSRPDLTDPKSTGPRAELAVLTTARRSAVESVTIAQRQLHAIVIAAPEVLRAKFRGRTTTTMLSTAARLRIAPSWDAETVTTARVLRTLARRASALLDEAREHERAITAIVRAWRPDLLDQPGVGPIVAAQVLTSWSHPGRIRSEAAFAMLSGTAPIPASSGLRTRHRLNRSGDRQLNRALHVVALSRTRYHQETRDYIERRRAEGKTDREIRRCLKRYIARRLYRQLEHGPQAA

SEQ ID NO: 505838 - protein, 375 aa, unidentified
MDDYSEAFIGFDTSKLRNAVAIADAGRGGEVRFFGEIENTPAATAKLVRKLSAKYQRLTFCYEAGPTGYGLQRQIKDLGFACLVVAPSLIPKRPGDRVKTNRRDALSLAKLLRADELTAVWVPDGAHEAMRDLTRARETAMLDLRTKRQHISAFLLRLGKPYPERKKTWSKVHVSWIASQKLEHPQQRLVLEEMMLAMRQAQERQQRLEQAIAAAVPEWSLAEVVTALRAMRGIDLISAATLLAEIGDLSRFRTPTELMAYLGLVPSEDSTGDVIKRGSITKAGNRRARRMLVECAWSYQHPPRVGPAKQPKVDAAPPAVREIAWKAQCRLYRRYRALIRKNKLKTVAIVAVARELAGFIWAVARAATAARAAVA

SEQ ID NO: 505839 - protein, 349 aa, unidentified
MNYYIGLDAHAATCTAVVVNDRGDIICRETFDTSEANLVGFIRRVPEGKTHLTFEECHLAQWLYVLLNEHVDRLVVCNPVYVAKKQGAKTDFRDALHLAQELRTGHLKAVFHDNSRWIELRTLVNSYLSLVEEIVRTKNRLKAAFRSHGLATDTDKFYTTPERAKELPHESAKFVAESLFEQIRVLEKYKSEYRDFFEKNIKRHRPIRNLDSVPGIDAVRANVIMAVVCQPQRFRNKHQFWGYCMLVRHIQISGGRIYGNKRVHGRAELRDVFMGAAESTLRTETTLRVYYDGLRAKGLSDKEAKIALARKIAALCLALLKNNDTYKNDHEQQQQGRTQARKSLNMKTV

SEQ ID NO: 505840 - protein, 351 aa, unidentified
MTTSSLAQEVIVGVDTHKDVHVAVAIDIHGRRLGERMVPTTEGGCTELHRWALGFAPRAWYGVEGTGSYGAGLARYLQAQGSQVTEIRGPNRKLRRDRGKSDTLDAEAAARAVLAGTSTISPKTGNDWVEQLRVLRVARRSAIQARTQAINQMHAVVVGAPQELRDLLQPLPRHKLIKRAARFRVADASDAQTTVRWTLRLLALRHQALTDEVAAIDEAIAPLLEQHAASLLELPGVGPEVAGAILVVAGDNPQRLRSEASFAALCGVTPLPASSGKTTRHRLNRGGDRQANCALWRIAMSRLSYDERTQLYARRRTTEGLSKREILRCLKRYIAREVFTALPMPTTLDRA

SEQ ID NO: 505841 - protein, 318 aa, unidentified
MNIIGLDISKDTIDATLHKTNGSIHYIKFKNNDDGLKQFRLWIKGNRIRKAYIGMEATGIYYEKAADMLSSYYTVYVINPLKIKDYGKSRFNRTKTDKADSNLIADYIKRHQDTLIPYQIPKNKALQKLINLKNQLQQHQKQIKNRLHSTEEDFIRNIHQDLIDTIQDKMEQVKIAISEQIKKQTDNNHYRNLQTIPSIGKDTASVLYAQLTEKHFKTANQFVSYAGLSPAIIQSGTSVRGRGRLSRYGNRRLKSTLYMPALCAYRFNAFPKLIKNLKKAGKPKMVIIVAIMRKLAKLAYYIVKTGQPYDAERHRLNQ

SEQ ID NO: 505842 - protein, 344 aa, unidentified
MDNHTQYLGFAGVDLAKKVMQIHFVTEDGEITDKSVKRAEFLDFFRNRGKCLIGMEACGSSQDWARKLEAMGHEVHLMSPKAVKPFVSGQKNDHNDAIGIYKAMFNGVRRVPVKSTEIRDLQTLRRIRSQVTKDKVKEINHVRGLLAEYGIVMGKSLNAFNKDISSALEILTERGDVSPLVAEELRTTVEAIKAKIERQKKLDQGIEQLARGCKNYENFLKTPGVGPFTAAMLCVLLCDPSIFANGRQFAAYIGLAPRSRGSGGKNYVTGIPSKFNCDSESRAVLVECAQAIARCKNKSLWVEEILRRKPKKVALIAIANKLARQVWAMANKGESFKQMAVLTA

SEQ ID NO: 505843 - protein, 309 aa, unidentified
MNVSTIGLDIAKTVFQIHGEDAEGEVVIQKRLGRRGMMAFFAKLPPCLVALEACGTAHYWGRTLRAFGHEVRLIPAAYVKPFVKRNKTDARDAAAICVAARRPDMRPVAIKSEAQQASRALERSRELLIKQRTQLMNSLRAMLAEFGVVAAQGYRGFAELTARLRSEDPGLPETLIAALRVVLAQLDGLTPAIEAMEDRIKAVVKADPDMRRLARIPSVGFITAHAVVAAVGDGRQFSSARDFVAWGGMTARENSSAGKRRTRGVSRQGESRLRKLFALGAATLMRNARSRQDRATPWQRGILARLGGQ

SEQ ID NO: 505844 - protein, 363 aa, unidentified
MEYIAFDAHKHYTLASVARPDGQLVREQRLPHERGALQQFLARCEPGSPVAVETIGNWYWIVDEIEAAGCVPKLVHARKAKLMMGEINKTDRLDVRGLNRLQRNGTLPTVWIPPGELRDQRDLPRTRMVLVRQRTQLKNRLHATLAKYALHDFTVSDIFGVRGRELLRQRLELLPPHTAYASQHLLRQVEELGGQIRQFEQRIQATFKPTPAIQHLMTVPGVELTLAVVIALEVGDVARFATAEKLASYAGTTPRVHASGGKTRFGRSRPDVNRYLKWAFVEAANAICVTRRRSACRHVSRLYERIARRKGHPKAIGALARHLAEATFWILSKQEPYREPKISTVSSTEDKREIPLSSRKLDR

SEQ ID NO: 505845 - protein, 413 aa, unidentified
MFKIFRKNCCGLDVHKTWIYACIGITDANGRTVYKQARFSSFTKGLNELAEWLAKYNCKDVCLESSGKFWIPVFNILEKTCFVTLAHPKYTKPQKGNKTDRKDAKWICDLFMCDMIKPSFIPGLEIRRLRDLMRYRTKLTNMKTSEKNRALNCLTVSNLKLDDVFSDVFGKSSTSIIQYLLEHPGESFDVRPFIHARCKTPVEEIQAAVEGAISVPQAIKLRQCLNHINEIEKHREEINLEIQALAEPFSPVLELLRTIPGLDTQPITAIAILSEIGPDMSVFPTSKHFISWAGCCPRNDRSARRTKSTRISRAGQSLKPLLVQIANALLRSKEHPEFKNRYRRIKANRGHKKAIIAICKMLLTAIWNVLSKVEPYSAKGYLEPKPAKEEKVLTQSQALDLLRKRGYTIIDSA

SEQ ID NO: 505846 - protein, 356 aa, unidentified
MRKTDPAEIIIGIDTHKEAHAAVAINGLGARLGAMTLLASSRGYHEMESWAQSLGPVRAFGIEGTGSYGAGLARFLQERGHNVIEVNRPNRQIRHQHGKNDPLDAENAARAVLSGQARAAPKSGTSSVEMIRHLKVARDTAVKSRTQAMVTLKTIIVNAPAALRESLDGLTGKMTLIRHLAALRPGAMTSPTASAKATLRALARRWLMLDAEIKSHDADLDTLTTACAPTLKEAHGMSTGTAAEMLILVGDNPERIRSEAAFAKLCGACPIPASSGKTSRHRLNRGGHRQANAALYRVVIIRMRSHPPTLDYVRRRTAEGKGKMEIIRCLKRFVAREIFGYLCRARRDPTTVHSTS

SEQ ID NO: 505847 - protein, 411 aa, unidentified
MDVFCGIDWAEDHHDVALVDAGGQVLARLRVTDDAAGLAALLELLAAHGDIQQDPVPAAIETPRGLLVACLRAAGRPVYPVNPMSVARYRDRHSVAGRKSDKGDAAVLANVLRTDLHAHRPLPADSELAQAVAVLARAQQDAVWERVHAQNKLRSHLREYFPGFLAAFGSARGGVTRPEARAVLAAAPAPADAARLTKARLASLLRKAGRQRGIEAEAARLHAAFQQDQMRQLPLVEQAMGRQALALLRQLDAACQSADDLQQAAEESFNQHPDAGIITSFPGIGTLTGARVLAEIGDDRSRFKDARGLKAYAGAAPVTRASGKSRSVTQRKVKNNRLAAAGYTWAFAALTASPGARAHYDRRREAGDRHTAAQRNLFNRLLGCLHHCLQAGQRYDEATAFPARAAAPAAA

SEQ ID NO: 505848 - protein, 420 aa, unidentified
MKVVYSTCCGVDVHKTFLVATIIKTTKGVQPSYQKKRFSTFNSDIRRFKQWLLDNSCFDVCMESTGKYWIPVFNLLEDQINVTIANPKWVKAVKGNKDDAKDSKWIGDLFRLGLVPGSFIPCKEIRILREYTRYRFKLTCCKRSEKNRFQNAFTVCNVALDAVVTDMFGKSASSITDYLITSDEFDPETCKSFLQKSLKKKADAVIESIEGYQMTSSQKERMLMVRSHLEFMQQSIDSLDSKLDELTAPYENAVSLLCTIPGVDRASAITIISEIGTDMTQFNSSKRLCCWAGLTPGNNESAGKKKSVRITRAGVYLKPALVQCAHAAVKSTATPYYKNKCERLAKRRGKKRAIIAIARMILTAVYHMLSTRETWNPCDLYKIDMPKEMQDKQKAKAVKQALKLLISQGVISPESAPTAV

SEQ ID NO: 505849 - protein, 404 aa, unidentified
MTAAAIWVGIDVGRYSHALCAIDAAGEVVWERKRVRNTTKEMRRTLAQFRGFAKDQCVQWATEEPGGNASALLRLLEESQEHVYLAQALRVHRFHLALGQPHKSDPYDARVIAEFARQNAGRLPTVRLGPPETQALKLLSRRLEMVGKDIRRSANRLRGVLAEYAPEWLGCRVFGRWTTEGALNTLARYGRLSKLQRTPLGRLSAALRSWSRGHYGELQAQTLLASLEDVSLPAHLEDAYVEIIRSLVCQIRSLLTERERLLALLAAHAQSCPELRALQREFGYGLETSAVIISEIGDIRDFANESRLATYCGVTPIKRSSGISAGSARLSRFTNRRLLRALIQSAYSAAHHHPESQAYYQKKLAGRTDPRAKTTALIALARHRVRRLYRLLRTVSETPLEAAL

SEQ ID NO: 505850 - protein, 432 aa, unidentified
MFGCDAGEGVVLEEDPQVEEIVARVAALDIGKAELVCCVRVPHEGKPGRRLQEVATYSTMTRSLLAMSDHLRCLGVSRVVMEATSDYWKPVFYLLEAQGLDPWLVNAKDVKHLPGRPKTDKLDAVWLCKVAERQMIRPSFVPPPAVRQLRDVTRYRIDLVGARTAEKQRVEKLLEDAQIKLSVVASDIFGISGRQMMAALIGGQTNPKALAQLARGRLRAKLEALEEAFTGHFTDHHAFLLATMLARIDALDADLAALEAKIQEMTAPFAAAVDKLDEIPGVGATGAHIILAEIGLDMSRFPTAAHLSSWARFAPGVKESAGRKKGSGTTGHGNRYLARVLGEAAVAASKTNTFLGERYRRIAKRRGKKRAIVAVGRSILVIIWHLLSNPAARFIDLGSDFYENRTGPDRKKRNHIRQLEALGYKVTLEPAA

SEQ ID NO: 505851 - protein, 309 aa, unidentified
MEHFVGIDVAKDRLDIRVRPSGESFTVARDGEGLAVLVERLRGLAPTLVVLEATGGYETVVASAVCAARLPLAVVNPRQIRDFARATGKLAKTERIDAAAIAHFAEAVRPPARPIADAEAQALGELVARRRQVIEMIVAEGNRRRMASQRRVIRAIERHLAVLQAELSELDGDIDGAIRNSPAWQADADLLVSVPGIGKATLRTLIAELPELGRLTRRKIAALVGVAPINRDSGTLRGRRTIAGGRPAVRAALYMAALVASRRNPVIAPHYAKLRAAGKTGKQALIACIRKLVVILNAILRDRKPWQPA

SEQ ID NO: 505852 - protein, 352 aa, unidentified
MSEKYVALDVHKASVAIGVRDERGKYIMESIVETKAVTLLDFVKGLSGTIHLTLEEGTQSAWLYDLLKPHVAECVVCNPRQNKLLEAGNKGDRIDVRKLSELLYLGSLRPVYHGDHGTRALKELVHGYESLVRDRTRVKNRLKAIYRGRGISCEGGQVYHPQKQEQWLAQLGEPGVRQRAVSLYTQLESLNVMVTEVQRQMLAESRRHKATAILRSLSTLGPISAAMIIATCDTPHRFRTKRQFWTYCGFAVVTRSSSDHYFENGELRKRRKPALTRGLNQNYNRRLKQVFKSAATSGTRQGPFKPFYEQLLAKGLRPDLAKLTLARKIAAIALAMWKKGVPFDPKKLKVNS

SEQ ID NO: 505853 - protein, 412 aa, unidentified
MIDWNDVRYFLAVANEGSAAERLEVDHYTVLRRTAQLEGALERKCCWGGRPPNGIETCQSESLRSQTKEPSVEEIIRIGMDTSKHVFQLHGVNAAERAVLRKKLRRKEMVDFFAKCPPTVIAIEACGASHHWARLLTSLGHEVKLIAPQLAKPYVRRGKNDAADAEAMSRPTMRFVPVKSTDQQAALMMVSLRERAVASQTQLANTIRSHAAEFGLTAAKGMSHIAPLLGRIMVDQVIPTLARDLFASLAEEFAQAVERLKDVDAKLMAWYRSNECCRRLARIPGVGPIGAVLLVMKAPAPEQFASGRQFAAWMGLTPKDHSTAGKVRLGIITRAGDEMLRKTLVLGATALLQQVRIGRSRNASVWLTELLRRKPPKLVAVALANKIARIAWKMMVTGEAYKGQAVQPACPA

SEQ ID NO: 505854 - protein, 475 aa, unidentified
MNLKGTKKKNQVSNVNIFEQQELLKKIEVVRENLTASTWRELETKGKFDKNAKLSFICDDMLILGCDVGSETHYLRAIDTRGRELSKSAFSFSNNADGFNKAKEWAVKIAAEYDKKQIVLGLEPTGHYWFCLATWMISNGLSVVQVNPYAVKQTKELEDNSQLKDDTKDPKLIANLVKDGNFGMPYLPEQLYADLRRLSMFRDQLNEDRIRSINRLHRELKIYFPEYKEALGKTEGTFSLELLKQAPFPDDLAALKEDGIRQIWHNAKLRGRGYSRAGEILEYAKASVGLREGKETGKLVVQWFVQKILELDAELALIETQINQKCLEIPHTDKVLEICGIGENTLSGMMAEMGDISRFDDVKEIQKLSGLGLVASSSGKHKGETKISHRGRKRLRYWLFQAAKSAVVHAEEFKELHVYYTTREQNPLKKMQSLIAIACKLLRIIFTILKKGIKYDPRKMLKDIRRESRQESLAA

SEQ ID NO: 505855 - protein, 342 aa, unidentified
MEHIAIDLGGRESQICVRNDKGEIVEERRHLTAHLGRYLAKREPGARVLLESSSEAFSVADWAVQSGHQAHVVPAALVRALGVGERGLKNDQRDARKLSEMDCRMEVPSIHIPSAERRDQQARVTARQALVEVRTKLVNTVRSFFRTMARPSVKATPDTLAKRVRDQLLKHREGIPDYIEFVLATLEALNEQIAKADAALEKLANADEACKRLQTMPGVGPVTSVCFAAAIDEVSRFESASKLTSYLGLTPGENTTGFKTKRTSMTKAGSGRARWTLNQAAWTMVRTRPNDPLVLWFQAVAGRRGKKIAISALSRKMAGILYAMWRDHQPYNPQKAAKVLTA

SEQ ID NO: 505856 - protein, 348 aa, unidentified
MKHYVGLDVSKDETHICVIDEDDRKLWQGKCASTPEAIGKLIQEHAPHAAKIGLETGNLSTYLWHGLNDMGLPVICIDAYHAHGVLKLRMNKTDKNDAHGLAQIMRSGWFKAVKVKSFASHEIRALYRARSSLVSMRSDVVNQIRGCLRVFGIFIKGIAGVGFEKRVQEIIDEGGQLAAPLQAQLTVLQTIKKQIEELDELVLDHSWACPSCRALMTIPGVGPMTAAHFVLAVDDVERFNKSKSVAAYFGLTPKRYQSGDMDFNGRISKRGNRIVRHHLYESANILMTRVKKPSALQEWGLRIAKRSGMKKARVAVARKLSVIMHQMLLTGECFEPYPAPNYGVPVHA

SEQ ID NO: 505857 - protein, 419 aa, unidentified
MPQIWAGIDAGKGHHHCVVIDADGVKLYSARVANDEAALLELIAAVTDLAAGAECLWAIDLSSGGAALILGLLAAHNLPVVYIPGHAVHHAAKAYRGDGKTDAKDAAIIADQARMRRDLQLLSVADETRIELRALTAHRKDLVCDRTRAINRLRGHLLEYFPALERAFNYSASRASLLLLTGYATPDAIRKMGESRLARWLRAQGCRTAVATATTAVAAAKSQQSVLPGQAIAAELARRLALDVIALESRIAEIDQLIAARVDTSRAAELLRSMPGFGPLLAAEFLASTGADLSIYVSADRLAGVAGLAPAPRDSGKISSNHHRPRRYDRRLLRACYLAAMVSVQQKTESRVFYDRKRAEGKSHKQAILALARRRIDVIWAMFRDDRPYSPPAPPGKKVSLTMSSTVPLHASSGAALAG

SEQ ID NO: 505858 - protein, 357 aa, unidentified
MEEYIAFDSHKHYTWVEHERIKGGKLRCYRLEHAPGAIREVLQGCAPGTAVALEATANWYWIVDEIEQAGLVPKLVHPRKAKLMMGLINKTDKLDAHGLNRLQRTGTLPTVWIPPGPLRELRELTRTRVVLVAQRTRWKNRLTATLAKYGRPPSQYSDPYGRGARQELAQRIAELPEQARWVAEQMLAEVDGLAGQITAFEQRLEKLIEVTPDMQRLRSLPGVGVVLAATLALEIGEVQRFASAEHLASYAGTTPRVHASGDHTRYGRTRPDVNRYLKWAFAEAANSVAVNHTRRPEAARQPTLLSPAPAQRAQQGHRSGGAASGRGDIPRLEPPAGLSRSDHPSGSDQGGVSAILS

SEQ ID NO: 505859 - protein, 445 aa, unidentified
MEKSNRGTRELRVVNPNAAGIDIGSKSHYVAIPEGRAPRSVESFGCTTAELVRMSEWLQGTGIETVAMESTGVYWIPVAAVIEDHGIEVVLVDPRQVKNNRGRKTDVLDASWIQQLHSFGLLTGAFRPKPEIQTLRDYWRQRTNLVRDAARQIHRIQKSLEQMNLQLHKVLSDISGVSGMRILRAIVSGTTDAHALSLMAEGCIKATPKEVEHALQGHYREQHILMIDQSLKTFDFLHERIRECDLAIEQVMKRLPARGQELAVKAPAKRRKNQPHFHLAQEIARVTGVDLTIIPGISALTAQTIVSECGVDLDAFPTEHHYASWLGLSPNNKKTGGRVFSSRTRLNPTPLSTSLRIAAQSLLRSQTPLGDRYRALRARLGAPKAITALAHTLAKLIHRGITRGQAFLQTGLDLLAQQAQQTKLQSLERRAAYLGYTLTPVSKTA

SEQ ID NO: 505860 - protein, 416 aa, unidentified
MNAVGIDVSSRKSTVAVLRPLGEVVCLPFDVSHDADGLASLAEKLKALDGETRVVMEHTGRYYEAVAKALHEAGFFVCAVNPLLIKEYGANSLRRVKTDKADAIKIARYALDNWADLRDFTPMDAIRYDLKTLNRQFQLASKQRTASANNLIALLEQSFPGIRKCFDSPVRSDGTQKWVDFAHSFWHVDCVRKQPFPAFCERYRKWCKLHAYFFKLRNAEKVYALAKSAIVLTPKSKVVKVLVQEAANQLISISRSVEVYRAEMDRLAAMLPEYPVVMAMYGVGKSYGPQLMAEIGDVRRFERKQALVAFAGIDPMPNQSGDKNVRSNKSSKRGSPYLRKTLFNVIRTYLQCAPQDEPVFQFLNRKRAEGKPFYVYMLAAANKFLRRYYAKLRDYFASLDTLQSVDPIPATLKASL

SEQ ID NO: 505861 - protein, 341 aa, unidentified
MESTQVAVDLAKSVFEIAVSHEVGRVAEHRRLNRSQFRRFLEEQEPSEILMEACGTAHYWGRECRAMGHRVRVLPAGDVRRYRDGNKTDRTDTKALLEAARNDAIDAVPVKSEEQQAIAALHRIRSGYLQTRTARINAVRGHLREFGVTIPPGARKVVPSARSALVQGAVPELLGEILLELLDDIERLAARAKDIEKRLERLTRHMPQTRHLMSVPGIGVLTATALIAFVGDIRRFPSCRSFADYLGLTPREHSSGAVRRLGRITKRGNTYLRMLLIHGARSALRAGMMTDEPDDLRTWALKVKDRKGFNLAAVALANKLARVAWRVWRDQRDFEPRPAAT

SEQ ID NO: 505862 - protein, 333 aa, unidentified
MLFVGVDGHKNTSQITVMDAAGKILKRQRVLSTPEHFRQSLAEFSGPMKAVLEASYCWGPMYDWLDGLTDEVVLAHPSKVRAIAEARIKTDKIDSEILAHLLRADLIPRAYAPSKEVRAVKRVLRQRLFLVQLRTMVKNRIRALLTQHSVELPKLSDVFGKSGVAWLEQVELPKPDDCILREDLQLLKVFAEKIASTERLIEKLAAGDEAVPWLASLPGIGKFLSVVIRWEVDDINRFQEAKKFASYTGLVPSTYASASRVVHGRLTKRGNKWLRWAFIEAVTPAVRTSASLRAQHQRIKIRRGAKDARTSIARKLAELAWTVWTEQRCYEQR

SEQ ID NO: 505863 - protein, 371 aa, unidentified
MGNGITYVGLDTSKESIVGYVLSSDGAPGVEFKVPSERTAARKMVRKLGRQYGSVSFCYEAGPCGYQLQRWIRAEGAPCVVVAPALIPRRPGEKIKTDRRDAKKLAELYRAGLLVEVHPPTLQAEAVRDLVRGREDLVEDMRRMKQRILSLLLRRGLACPGVKGYWGVGFWRWLRSLAWEEEADRAIFSDYLLGLEQAQDRLRQLEARIAEVAASEPWAERVGWLCCLRGIKTLSAMTLLSELHGWERFRTARELMSFLGLVPSEHSSGERERRGRITGAGNIHARRILIETSQNYRVTARVTPALAKRRQGQPAWVIALADRAQQRLNRRFWRLLAKGKLHNKVVVAVARELVGFIWAILQGPRTEVAAA

SEQ ID NO: 505864 - protein, 350 aa, unidentified
MGKINKSGANQKGQVAFLGIDLSKKSFQLHGVDAKGNVVFKKKLNRKALLPFIANLPKCVIGIEACGGSHYWCRKFTELGHEVRIIAPQFVKPYVKSNKNDAADAEAICEAMQRPSMRFVPTKTMEQQDIQSLHRIRSQAVARRTALGNQIRGLLMEYGVIIPKGISYIRKQIPLVLEDAENGLTVLFRELLNELYEEMKHLDKRIEKLEQKLETIAANNVACQLLLTIPGIGLLSATAMFAAIGDITAFKTGRELAAWLGLVPKQASTGGVPTLLGISKRGDTYLRTLLIHGGRTVVRVADKYDNKRNNWIKELDKRRGKNISAVAVASKNARIAWAVLTKKESYKAAA

SEQ ID NO: 505865 - protein, 410 aa, unidentified
MYGKAGPMIYAGIDIAKNDHVVGATDEHGRDASKPMRFANSAGGFDRCVAYLEGLAESKSDLLVGMEATGHYWLPLFCRLQDAGYAVVVINPMRTDAMRRFKGSSRVKTDTIDCVLVAETMRCGDFEPSRLGDESMMELRQLTRLHQELKESVADLKRQVITALDQVFPEYDSIFSDTFGESSKAFLKRCPTPEECLGIRADSLAGTLAKASHGKLGRKKADEIKSIAKGSCGMRMATSALSFQIKLLIDQIDFIERQAEEVEAKIREGIQEIEPLILTIPGIGHVLGAQIVSEIGDIRRFHSAPAIVKYAGINPSVSQSGKFSSDDNHITKQGSPYLRRALYLAAMGQLKLKTPFYDYYAKKRADGKSHREALIAVSRKLVHVIFAVLSKQQPYDPNAAKSPELASRSE

SEQ ID NO: 505866 - protein, 368 aa, unidentified
MDKSTKLYVGMDVHKDSIDVATGEDAAGEVRHYGAIGGERAAVSRLARKLQSTGKELVFVYEAGPCGFGIYRMLRARGHECWVVSPGMTPRSNADRVKTDRRDCLKLARLARAGELTPIHVPDEIDEAMRDLVRAREDAVLMQRQARQRLGALLLRNDIRYNGKTLWSPAHRRFIAELKLPHPAQHIAFEEYAQGVDEAGQRIQRLEAAIGDELTRWRWRPVVQALQALRGIRTIHAVRLVAELGDLTRFAHPRHLMGFLGLVPSENSTGNRRRQGAITKTGNSSARRALVEAAWAYRYGARVSVGIARRQSGLPKPVTDLAWKAQLRLCSRYRRLSARGLNRNKIIVAVARELSGFVWALGQQVKPL

SEQ ID NO: 505867 - protein, 364 aa, unidentified
MQQLTHIGLDVHKETIAVAVLRPDTVACDERVIPNTPEALRRLLAHYPDTSALTTCYEAGPTGYDTHRLVTSLGIDCDVIAPSLIPKRSGVRVKTDRIDARNLARLHRAGELTAVRVPTPAEEAVRDLVRAREEIKADRRIARQRIRSFLLRYGKRYPKPTDRWSSRFEVWVRALRFDEPLSQAAFEHLLGAYFVRDSQLAAVDHQIEEIAALEPLAQGVALLRAFRGIDTLTAVTILTETCDFRRFGSAAAYMAFTGLVPSEHSSGASRHQGSITKTGNQHVRRVLVESAWAYRYAPAVRGKLKKRLEGQPPEVVAYSWAAQCRLNATYRKLAARKGANKAVVAVARELSGFVWGAMTGSMGA

SEQ ID NO: 505868 - protein, 455 aa, unidentified
MQDCLTFFLSGCSDSVCLKGCVSLSQFLNDFVVGIDVSSEFSIVAMLAPTGELIRKPFRIDHNPVGFHKLLDILKKEEERLKRKPIYFVESTGIFHLPLFFFLKSNDLKGFVLNPLCVHSTKNFDLRKVKNDNKDSEAIARLAKYQDVKVSMMPEPQILVLRMMTREYYAVSDMLTVMKNRLCTDLYLLFPGFLNVFSGPFGKTALAVLKNYPSPRAIREADTDALTLLISKTSRKGSEWASKKVALLCDCAQLASSMPSEFSMLDTKIKFHIDGIEHMQASLNGIEAQVKTMIKSKEFPANAKRNIELLDEIPGVGFFTAATLIAEIGDFSLFNSPKALTAFFGLDPSVNQSGKFNGDRNKISKRGTRIGRRILFTVAMASIRRTRNGKEINPVLRDFYASKCVSKKKKVALVAVMHKLLHYIFAVLRDQKTFEFRKPEDHQSWRENKLQPAAA

SEQ ID NO: 505869 - protein, 316 aa, unidentified
MQTPLNIGVDVAKDQVVVACDDSTFTPRSIRNCRTALSAWLRRLPAGSHIGLEATNVYHQCLADLAHAMGFAVFVLNPKDLHHYAKGVGRRAKTDRVDAEVIARYVAHEHQKLHAYVPPSPEQRLMEQLLRRRARLVSLRVALQATMAELSCCRTQSKAVVRQLDALVAALEAQLKQLLKHSETSRQAQLRLQSIPGVGLIVGAGLSVALQRLPFKSADAFVAFTGLDPRPCDSGKKVGRRRLSKRGPSELRRLLFNAAMAASCTKAWKSFYQHHRQRGLASTEALIVLARKIARIAWSVFHHQTSFDPARLRALT

SEQ ID NO: 505870 - protein, 435 aa, unidentified
MEEVTDEPLYRDRVCGIDIGKAELYATIRVPSDKNPARRASETRSFATTKRGVLALADWLHCWQVPAVVMEATGDYWKGPSCRLEAEGFECVLADAKQVKHLPGRPKRDTSDSAWLAACFERGAVRPCFVPDPEFRIIRLHTRYRRDLTDERTREKNRTEKLLESAAVKLSSVVTDLHGVTGRDIMDHLIAGERNPKVLAQLARARARRKITELEHALDGAEFFTEDHAALLTAMLERIDGLNAQIARLTAVIERLLAPYEEQLQQAESQPGWGRRSAQDTLAETGPDMSKFPTGSHLSSWAGRTPLDSQSGKRTGRARHKKGNKYLGAITGETAVAAGKTQTREGARYRKLARSRGKAKAQVAVGNTQLKVYHKLLSNPGMRYQDLGPDYYERQAATRRKIAYHVREIEALGLEVTLARIPEPDPDGPASTQAA

SEQ ID NO: 505871 - protein, 351 aa, unidentified
MPQSSTVHAVTTLGIDMGKNTLHMIGLDTRGGIVLREKVSRGRITSRLANLPPCLIGIEAGMATHYVARELAALGHDVKQVPPTYAKPFRQGHKNDFRDAHAVAEAVQRPTTRFVPAKTNEQLDLQALHRVRSRLVSERTAVINQIRGFLLERGIIVRQGLRFLRQALPDILAKRTDVLSPRMVRMVADLASDWRQLDERIEAVTDEIKTLAKSDDSCRRVMTVPGIGPIISSAMVAAIGNGAAFARGRDFSAWIGLVPKQMSTGDRTILGRISKRGNSYLRTLFMQAARVILLRQASWPKHGFGIWLARAAQRLHPNVLAAALANKLARIAWTVLAQERSYEARIMKAAA

SEQ ID NO: 505872 - protein, 410 aa, unidentified
MEVLHAHCAGLDVHKDSVVACVRHMVDGKVTTGVKTFKTTTQELMALSDWLSAEGATHIAMEATGVYWKPVWHILSDGEFELILANAAHVKNVPGRKTDVNDAMWLTDLMAHGLIRASFVPGEPTQQMRDLLRTRKQMVRERSSHVQRIQKTLEDANIKLDSVVTDILGLSGRRIIEALIAGQTMPQALASLAHRRIHASADELEAALRGRVTRHHRFLLKLHLDQIDALDAALARIDEEVGANVEPFRTAVEMLSTIPGISTLSAEVIVAEIGIDMSHFETAGHLISWAGLCPKNDESAGKRRSNRMKKGAPWLKTTLIQCAWAASRKKNSYLQAQYLRIRSRRGAKKAIGAVAASMLTAAYHMLKDGTLYQDLGADHFDNRAKGKHVLRLVNRLQNLGFDVQITPLAA

SEQ ID NO: 505873 - protein, 440 aa, unidentified
MAMRKREDEVFPNAAGIDVGASSHWVAVPGHCTDAPVREFGAMTDDLHAMAEWLLACGVDVVALESTGVYWIPVYELLESRGLKVWLVDARQVKYVPGRKSDVADCQWLQKLMSHGLLRAAFRPAAEVCVLRAVARSREVLLTEQASWVQRMQKALVQMNIQLTEVISDVMGQTGQAIIRDIVAGQRDPARLARHRHRRIKASEQDIVRALTGHWREEHLFVLGQALGMYDDIARHLHACDTKLRTLLAERSSACVDVGKTPRTGSKARAQFDLRQQLANWAGCDLTRINGLGLESVMKILSELGTDLSRFANVKHFCSWLGLCPATKISGGKVISARTRRSANRVRQALKMAAMSLSHSDSALGAFYRKLCTRMDKPRANTATAHKLARLVYFMLTRGEAFVDEGQQRYEEQQRERSIAALKRRAATLGFQINPIGTAA

SEQ ID NO: 505874 - protein, 355 aa, unidentified
MTSTKYIGMDVHKESVSIAVRNDAGKIVMECVIETKASMILQFFDGLRGDVHVTFEEGTWAAWLYDLLKPHVTKVLVCDPRRNALLQEGNQNDRVDARKLAELLHNNQLRSVYHGDHGLRTLKELVRSYLTITQDLSRVMTRVKAIYRSWAIPCTGKQVYGPNHRAEWLAKINEPGVHRRAEFYYQQLDALRCLRQQVRRDLLAESKKHPTWKQLCGIPSIGPIRAAELLGILQTPHRFRTKRQLWTYGGVGIETSSSADQHVVKGQLERKKKPVEIRGLNSNYNHDLKNIFKGAAIVAATKPGPFAEFYAELLAKGMRPEMARLTLARKIATIVLIVWKRGVSFDARHLKPQTA

SEQ ID NO: 505875 - protein, 343 aa, unidentified
MSEYDGRQFVGIDLHRRRTVIVRQGESGEQLGSSRIVNDPLALAAEIGKAGPSPEVVLEATYGWYWAADVLAEAGARVHLAHPLGIKGFAARRVKNDLRDATDLADLLRMNRLPEAWIAPPEVRELRELVRHRAKLVAVRSGFKAGVHAVLAKQGLHIAVSDLFGPRGRAELAQAPLDTAYRARVNAYCRLIDTLDQEIELAAGWIAARLATHPGYRAIQQIPGVGPTWAAVFVAEIGDVTRFASARHLCSWAGLTPRHRESDTTVHRGPITKQGATLVRWAAVEAVQKLPPTAGWLVSTREQIAARRGRNIAKVAVARKLLILVYYGLRDGHIRALHNVGAA

SEQ ID NO: 505876 - protein, 344 aa, unidentified
MTYYAGLDVSLRTVNICIIDGDGGVAAETKLPSDVQEIVTYLDELEFDIEIVGLEAGTLTQYLTYGLQYAGYDVVCMEARQVKAALSAMRNKTDKHDARGIAQLLHSGWFSQVHVKSLESHRIRMLLSSRKAVLNKCIDLEQEVRGLFKIFGIKLPPKLGHGSFDKVVRAIIETDETLSHALLPLLDARLALYKTFRVLDNRTRHLAQGDPICERLMTAPGIGYVTALTFKAGVDDPTRFRQSRTVAAHFGLTPRRFQSGEIDFDGRISKSGDAEVRRSLYVAANSMLTRSSQWTPLKAWGMKIKKNRGHKKAVVAVARKLAVILHRMWIDDTQFRWGMEAARS

SEQ ID NO: 505877 - protein, 423 aa, unidentified
MPYRIAGIDVHKKMLAVVVADIAVEGEYQFERRQFSSSPDQLRVLAAWLIEREVQEAVMESTAQYWKPVWKVLERYWKPVCPQRDAPLLGALHWAQAKSNRAPGGRKNDFGDAERLVRRLVAQELVLSFVPDAEQRLWRTVTRRKQQLTQDRVRLQNQLEGFLEEAHIKLSSLVSDLLGLSGRRMLKALAEGEKDPAALAALADRRLRATPPQLCDALGACTELNGVYRRLLKMSLQELQQIEEQMDQLDQETAALLQEHQDAVRRIAEVPGLGVESAHQIIAEIGPAVATFPSAKQLASWVGVCPGQDESAGISHSSRSPKGNQNMRRILNQAAHAAIKVKGSIFEVVFQRLRRGLKYKEAIWAIAHRLCRLIWKLLHDRVSYQERGPSVSLKSQRTRAARMAKQLRAMGYRVVPPLGIQPA

SEQ ID NO: 505878 - protein, 343 aa, unidentified
MQIHSVGIDLGKTTFHLVALGAAGKVIVRKKFNQKQLLAYTANVPASLIGLEACSGAHFLGRALRQQGHDVRLIPAQFVKPFVKSNKNDFVDAEAIAEAVERKNMRFVPIKTDDQLDLQAIHRVRDRLISRRTAVINQVRAFLLERGLVFAKTPAKLRAALPDILENADLDLTPQMRSLIDLLWREWKTVEDQIEGLSLELERISAADPGCTRIRQIPGIGPIVATAIVAAIGNGAAFRKGRDFAAWLGVVPRQYSTGGKARLLGISKRGNVYLRKILIHGARAAVLRIKRDRAPIGAWLDALDARAPKNVVVVAMANKLARIAWAVLSSGEDYRPMGNIVAA

SEQ ID NO: 505879 - protein, 412 aa, unidentified
MQDILTCAMGLDIHRDVIVACLAKGELGTDPEIEIRSFSTLIPEMRKLRDWVLEAECRYVAMESTGIYWQPIYEMLEPCFDGQINILVVNARHMKNVPGRKTDMRDAQWIATLLRAGLLKGSFIPDKTFRELRHLTRYRKSIVRDITAQKNRIDKFLQSSGFRFTAFLSDAFGASGRNIIRHLMEYGNISREALDRCLKTQTRKRIDEILIALNGSLSEHQRGFLRMIFGHLEALEQHRHTVEDAITKEITKHEEALSLLCSIPGIDVTAAAAIIAEIGTDMSAFPDSQHICSWAGLSPGNNESAGKRKSAHINKGNPYLKSMLCEVGWVISGKRSLYLSGWYWRIKQRKGAKRATIALARKLLALIYTMLKTGSPYNEDCFEIRRKQSERKRTSRMVNELQKLGYFVVAPG

SEQ ID NO: 505880 - protein, 322 aa, unidentified
MNKDIKYYGIDISKEVFDVCDSTGESSQYENSVKGFKRFVKTLSVNSHCVMEATGYYHYQLAYYLLESAVKVSVENPLSIKRFIQMKLSKVKTDKSDAKMICKYAQKVEMRLWEGQSKNQVECLQISRLLDLYFKQSTAVKNKIHGENVLGKPSSLVMKSLQQSKRNIEKLIKELEARLTELVKSEHQELLTLLESIPGMGRKTSMLLIVLTDGFNRFDNAKQLCCYSGLTPTIRQSGSSVRGKSRISKVGNRKLRNLLFMCSFTACKHNKSCKQMYDRIVAKGKSKKLALIAICNKLLKQAFAIAKSGLPFDQSYRSKLGI

SEQ ID NO: 505881 - protein, 332 aa, unidentified
MYLGIDVHKRYAQVAVMDEAGEIVEEVRVENANLDDLAQRYAGAQAVLEATSNYYHIHDTLSEHLDVTVAHPKKINQIADTDKKTDRVDAKELARMLRLNSVPESYVPSEEVREARALVRGRQTLVENRTKYANKVHGLLSDHGITEDVKPLSVEGREFLRELSIPTPWDELLDSYLDLIESLTEEIQKLEETIEQRAGSLKETQLLMSIPGVSYFTALTIYAEVGDIRRFDRDKEVVSYVGLNPVIRESGDSRIEGSISKRGSGRVRWLLVQAANTAVHTCNDEYLSRFYDRLASRKNSQKAIVATARKMLVSIYHMLDRGEAYDPPGVSA

SEQ ID NO: 505882 - protein, 360 aa, unidentified
MTMLAEHVDGVIGVDTHRDTLAAAAVSPIGAVLASTDSPANASGYRRLLDFARQQVPGRRCWDLEGIGSYGAGLAVFLDQAGEQVVEVCRPKRAANRGGRKTDMLDAIRAAKEALATEHLIQPRLRGEREALRVLLATRHGAVLASTAAINQLKALIVSAPDELRAELWKLKRPAQIAYCAQFRDRPAQDLEHRMTVRAVRSTAQRIQALQAEAKEFENEILALVRQQAPELLGLLGVGPITAAQILVSWSHQGRFRSEAAFASFAGVSPIPASSGLTNRHRLNRSGDRQLNRAMDTITLIRMRLDPSTKTYVARKIAAGKTSRDAQRCLKRVICRQIFKILERDDRNRLSNVEELAQAA

SEQ ID NO: 505883 - protein, 420 aa, unidentified
MAKKGTKVRIEDLQDIYEFCAGIDVHKAGVTVCAICGRGAELEAEVVEYGTTTAELRQLGEWLREQGVTHVVMESTGVYWRPVWQILESAGFHLLLANAKKVRNVPGRKTDQSDSIWLATLLRKGLIQGSFIPPQEIRALRDLCRSRASLVRDRTRVIQRIEKVLEEGNVKLDVVASDLVGVSGLRMLKQLAEGETDTTAMAELALGRLRSKIPQLIEALEGSFRPHQLFLLRELLEQYDYLCKKVERFEIQIEEYARPFEEQIQRLDAIPGVNRLSATAILSEIGVDMSRFPTPQQLCKWATICPGNRESAGRKKPGKTGRGNHWLRGTLTQCSWAASHDKNTYLAVQYRRLLHRGKQRALVGVAHSVLNIIWHLLKHQIEYQDLGVDYFERQNLEGQKRSYVKKLEKLGFTVKIEPAA

SEQ ID NO: 505884 - protein, 416 aa, unidentified
MIHEQQFAAYVGLDWGDQRHSVHLQVSGQPKAESFELEQKPEALHEWVARLVERFQGRWIAIAIEQRKGAVIHALMMYDFLVLFPINPKALARYREALYTSGAKNDPTDSELLLDFLTKHSEKLRPWIPDSEPTRELQALCEQRRKLVNRRVALTNRITSLLKQYFPQALDWIGDIASIQACDFLESWSTLDAVQTIGQNQLRTFYRHHNCRKASVISERLDQIARARPLTNDLAIIEPYSFIVEASAAQLRNLIRAIKRLDKRIAELFTQHPEHDLFDSFPGAGAACGPRLLTVLGTDRSRWTSAVELQSYSGIAPVTEKSGNSCWIHHRLACAKFVKQTFHEFAVQSIRYSNWARAYYDLQRSRGKEHHTALRALAFKWIRIIFRCWKDRKPYDEATHVQSLRRRGSPIVEKLP

SEQ ID NO: 505885 - protein, 445 aa, unidentified
MSNYYLGCDVSKGYADFVILDSAKKDIESVFQLDDTFEGHNQFYRFLLDFFKRYPGSTLFSAVESTGGLENNWLALFKRLADVMNIKSARINPVGPNALHKASLTRNSDDAISAKLIAEYLISCPEKVNYADDDPYISLRKQWNLIEMYKKQKTQLLNQLNILLYTSMPFLMKYSRDGIPNWLLHLINKYPASSQLARTKETTLAKIPYISHKRACTIISDARESIGSVDDEATAFIIKSTVDQILHLKNIIERHKQYMVTRCDLPEVKLLRSFKGIGVYSAIGLVLNIVSIDRFPSAKHLASYFGVHPVYKISGDGKGGFHMSKKGRSAPRQILYMIARSSSVYNPLIKEVYINHLKRGKPKSSALGVCMHKILRIVFGILKHQKEFDPEIDRQNRNKTRIVKNEDSKSNLKRRYQEDAEDAPVSRRQSIKRRKRKQSQNLLEV

SEQ ID NO: 505886 - protein, 387 aa, unidentified
MTQFDDLSRSFVTFDQTTSLTVVVEMSESSWLVAGMVPGVDRQPLKKLPPDPDALKRLLERWRAEAVKAGQTIERIALAYEAGRDGFWLARWLQARGIEVHVIHSTSVAVSREHRRAKTDRLDTAMLMRVFLGWLRGERGHCGMVAIPTIEEEDAKRPSRERESLVGEKSRITNRMKSTLARLGIRGFKPHLRKAPERLAALRTPEGSAIPPNTLDELRRDMARLAVVRGQIKEIEQARLERLEQAPQEGPNAMVRLLARIVGVGVETADMLVREVLSRNLRDRRAVARYAGLTGSPDESGSKRREKGLAKAGNARVRRGLIQLAWRFLMFQKDSALAQWYRSRTEGPKGSRKTTMIVALARKLLIALWRMVTTGVVPEGVVLRPVA

SEQ ID NO: 505887 - protein, 337 aa, unidentified
MSEISILAIDLAKGSFQVCGVKADGAVVFNKSVSRPRLYQLLADHAHCAVAMEACATSHHWGRVAQSYGHEVRLIPAAYVKPFVKRQKNDRADAEAIAEAASRPSMRFVAVKSAEKQGRAVAFRTHQCFVRQRTQLINALRGHLAEFGLVAPKGPASLKLLERALAQPDVDLPSPVREMAALYLDQICRLTELIEQMADELDRASKTDEELRRLCTVPGIGPVTAGAIAAFAPDLSTFDSGRNFAAWLGLVPRQRSTGGKARLGAVSKMGQCDIRRLLIVGAMSVIRWVVRKGGSANRWLAELVLRKPRMVAAVALANKMARMIWAMTTKQENYRMA

SEQ ID NO: 505888 - protein, 441 aa, unidentified
MAVRKVLELMYPNAAGIDIGSASHYVAVPADRDAQPVRECKSFTEDLLAMADWLSGCGIDTVVMESTGVYWIPVFELLESRGFAVYLVNARHVKNVSGRKSDVLDCQWLQQLMSFGLLSGAFRPTEEICVLRALSRQRDMLLDAQGRHIQHMQKALTQMNVQLANVIADIVGKTGQAIIRAIVAGERDPVKLAQFRDRRIHASEEQIAKSLRGNWREEHLFSLAQALKLFDAYQQLIGECDERLEQLLLQLASHAGEPEPNRNKGRQKNAPKFDMRTALFRVCGVDLTRIDAIDVSTAFKVIAEVGPDLSKFKTVKHFCSWLALCPGTKISGGKRLSGASKPCANRLAQALKLAATGLLRSHSALGAYFRRMAARMDKPKAIKAAAHKLARLIYTMLTKGTEYVDQGQDYYEQQYRQRVVANLQRRATALGYKLMPSAQPA

SEQ ID NO: 505889 - protein, 290 aa, unidentified
MQDVQKFVGLDVSKEMISVGLAEAGRGEPRFHGNIPNQPEAIRKLMKKLGNPESLHVCYEAGSTGYGIVRFLLSMGIDCIVVAPTLIPRRAGDRVKTDRRDALRLAQLLRAGELTAVWTPDEDHEALRDLIRSRHDTREDLQRARQRLNHFLLRHDLRPPQGTRNWSVKHRDWLNTLTFEKQSLRIVFQEYLHTIHEVEERMKRLEAQIHEEAMQSEHAPVIQALQTLRGVAEVTAVTLVAEIGQFSRFMSPRQLMSYAGLVPKEYSSGSSRWQGSITKIGNAQIRRALV

SEQ ID NO: 505890 - protein, 406 aa, unidentified
MRVLYERCCGLDVHKQSITACALTPEGKEIRTFGTLTDDLEELVDWLKEKKVTHVAMESTGVYWKPVYNLLEAEPIEVLVVNAQHIKAVPGRKTDVKDAEWIADLLRHGLLKGSYIPHRAQRELRELVRYRRSLIEERARELNRIQKVLEGANIKLSSVVSDINGMSARLIIRALIEGKNDPAALAQLAKGRLKQKTEELRRALKGMIGPHQRMMLAEQWRHVEYLDEAIARLDREIEERTSPFHEALELIDTIPGVGRQSAEQILAEIGTDMSRFASASHLASWAGMAPGNYESAGKRLSSRTRKGNKKLRSCLVECTRAAARTKNTYLSAKYHRIAKRRGANRASVAVGRTILEMIYYILTRKEPYRELGADYWDRQREASIVRQTVKRLEGLGYEVKLEKVGS

SEQ ID NO: 505891 - protein, 400 aa, unidentified
MLSIGIDVSKGKSTVCGMKPGGEIVYAPFEVQHTRKGMSELVSLLRGSGEKVRAVLESTGSYHCPVVAALLENGIFVSVVNSLRMKRFCSQSIRKVKTDRIDAMQIALYGLAYWQELQPARLPEDTYRELQLLARQYYQMTSMLIKAKVDFNAICDQVLPGMQELMNDHAGRHKLSDFVLRYRHTTHILEMGETRFRKDYCKWAEKKGYRNCERMAALIFATAQNGIPVLPNAPSTQIVITEAIRVLHTVEASRDAILTQMQALAKTLPEYSLVREMPCIGDTLAPRLIAEIGDVRRFHSKRALIAYAGIDAPPYQSGKFCANNRHISKRGNRYLRKTGYEVMQSYVMHKPANDPIFTFIEKKRSEGKSGKLAMVAGLNKFLRVYYGKVTELYRSLPAIE

SEQ ID NO: 505892 - protein, 455 aa, unidentified
MAKSRVQKRKVVVNALDQINPNAAGIDIGGEEIYVAVPPDRDEESVRCFGVFTEDLERLADWLKACRVDTVAMEATGVYWVPLYEILEKCGIRVFLVNARHLKNVSGRKTDVLDCQWLQQLHTYGLLQASFRPPEQIVAIRSLVRHREMLVQYRSAHVQHMQKALILMNLRLSNVLSDITGVTGMAILRAILAGERDPHKLAEFRDKRCAKSEEEIVKSLQGHYRPEQLFVLKQAVELFDYYAAQIQACDGALETLYCQFDPPENPGTPPPAPRSTARRKNQAHFDLAPALYRMTGVDLTPIDGVDALTIQKVLSEIGTNMSPWPTVKHFTSWLHLCPNNRITGGKVKQTGVQPTKNRATTALRIAATSLKNSDSALGAFFRRIRSRHGTPVAVTATAHKLARVIYFMLKEHKPYQDVGALSYEQAYHQRMVRNLHRQATKLGYRLEPATVMASA

SEQ ID NO: 505893 - protein, 334 aa, unidentified
MQNVALIGIDLGKHSFHIHCQDKSGNALLRKKFTRTKLMQFLATCPSSVVVMEACAGAHFMARRISDIGHEAKLISPQFVRPFVKSNKNDFIDAEAICEAASRPSMRFVQPRTETQQAMRALHRVRESLIRDKVKTTNQIHGFLLEFGISLPTGDAAIKRLSLVLAEHEVPEYLSRLLMKLHAHYLYLIEQITELESELNQSIKADATAQRIMTIPGVGPMTASLLSSQLGDGKQFSCSRDFAASTGLVPRQYSTGGKSTLLGISKRGNKNLRRLLVQCARSFMMRLEHQQGRLAEWVRKQLDNKHSNIVACALANKLARIAWAITALQKEYQA

SEQ ID NO: 505894 - protein, 357 aa, unidentified
METAYDGRQVVGMDLHRRRSVLVRMTGDGRRLGSARITNSAAELRAQIARAGEHPQVVLEATYGWYWAADVLAAAGAEVHLAHPLGVKAFAYRRVKDDFRDSADLADLLRMGRLPEAWIAPREVREIRELTRYRIKLVRIRTSCKDQVHAVLAKLGIPVAHSDIFGAGGRAWLDQLALPQPYAGKVCSLRHLAGELTGEIDMLAAVIRDLLAGDRGYQVIQQLPGIGPVLAAVIVAEIGDVRRFATADRLCSWAGLTPRHRESDVKVVRGHVTKQGSRLLRWALIEAIQRVPRDCVIGGVKDAIIARRGKQARNIAKVAAARRLLALVYYGLRDGQIRCLSRPAGSPPPAIPPARAA

SEQ ID NO: 505895 - protein, 357 aa, unidentified
MNATERNVENIVAIDLGKFNSAVCIFKKSTFKSNFRTIKTDGQEFHDLFVELEPDVVLIEAGSSAGWVADLLRTLDIPFEVANTNHEAWKWNKSKKKTDKRDAKKLAMMYAYGGLPTVHMPTKAVRQKRSLINYRQSIVKRVTQSKNVIRALLQTIDVKILSGKNAWSQKGINYLSSMAKSFDEIDDMEQLWRSQLHTEIQILKDMTDKLKVVTKKLDKLALADKKISLVQTIPGVGPRVAEAVVAIIDDPSRFKSAKHISNYAGLVPEKHDSGQTKRNGRITGHGSGMLRALLVQVSWLGLKNKWIRDIYDRIRRGTKSRSKIAIVAVARHILVRCWAMLRDNTTWRGSVELAVKN

SEQ ID NO: 505896 - protein, 422 aa, unidentified
MNANWTQHTHYAALDWASDHHDVVVVDRAGTLAAEFRFAHTAAGWAEFTAQMQPFAGAPLALETSSGPAVDQLLQRGWTLYLVNPKAAQRYRDRKAPSGTKTDRHDAWSLADALRTDGHGWRQLLAQDEATATLRTLCRDELGLIEQRTALVNQLQATLREYYPAALAAFDDWTQPYAWALIQQFPTPLALHNAGQRKWEQFLHTHRLWRADTAPARLECFAQAQALPASAAVVTAKSLLATTLVKVLQALQGQLDEYRRRITQGFTQHPDHDVFGSLPGAGEKLAPRLLAELGAVRAVYPDADALCCQAGVSPVSIQSGKLDKVRIRWGCDVVLRHTVHLWADCSRKKSPWAQAYYAQKRADGHDHASALRCLGKRWLKILWRLWTDRQTYDEARHQANQRQHGSWVSGLLAAAEPKAASV

SEQ ID NO: 505897 - protein, 350 aa, unidentified
MDVHKYAHFAVALNCLGQELSQLSFTNEELEKCRDWLKQLSLQEHIVVGLEDVKGVGVHLVSYLQKEGFSCRYVPAILTERERKHSVQHDKSDYLDAKRVGKVILTKSEETLPVFPIVSQEQKDIRELDLLLQERQELVREQTALKNQLHVLLHQQYGNTYRQGFASIFGAKALKWYKRDCYKNIGTSLASSIGRRIERLMLTGEQIAQITKTVETMDQKFPEVALLTKQIVGCGKLTACKVIVEIGTITRFEKKEKLAKYAGIAPVSDQSSSKNKVYTNSGGNRKLNQAIHTIALSQIGARGYTPAKKYYQKKVSEGKTKLWAIRCLKRHIANRIFILLKHASNTNYTN

SEQ ID NO: 505898 - protein, 400 aa, unidentified
MENVIIGVDPHKLSATMEVVDQRGQLLGSGRFTTDQAGYAAMRTYAKAWPDRVWAVEGANGVGRPLAQRLLEAGEQVVDVPAKLAARVRLFDTGHNRKTDALDAHSIAMVAVRTTTLRVLQVDGELEALRMLTDRREALTRRRVQTVDRLQALLAELLPGQAKRDITTGQAKAMLATVRPRDIAGKTRRRIAADELAELIAVEAKIKKATAELKAIVLARGSALMDIHGVGPVVAARILADVGDVSRFADRNRFASWTGTAPLDASSGEQNRHRLSRAGNRRMNHMIHIAAVTQLRLDTDGRTYYRRKRAEGKKSLEALRCLKRRISDVIYRQLIADAQRTWLMPADGTGPGGHCGASQESSAVDLPPHIDTSDQSLPGPAHPTLQPTRRTRKTAALAAG

SEQ ID NO: 505899 - protein, 351 aa, unidentified
MKYYTTTTEYNCGIDLHARQMYVCVMDRHGKVLLHVNIEGNDFAYFLKRVEPWRHDLTVACECTFNWYWLADACAAAGIKFVLVHALYAAHIHGGKNKNDRIDSEKLAHLLRANLIPPAYIYPAERRPVRSLLRQRMRYVWSRAELMTHLSMNQTAEGLVPAAKGGHNRDVWQERILAQTTNPYHQLAVRCEMDAIRTYDTLIEKLDGTITFHAREQQGRDYELLLSVPGIGPVLAMTILYEIDTIQRFPTVKDFASYCRLVKGSVASAGKIKGLTGGKMGNAYLRWAFGEAAVICKRAHRLLTPYAERLVSKHGTFKGNAILANQLARAVYYMLHSGRVFDAERIVAAAH

SEQ ID NO: 505900 - protein, 434 aa, unidentified
MLRPKDKACGADIHKKTVVATILSADGTKVEGEFGTTVPELIRFKEWLKENDCNSVAVESTGTFWQPIYSVLEGSVEVIVANPYMIKHMPGRKTDKVDSNWIAQLCLKGMIEPSRIFPKANRELRRLTRARESLGKIRTQFKNSIHKDLDSSHIKLSSVISDIFGKSGMHILRGLLDGQSLGAIIEGIPSGRVRKKADQIKEAVHNNLELTQVILIESSLSLIRSVEQQIDMIESEVASRIVSRQEDLEIARSIPGIDFISGATVLAEIGNYRDFSSPEKMAAYFGIVPSVSQSAGTLHTGRITKHGSKHMRWILVQIANAASKKIGSKLRRFYLRIKAKSGHNVAIVALARKILCLLHHLLMNREKYVEDDGSKKSKSKKNYRTSSPRVMDIQEMIDVIRQSGYEVQKVDTSGGAGLKRRRNSERNLKRGACG

SEQ ID NO: 505901 - protein, 348 aa, unidentified
MAVTTLDRSRPVVGGVDTHLDLNVVAALDSIGGLLGVAEFATSSAGHDDLLVWLSQFGSVARVGVEGTGSYGAGLARFLRAAGIEVLEVDRPNRQARRRQGKSDTVDAIEAARAAQADRQLGAAKTRDGNVEAIRALVVAKRSGRSTKIKTLNQIRHLGFTAPEEIRQSLQGVSRLLIAKQAAAIRPRAGTDPVVFATKTALRALGRRVLALDVEREEIDRLLGELVTATAPKLIAVYGVGIDSAASLLVAAGDNPDRLRSEAAWAHLCGVAPIEASSGKVTRWRLNRGGDRQANSALWRIVITRMSSEPRTRAYVTRRSEEGLSKGEIIRVLKRYVAREVYPILVGK

SEQ ID NO: 505902 - protein, 339 aa, unidentified
MFEVSTVGVDLAKNVIQIHGVDIDGTVVVRRQLRRSQFLAFFEGHPSCLIGIEACSGAHHWGRELQRLGHEIRLMPPSYVKPYVKRNKTDAADAEAICEAVTRPSMRFVPVKSEADSAALVLHRARDFLVGQVTQVGNAIRAHMAEFGIVTAKGSKRVASLAEELDALPEAARLPLRALFDQLAETQGRIDRLTDEIEEVHRQNEVSRRLASIPGVGVLTATAIAATTPDVSNFSCARDYAAWLGLTPKQHSTGGKPRSGGISKMGNRYIRRLLYLGAMAQIMVRRRSRHPGTDWLSRKLATKETRVVAIALANRMARTIYALLRDGTSYRSRIGTMPV

SEQ ID NO: 505903 - protein, 318 aa, unidentified
MNSPSVTVGIDISKQRLDLARFPQGDTFSVAYTDTGLTKMLKRLRGWSPQIILLEASGGYEYGVVAALVAADLSPVLINPRQVRDFARSLGILAKTDKIDAKVLAEFAFRVQPEPRPLPAAQQQELNHLLSRRRQLLEMIQMECNRREISPFPRVRQSIDHNLDSLRRQMADLEREIDDFFHQSPLWVEQDTLLRTVPGIGPQTVLSLQAWLPELGALNRHQIAALVGVAPFNRDSGVFRGRRMIRGGRHKVRQALYMATLSAVRSNPIIKTLFDRWTSQSGKPGNVALVACMRKLLIILNAMVKNETPWHCMTSLTT

SEQ ID NO: 505904 - protein, 334 aa, unidentified
MEKITTVGIDLAKSVFSLHGVDGAGRVALKRTVRRDQLLEVVAGLSPCLIGMEACSGAHEWGRRFQEHGHTVRLMAPRFVAPYRKNGKNDGNDAEAICEAVTRPSMRFVPVKSAEQQALLAMHRVRQGFVVERTATINRLRGLLSEFGVVLALRSVTVRRQAAAAAENLPQLARRAIGDLLEQLRVLDERISGYDREIEAQARLCEPAQRLMKIRGIGPTTALAIVATVGNAREFRNGRQFAAWIGLVPGQYSTGGKPRLGHISKRGDAYLRNLLVQGARSVLHTASAHRDPVSRWALELQPRRGYYRTLVAIANKNARIAWALLAKNETLRAA

SEQ ID NO: 505905 - protein, 400 aa, unidentified
MLSIGIDVSKGKSTVCGMKPGGEIVYTPFEVQHTREGMSELVSLLHNSGEEVRAVLESTGSYHCPVVAALLENGIFVSVINSLRMKRFCSQSIRKVKTDRIDAMQIALYGLAYWQELQPTRLPEDTYRELQLLARQYYQMTSMLIKAKVDFNALCDQVLPGMQELMSDHAGRHKLSDFVLRYHHTTHILEMGETRFRKDYCKWAEKKGYRNCERMAAHIFATAQNGIPVLPNAPSTQIVITEAIRVLHTVEASRDAILTQMQALAKTLPEYSLVREMPCIGDTLAPRLIAEIGDVRRFHSKRALIAYAGIDAPPYQSGKFCANNRHISKRGNRYLRKTGYEVMQSYVMHKPANDPIFTFIEKKRGEGKSGKLAMVAGLNKFLRVYYGKVTELYRSSSAIE

SEQ ID NO: 505906 - protein, 315 aa, unidentified
MSESKVEVFVGIDVCKSTLDVRIEPPGEVFQVDNDDAGIRALCTHLSELAPTLIVMEATGGLETRAAGELTARGLCVAVVNARQVREFAKATGQLAKTDRIDAGVVCSFARAIRPVARPMKEALTAELDDLVTRRRQLVEMRVQETLRLQGASKVQAKSLKAHIVWLNKRIKSIETDLGTRLRSSDAWRVKDDVLLSIPGVGEITSRSMLSRCPEIGQLNRREIAKLVGIAPLNNDSGKYRGQRHIWGGRADVRSVLYMAAVSAKRCNPVIKALAERLKRAGKAPKVVIVACMRKLLTIMNAMIKSNTPWNPKIA

SEQ ID NO: 505907 - protein, 427 aa, unidentified
MKKTDLLSTLFVGIDISSRSNVVALLDFESQKPLQTFSVANNQPGAIELAQHLLEFLDSRPDLRKLVVALESTSFYGVHIANFLSSHETLASFRTAVYCLNPKTVANYKKSFIDLGKNDFVDAFVLADFARVGRITNKPWRGSQFLALQRLTRHRLHLAKSLTKEKAYMLSNIFLKFSEFSLLDGEQQPFSDRFGKAAASVLTDFLSTEEIVDMPLDALIRHICEKGRNRFQDPEATASLLQKAARDSYRLDKCLYEPLTISIASSFNLISTYTAEIKAVNKAIEKTLKGLDPAAYQCLLSIPGIGPVMAAGILSEIGWIDAFKSQESLAKYAGLVWRENQSGNYRADDTPMSKAGNAYLRYYLLEATSHVKNHCQEFAAFYQKKYAEVKTHQHKRALALTARKFIRLIFGLLAKHQLYSSNRVVQA

SEQ ID NO: 505908 - protein, 445 aa, unidentified
MICAAVERCAGIDVGKTFLAVCVMIGPLNGEARIERRRFGTITSQLEALRNWLKQEEVTHVVMESTGSYWKPVFNVLESSVKVYLANPQEVKIRKGHKTDDKDGWWLAHLLRHAMIQPSFIPPKAIRELRDLTRRRKRLLGNGTSEKNRVQKILEDANVKLSNVLTDVFGVSGQLMLDALLEGTTDLAEVAQFAKGPAKKKVPEILAALEGHQMNDHHRRMIRYSLLHLKFLEEQIAELDRDIAEKIREAGLEREWELLQSVPGIQERSAASVLAETGADMQVFPSEKDLSSWAGVCPGNNRSAGKNKSSHTTGGNKWVRSALTECAWAAAATKDCFLKDKFWRIVGRNGGHKGAALIAIAHTMLVLIYHLLRTGEPYKDKQSPPLDERQKQRLIHHHFNRLGKLGIAIPRTLQIPANSGTAAPLNVARRSCAAKPGSQIIIDNA

SEQ ID NO: 505909 - protein, 549 aa, unidentified
MRTEVERGCGIDQHSAMLLACALVGAAGTAPQKFLRQFATTARGLQELRKWLKEMEVTHVAMEATGVYWMPTYEELEGHFKLTVANPHHIKKIPGRKSDPKDGSWIADLLRHGLIPRSFVPPRVFRELRWLTRWRIRLVAARTAERNRTVKLLDAVGIKLSTVMSDVFGVSGMLMLWAMAGGETNPARLAQLAKGVLRSKTPQLVLALERGLGVEPRETLRMQLNRLASADKDIDALEQRIARLAKPFEHHIELLCTIPGVDRTIATIIVAELGTDLSAFPSAEALAFWTGLAPGCNVSAGKRLSSRTTPGNRHLKTAMVEAAQAASRKKDGYLREKYYRLKARRGAKRAVVAVAHKQIRAVWYMFTRDEPYRDLGGDYLERSTKRRVGRQLVQRLISLGYKVQIEEPPAESDTGGASSAPTRSYKLAPRPAPPAAPRAAPKSVAPAAAPKSVAPAAAPKPVSAKRVPSTAPAKAAAAEAAATPRSSGTAVAAVQKPDSTGVAALQSPRSKSDKPAARHSRARGTALSSSSTTKTAPNPKHPKKRRKTP

SEQ ID NO: 505910 - protein, 350 aa, unidentified
MPQRNVPRSAAVYGIDIGKNIFHVVGLGSDGVPVQKVRFRRDTLLQFFERAAPAIVGMESCAGSQWIARKIQALGHKVRLIPAQFVKPYVKSNKTDIIDAEAIAEAATRPTMRFAALKSEEQADLQALHRVRDQMIGTRTRLINQMRAFCLEYGIALRQGAGLFKLDLPQVLEDQSNELSSAMRKLLADLFADLRQLEQRIGDITREVEAIASREDVARRLMTIPGIGALGATALLAAIGSGRQFQKARDLAAWLGLVPREYSTGGKQKLLGISKRGNRYVRKLLVHGARSCFRHLDRTKDRLGSWLDGLQARMHPNKAVVALAAKMARIVWVVLTKPGALYERRDPAFA

SEQ ID NO: 505911 - protein, 362 aa, unidentified
MIVEERTHVGLDVHAHAVVAAAIDGVTGELFRRRLGSSPAEVLAWVRSLPGPVAAAYEAGPTGFTLARALRAAGVRCEVLAPSKLQRPVGERVKTDGRDALHIAKLLRLDEIVAVTIPSESQEAARDLVRAREDARRDLMSARHRLGKLLLRRGITYPDKTAWTTRHHAWLRQQRFELPGLQAAFDAAHEAVVAIQDRRERLDEAIHALAAQSEFTSVVNRLACLRGVSTLTAFALAVEIGDWTRLDGRRIGSYLGLVPTENSSGQSRSQGGLTRTGNAHARRLLVEAAWHHRPYYTPTSPTLRARWALAGPEARERAHQGNLRLHRRWASFQARGKRNVVANAAVARELAGWCWSLAVMES

SEQ ID NO: 505912 - protein, 343 aa, unidentified
MYYIGLDVHKKTISYCVKDVAGHVHREGKIGSTRRELDAWINTLPQPRTMAMEATIFTGWIYDHLLPHAEKVKVAHPLMLRAIAAAKKKNDKIDAAKIADCLRCDFLPECHMASTEIRDRRRVLRYRNLVVKQMVQMKNRVSGLLMETGVSYNKQRLHKVGYFGELMSTNEDISQAVRPLLNLSRGMIRRSGKLEYDLVSSLERDPLLRERLRRLRTVPGVGSITALTWALEIGDYTRFSSNKQAISYCGLCADEKSSADKVMRMPLSKQRNKHIQRVLIEAAKLAPRESPELAMIRERELQRGNPNRATLAVARKMVCYMMAVERRQQDFVTAGETVPTEAA

SEQ ID NO: 505913 - protein, 486 aa, unidentified
MENHAHLGIDVAKGSADFLLVNARKEPLEDGFVLDDCTQGRRILTRLIDGWFAGGITHLYCGVESTGGYENNWFNLLCSLAATYQKKGKTLRVARVNPRPVKAYGQAGMLRTQTDQTSALAIASYLIGFPEKIRYSPHQDRQEDPLWLAARGQAALIRMLIKQKSQLFNQLEKLLYSHLGELMIYCRHGIPGWLLRLISRYPSRDHLRRAGIRKVASIKGISLDKAQSLLGRLDTGQPAPLPIACHTIRATAKQILHLQTQIEAQQTHLTSLFEDHPHVKLIESIKGIGLDSAVRLMVEIEDVSRFDTNKAMCAYFGIHPTWRESGDGHWKTGMSKQGRAQVRGILYMCSLTAIRWNPPLKALYHRFRKKGMNHYQAMGVVMHKLLRIIYGVLKTQTPYDPQVDQQNQQRSKQAQQAYQEKIARTKTAQKTARQRYMSEVDSTENAPISRRAYKKRKQEASQSSPKEEYTGSPPADTPEEASVMNI

SEQ ID NO: 505914 - protein, 427 aa, unidentified
MKKADLQSTLFVGIDISSRENVVCFLDFFSTTVLKSFAVPNNQPGAEQLANTILEFVAAKHDFTKVCVALESTSYYGIHIANYLSDCSELMALGIEVYCLNPKMIANYKKSFLGKSKNDYVDAMVIADFARVGRITSKPWRGSQFLALQRLTRHRLHLSKCLAREKTYMCSNIFLKFSEFSILDNENKPFSNNYGATAAAVLTELLSTDDIATMSMESLVDFICSKGKNRFTDPERTAQLLQKAARDSYRLDKCLYEPLTIAIASSFNVIRSYAAELKTVNTAIEHTVRGLHPEAYTVLRSIPGVGPVYAAGLLAELGTIENFSSDDALAKYAGLTWRETQSGNFRADDTTMTKAGNSYFRYYLLEAVGSLIRHDAVYAEFYQKKYDEVKLHQHKRALVLTARKFVRLIFGLLAKNQLYSQSGVSRT

SEQ ID NO: 505915 - protein, 309 aa, unidentified
MPPNYIGCDICKDRLDIFVPRSGARAHANTASGIRALIKACGPGSVLLFEATSGCDQALLTALAEAGQPFVRLNPLHAWHFAQSLNLPKTDRVDARMLARLGAERQPAPHLPQDPARAELAELADRRDQLKRMEVQEKNRLTKTTSPLIRADIRASLKALAARIARFGAEITDHLARHPDLARDALLLRSIPGIGPVTAANLLARLPELGQLDRRAIASLAGLAPKARESGKFRGQRRIGQGRDVVRRLLYMSALSLWRTPGPTTATLRRMQEAGKPAKVILIAMARKIVTIANAVLRDQTPFRTPTAT

SEQ ID NO: 505916 - protein, 360 aa, unidentified
MAKTKAVHSSYVIGGVDTHKDLHVAAVVDQNNCVLGSEFFATTRQEYRQLLAWMASFGTVKRIGVECTGSYGAGLLRYLQSAGVDVLEVTAPDKMERRRRGKSDTIDAESAAHAAFSLIRTVTPKTRGGMIEALRVLKVCRKTAVAARRTALQMIQMNIVSAPDELRDQIRSLTRMQLIRTLASWRPDVTAYRNVQDAYRIALKSLARRYLELHDEIADLDVMLASIVDELAPELIKRNSVGYECASQLLITAGDNPLRLHSEAGFAALCGVSPVPASSGKKNRHRLNRGGDRAANSALHIIAIGRLRTDTKTQEYIGKRVAEGHSKMEALRCLKRYISREVYTLLRNQNRQINSTQITT

SEQ ID NO: 505917 - protein, 397 aa, unidentified
MYIVGIDIAKRKHEAAVIDGDGTVIIKPFSFTNNCSGYNRLLAMLAKAKLPLDEVSFAMEATGHYWLALFTRLQKEGFRVQVINPVQTNSVRNFYIRQAKTDPRDALLIAEVIRFGHFSESTLHPENIYELRELCRGRHAIVSMQADVKRKVVALLDQVFPEYETAFTNMFSDTSMAILQTCPTPKELSEMPLEELCHLIEVSSHKRFRMAKAQELQELARNSFGFAMAGDVFSTMIRLYAKHLDFLKQQVREMDRKIAEIMETLDTPITTITGIGPTLGAYILSEIGDISRFSSAAKLAAYAGIDPTMRQSGEYNGVRNRMSKRGSPYLRHAIWLAASSAVLHDPALKFYFQKKRDEGKPYMASVGHACRKMVSIIYAVMRDNKAYTPCIPNEISA

SEQ ID NO: 505918 - protein, 343 aa, unidentified
MTKISTIGLDLAKNVFQLHGVDGSGAVVLKKQLRRGALEKFFAQLPPCLVGMEACGSAHHWARVIGRYGHEVRLMPPAYVKPYVKRNKNDGRDAEGICEAVGRPTMRFVPVKSVEQQATLAVHGTRALLVRQRTMAANALRAALSELGMVAAQGYEGLRELMARLEEPGEEIPEVMRGALLVLARHWQALDADERLLERQIAKAARSDQDARRLMEVPSVGPIIASTVLAKVPDAKVFRSGRDFAAWIGLTGKDHGTGGKHRPGRISKQGDRMLRAMLICGASAYLRHQKARGVSDPWLRELLARRPYKVVMVALAAKTARIIWAMLAKGEAYRDRASASAAA

SEQ ID NO: 505919 - protein, 370 aa, unidentified
MTAQQCTPPQAALVAIDIAKNRHEVLIDPGPGMRRRRLTVLNTRAEHDRLVATLAGLGKPVIVGFEPTGNYHRGLVHRLIAAGFEARLISSMALARTREALHNGWDKNDPKDAQVILHMLRIGASTVYSDPGYGRLNDLQELSKTHDMVSRAKTELWHRLLTHYLPLYFPEAERFQGNSRSDWFLALLEQFPTPASITGLSEEAFVEAAWEVVGRKVSKARLLADIYETARSSMALPVRPDSPAIAMFRLVLAEGRSLIRQRDQIEAQAEALLACDADAARLRQLPGIGPIIALTILAEAGDLRRFGHHRQFLKFCGFDLATHQSGMFRGQTRLSKFGNARLRRSFCLAAQVAILQLENSFQARYSRYIV

SEQ ID NO: 505920 - protein, 392 aa, unidentified
MMVSVGIDVSKDKHDCFIVNSEGEILADVFTIPNNMDGFHYLLQRIQDCANTQNKIKVGLEATGHYSYNLLGFLLDNGLPTYVLNPLRTNIYRKSLSLRKTKTDRVDARTIASMLLSDVGLKPYTDTAYHNEELKSLTRYRFDKVKERAKLKSSIARLVCILFPELEKLVPSLHIASVYALLEEFPGAKQVANTHLTRLKALLETASNGHYKRDMALEIRNAAKNSIGSQMPAKSLELQHTIRLIRELDDEIAEIEKQIQAIMDELNSPITTIPGIGFRMAAMIFAEVGDFTRFDSPDKLLAYAGMSPSTYQSGQLKNCYPHMEKRGSRYLRYALYNATKYVCHWDPTFAAYLAKKRAEGKHYNVALSHAAKKLVRLIFAMEKSRQPYCLVA

SEQ ID NO: 505921 - protein, 331 aa, unidentified
MSAVLGIDIGKDQFVTLLLNEDQPSQQATFDNTPRGFARLQRFLKKRKLKSLHACMEATGRYYESLADFLYAQGYTVSVVNPAQIKAYGDSQLRRNKTDALDAALIADFCRTQQPSLWTPPPPEWRQLQALVRHLEDLQADYQRQRNRQHALHHAAHTTPLVENNLKAQLDLLKQQIEQVKRALQQHLDQHPDLKRDKELLTSIPGIGDLTAGKLLAEFRAIRDFADVRQLVAFAGLNPRQQQSGQSARGYTPISKQGRATIRAALYMPAVVAKNHAPSFRPLVQRWQQAGLCPMEIVVALMRKLLHLIYGILKSGQPFDPHFLHNNLALA

SEQ ID NO: 505922 - protein, 463 aa, unidentified
MKHNRKRKHEARKERGSISLLERIQPDAAGIDCGQNSHFVAVPPDRDPQPVREFRTFTADLHRLADWLVQCRVKTVAMESTGVYWIPLYEILEQRGFEVVLVNARDVHNVPGRKSDVQDCEWLRELHSVGLLRASFRPSAAIVPLRAYLRQRETLVQETSTRILRMQKALTEMNLMLHVVVTDITGQTGLRIVRSILAGERDPERLAQHRDPRCRASHAEIVAALTGNYRAEHLFALKQNFAAYEFLLQQITECDSEIEALLSKLADRQPPPTAPLPDARSKQVSKHTPTFDVRSPLHRLTGGTDLSQIDSIGPHAALQLIAEIGTDMRRWPSEKHFTSWLTLAPSNKISGGRLLSSKTRPSANRAAVILRRCAMSLTRSATALGAFYRRLAARVGKPVAITATARKLAVIVYRVLSGNLVYNDPGATAYHQLHSARELKSLRKRARLLGFHLVDQTTGEASV

SEQ ID NO: 505923 - protein, 340 aa, unidentified
MSTLYAGIDLHSNNSHLAILDQSDKRIFHKRLPNMADVLLAELEPFKETLSAIVVESTFNWYWLVDSLMEQRYKVLLANPAAMQQYKGLKHVDDKHDAFWLAHMARLGIIPQGYIYPKEERPFRDLLRKRGHLVRLRTSVINSLQGIISRNCGYNLKGNKIIRLRENHVTPLLATNEDLALSGEVSKDVIDFLGQQISRIESQVMEKVQLRKPFQCLQSIPGVGKILSLTIMLETGPITRFNKVGNFTSYCRKVPTSWTSNNKKKGKGNSKNGNKYLAWAFSEAAEFSRRHSDHARAFFNKKAARTNKSVAYSALAHKLARAAYYMMKNQVNFDPSKLFA

SEQ ID NO: 505924 - protein, 319 aa, unidentified
MAKIVLGIDVSKKTLDVALIFDNQTFCKQFKNSADGFGLLAAWLVCLKITRVHACLEATGTYSEAIALFLHERGHWVSIVNPLRIKGYAQSNMQRNKTDRLDARLIADFCLTQEPDEWQPPNEAVKHLQSLVRRVEVLEEMRQAEENRLANAVFEIKPSIERMIVLIKEEINQFERQIKQHIDRNSHLKEQSELLQTIPGIGERTANLLLSEIEFERYSSARAIAAQAGVTPRKKQSGTSLKQTSLSKLGNARIRRALYFPAIVARQHNEIVKEFAKRLKKNGKTPMQIVCAAMRKLLHIAFGVLKHKRAFDASLAFSA

SEQ ID NO: 505925 - protein, 432 aa, unidentified
MEDVHEEPLFCQRVAGLDIARAEVEVTIRVPSDTSSGRRQQETRTFGTTRRELLELADWLRSRGVTKAGMEATSDYWKPVFFLLESRGFDCDLYNAAQVKALPGRPKTDRADSIWLARITERGMIAASFVPPEPIRRLRTHTRYRRHLTQARTAEKQRVEKLLEDGHLKLSSVISDIHGVSGRDMLDALAAGQRDPHALAAMARGKMRGKIRRLEEALECSFLTDEHAAVLAMMLQVIDHYTAQISQLTATIEELAGPYLPQIEQPGAVPGIGMICAQDIIAEIGTDMAVFPTAAHLVSRAKWSPQVRQSAGKRKGSNAAGRGNPYLGAALGEAGISAGNTQSFPGARYRKLTRRMPRKKALVATGNSMLTIIHALLSDPAAVYTDLGADYYEQRMHARRQARNHVKSLERLGCKVTIEAIDPATGELTAAS

SEQ ID NO: 505926 - protein, 312 aa, unidentified
MSQNTSILHVGLDVAKLSLQLDLAGQAHALSNDRPGHGHLLKLLRRHPNAHIVCEATGGYEQPVVRALQAAAIPVSLIEAGRVRFFARAQGQRAKTDPIDATVLTRYGVTFQPAPTPGLSAQQQQLADVIQRRRQLIHSRTMETNRAEHYTDPFCRRQHVQFLKVLDRQIDQCDAHITALMAADAGLAQKAARLQAIPGVGPVVAATVLADLPELGTLNAQTAAALAGVAPYNRDSGPRVGHRHISGGRRPVRCALYMAALSAVRHDRILKAFYQRLRDAGKKPLVALTACMRKLVVLMNHLLKHEDFQLAN

SEQ ID NO: 505927 - protein, 397 aa, unidentified
MYIVGIDIAKRKHEAAVIDGEGAVIIKPFSFTNNCSGYNRLLAMLTKAKLPLDEVSFAMEATGHYWLALFTRLQKEGFRVQVINPVQTNSIRSFYIRQAKTDPRDALLIAEVIRFGHFSESTLHPENIYELRELCRGRHAIVSMQADVKRKVVALLDQVFPEYETAFANMFGDTSMAILQTCPTPKELSEMRLEELCHLIEVSSHKRFRMAKAQELQALARNSFGFAMAGDVFSTMIRLYAKHLDFLKQQVREMDRKIAEIMETLDTPITTITGIGLTLGAYILSEIGDISRFSSAAKLAAYAGIDPTMRQSGEYNGVRNRMSKRGSPYLRHAIWLAASSAVLHDPALKLYFQKKRDEGKPYMASVGHACRKMVSIIYAVMRDNKAYTPCIPNEISV

SEQ ID NO: 505928 - protein, 456 aa, unidentified
MENFLGIDVSKGYADFALIDEQKQPIVKNFQLDDTPDGHSRLGEFIRELFKQHPDLTLLATAESTGGYENNWLDCLQKLQRCYTIKIARLNPKGVRHHHQAKLNRAITDAISARLIAEYTMSHQEIIQFDQSDETYSLRKQWSLIKLLSKQKTQLLNQLDNLVYQSNTELMVYCRSYWPAWLLQLLGKFPTAKELAQANVDQISKIPYLGIDKANKILNQARQSVASATDPVSGGMIRTVIAEIIHREKVIAICKKSLIENCSLPDVELLASIPGIGKFSAVGLIIEIGTWLRFSSAAKMASFFGLHPILRQSGDKNWVARMSKQGSSEVRALLFMCAMVATRRNPVIKDLYTYSLAKGKSKMSAIGICMHKLLRIIYGVLKSGKVFDPAIDQANRTRKTDQRKPKKKETRRLQPVDENAPVSARQNKKRKEQNQSQGELVTTCEIKAPALSHCTP

SEQ ID NO: 505929 - protein, 359 aa, unidentified
MRIIGCDLHARQQALAMLDTETGELVNLMLWHEGNEVREFYSQLPRPVLVGIEATGSMHWFLNLMEELGIECRVGHPATIRAAAPRKQKTDRRDAELILQMLVEKRFPAIWLPTKELLDLRALVLHRHQWVRIRTRIQNALQAIALANGLRRGPSLWSYDGQAKIAFLSLLPHASYRRSMLQEMYRKMEEEIENLTQRVAEQAGQRCGARLLMTHPGVGPVTALATEVFLGDARRFVDGKALASYVGLIPREYSSGARQRLGGVTKQGSPLLRFLWCEAGAHAVRRDPELKRFYRRKLVQKGLGKARVAVARKLGIRLWIMLRDEIDYQEFCRRGQKQQSGAACAGKPEVANGAKSPAD

SEQ ID NO: 505930 - protein, 350 aa, unidentified
MKVTTIGLDLAKNVFQVHGADAAGTPVLRKQLRRAQMAEFFAQQPPCVVAMEACGGAHHWGRKLRALGHQVRLIAPQYVKPYVKSQKNDAADAAAICEAATRGHMRFVSVKTVEQQSVLALHTARSGFVKQRTALSNQIRGLLAEFGVVLPQGLSKLNGQLPIALADQNNELTGTIRNLFRTLHAELAHIDDLVARLERQIREWANQDPGARLLQQILGIGPITASALSAVIGDIRQFKNGRQLAAWLGLVPRQHSSGGKSVLLGITKRGDKYLRTLLIHGARAALKAYQRNPEKMPAHLAQLLARKHPNVVCVALASRNARVAWAMLSRGEDYKGWEVAKRPALPAQLN

SEQ ID NO: 505931 - protein, 442 aa, unidentified
MSFKTLQTKRHFIYDKTIVGIDPAKKKHQVAVINKNGLQVGNSFTFTATYTGFTQDLWIKIKKIITDVNANHVVFAIETSCNLWQTLASYLQRTGYKVLMVSPLSTKHTRPAMNHDFSKTDPKDALLIANNARNGYFDFFQDYSDHIIAMHRLAITYYKLHNDYIRNAQRLRSVIERVFPEFFHAMQTDAATARYLLKKYLQPQDFLDLNLTQEAEAISKISCKKFNLDTLHQLQEDARHSIGIPTHHENILAERLSVDSWLMMVELLKNQMDAVLSQLLIFAKQTPYYDILSSFKGLGISDTLIALFIAETRNLADYNHYKKLEKLAGYNLRRNDSGQYIGQRKINRIGNKRLAWILYWMTKGGAKHIPEVALKYLRRQKYHTKHRKNIVACIPVLLKLVVAMTREHRPYQLREEKIKELEILSQAFKAQKDNKKRRHRAA

SEQ ID NO: 505932 - protein, 351 aa, unidentified
MKQKKFVGLDVHKETIAIVVIDEQGKTLVQSVIATDGETIRDFLKGLSGEIHVTFEVGTQSNWLYRQIKPFVEKVVVCNPRHNNLLMVGNKADLIDAEKLAQLLRLGALHEVWQHSAEQAYLKELVRTHENIVSDSIKVMNRIKAVYRSQAIKCTGTSVYQVSKRDEWLAKLQEPGLRFRATMLFQEFDTLAELRKQAQQAMLRQARKHKDFKRLCKIPGLGFVNVSRLIAQVGTPNRFQTKRQFWKYCGLAVTTRSSADHQIINGKLRKRIKQTQTRGLSRHFCHRLKNVFKMAAQKSARREPYQQYYENLLDTGTRPALAQVSLARKIAATALSVWKNQTDFDARRLAA

SEQ ID NO: 505933 - protein, 370 aa, unidentified
MKLSIGSDLHKTQFTTLSLSEDRKIEESGMYPTNKTGYGEFLKQVKEWIEQGYEISIAVESTGNARFFRNKMISAGIEVKVVNTLKFKVINESVKKTDKHDARTLAEFLEKDMLPESILCSQESEDIRRILKSRSILVKTVVSLKNQVHGLLLGYGIESKRGQLQSKKERQRILVGLEDHRFNGNAANAVRPLLNTIDQVSSEVKILEKVLAKMVEEDEDVALLQTIPGVGIITASTIRAFTDDIERYSSAKKYAAHAGLVPWVQNSNMTIHHGHITKRGPVELRTAFVQTVMGMIRSKKHTMGYRLMSRYTDMKKHKGSGKSIIATARKMSTIVYTILKTREPFDPQKMAHNSKYREMQATALGAALAV

SEQ ID NO: 505934 - protein, 415 aa, unidentified
MEATVERCAGLDIHQASVVACALVGPPGCKPRKETRSFGTSTRELEALRAWLEGLGVTHVGMESTGVYWKPVHAVLEGGFGLIVGNAHHIKAVPGRKTDVKDAEWLADLVRHGLIRPSFVPPPPIRELRDLVRLRRSLTEARSTERNRTLKLLETANIKLASVASEVFGVSGMAMLRALVEGEAAPAEMAELARGKLRRKRERLTLALEGRLTEHHRYVLAFHLRRLAAIEEDLRALDARIEAKAEPFRAQRLLLQQIPGVDALVAVTIIAEVGVDMSVFGNAKRLAAWAGVCPGNHQSAGKQRSGATRRGNVHLKTALVTAAVSGSRRRGSYYRDKYHRLRARRGRLRAAVAIAHKILVAAYHMLAEGVPFRELGEAFLDQQARQRNVRHLLRRLDHLGYDVLLRPKAAEAAGP

SEQ ID NO: 505935 - protein, 422 aa, unidentified
MNTFTSNTFSAYIGIDWADSKHDICLQAANEAKRKFSVIEHKVDKIDEWVESLLKQYKAPIAIAIELSKGPIINALQKYDCFVIFPINPSTLATYRLAFKSSRAKNDPGDAELALDLLIRHPERFNALTPQSAEIRALSSLVEARRNLVDDKNRLTNRLRASLKQYYPQTLEWFDRIDTHLFCNFITRWPTLLQAKRARQNTLIKFFLENHMRFPKVIEKRLTAIKKASPLTNDEAVIIPHRLQSLNLVAQIHVILDAIEQYDSEIERIAKQQADYELFNSLPGTGSALTPRLMVAFGEQRERFQSAAEMQMYSGIAPVTEQSGKKQWIHWRWQCPTFLRQTFVEWAGQTINKSIWADAYYHQQRSKGCTHQTALRSLAFKWIRIVYHCWKTQTPYDELLYLKALKQRGSTLLNPISLPKSC

SEQ ID NO: 505936 - protein, 338 aa, unidentified
MVYGAIDLHMRSSQIRIIDDAGVVQRDQRVPTTRERLTQAFGSHGPMRILLETGTESEWVAQTLEAAGHAVIVADPNYAPMYGERTRRIKTDRRDVAALAEANRHGWYRVAHRTSAPQRATKQLLRSRRLLVQMRTGAVSLLRSLLRQEGHRLGTGSCETVPARVAKLPVAPELAETLAPLCRQIAGLTTDIHELDARLRTRTASDAIVTRLRSVPGVGLIVATTFRAVVDRHERFDHAGQVSAAIGLVPREDSSAERRQRGHITKAGPRELRSLLVQAAWVCWRHPGSATLKAWVDRLAARRGKRIAVVALARRLSRILFALWRDGTMFDGTTLATA

SEQ ID NO: 505937 - protein, 347 aa, unidentified
MSEYIGIDLHKAKSFVTRVDRHGRVLEQVELRHAAGELQRYVEKIPGDTRIVVEATGNWMWLYELIEDRHPDLVLAHPLKTKAIASARIKTDKIDATTLAHLLRADLVPAAYIPPRAVRDTREILRYRASLVRLRTQVKNKIAAILSKNGIVPPTKTAFGVKSRQFLATVAVRPCYRLALDGYLRQLAHLTDEITQAAQTIEAQAQADPQAQLLCTMPGIGAYSALLILSEIGDVHRFPDSRHLCSYAGLVPSVHASGGKTRLGRLTKQGSTWLRWILIELSMHAIKGAPQFRQLYHRVARKHGRNAGRTAVARAMLKTIYAMLKHQEAFRPIEQGSTGQRLGAMAG

SEQ ID NO: 505938 - protein, 345 aa, unidentified
MQPMYYIGLDVHKKKISYCVKDCVGKVHAEGWIPATRFDLDRWMKTLPQPWSAAMEATMLSGWIYDHLKPHAAELKVAHPLMLRAIAAAKKKNDRIDANKICDCLRCDFLPECYMAPTAIRERRRTLRYRNLLVRQMVQMKIKISSLLMEAGVSYNKQKLHKAGYFRELLATNPDINEGLVPLLRLCRETVVRLGKTESALVRSLERDSVLVERVERLMTIPAVGPITALTWALEVGDVQRFSSIKKAVSYCGLCGAEKSSGSTVQRTPLSKQRNKHLQTTLIEAAKMAPRNNSELAMLYDKEKQKGNAHRATLVVARKLVAYLVAVDRRQTEFLTVERENRTAA

SEQ ID NO: 505939 - protein, 333 aa, unidentified
MYYSGIDLHSDNCYMTTLDDTGAVIKQQRVENISELVLDYFHSIPGDHQAVVESTTGWYWLNDLLQDNGIELVLAHAKYLKAISYAKVKTDKVDSQTLAILLRQGLIPRAHKISRDLRGLRDTMRIRLRLVQQRSACLLRLNSIQMKFNGSVPDPYRFQSAVLEHTRDTFTSQILALEKSLHPVLIPNDDIQRLLNIPGIGKLSAFTIYLEIDGIERFDSDKKFASYCRLVPAADNSNRSVHHRSSKDGNKYLKIAFSDAAVHAIQYYPEYKRFYQKLARRSNEATARTVVGKELAKIVYYILKNKTQYKGLKGQPISRIKSKQWPRLASSNA

SEQ ID NO: 505940 - protein, 326 aa, unidentified
MQIAVSFFGADVGKAEIVVADHGRAKPVTQILKNTPSSLSKWLQTLPPGSVLAMESTGGYERMLADLAHERGLKVYVLNPKALHHYAKSQGQRGKTDRLDAIMIARFIASEHERLHPYQPCAQYIERLRQMLRLRRMAVITRTQLRLSSERHHQVHDAQAQVQKALDALTELANSLEDQMLAEIQAEPALAQDFKLLTSIVGVGNLTATALVTTFARIPFTSSDAVVAYAGLDPRPKESGAYKGMRKLSKQGDAILRSLAYNAATAAARSITFKPMYQALLAKGWATTQALNIIARKLLRIAFGVWKSRKPFERELFLANQACVKP

SEQ ID NO: 505941 - protein, 367 aa, unidentified
MKKVSTASGKATKNFPQPKLTIGLDLGDRSSWYCLPDEVGEVLQEQKLSTTPKAMREVFGTLPRCRIALETGMHSPWVSRVLSELGHEVIVAHARTVRLIGESRKKDDRLDAGTLARLARIDPQLLCPVKHRSAKAQADLTVIRARAGLVRARTALVNTARGLAKSYGERLRGCNVRNMNPEKAKGLSAELQRALEPLLAGIESLSERIREYNQRIEQLAQQSYPQVALLKQVKGVGTLIALTFLLTLEDAHRFRKSRDVGCYLGLQPGRRNSGQSEPQMHISKEGDPYLRTLLVQGAQHILGPFGIDCDLRRWGLKLAERGGRNGKKRAIVATARKLAVLLHHLWVSGEVYEPLHNSQQSSLALAA

SEQ ID NO: 505942 - protein, 394 aa, unidentified
MIYAGVDIAKTDHVIGAVDERGAEMCPPMPFKNTEAGLEGAVAWLEGLAGSPSDVVVGMEATGHYWMACYSFLVARGYSVAVINPMQVKAVRKLKGLDKVKNDRVDAGLIAEALRIGQYDETRLATDEMASLRSLSRYLQSLRGMVAELKTQCICLMDAHFPEYAGIFSDMFGAGSRAVLSKSPLPFELARRRADSLARDIAEASRRGGKSSGYAAKIKAAAKSSIGVRLGQEAASFQVKSLIRQIEFADSECAGVEARLRSLLDEVEPLVLTIPGVSYVTGAQIVSEIGDVSRFRNAPALVSYAGLNSSVSQSGRFDSGGGPITKHGSPYLRRALWLAANRARQYDPGLRAFYDRKRAEGKPHRVAVTAVARKLCHIVFAVMRDQVPYDPGRE

SEQ ID NO: 505943 - protein, 326 aa, unidentified
MSAAQKTFNHIVAFDVGKESLAVHILPGDERSTIANKPKAIRKLLIRQMHRNANLNIGPLLVVCEATGGYERDLLEICVELELAAHKAHGSRVRHFANYRGLIAKNDPLDARVLALYGLKTEDLQLYAPRTPGQEALIDLRARRDQIQAMLLAETNRLEHVRHAIVSRSLEQHIAMLRKALAAIEARIAAHIQASKELACKAELMRTLKSIGPGTATVLLAYMPELGTFTRAGAASMAGVAPFDNDSGKKSLPRHIEAGRAAVRKALYMAALTAIRYNPIMKSFAENLRRRGKPAKVVITAVMRKLIVTLNAMLKAGEPWKHAQTA

SEQ ID NO: 505944 - protein, 320 aa, unidentified
MMAQNDLVVVGIDVAKDKVDACIRRFTLRQTFPNTAQGHRKLVAWLRKYQVGKAVMEASGGYEREWRNVLHNAGIEVRIVDPRRVRSFAQSAGRLAKNDPIDAEMIAWFAETFSQAPGQIPDAAREELAALAKARKALVDVKIRLQAQDEHAAPEPARKAYARALKSLAAEIDKLEAAISAKVEATPEFAERAEIIESVPGLAQATSAILIAGMPELGQVSDEVAAALIGVAPYDDDSGKRRGERYIKGGRRWVRNAIYMPCLGAATQYNPVLKAFYHRLLAKGKEPKVALVACMRKLIIILNTMLARRQKWNPGRHAMA

SEQ ID NO: 505945 - protein, 470 aa, unidentified
MFRQVSAMQKNCDKNSKPDKEVGIEGLPVIRPNVAGIDLGSETHWVCAPNVERTGLEVETFGATTPELERMAEWLKARKIESVAMESTGVYWIAPHEVLERHGLEIVLVNTRELARVPGRKKTDRVDCRWTQRLHSCGLLKGSFRPNEPVCMLRTLVRDKGNLVAEAGDWLRRMQKSLDQMNVRVHRAVSDIDGVTGMRIVRAIVAGERDAHELAKLRDRRCGKSEEQIAEQLSGHWREDHLFSLRQALKMYDAIQERIADYEREILRKLAEMERAECHGQEPPKLKNPQKAKAIQKRGEEPLRQALYRLSGVDLTGIDAIGVETVQVVLSEYGPDLSRFPSEKQFVSHVTLAPRQALSGGKPVKKKKRGSASTRVAAALRMAALSLRHSQTALGAYYRQISRRIGGDVAVFATARKLATLIYRLLRWGQPYVDVGAAAWENRYRQARIQRLAATAKDLGYQLTPNPTKA

SEQ ID NO: 505946 - protein, 315 aa, unidentified
MEKTTPATAVTYVGLDIAKDRLDYTVDGLRCHHVPNTPDGHQRLLAALRCHAGVRVVCEASGGFERSVVAALLLARLEVCLVNPGRVRAFAQAEGLLAKTDRLDAQLLRRFGQKVEPRLHAPMDQAAVTLRELLDYRRQVSDQLVAVRNRLDHAGPVLRTRLEGQIAFLEKELKETDRLIHEHIDHDDTLRRKAARLRELPGAGPVLAATLLAYVPELGDIDSPQLSALIGVAPFARDSGRSHRPRHVRGGRAVVRHVLYMAAVCATRHNPVLRAFYARLLAAGKPKMIALIAVMRKMLHVLNRLIADPHFVLVR

SEQ ID NO: 505947 - protein, 334 aa, unidentified
MLYAAIDIHKHAFQAAVLDPESGEVVEERFPADRESLARWAEPWRGRVAAVAIEATTGWRWVWRELVARGFEVRLAEPVQTRALLGRRRSAKTDRLDARWLARLLAKEMLPQSWIPPAQIQELRDRTRLRKALAEDRRRWGQRLHAYLLHEGWPCSRSNLLRPPGLRWAAALRLPAHARLQVDSLLAVMAALETQLDTVDAELRRFARADERCQALQSIYGIGPILACHLLAEIGEARRFRRAEQITRLAGLDPVVDESGETRRRGHLAKAGSPHLRWALVEAAVHAHRPTAPDLALYRATRQRRDTTVARLTIARKIGKRAFHALRELELTAA

SEQ ID NO: 505948 - protein, 541 aa, unidentified
MARRKSNKQTRANNAVLPVMRPDAAGIDIGATEIFVAVPADRATENVRSFPTFTQDLYALADWLKSCSISTVAMESTGVYWIPLFQILEDRGFEVCLVNARHVKNVPGRRTDVSDCQWLQFLHSVGLLRASYRPEQEVCAVRFLLRHRESLVQMAATHVNHMQKALDQMNLQLHHVISDITGLTGLAIVDSILAGERDPFVLAKLRHDRIKASEEVIAKSLVGDYRAEHLFTLDQSVIAYRSYQKLIAGCDKEIRRCLDQFKPPTQPASKLGGSDQEKGKPKSDNGVLCNELRRVFGVDLTRIPGIRTGIAQTLFGEIGPDLTKFRSASAFASWMGLCPDNDISGGKVLWVGTRKVKCRAATALRMAAQSLHHSKSGLGDFYRRMRAKLGAPKAITAAAHKLARIIFHLVTTRQEFDDSRFAADQLRYEKRQEAKLRAKAKALGFQLIPADDPGVVPQKQGARWTGPIGKEPGSGRWDTEGVRATEVGRIVSGACSPIKSVVPSLVHQSVVTARDTTPGLIPIKRVLFECAAWPLAEQWSR

SEQ ID NO: 505949 - protein, 358 aa, unidentified
MQKKIKELDFSNQLISVGIDVHKKSWTVTIRIAGQQVKNFSMNPSPEQLNRYLHTNYPGGIYQSVYEAGFCGYWIDRQLQALGIRNIIVNPADVPTSNKEKTRKTDSIDSRKLARELSSENLTGIYIPNEDEEAERILSRLRMQLTKDQTRLKNRIKSLLAFLGITLPENIELKHWSGVFISYLNKMEFKHEQIKQTLEQLLKQLSDLRNQLAEVMKLLRQSIKKNGSAQKIINHLLTVPGIGFITAVTLYAEIMNINRFRRFDEFSSYVGLSPSIHSSGEKERVLGLSQRQNKYLRNILIESAWVAVRKDPAMTMVFGQLTKRMKKQEAIIRIAKKLLSRIMHVWKHEEDYALAVVE

SEQ ID NO: 505950 - protein, 376 aa, unidentified
MDKSITGVRRFVGLDVHAATIAVAVAEKDGEVRSLGTIPNQEHSVRKLVTRLSGFGKWRACYEAGPTGYTLYWQLTKLGVECMVIAPTLVPVKAGDRVKTDRRDAERLARSFRAGELTPVWVPDAAHEALRDLVRAREAAKRDQLRARHRLGKFLLRQGRRPTEKLRAWTQSHLDWIRSEVKFEQFAQQATLEDYLAEVDHLGQRIVRLEKAIDEAIEGAPATMKAVVSALQALRGVAKMTAVTIIAEIGQLSRFPTARQLMGYSGTVASEHSSGERTSRGGITKTGNAHLRRVLVEAAWCQRHKPTLTRTLRVRQEGLSGEVQEIAAKARHRLSTRYRRLLARGKSKQQVVTAIARELLGFVWAIGVEVERKGAA

SEQ ID NO: 505951 - protein, 418 aa, unidentified
MSRLHIGIDPAQKTCVASLVDESGRTVGNALQFAPNRSGVAGLVRRVQERVPGAQCHYFVESSGFAWYAPSALLRDAGQAVSLINPSYTKAQRKVSSRHAKSDAKDADAIARAPLNMGEKAYHPADIPEGPRLNLRMLCRHRHTLQGDATAIKLRLLAWLGLTTPGITAILGNDLSAMDRDFIRRYPVVARIVRLGRARVQEFLQRRSEGEFDDATVDELFALAQEAYQPKEFDDRLMGRQIGMELDRLALLEKQIAELDKAIEQLYPDCDPGGLARSLPGFGKVVAPILVSEAGTDMTRFATVDRFASWTGLVARASGSAGKQQEGLPMTKAGRSIVKWGLHMAATAAIHCDPELRAFYDNLRARDKHHNAAITAVAHKLARRYWALMRQQRPFEKRTPLTDAQAPTASADDTPPCA

SEQ ID NO: 505952 - protein, 346 aa, unidentified
MTLTIVDEPRLVTGGVDTHAGTHVAAALDGIGGLLGTRGFPATAAGYAGLLGWLGKFGDVALVGVEGTGSYGAGLARYLAARGVRVVEVDRADRQDRRRKGKSDPLDAVSAARAAQSGRASGEPKGRDGAVEAIRALMVAKRSARNERTQAINQARALILTGPDELRARFARKRAAALAEAIAALRPRPGDAAGYAVRTALRELGRRVEFLDAQIERLDDLIVPLVAVRAAGLLSLYGIGPDTAAMLLIAAGDHPGRLRSEAAWAHMCAVAPIPASSGKTRRHRLNRGGNREASHALWRIVITRMSAHPATRAYVKRRTAEGLSKKDIIRCLKRYVAREVYPYLRG

SEQ ID NO: 505953 - protein, 311 aa, unidentified
MYYIGIDVSKKDLSVFDGKDLNFTNQEGLKSFKKYLKKKYSLSEIVIIFEPTGVYSLYLKEFCAENGIKTYIVNPKKSHNFSRALGIRPKTDKIDARTLYQFHKLIDLKDIKVPKIDQQAKTLSSYLVSYEFALKQRISLSHHLESLRDKQLITLIKKELKRAQRLENKIFDDIKEYLGKNQNLKEDYQRLSTIPGIGEKAAIALLTLFKTYPGTSRAQITALAGLDPIKRESGTSVKYKVKISKNGKGVYRKILYLPTLCTTVHNQKIKIFYQRLLANHKPKKLAVIASMRKILLIAHAMYQDKTEYIAV

SEQ ID NO: 505954 - protein, 429 aa, unidentified
MNYNTQNAKIASITEKTLIVGIDVGSETHYARAFDWRNYEYSKKPFAFNNDEAGFAAFKVWMEDIAEKHEKEAVIPGMEPTGHYWLNLGAYLQEQGMKPVHVNPHHVKKSKELDDNNPNKNDRKDPKTIAGLVNEGRFSYPYIPTGIYAEIRNLSNLRIQTQEELTRIKNRIARWFSIYFPEIKDVYKNPDAVSGMMVIKKAPLPCDIKELGVDGVNQVWRDAKLKGAGLKRARTLVSAAEHSIGSTEAPGSARIEIRNLLNDYEVYKNRMDDLMREIEAKLSEIPYIDKLMEINGIGLKTVSCFIAEVGDIRRFDNPKQLQKLAGYAIVADSSGKHNGESRISHRGRKRLRYALYEAAISVIGKNKEFREIHDYYRTRKQNPLKKMQSVIAIACKLIRIFYTILTKGVDYDGQKMLSDIVRPEIIMAA

SEQ ID NO: 505955 - protein, 392 aa, unidentified
MPLSRVAPDWPAPSLRHGGTGLVDDSIFVGLDVHKATVSVAVAEGRRGGEVRHLGVVANRPDHIGKMVERLAKGGRRLNFCYEAGPCGYGLHRQLTGLGHDCVVVAPSLIPMKAGDRVKTNRRDALMLAKLHRAGELSAVWVPDAAHEAMRDLVRARATAVRGLGKARQHLQGFLLRHGHIFAGKKGWTQAYRRWLTTVRFEHPAQQLVLQDYIHAVTDGEVRVERLTKQIEELLPGWSMAPVVVALQAMRGVAFIVAVTVVAEVGDFSRFENPRQLMAYLGLVPSEHSSGNTVRRGGITKAGNMLARRALIEGAWTYRMQARVSRKLHDRIENVPQTVRDIAWKAQLRLCGRYRRLMAAGKPKVVVTTAIAREMVGFLWAIAREVQVNAMI

SEQ ID NO: 505956 - protein, 438 aa, unidentified
MMQTELSKYTVIIGVDWADKKHDVCIHVMATGKRELSQIAHQAEKIDAWARSLHRQYGGPMAVALELSKGPIVAALQKYDFFVLYPINPSSLASYRRTFTPSGAKDDPTDAAYIMDLLLRHPDQFRPLAPQSAEMRALMTLVEQRRRLMDDRVRLTNRLRNALKQYYPQALEWFDHIDTRLFCDFIRRWPSAPQARRARKATLEKFFRTHNMNRKPLLEKRITAIKLAVPLTTDDGVVVPYRLLVLTLVEQLEVMLVCLDRFDEEIASLVPQHPDFVLFDMLPGAGPAIAPRLMVAFGEQRERFNNASEVQMYTGIAPVTERSGQSNWVHWRWKCPTFLRQTFVEWAAQTINKSYWAGLYYHQQRAKGCSHQAAVRALAFKWIRILYRCWKTRTPYDEARYLKALQERGSPLIKIAEAAGLRDSGREAAIGVALSEKL

SEQ ID NO: 505957 - protein, 328 aa, unidentified
MATQRCVGVDVGARELVVAIEGRSGTIAFANDAEGHGRLVRLLRKRRGPIRVGLEASGIYHLDVALALHRTPSIEVMVVNPAAARDFARALLARSKTDGVDAVVLLEFVRRMPFEAWQPPAQEILDLRALMRRIGALTVAQTQERNRRHAAGRCSELTDAITWDIEAHLEHLAQSIERLEAKALDLVRADPILRTRFAQLTSVRGIATLSALRILAELAVLPADMTARQWVAHAGLDPQHIESGTSLHKPTRISKTGNGHLRAALYMPAMVAIREETQVKAFAQKLVARGKKPIQAIVAVERKLLHSIYGMWRTNSMFDGSKFLAMRA

SEQ ID NO: 505958 - protein, 372 aa, unidentified
MNYNTVYVGMDVHKESFSLCAYTIETEKASHYQRTEADYKRVLNYLEFLRTIYGDDANFICGYEAGCLGYTLYHQLTTNNVKCIILAPTTMLEQRSKKRIKTDRRDAEIIAKCLAQHNYSPVHIPTAKDEETKEFLRMRDDHKLALKKVKQQILAFCLRHNYRYDGNSHWTAAHLKWLKGLTPEALYKEILDEYLLTYQTLSDKIERLDERIEELATQVEYKEAVKKLCCFIGVKTHTALSVLVEVGDFKRFASAQHFASYLGLVPGEDSSGDDQNRLGITKAGNRHIRLLLTEASQCYARGQVGFKSKELKTRQSGNTPEVIAYADKANERLRRRYYKMVLNKCKKHNVAKTAIARELACFMWGMMTDNIA

SEQ ID NO: 505959 - protein, 367 aa, unidentified
MKKVSTTLAKQSRKNSQQKLTVGLDLGDRNSWYCVLDEAGQIQLEQRVRTTAKGLGEVFTAMPCSRVALETGTHSPWISRLLRELGHEVIVANARKVRLIGESRKKDDRLDAQTLARLARIDPELLCPVKHRSAKAQADLMMIRARAGLVRVRTGLVNTARGLAKSYGERLRGCNVRNMNAEKAEGLSPELQAALQPLLAALESVSERITEYNERIEKLAQARYPQVAVLKQVKGVGTLIALTFLLTLEDPHRFSKSRDVGGYLGLQPGRRNSGQSEPQMHISKEGDPYLRTLLVQGAQHILGPFGVDCDLRRWGLKLAERGGRNGKKRAIVATARKLAVLLHHLWVSGEVYEPLHNSCRVAVTAAA

SEQ ID NO: 505960 - protein, 358 aa, unidentified
MRIIGCDLHARQQTIAMLDTDTGELEEKTLEHEGETVREFYSALRGPILVGIEATGSMQWFLELMEELGIECRVGHPAKIRKAETRKQKHDRRDARLLLTLLAENRFPTIWMPSTEQRDLRTLLRHRHQWVRMRSRVQHTLQSMALNHGLRRGRSLWSQAGQGELRALPLAPHASERRKALMTLYPHLQESIDELDRQVSEQTQQRTDARRLMTHPGVGPVTALATEVFLGDPKRFSDGKALASYIGMIPSEHSSGRRQRLGAMSKQGNALLRYLWCEAAMHAVERDPELKRFYRRKLMQKGLGKARVAAARKLGIRLWIMMRDEIDYQEFCRRGKARQESGSVRAGMPDRNSGPAEQ

SEQ ID NO: 505961 - protein, 455 aa, unidentified
MAKKGKKNTPSPENMPILHPHAAGSDVGAEEHWGCVPADRDAQPVQPFSAFTCDLHRLADWRTACRITTVVMESTGVYWIPLFQILEVRGFEVALVNARHVKNVPGRPKTDRFDCRWLHKLHTYGLLAPSLRPPEDICQLRSLLRHRDNLLRMTVKHIQHMQQSLDQMNLHLHHVMSDVTGVTGMRILRAIVAGERDPQTFAQYRDYRLQSNEDTIAKALEGDYRADHVFTLTQSLALYDFTQQHIAACDQEIERVLATFDSLVAPEEHPLPPPTTPHRRPPRNEPAFDLRTHLYRITGVDLTQVPGWQTPTSHIVLAEVGLNMHKWPTDKHFASWLGLCPDNQISGGKVLSTGSRRVQNRASRALRMAAQSLRTSPSYLGAFFRRMRSKLGPAKATTATAHKLAKIIYHMLKEKAPYRARSAEDYLHKDHERQLRQLRKQAQYLGFDVVPQTNH

SEQ ID NO: 505962 - protein, 405 aa, unidentified
MMNAVGIDVSKGKSTVTVLQPGGIFIHKPYDVSHKSSDLHRFTQYIGSLEGDTRAVLECTGRYHEPILHALSDAGIFVSAVNPHLIKNYGNNSLRKVKTDPADSTKIARYTLDNWTELREYTGMDNTRTQLKTLNSQFDFFMKQRVAAKNNLIALLDQTYPGVDKLFSSPVKLDGTEKWVNYAYSFWHVDCVRKAGIKAFTERYKAFCKRYGYNFQKDKPQELFDGSKELIAVLPKEPVYKELIQDSIQQLNLASKHVEELRAEMNRLASTLPEYETVMGMYGVGPTYGPQLIAEIGDVSRFPRRESLTAYAGVDPGKNDSGKRVSKSVHASKCGPSRLRKTLFQIMSTILQLGDNDDPVYQFLDKKRSEGKDYLVYMTAGANKFLRIYYGKVKECLREQQQTTE

SEQ ID NO: 505963 - protein, 403 aa, unidentified
MNAVGIDVAKGKSVVSILRPYGEVISSPFELCHTSSAIDDFIHSLSNLEGEVRIVLEYIGRYHEPIARWLSDADFYVSVVNPKLIKDFGNNSLRKVKSDKKDALKIARYALDNWNDLRQYCFMDKTRDQLKTMNRQFDFYMKHKTALKNNLIALLDQTFPGANTFFTSPVRKDGSQKWVDFVASFWHVDCVRKVSLSVFTERYRKFCVRKGYDFHPDKPAQIFEASKELIALLPKDKMTKNLIMQAIEQLNTLSRTIEQLRLQMDQTAAQLPEYPVVMAMKGVGPSLGPQIMAEIGDVRRFSRRGALTAFAGVDPGVNQSSTYNQKSVRTSKRGSAQLRKSLFQVMDVLVKTSPENDPVYAFLSKKRAEGKPYYVYMTAGANKFLRIYYGRVKEYLASLSEEE

SEQ ID NO: 505964 - protein, 316 aa, unidentified
MLYVGIDVAKNKHDVTALNVPGKTVLKPLTFSNNKAGFELLDLSLRQLNQDCLIALEDTGHYAFNLLNFLHEQGYKVYTYTPLLIKEFAKSLSLRKTKTDKKDAHGIALKLLSDPNREQFQHDNRQVELKILARHIHRLKKKQSDWKVQYTRCLDIIFPELDKIVGKHSEYTYQLLTCYPNPQKRLEAGFDKLIEIKRLTASKIQDILSVAPRSIGTTSPAREFEIIENIKHYKMLIDKAEKCVNDLMAEFNSVITTVTGIGNRLGAVILAEIQNIHAFDNPAQLQAFAGLDSSIYQSGQIDLAGRMVKRGSPHLR

SEQ ID NO: 505965 - protein, 273 aa, unidentified
MMMTIGDDSHKRTHTFVVVDELGRQVDEKTVRATSDGHLDAIGWAAQWPERRWALEDCRQVTRRLEQDLVRSGESVVRVPAKLGADMRRGAREPGKSDPIDASAVARAALREPDLPVARLDGPEREMRLLVDHREDLVGERTRMQSRLRWHMHELIPEHVVQLRSLDRFHVLDDLERRFVAIGGPVADIAAELTTRIRELTIRINELYREITSIVTSLAPSLLALEGCGALSAAKIVAETAGADRFRSRAAYARWNGTAPIPVWTANPRFRLS

SEQ ID NO: 505966 - protein, 352 aa, unidentified
MDYYAGIDVSLEYSSVCVVEASGKIVREGKVASEAEALIGWFAGLGHGLTRIGLEAGPLSQWLYAKLKEAGFAVELLETRHVRDAFKAMPVKSDRNDARGIAQLMRLGWFRPVHCKSLPAQEVRALLTARKLVQSKLLDIENSLRGILRGFGLKVGKTTAGKFAERIRALVAGHPMLEKIAKTLLSVRQVLLQEFNSLDKLVRETARTSVTARLLMSTPSVGPIVALTYASAIDDPARFKSSKQVGAHVGLTPKKYQSGEIDVSGRIRKIGDAAVREALYQSAHIMLTKPLAGCSQLKGWAMRIARRAGMRKAKVALARKLAVIMHRMLADGKTFNPNAKAEVKSMPKALAA

SEQ ID NO: 505967 - protein, 339 aa, unidentified
MKVSTLGIDLAKNVFQLHGVGCNGQTVLKKKLTRDKFLPFLMQLEPCLIGMEACASSHHFARVLRQYGHEVKLIPPQYVKPYVKTNKTDAADAEAICEAVARPNMRFVQIKTAEQQAILVLHTERNILIRERTACANSMRAILAEFGIIMPRTLSQLYKRIPEILEEYDNELSPFVRCSVARQLEHLQGVEDQITLIEQELSRWAKTQPACQRVMKVPGVGLMTATYLVASVGNGQQFHSAKQFAAWLGLVPREFSSGGKQRLGRISKRGDRYFRYLLVHGARAVAAVIERHKDNMPWLYRLLNKKAYNVAVVAQANKTARILWSMLVHHTEYRTLSAV

SEQ ID NO: 505968 - protein, 412 aa, unidentified
MQTLIERGCGLDVHQATVVACLLMVRRDGKVQKQIRTFGTTTRELVGLREWLLSEGCTHVAMESTGVYWKPIYAILEGALEIVVANAQHIKKVPGRKTDVKDAEWIADLLCHGLLRSSFVPPKPIRELRDLMRYRRKLVESQAAERNRLLKVLETANIKLANVATDVFGMSGRLMLRALIAGKATPQEMAELAKGLLRKKIPELELALEGKLEQHHRFLLELQLQRLEAAEKDLAALEQRIRQKLEPYAAQLALLDEIPGVDWTLAAVIIAELGVDMSVFGSVSQLASWAGVCPGNNESAGKRKSSRIPSGNVYLKSGLVEAANAAGRAKGTYLRDKFFRLKARRGYKRAVVAIAHKILVAIYHMLSQQVSYNDLGDLYLDKLNKNHLTRNLVHRLERLGYAVTLTLQQKAA

SEQ ID NO: 505969 - protein, 367 aa, unidentified
MDETITYVGLDVHKETIAVALADGGGRGDARAFGEIANTPTALARMLAKLSQPGRTLKFCYEAGPCGYGIQRQLSAAGHDCVVVAPSLIPKKPGDRIKTDRRDASNLARLHRAGELSAVWIPDPAHEAMRDLVRARLAAVRSLRPARQQLSGFLLRHGFHYSRPAWTQMHRRWLAGLCFEQPIHHIVLEDHIATIEAATDRRDRLTMQIEIMLPDWSLAPVVLALQSLRGMALVTAATMIAELGDISRFTNPRQLMAYLGLVPSEHSSGGTRRQGGITKAGNTTARRMLIEAAWSYRFPAKISREQLLRQEQLPKPIRDMAWKAQVRLCSRYRKLTKAGKPATTVTTAIARELSGFVWSIACQVSLR

SEQ ID NO: 505970 - protein, 373 aa, unidentified
MPRYSTAFGMDVHLRSTTVCALDAETGEAVTRRFRGNPWGEVAEWMSGFPGPSLAAYESGYLGFAPQRELSGLGVDCVVAAVSRVPRSAADLSSKNDRNDAARMAKAILSHDVTPVWVPSPEIEGLRDLAAAHDAATARLAAAKQRLLAFLARRGYAYGGTTPAGNPRRYWTYDFLRWLDGIHPADDGGIRALAALRSEVEAAAETRDDLLAEYRAAVAAGPLSAEVEALQSIKGCGFALAAAFASEVGDFSRFRSGRQVTAYFGLAPKQRSSADSVRLGGISGAGNALVRRLAVEGSWSYVQASHQPKLMPKGSGVPLGVRMHGRKGSERLLRRREEMLARGMPQAKANAATAAELVRWLWALGAMCREATE

SEQ ID NO: 505971 - protein, 341 aa, unidentified
MNGSKNVVGIDIAKRVFQLHSIDMETGEIVSLQLKREKFLEHFANLQTCLIGMEACGGAQHWARKFRAMGHQVKLLPGKAVKGFVTGNKNDRHDARAIWTAVQQPHVKAVAIKTEEQQAMLALHRMRSQLVKFRTAQINGLRGLLTEYGEVMPQGKAGVRKGITDALARMADRLPAMVIDTLREQWARISKMDEEIATIEQRIKLWLKNNEACKRIAEIPGVGPLTATAAVAIMGDAKTFKSGREFAAFAGLVPRQTGTGGRIKLLGISKRGDTYLRTLLIHGARAVLTTAKEPGPWASELRQRRPLNVAIVALANKMARTIWAMLAHERTYQREFVSQPV

SEQ ID NO: 505972 - protein, 353 aa, unidentified
MSKMRKTIIEDKRIFVGLEDSKRTWKVCVRCEGMIVHEVSMAAKYPNVQGYLKDRYPGCDIQVMYETGFSGFNLHDRLRADGIGCVVTPAHTVRQAKVSRVKTDRTDARLLAKNLEAGTYVMCRVPDRQQREDRQVSRTVSQIQRHLVSVKNQIRRFLGFHGLDEALPAGRWRDHNYHDLNTASLPHSLKVSLEALLTILVTLERLRAEMKKELKSLSQQPRYHGSALAKQSCPGIGPLSAIRFTLEWGPMDRFGSGEQIASFVGLTAAEDSSGERIQRGHITGQGSGLVRAWLIQCAWRAIRLDPVLLHKYRAVWSSSGSKKKAIVAVARKLIVRMRTVELSGCPYVIGVER

SEQ ID NO: 505973 - protein, 338 aa, unidentified
MYYTGIDLHKETSFITTVDEKGKTVAKANLPNNRDLILKYFGDLGGETQIVIESTASWYWLYDLLTGGGFQVMISNPAKTKAIASAKIKNDKMDSHMLAQLLRSDLVAPVHVSNLKTRELKELLRHRARLVRDTTRMKNRIHHLLLKNNHQVPLSDLFGARGLDYLSRLSLPDYHKPQLQSYLTLYGQLLEQIEPLSKTIHQRAKEDPRAKLLMSIPGIGPLIAMTLVAEIEDISRFPSCRHLASYAGLVPSLEASGGKERKGRITKQGSPYLRTALIEAAQVASRLRGRRLNFFFRKRIVKSGYKKAIVATAHKLLELAFYIWKNETPYQEVSLTVA

SEQ ID NO: 505974 - protein, 349 aa, unidentified
MGEVSTIGVDIAKSVFQIHGVDAGGTVVIRRRVGRARVLEFFADLPPCLVGMEACATAHQWARELKKLGHDTRLMPPTYVKAYVKRGKNDAADAAAICEAVTRPSMRFVPIKNVEQQSVLMLHRTRDLLIRQRTQLINALRAHLAELGLVAAKGREGVHQLVTVVTECGGERLPSNARFACQAIVTQLHAVQIEISGLDKRITQTHRVNADSKRLDTIPGFGVILSTAVVATMTDPKAFKTGREFAAWIGLVPRQNSTGGKDRLGSISKQGDRYLRRLLVVAATSVINSARARPYKYPWVIELLGRRPTKVVAVALANKMARIAWAVLAKGEPYRAPTCSSNAVVPAAA

SEQ ID NO: 505975 - protein, 363 aa, unidentified
MTESSDYESVQVFIGVDVGKDTHHAVAVNRSGKRLFDKALPNDENKLRSLISDLKQHGQILLVVDQPATIGALPVAVARSEGVLVGYLPGLAMRRIADLHAGEAKTDARDAAIIAEAARTPPHALRTLKLADEHIAELSILCGFDDDLAAQTTQASNRICGLLTQIHPALERVLGPRLDHPAVLDLLQRYPSPEKLASLGEKKLATQLGKLAPRLGKRLAADITKALTEQTVVVPGTNAAVVVLPRLALQLITLRKQREEVALEVEQRVLAHPLYPVLTSMPGVGVRTAARLLTEFACRAFASAAHLAAYAGLAPVTRRSGSSIRGEHLSRRGNKTLKRALFLSAFAALRDPISRAYYTRKMS

SEQ ID NO: 505976 - protein, 401 aa, unidentified
MNAVGIDVSKGKSMVCVMRPFGEVVLEPFEVLHTAQNLHDLAGKLKALDGETRVVMEATGNYHKPVAFVLHDAGLFVSVVNPVLIHDYDNNSLRRVKTDRKDAVKIANYTLDKWTRLRQYLPEDDTRLALKNCYRQYQQAVAVRTMLKNNLISSLDLTFPDANKLFSSPAKSNGCEKWVDFIGDFWHSECVSSLSSDAFAKKYLKWCQKHGYNFTRSKSDTIYACAVNAASLPKSPTSKLLIQQQVAQLKAVSQSVAAFQQEMLRLSQQLPEFDTVMEMYGVGPSLGPQLMAEIGDVRRFSSKKSLIAFAGIEPQPNDSGKIVGNDSGISKVGSAVLRRTLFLIMTVILKTQPQDEPVFQFMNKKRSEGKPYKVYLMASANKFLRIYYARVKAVMDSKHSK

SEQ ID NO: 505977 - protein, 440 aa, unidentified
MNDLRVLDAHAAFVDVGSEQMFVSIAGGSPEVFGTVTSQLHALRDWLLTHQVRSVAMEATGVYWLPLYAVLEAAGLEVLMVNGRQMRNLPGRKTDMQDCQWGATLHAHGLLHAGFVPPAHIRRLQDYLRLRADHITSAAAHVQHMQKALERMNVKLHHVISSLTGTSGLAVVRAILRGERNPEQLLALCDTQIQRAKAQRVKESLRGTWAEEHLFALRQALASWEHYQNQIAECDRQIEALLPASADDHTPPNTAVHTRPRKRAGPNAPEIPQLSEILTQMCGGQDLTRLPAHTEYSVLQIVSEVGTDLTKWATEKHFTAWTGLAPGSHQSGKRKGSVKRQRNRAGRMFCVMARALARSKDIALGGFYRRMAARRGGLIANIALARKLAVLFWRVMVKGTDYVEHGLAQYEAKVLQTKQRALRRLARQLGQQLVPSPVPT

SEQ ID NO: 505978 - protein, 342 aa, unidentified
METTRHVGIDLHRNRFTCCVRLENGRNYLSVWKLEDLPGFVKKLRPSDEVAVEVTGNTRLFYNAVAPHVARVVAVDPNQFRVISHSVKKTDPNDARNLALYLSKGLLPEVRMKEKTQAQIASLTQTRDTLVKLRTVLKNKINNILSAHGINLEREALSTEKKLDEVLAMEFDPMIRTELKVIVEQIRSLNDSIGELEKTITAEGQKLPGHKNLTSIKGIGPLTGSILLSVIGDIHDFADEGKLAAYFGIVPRVSNSNETERTGRITKRGSKLGRTALVQCALIAQRFSPYLKNFYEKTKARRGTGKAIIALARKLLGIVYRTLKNKWVFADFPNFVLAKESK

SEQ ID NO: 505979 - protein, 330 aa, unidentified
MKTAGIDVAHKTLALAIRAGEKTGKMQEFANSASGHQAVIKALKGAGVERVCLEATGSYHLDLALALDAAGVTLMVVNPKAAKRFAEALMTRTKTDAVDAAMLCEFAQRMPFEPWQRPDDQALGLRACARRLAALNDARTQAKNQLHALSQTASTPVIVLEDVRLSIAQCEAQIEHLRTWAGAFIQGDAHLKETFQLLTGVTGIATASAIQLMGELLVLPEDMRAKQWVAMAGLDPRQSVSGTSVNKRPRLSKAGNRYLRLALYMPALSAAQHERHVKGYYRHLIEERGLKPIQAVCAVMRKLLHAIHGMLKSRQPFDGRRFYALAEASA

SEQ ID NO: 505980 - protein, 365 aa, unidentified
MYYTGIDLHRRSIALCTVDENGTVVEHRTMKTRPELVTAYFQQWPDHEHRAVVECTTGWYWLCDLLRSLGITIVLAHAKYLKAISYAKVKTDAVDAETLAQLLRMGYIPEAHQLPPEYRAMRDLLRQRMVMEHKRTNIIQRISSILAQFNVTRIEVSPSVPGFATFLGSCSLPTEYRMTLLMYHQQCIQATEHRKQLEKYFKGKLRPTPALQLLMSIPGLGEITGAVVAMESGDMHRFADHKHFESYCRLVPGSKDSGGKHAHRSGSKDGNKYLKYAFTEAAIKAMMYYPEIKQFAQRLEERSSKAIARTVVAKELAKIAYYVLTRKQEFKTFKGITIEKIRDWPRARKPVRITEEEPASAMSVV

SEQ ID NO: 505981 - protein, 343 aa, unidentified
MTDILKQVAGIDVAQKELVVSLGRIGHSLNTDVYRCKAFANKLSGFKAMIAWINRYTEEQVPVRYVMEATGVYHESLAYYLSDHGLESSIVLPNKISNYFRTLDEKSITDKTASAAICQFGLERKLEVWKKPKRIFKTLKQLTRERDQLISERTLLKNQLHAERAEAEPSEDSVTRMKARIALINKQEAEIRSELAATIKKDPEITGQVNNIISIPGIGKLTAAIILAETNGFDLIRNKRQLVSYSGLDVRVKDSGTSVKSKPRISKKGNRHLRKAMHMPALTAISSDQRARAVFIRLVSKHGIKMKAVVAVQRKLLEMAYTIWKTGKPYDREYLQRANMISV

SEQ ID NO: 505982 - protein, 369 aa, unidentified
MNDITYVGLDVHKATVCVAIAERGRGGEVREVGVFENRPDVLRKMVDRLGKHRRRLNFCYEAGPCGYGLHRLLTGLGHDCVVVAPSLIPMKAGDRVKTDRRDALMLAKLHRAGELTPIWIPDAAHEAMRDLVRARATAVRALSKARQHLQGFLLRHDRIYHGARAWTLAYRRWLTTVRFDHPAQQIVLQDYIHAVEDAESRRDRLTRQIEELMPSWSMAPVTAALQAMRGVALVVAVTVVAEVGDFRRFTNARQLMAYLGLVPSEHSSGSTVRRGGITKAGNALARRVLIEGAWTYRMSARVSRKLHDRLEPLSAAIRDIAWKAQVRLCARYRRLVAIGKPKVVVTTAIAREMVGFIWAIARVAQPELI

SEQ ID NO: 505983 - protein, 416 aa, unidentified
MDASGVPRRPEHTLLQTGVVMESPVYLGVDIGKSGHYAVAVDAAGKPIHQTSVSNDELALRRLVDWAKAHQATVVVDQPGGAAGLLLKLCWQVDVRIGYLHGLAMARAREFYAGKSKTDPKDAFVLADVARAHPNRVVWLEPNSEALAHLELLCGYDADLRSDANRLSNRLRELLVSHWPALERAFGERLDSRGVLAVLQQYPSGPALKQAGVAGLIAALKAQRVHRAEAFAKQLHEAAMAQTVTITGSATAARLISELAMQLAAVRVRRAELEKEIEADFFALPEAAILRSLPGIGARLGARIAVEIGSISRFRTPGHLAAYAGLGPTPWKSGTSINANRPSRFGNHRLKNALFLAAFASLRHAPSRTYYDRKRAEGKRHNQAVLCLARRRVDVLHAMLSQGALYRPPTPLAAAA

SEQ ID NO: 505984 - protein, 361 aa, unidentified
MDVGQTVADHGVVVGGVDTHKDLHVAAVVDERDRVLESRCFATTRHGYKQMLTWMRSFGQLRRIGVEATGTYGAGLLRYMQNAGVEVLEVTTPDTHDRRKRGKTDDLDAQNAAHAAFAGRRTVTPKRRDGMVESLRVLKACRKTAVAARRVALQMIHNTIVCAPDDLRETLRKMTRMQLIRTLAAWRPDLTDYRSVVSAYRITLKSLGRRYLELHDEIADLDTMIVAIVDELAPALVARNSIGHGSAAQLLLTAGDNVERLQSEASFAALCGVSPVPASSGKTIRHRLNRGGDRAANSALHIIAIGRLRTDPRTKAYIAKRVAEGHSKLEAIRCLKRYIAREVFSLISQRKREINQGRNAA

SEQ ID NO: 505985 - protein, 458 aa, unidentified
MKIKSIYPARNSSQLREVLGKYSPGELLYAPIDVAKYNHKACAVNFFGDILTPAFEFSNNAHGVKFFISKITEAARNAKAKKIFIGLEATGHYHQNLTLHLKSLGYEVAVINPFDSWKERLNKSSKTDKIDLGSIAKSLISRKFSSSTVPQGVYYNLQRATRTRRKFVNRRTSSKNIITGLLDNLFPGLWDKEDTIFSDRWGKASLSVLEHYPTPQMVLRLGEKRLTRFLKKGTTKLGEKTARKIISAAKVALTRSPYEQTMDILALRSHLQAYRLYEEIIFHLEKEIAYLLVQTPGTYLLSVPGISVTYAAEVTAEIGDISRFAYANQIISLAGTCSKKDQTGEHDPQNLPISKKGNKFLRTVLNQAGLSLNTWCPDFNAYYSRKVEEKKGRCGIARTATGNKFARLAFALMKHESLYHPHSFNTLVQDPGNYYLLSLWRNTEEVKGFLFREDPSSE

SEQ ID NO: 505986 - protein, 348 aa, unidentified
MLADELDYVVGVDTHRDEHVLAVVVAPAGAVVARRAVAANARGYAQALRFADAYAGGRRVWAVEGVGHYGAALARYLSGRGETVLEAGRSPRGERRLQGKDDGLDAVRAARAALGHELASPRAGQRREALRVLLVARRSAVDVRREALVQLRSVIVTSPDRLRDELRRLPVQRLLDRCSSFRRSKTATPDELAVRLVLRTLARRIEAVTVEAAELEREILAHVRALTPQLLDEPGVGPIVAAQLIVAWSHHGRVRSEAAFARLAGVAPVPASSGQTTRHRLSRGGDRQLNCALHTVILHRRQHDPATKEYIARRVAEGKSRRDATRLLKRYLARHLYRVLDQRTPLIA

SEQ ID NO: 505987 - protein, 420 aa, unidentified
MSFKIFRFNCCGLDVHKTWIYACIGITDSNGRTDYKQARFSSFSKGLKELCDWLAKYNCSEVCMESTGKYWIPVFNVLEKANNSVILAHPKYTKPQKGNKTDRKDAKWICDLFMCEMIKPSFIPPADIRHLRDLVRYRFKLTCMITGEKNRAQNCLTVSNLKLDDVFSDVFGKSSRSITEYMLAHPGEIFDVAPFVDSRCKTPMEEIQAAVDGAISPEQAIKLRQCLNHIDELEKHLEEIEREILRLSDKYQAALDLIRTVPGFDKNPMTAIQILSEIGGDMSVFPSAKHLVSWAGCCPRNDQSNKRIKSTRISRAGNYIKPILVQVAYGLLRSKKHPEITGRYKRIKSHRGHKKAIIAICRMLLTAIWHILSDLKPYTAEGFLESRPVNKAKVLTTSQALNLLKQRGYTIKDDIVPAMN

SEQ ID NO: 505988 - protein, 334 aa, unidentified
MWHVGIDLHRMTVVLAAVNDAGEAMNPITIPCSDTAAIVSTVKALGSFRAVIEACGTYRWLYDLLRPHGTVLLAHPLRLRAMIQRRTKTDKLDAQLLANLLRINQIPLAYIPPEPYQQLRDLTRCRARLGRQLAEVKIQLRALLARQNRESPYRTPFGPRGLGWFRGQDFGPIESMVRDELLERFRHYAKQMTLFDKRLEEMRQAFPQVESLLDIHGIGLYSALLIVAEIGEVERFHTAKQVGAYSGLTSRVHQSGGHCYQGSITRQGSPWLRWVLVQAAMKAVHKDAALKNFYSRIRKRSSAKIGRVAAARKLAEICWKRLRQWQREHARQAA

SEQ ID NO: 505989 - protein, 415 aa, unidentified
MDWRLELLLVGDDWAEEHHDVELQDETGRRLGRAKLPEGVAGVARLHAMIGEHLGEHGEPAQVVIGIETDRGPWVQALIAAGYQIYAINPLQVARYRERHGVSGAKSDTGDAHTLADMVRTDRHQLRPVAGDSDLSEAAKVVTRAHKTLIWERTRHMLRLRSSLREFFPAALVAFDDLTAPDALELLAKAPDPASAARLSSAKITAALKRARRHHVAAKAEAIAAALGDEHLGQPAVVTAAYAAAARAQVAILTTLNAEIETMQEQVEAHFGKHPDAEIYLSQPGLGLVLGARVLAEFGDDKTRYADARARKNYAGTSPITRQSGKKKVVLARYVHNDRLVDALGLQAFTSLRASPGARVYYDQLRARGIGHRAALRQLGNRLVGVLHRCLKSSTNYDEATAWPKHAQQAEQAAA

SEQ ID NO: 505990 - protein, 346 aa, unidentified
MKYFAGLDVSLNEISMCVVDEEGRVVFRRSLPFCALAVRDALEEQEVAPQRIVHESGQISIWLQRQLEDLGLPAICIDARSAHKVLSAKLNKSDRSDAEGLAQLARIGWFTAVHVRSIDADRLRTIIGARDRFVRLRMEIEAHMRGILKTFGIRLTAIGNGRQRQRFRDQLSVARQSDPALAVIIDQVLPSHEAVCSAAAALEDEIAAIAKRHDLSRRLMTIPGVGPVVALSFLSLIENTERFPKTTNVGAFLGLTPRRYQSGEVDYSGRISKRGNAAMRRLLYEAASTLISRVKRYSPLKSWAVRLAARRGFKKATVATARKLAVLMLTLWKTGEEFHWTKEAAT

SEQ ID NO: 505991 - protein, 333 aa, unidentified
MEIVTEEEVYYERCAGIDVHKKLLVVCLRIGRKSEIREFGTLTHEIRGMAAWLKDNGCQMAAMESTGSYWKPLYNIFEQEGLPAMVCNAYHIKNVPGRKTDVNDAQWIARCLSQGLLKPSFVPDRQQRELRDMTRFRKSQIEERARNINRLQKFLEGANIKMGSWLSDVEGKSATQLLELVIGKPDFTVDDVAVRMSKNMKSSPDEIFLALEGSMTPTQREFFEHVMNIIREQTAQIEFTDGMIQRMLDDNYKAAVAALDVIPGIGKVSAEQIIAEIGIDMSRFNGPDKLCKWAGVCPGNNESAGKRKSGKTPPGNKTLKSTLAQCAKSAKNK

SEQ ID NO: 505992 - protein, 317 aa, unidentified
MPRVDVPCFVGIEGAKAQVDIALRPTGARWAVPNDARGIAPLVDRLQALQPTLRVREATGGLEPAATAAVAAAGLPVVVVNPRPARDFARATGPWAKTEALEARALAHFADVLRPTPRPLPAAQTQAWRALLGRRQHLIVMRTAAQNRLAGASERLTQDITAHSTWLKADLATRDNDLETLLRASPLWRENDDLLQSATGMGPVRAHTLRRELPELGTLTRQQMAALGGVAPLHCDSGTRRGKRTIWGGGAHVRTVFSMRTLVATRFNPQITAFYERRLAAGKVKKVALTACMHKFLTILNAMLKHRTPWQPQEVQS

SEQ ID NO: 505993 - protein, 327 aa, unidentified
MTPVSVGIDVSKRQLVIAVDPTGEQWTSETTTAAIAMLVARLQPLRPRIIVLEATGGYERALVAAIAAADLPVAVINPRQARAFAQALGRTAKTDAIDAGILAAFGGRLEVTPRPVADPATQALAALMARRRQLLEMIGMERARLEHAPTTGRLTRELRRHIRWLERRVEDVDDEIGTSIAAHPTWRAQEELLRSVPGIGSTTARTLLAEVPELGRLDRRAIAALVGVAPMNCDSGEHRGQRHIWGGRASVRTALYMAALVASRHNARLRATYRQLRDRGKPAKVALVAIMRKLLTIVNAMLKHQTHWMQVASTPDSQAGRARAATV

SEQ ID NO: 505994 - protein, 392 aa, unidentified
MYIVGIDIGKNHHEASIVSPEGKQIGHSLRFATTHKGADSLMSFIFNNIGNSSCIFGMEATGHYWYPIYSFLKARGYTIYVINPIQSDSLRKMYIRQTKNDSIDSFLIAEVIRFGQFTTTSMADENILAMRQLCRYRDSVISSRTEIKLRISTIMEQIFPEYEKQFSSLWVSTSMGILEKYLTPENIENAPIDELFEIIKDKSHNRLTKAKAISIKEAAADTFGIKIAQDAFSFQLKQLIDRMNFLDKQIEALDIEIMKYYEQFDCYLHTIPGIGIIGAATILAEIGDISRFKNSSALVAFAGIDPTVRQSGEFNSTHNHMSKRGSPYLRHAIFLAATTCSFHNSPLNAYYKKKRDQGKHHLTATGAVARKLTTVIYAVLRDSKPYEPKKFC

SEQ ID NO: 505995 - protein, 464 aa, unidentified
MHLGGFSPRLFNVDELPKRTAVCRITEVKSTSSKVRIPTRAIPSLHNFRRDTMQDILTVAMGLDVHRDIIVACLIKGQIGLEPETEIRTFSTLIPEMQKLRDWILETDCRNVAMESTGIYWQPIYEMLESCFDSEINILVVNARHMKNVPGRKTDMRDAEWIATLLRAGLLKGSFIPSKPIRELRHLTRYRKSVVHDITAQKNRIDKFLQSSGFRFTAFLSDAFGASGRNIIRHLIENGRIDRAALDKCLKTKTRNRIDEILVALNGSLSVHQRSFLRMIFEHLLALETHKTAVEYAITEEILKHEETMNLLCSIPGIDITAAASIIAEIGTDMRSFPDAQHICSWAGLSPGNNESAGKRKSTHINKGNPYLKSMLCEVAWIISGKRTLYLSGWYWRVKQKKGAKRATIALARKLLSLIYTMLKTGVPYNEECFEERRKHSERKRAGRMINELQKLGYMVVVPE

SEQ ID NO: 505996 - protein, 341 aa, unidentified
MNAIYYIGLDIHKKTIAYCIKRIDGELIRQGTISAERKALQQWQSELPGPWYGAMEATIFTGWVYDFLKPYAVDLKVAHPAMLKAITAAKKKNDRADAEKIADLLRVNLLPECHIMPEELRELRRILRYRNMIVRTAVKMKNKMSGLLMEVGAQYSKKKLYGKKYFSALLERVEDVPDSVKELLKLSRSGFDLYDDIQKKLVNALLKNKQIQERVQRLMSIPGVGEVTALTWVLEIGVLDRFSSSRHAISYCGLCSAQHESAGKEQRGPISKQRNKHLQTTLIEAAKLAPRWNEQLAILHEKELARGNRNRATLAVARKLVEFMLAVDRRETDFQLMKEAA

SEQ ID NO: 505997 - protein, 341 aa, unidentified
MKQPITKNYLGIDVSKPWFDVSLMPVIDYVKQPIITKRFDNSTSGMNAFKSWLKTSGVTLDSNSLLVIENTGVYHRLLWSFCSKHNLPLHIGNAAHIKWSLGITRGKNDVIDSVRLCQYCCKQSDELKASPALNPVFMKLKDLMSSRSRLVTQLHSTRNYIKELQCSNDKILLATLEKAHKAAIEGIKKSIVQIEELINKIIQEDPAIYKNYLLIKSVPGIGHLTAVYIICCTNNFAAKVTGKQLASYAGVVPFEHSSGISVKGRNRVHKMANKELKKMLHLCALTAIKYYPEFKDYFNRKKAAGKNGMLVLNAIRNKLILRVVSVVNKQQPYVNNTSIAA

SEQ ID NO: 505998 - protein, 313 aa, unidentified
MIFNNFLGCDVAKNKIDIAFHNKNQTFSIQNNVIGIKKFIKEYKFLLQDSFVVIDHTGGYEKLLTKMILSHVKAVHISDGRCVKSFIRSFGIRAKTDKIDAKMLALYGQDRHEKLRIYNETDEELINLQKLTQRYSDLSEMQQKEKNRFKAPEYDKASCKRSISFFQKEIDKIEHKISELINKNGDLKKKAEACQKIKGVGEKTAFKLLALLPELGMLNRREIAALSGVAPYSFDSGQMQGRRHTRAGRKGVKEVLFMAGLVGTRYDPKLKKFYEELQSRGKAKKVALVACLRKIITEINWEVKQVINEKSTI

SEQ ID NO: 505999 - protein, 466 aa, unidentified
MRQDSTKVGGKPGLGGHGSADGLRRMKENAAGIDIGSQTHYVAVPPGRATPSVRRFGCLTPDLHEMAKWLAGCGIKTVAMESTGVYWIPVAQVLEQYSLEIVLADATHVKNVPGRKTDVSDCQWIQELHSYGLLRGAFRPDRALQVLRTYWRHREGLVQGCAQQIHLMHKALEQMNLQLHKVLSDVSGVSGMRIIRAILDGGRDGETLAKLCDRKVQASPETVAKSLTGDYRADHLFTLRQAVELYDIYQEKMAACDGEIQRQMATFAPKGDPKDLPPPRKGKKRGKRRKNQPHFDLRTEMYRMTGVDLTQIDAIDTLTAQTALCECGHDLKAFPSEKNFTSWMGLCPNNRITGGKVRRTRTRRVQNRLADALRVAAQSLHHSRTALGAFYRRMKARLGPAKAITATARKLACQIYRLLKYGQNYVDQGERAYEQKYREHLLRRVKRHAQQLGFDLVAVQTGEVVS

SEQ ID NO: 506000 - protein, 346 aa, unidentified
MLSKNDFNKNNLNTDNSPLILSSLIIGIDIAKSSFDISFLQNNSTFYARFCNHDDGFLDLSNYLTNHLTEHKITCLNIHFIMESTNIYWQALALWAYQAGFLVSVVNPAFIRAYAKSLGIRNKTDKQDAALLARYGRHENPPLWQPPSPIEDKMISLVRQRRHSKHKLTNELTRLETANYHTLSFIQSTISYWQTHIQKLDCVIWQTINSDVNLKVRARLLHSIPGIGKKSIPPLLALIGDGSRFASSKHLVSFVGLVPRAYQSGSSINKQTTIGHSGRPDIREVLYMPAVVVSFGRYKAFQPFVQRLLANGKCKKQVIVAVMRKLLAICHVVIKTGQPFNPSLHQ

SEQ ID NO: 506001 - protein, 310 aa, unidentified
MDIIAVGIDVSKDRLDVAVRPGGELFAVTRNASGVDRLIERMRALAPGIIALEATGGFETVVAASLAAASLPVVVVNPAQIRAFAKALGQRAKTDPIDAAVIAHFAEATKPQPRPLADEATQLLADLVARRRQIIEMIGAESQREKRIAVPRLRKSIRRVIGMLEKELAELDGEIDDNVRGSPAWREKEDLLASVPGVGPIISRTLIADLPELGTLSRKQIAALAGLAPFTRQSGQWKGRSFIGGGRKSVRTALFMGALVAMRHNPVLKAFFDRLTEAGKPKMVAIIAVARKLLTILNAIVRDKRPWQIA

SEQ ID NO: 506002 - protein, 386 aa, unidentified
MPQPKNDLSRSLVALEQDKTVAAVVELSSRTWLVGEMVPGIEREPLKKLVPDQAALLTLLHRWRDEAIAAGHRIARVVVAFEAGRDGFWLARWLRSRGIEAYVIHPTSIPVSRERRRAKTDRLDIELLKRSLLGWLRGEKKHCTMAAIPSLKEEDAKRPTREREQLVGKRTGIVNRMKAALVRLGIRGFNPKLRKAPERLLTLRTPEGCPIPLNTLAELQREMAHLRFIDEQINQIEQTRLEQLKQAPLQGSNAKVLHLQRVNGLGIETADMLTHEVLQRDLRDQRAVARYAGLTGSPDESRARRREKGLTKAGNARVRRGMIQFAWRFLIHQKDSALAQWYHASVIAGKKRKTMIVALARKLLIALWRFATTGEVPQGVVLRPAA

SEQ ID NO: 506003 - protein, 337 aa, unidentified
MIVIGVDVHKQSLTAIAVDEAGRALAESTAPTACELLAWASSLPGERSWAVEDCRQLTRALERALLEAGESLVRVPPKLMAPQRRAGRARGKSDPIDALAVARAALREPRLDHPRPGEQRLRELKLLVDHRDDLIDERRRGQQRLRWHLHELELEPAVPLGALDRGVWLDRLGRRLAGLEQSAQVRIARELVGRCRGLTRTILALDRELQTAAAQTAPALLALPGCGAVSAAKLLGEIGPIERFETDAQLARHAGVAPLEASSGKHRRHRLDRGGNRQLNCALHRIAITQARVHAPARAYLERKQGEGKSRREALRCLKRLLARTVYTTLKSEALLT

SEQ ID NO: 506004 - protein, 353 aa, unidentified
MVEFSKVEAQEVVGLDLGDRSSQICRMDRKTGAILEERRLSTTSAGVQRYFSTLAPQLIALESGTHSLWMTRLLKSLGHEVIVANASKVRAISSSRQKTDERDARCLAQLVRVDPQLLSPVQPRSQESQQAIAVVRAREGLVKARTMLVNQVRGVVKSFGFRLPSGSTAAFAHKAQQDKTLPSVLKETLEPLLRVITEMSEEIARFDKEVEALARRWPVTQRLRQIKGVGALTALVFVLTLGDPLRFARSRAVGAYLGLVPGSRNSGQSTPQMPITKQGDRMLRRLLVQASHYVLGPFGQDSDLRRFGVRLAERGGKSGKKRAVVAVARKLAVLLHRLWVSETDYEPLRKAAA

SEQ ID NO: 506005 - protein, 315 aa, unidentified
MTTKTQENFIGIDISKTQMDVAVWDQEETWEFRNEAEGRQELVEKAKELNPNLIVVEASGGIEQPLVAELYLEELPIAIVNPTRVRNFARSTGQFAKTDKLDARLIAHFAQAVRPPVRPLRTANQEHLHALVTRRRQIVQILTAEKNRRATTFSTLRERLQQHIDWLEAEVKALNEEIEQFIQDNPVWQEKAVIVRSVPGVGPVTASTLLAELPELGTRNRQQIAALVGVAPLNKDSGKMRGKRRVFGGRASVRRVLYMATLVATRTNPVIRSFYERLLARGKEKKVALTACMRKLLVILNAMVRNQKTWRPYLT

SEQ ID NO: 506006 - protein, 320 aa, unidentified
MSEPYYVGIDVSIDRLDVAIRPGGRGFCVTNDAAGWAELVARLPQGAIAAIGLEPSGGYERGIVRVLLAAGFSVRRINPNKLRQFARAAGALAKNDRIDARLIADYVAVIPTRVVERNPALEQLAETVTMRRQLCDEHIAVESQASHLEDALLQRIAKRRLTRIKADIVLLDKRLAELVAAQPDLVQRFRLLCSMPGVGATLADTLLALLPELGQIGRKQIAALVGLAPYAFDSGRFRGQRHIYGGRTAVRNTLYMPALAAFRFNPALRTFHHRLVAAGKKPKVAIVAVMRKMLTTLNAMLRDGNSWTDGHTGRHTVLAI

SEQ ID NO: 506007 - protein, 330 aa, unidentified
MKQYKYFFGVDVSKKTVDISLFDQHQTLHRQFINTTSGMEELKQWLQELNQSRSEVLFCMETTGLYCFPLTQFLADNGIDIWIEHAVQIKKSSSLNRGKNDKIDSRRIALYAAKNLDRLRLWKPMSTTLEKIKHLAGLRDRLVETKKRLLTPIKEIEEMGNIEMAKLLTKTVKHSLTAVDKDITNIEAKIIDIVNEDDNLKQLFRLITSVVGIGFVTAINLLIYTKGFTVLNETRKLACYCGVAPFEYSSGTSIRGKTKVHFMANRKLKCNLHMASLSAIKLDADLKTYYERKIAEGKNKMSVLNAVRNKLLARVIAVVNNKKEYVKKIA

SEQ ID NO: 506008 - protein, 314 aa, unidentified
MSEPTLFIGIDVSKASLDVAVHPTKEDWTVSNDPAGLQELLPRLQALQPQIIVLEATGGYETLLVAALLAGGLPVAVVNPRQVRDFAKSIGRLAKTDRIDAHVLARFATAVELKVRPLPDAQLQELSDLLARRRQVVEMLTAEKNRFKMARGPVQADIREHIAWLERKLDQLDDELRQRLRSSPVWREKEDLLRSVPGVGPVLSVTLLAELPELGQLDRKQIAALVGVAPLNRDSGQHQGKRMVWGGRAAVRSALYMGTLVATRHNPVIKRFYERLLAAGKARKVALVACMHKLLIILNAMIKHRTPWRCPSAT

SEQ ID NO: 506009 - protein, 347 aa, unidentified
MDQQCHYVGLDVSLETTSICVIDDAGAIIWRGKCRSDPDTITAIVRQHAPGAVRVGLETGQLSNWLTLSLRRRGVPVVCMDARHAKAALSLQINKTDANDAFGLAQVVRTGWYREVAVKSMDAHTLRMLLVARSRLVSQRQATANTIRGLLKTFGLVVARGSKGLFPVRVREQIAGNPALIAIIEPLLAVWHAIRDQVAMLDRQMLARARNDPVARRLMTIPGVGVVIALAYTAVIDDPARFRRSVSVGAYLGLTPRRYQSGEVDTTGHISKCGDSLLRGYLYEAAAVLLCRDGRASTLKSWGLGLAKRIGMRRAKVAVARKLAVIMHRIWSDHGEYRWTAIPPTAA

SEQ ID NO: 506010 - protein, 318 aa, unidentified
MGTVMNLNSSVYIGIDVSGSTLDVAIHDTTEHFSVDNETAAIDQLVQRLIALGPTLVVMEATGKLELAVLKALCQAGLPAVAVNPRQVRNFAKATGKRARTDRIDAFVIAHFAAVIKPVVRPLNDVQTEQLQALLLRRAQLIDMLVAEKARLERAHVAAKESLNDHIKWLKQQLTVADRDIDSFMRASPAWRQKEDLLRSVPGIGPGAAATLIAFMPQLGSLNRREIAALTGVAPFNCDSGKHIGKRRIQGGRAIVRRALYMACIPALRFNPVIRAFYDRLRKAGKPFKVAMTACIRKLIVTLNTMVHNSTPWRPSAD

SEQ ID NO: 506011 - protein, 344 aa, unidentified
MKINLLGIDLAKNVFQLCALNQANKILFNRSIRRAHLRSSIARLEPTTIAMEACSSAHYWGRAFEGMGHQVVLLPAHHVTPFVRGGKNDARDALAICEAAQRPGLHPVPIKSIEQQDIQLLHRLRQRQVQHSTALANQMRSLGREYGVIFPAGIHSLIARLPEVLEDGSNELSPVARYALADQHRCLLDVRAAMVTFMHQIEQLAAQHPAYIKLLPLPGIGPMIASAYIAAIGDGRQFKCGRQVSAWLGLVPRQYGTGGKIQLKNMTKNGDRYLRTLMIHGARSVITRGLKNRPELAQWVQPIIDRRGVNRAVVALANKLARISWVIVTTEEPFDMQQAFKPAV

SEQ ID NO: 506012 - protein, 411 aa, unidentified
MENVFACCAGLDIHQKSVEACVRRLEPAGQLHHQTRHWGTMTRDLLAMADWMAAQGVTHVAMESTGVYWKPIYNILESRFTVLLVNARHLKQVPGRKSDVRDCQWIAQLLQHGLLKGSFVPPRAQRELRDLTRHRAQLVEEKTRTVNRLHKVLEDGNIKLASVATDILGVSGRAMLEALMEGQEDPVKLADLAQRQLRGKIPELEKALEGHLTEHHRFMLRLLWKELGQQEELIAELDRKIEEQTRPFANEIERLDAVPGVDRRVAEVALAEVGSDMKPFPTHSHVASWAGMCPGNEESAGKRRRQRLTPGNRWLKRSLVQAAWAASHTKHTYLASQYRRLAGRRGRKRALVAVGHSMLVIFYHMLKDRTTYKDLGGDFFDRLEPERLTRYYVKRLEDLGHKVTLESSVPA

SEQ ID NO: 506013 - protein, 381 aa, unidentified
MTTTTTHTEYGNTAADILFMAFELSDKTWKLGFTTGPGQKPRERNVAARNQERVLEEIASAKRRFGLPETAPVVSCYEAGREGFWLHRFLLAHGMTNHVVDSSAIEVSRRQRRAKSDGLDVRKLLSMLMRYHHGEQKVWQVVKVPSMEAEDQRHLHRDLETLKRERGSTTTRIKGLLSSQGLRVTSLTQLPEQLDALRLWDGSPIPPGLRQRVLRVYAHHQFLSEQIAEVEAERRALLQTSPDASIDKVRQLMMLKGIGINGSWLLVMEFFGWREFKNRREVGGLAGFTPTPYQSGESAREQGIAKSGNRHVRWMTTELAWSWLRFQPDSALSNWFRERFGNGGKRLRRIGIVAVARKLLIALWHFLETGVLPEGAVLKEG

SEQ ID NO: 506014 - protein, 429 aa, unidentified
MNYNTQNAKIASITEKTLIIGIDVGSETHYARAFSWRNYEYSKKPFAFSNDEAGFAAFKEWMDDIVEKHGMEVIIPGMEPTGHYWLNLGAYLQEQGMKPVHVNPHHVKKSKELDDNNPSKNDRKDPKTIAGLVNEGRFSYPYIPTGIYAEIRNLSNLRIQTQEEITRIKNRMARWFSIYFPEIKDVYRNPDAVSGLMVIKQAPLPCDIRELGVEGVNKIWRDARLKGAGIKRATTLVTAAEHSIGNTEAPRSARKEIRNLLEDYEGYKKRMDELMEEIEKTLSEIPYIDKLMEINGIGIKTVSCFIAEVGDIGRFDNPKQVQKLAGYAIVADISGKHNGESRISHRGRKRLRYALYEAAISVIGKNKEFKEIHSYYRTREKNPLKKMQSVIAVACKLIRIFYTILTKGVDYDGQKMLNDIVRPEIQPAA

SEQ ID NO: 506015 - protein, 331 aa, unidentified
MQYAEVKLGIDISKASFDGYVINEGQGKHKVFSNDPNGFEVLNSWLNKLGFERVHACMEATGRYGEALAEYLICQGHQVSMVNAYLIKQYREGHLHLNKTDRGDAQLIAEYCLREGTNLRLWVPLDEKQKHLRALVRRLDELKEERTREENRLESIIDDAFVDRNIKAHLDYLNVQIRLLQDEIGTFIDQDSDLQAKQKLLKSIPGVGEQSAQRFMAELADTNQYENSGQVVAHFGLNPRIFQSGTSVRKQSRISKQGQSQMRASLYMPAVVATRCNPVIIDLSQRMTKTGHCKMEIIVAAMRKLLTLMYGVLKSGLPFDPDFGKNFNFAP

SEQ ID NO: 506016 - protein, 418 aa, unidentified
MNPTSTAISFTRFIAIDLHKRYAVIGGVNTQQQVVLPPRRVEIDELATWAQNHLMPTDEVVLEATTNAWTTYDLIAPTVQRCVVASPSHVRWIAEARVKTDAADVLRLARLLAAHLVPEVWVPPVYVRELRSLIAYRRRVVAMQTMTKNRLQSLLHANHLIPPPGRVFAEKNRDWWLRLNLSLTECLRIRQDLATLEHLEGQLAELEAEICRLSTSPPWSEQVPHLVQLPGFGMLTAMTVLAAIGVITRFPTAKHLVGYAGLGAGVHDSGETHRDKGITKQGRRELRKVLVEAAWIAVNSHPYWKAQFDRLTRRKPRNKAIVAIARKLLIAVWHVLSERAADKNAVPAMVAFKLMIWSWKLNDRERGGLTSRQFVRYHLIRLKLGEDIPYLITGKGTKRAIASPQEVLALRPELAAAG

SEQ ID NO: 506017 - protein, 345 aa, unidentified
MTAIGIDTHKATLACCLVDDLGSALDERTLPNDPAGHARLIAWVRSLDPMPRVGLEGSASYGAAAARALVAAGLEAREVPPMLSRRERRTTRRAGKSDPGDALAIARVVVRERELPPVRVEDASTELRLLVDARGRALAEATRVRNAIHAQLLVLLPGYAGTAPNLVATRNRRTVRVMLRGRTGVRADLVRADLDRLERLEREARAFERDIAARVIGHPLLRVPGCGAIVTATILGRVGDATRLASHDRFAMLAGVAPVPASSGQVRRMRLNRGGDRQLNRALWVIAFTQLRIHGPARAYVLRKRAEGKGWAEAIRCLKRHLARVVFQALRAGASGPAGSIPAAV

SEQ ID NO: 506018 - protein, 366 aa, unidentified
MLTIGVDAHKQLHVAVALDDTGVIVDQWRGPNSTTGWTQLQQWAASHGPLRRWGIEGAWNYGRGLAQHLVATGETVYEINPRWTAQRRERTRQLGKNDQLDAYAVAQLVREQDSKLPRVTRDDLTSVLELLVIQREGLMAEATRLRNQIHQLLLALDPSYKQQLPALRTKHGLQALQTYSSNSTNPLDQQRVAAVQRIAARLQLVVAQAAELAVQIRTLAAPQYTPLTEICGVDLLTAGALAGILGPGKRFANEAQLAMHAGVAPLEVSSAGRIRHRVNRGGNRRLNAILYRMAVSQSRYSSAAKAYLERRVSEGKSLREARRALKRYLVRAIWRAWQQCQVAASATSGSEPQQMALLAQQADAAA

SEQ ID NO: 506019 - protein, 325 aa, unidentified
MSSYEIVGIDVAARTLVAIGERVTLAAAYDNTPASRSSLIQTLGRSRRPVRVVLEATGIYFVDLACELVAAGIAVMVVNPKAAHHFAEAILQRRKTDPVDAAMLREYGRRMDFVPWQPPRPELFGFRALTREVQALSKAVAAAKNRLHAVTATRLTPAALIRALERQIAHNQTLIDELVAAALAQTETDPELARLFARTDSVPGFADKAAVLVIGELAVLPPMTARQWVAQAGLDVREESSGISLARRPRLSKRGNKRLRQTLFYPALTAARCCPAAGAFVERLVAHGKTRLQAIVALMRKLLHGLHAMWRNDEDFNAEKLFAQA

SEQ ID NO: 506020 - protein, 378 aa, unidentified
MNRIIKIGMDVHTTNYTLCIFEPSFEHDGTVHCITQVKPEIKKIIHVIETFKKKHENEELNIVCGYEAGCLGYSLYHELKEKGVECVILAPTTMKTEKGGRKLKNDYRDAKMIAECLAYGGYSAVHVPTELDNSVKEFIRMRDDIKENLKSIKQQIIAFLTRNGKQFEGKSYWTRKHIDWINTVSFSESLLQDTLKEYMIEYNHLCDRVETLDRQIEEISLKEEYVEKVQQLQCLIGIKTHTALSLIVETSDFNRFKKGNMYSAYLGLIPGDDSSGGHEKKLGITKAGNNHLRRLLVEAAQGYTRGRVGFKSKDLKSRQEKCSSEVVAYADKANERLRRKYYRMILRGKKYNVAKTAIARELACFIWGIMTDHIALCS

SEQ ID NO: 506021 - protein, 342 aa, unidentified
MVVIGIDPHKHTHTAVAVDEVGRKLGQVTVAADEAGVLRLWVWAGRFGQRRWAVEDGRAVAGRLVRTLIGMGSAVVWVPPKLMVACRASARTRGKSDPIDALAIARAALREPRLPAARLDQVALDLRLLIDRRETVVAARTAAICRLRWHLHDLAPGLDEGTRTLTGRRRQHALTGMVAALPASVRRDIALDLLADITRLTEQILILERRLSELVTPIVPTLMAIVGINVLAAAKLIGEVADITRFRSPAAFAMHTGTAPIPVWSSNTPQYRLNRGGNRQLNTCLHRIALIQLIHHPPAQQFRDRWTQQHPHATKKAAIRALKRHLTNVIYHALQTDHHHLT

SEQ ID NO: 506022 - protein, 462 aa, unidentified
MKQDRRQSKKRTSPSLLKRINVNVAGIDCGSAEHFVAVPPDRDPKPVRSFQSFTPDLHRLAEWLSTCGVTSVAMESTGVYWIPLYEILEGRGIHVLLVNARHVKNVPGRKSDVSDCEWLRELHTVGLLRGSFRPEAAITVLRGYLRHRETLVQSAATHVQRMQKALVQMNLQLHLVVTDITGVTGMRILRDIVAGKTDARGLARHRDHRCQSSEAEIAAALTGNYRPEHLFALKQNLELLDTFRLQIQSCDAAIEAHLQRLAQSSNPNTVLPPPRKKRKPRVNEPQFELRPLLHQITGVDLSQIDAIGPYTALRLLGEIGTDMTRWPTEKHFTSWLTLAPQNKISGGRLLSSRTQPSANRAAAILRVAALSLGRTQTALGAYYRRLAFRVGKSKAITATARKLATLIYRTLKDGLIYKDAGADAYQAQDRSRVLRRLAQRASNLGLVLVEPNTGELIDGTVS

SEQ ID NO: 506023 - protein, 432 aa, unidentified
MRQIGSSVHYVCVPEGRDKQNIQKFCCFTEDLYNLAKWLKRCKVTTIAMESTGVYWIPLFQVLESYGFEVKLVNAKYVKNVPGRKSDVQDCQWLQQLHSYGLLQGSFRPDNQICVLRSYAGQQDNLIKSAAAHIQRMQKALIQMNIQLHKVISDITGVTGIQIIKAILEGERNPEKLAELRDGRIKNDKSTIAKALAGDYREEHLFTLKQEFELYNIYQEKIAECDRSIEGYYKTFETKSGGNKLCNKIKRKSTKHRPNFAIHEELHRITGRDFTKVPGLDVVTIQTIISETGINPNRWRTEKHFSSWLGLSPANKITGEKVFSTRTRKVINRAANAFRIAAHCVSRSNSGIGAYCRRIKRRLGAPKAITATARKLACIFYSMLKYGQEYVEKGMNYYETRYKERVKKNLIKKAQEFGYILVQKDELVEGVS

SEQ ID NO: 506024 - protein, 402 aa, unidentified
MGVDWGSETHVVCVLDRDRRRLAECSYPHSGAGLTALADDLIALAPTEPGRIGVALEIPRGAIVDTLLERGLHVFSLNPKKLDRFRDRHTVAGAKDDRRDAFVLADSLRTDRPVFRRVQADHPRVIELRELARVDDDLGQDLRRLSNRLRAQLHRFFPQALTLCPAADDPWFWALLERVPTPVHAQRLSAKTVAAVLKVYRLRRLTVETIREALQSPPVHVAPGTVEAASAHIALLLPRLRLLHDQRLKIARQIETLLEELGQEDVPGEHRDVTILRSLPGVGRVVAATVLVEAARPLAERDYQTLRAQGGIAPVTRQSGKKISVSMRYGCNSRLRNAFYHWARTSVQSDPHCRAHYDRLRHHGHGHARALRGVADRSLAVLVAMLRTRTLYDADRRRGRAA

SEQ ID NO: 506025 - protein, 343 aa, unidentified
MQTVTTIGLDIAKSVFQVHGVDAGGEVLIRRQLKRRQVLAFFEKLPPCLVGIEACASSHHWSRQLQALGHTVRLMPPAYVKPYVKRQKNDMADAEAICEAVARANMRFVPTKTPEQQSCLMLHRTRNLFIRQQTAVINSIRAHLAEFGIVAPVGRKGVTELLHAVADPNDKRVPEVARACLAALGAQLLHLKEQILEFDRMIMAWHRSNQTSKRLHYIPGVGPMLATALVASVADPRTFRSGRNFSAWIGLVPKQHSSGGKERLGSISKQGDRYLRSLFVAGALAVIRYAKIHGAGHRPWLTALLGRRPIKVAAIALANKIARMAWAMMAKEECYKQPAALAR

SEQ ID NO: 506026 - protein, 307 aa, unidentified
MIGIDVGAHTLHIHDTDTGEVIKLPTPQAETYLRTKPPTTIVLEPTGHYGLAIAELAYLAGHQVLLATDNDTWALRRVVRRAHKTDRLDATMLSSLAQLANTAPDIVKHALTPYANVRPLFLARRSAYTARKLVTLAAAIQNRLRQHPDPELQELARTLKKLAEHYQQQTIEATPPDVIARLTTIPGVSAPLAALLWTYLGNAERFSSPNHAVSYVGLAPRNFPTSGATTRPPRRRRTAALLATHLHMYALRVAANPHKYDRFGQTYLRLRTKGGRIALHAVKRQLVRVAFALLRNKETYVSSQEAP

SEQ ID NO: 506027 - protein, 338 aa, unidentified
MPLYASVDLHSNNSYATITDGKDKVIKEKRLPNQIEEVERFFGPYKDRIDSVVTEATYNGYWLLDGLKGLGYNVKLANPSAMKQYEGLKHTDDKSDCLWLNRLNRLNILPQAYIYPEKDRPVRDLLRRRMYLTQMRTSFITVLKIQFQSWNSTSIAPRAIYKLDHADISKLFRDKALRLSANSFLDSIQLLNQQITEIESHVERAAKKDPVVDRLQVLKGIGPILAWTIKYETGELSRFKSIKNYLSYAGLVESLKLSNFKVKGKGNRKNRNRFLRWAFQEAAIHSLLHNRAERYHDRLARRKGKFKAKAIMASKIARVAYMIMEDPDFIYDPDKLFR

SEQ ID NO: 506028 - protein, 473 aa, unidentified
MIKSVGIDLAGNGEHKVRCLEKQGQLCDGFSFDSTPAGLSKFEEHVFKDGSNPVFVFEPTGLAWLIVAVYIRGQHPGCRLVRTQGRNVVALRKYLHRSSKSDKLDALTLAKMPFVDQERLNDVYLPPAKVNAILRLARQRQRLEADVAGRKKRILSILNGYIPGIRQTFSNIWSPQGREFLRTHLNPLAVSRSGEKAFDRFLTRARFRGKEDAEESHTVYLTCKMAATIYEKSRSTGAIDDDFFAALQDEIARELRLMEAEEAESDAIAQRIDELYQELHPSDNLRTIPGVGDQTAPIFLAVVGDPARFPSQSAFANYNGVVPDSRQSANTEAKGLRMTKAGPAIMKWALYQSSQIGRRFDPQLAWVYYHEIMNNGKNHKQAMGAVMSHIGARILAVLRENKPYELRDLQGKPITWENARRLILANYQIPEEIKQERRRCKSDGLPAKVRNRRREMKAHRAHEAATAPQPVVA

SEQ ID NO: 506029 - protein, 372 aa, unidentified
MKQNIIHIGLDVDDTQYHGAAFNKETGEVIDFKCRPTLKGLLQQLDRMARHFSGCTIKLCYEASYIGYGLQRDLMANDIHCDIIAPGSIPSPRGKAIKTDRIDAGYLAQFDANDLLTIVQPPDEAQVRDRDLLRSRQKLLQQRTQLRKHMQAVLRRNGLHYKAETGRKSHWTKIHYFWLVRTIDGLSGSLKVNLELLLRQLKGLNEVLTEYGHQIEMLAGSSRYRETVQSLTCYKGIKNIFALTMIAEIGDIKRFSHPRKLVSWIGMDIREYSSGGKHNRFGITKHGNRYLRTAFVEANQRGYRTARINKDLKARRKNTAPELINIADRCLRRLNKKGNRLLLAGKHPNKVKVACAREMVGFVWESLNKVAA

SEQ ID NO: 506030 - protein, 404 aa, unidentified
MKERIPLCWAGIDVGKGHHWICLIDEAGTTLWSVRVVNDQAAILDAIAGVLARGERVVWGVDVTGTMSGLLLALLAAHGQRVRYVPGRTVNQMSVAYRGEAKTDAKDAYVIAETLRHRGDLAEVEVATSLVSELRLLVTHRTDLVGDRVRMVNRLRDVLSGYFPALERAFDFAHSRGALTLLTGYQSPAAIRRIGESRLRAWLTKRKVRSADQIATAALGAARAQQSVVPGQDVAASIVADLATQLLAIGARIFDLDARIITTFRRHPQAEIIESLPGMGPILGAELIAAAGDLAGYGNAGRLASAAGLVPVPRDSGKRTGNLHRPMRYSRKLRRVFYLSASAAMMREGPNRDYYLKKRGQGHGHVQALITLARRRVDVLWALLRDNRPFELAPPTPEPIARTA

SEQ ID NO: 506031 - protein, 389 aa, unidentified
MYDTIIGMDVGKTFHWMHAVDQAGTPLLSRKIDQDERQLADAFNKAAAGGRSVLVVVDQPKNIGALTLACATRAGCQVAYLPGLAMRRAAGLLPGDAKTDARDAQVIATTARTIPEALRPVATPDPDRANLEALVAYDHDCLADKTRAANRLHALLAEVNPAFEKTIGHNIDAPFVLTLLQRYGGPWGIRHAGRTAVKRWSAGQRRVPTQLLDQLLDATWAIDNKPLGADIHEKYAIPAAARQIAELITTRAANEALINTMLANNPTYQALITMPGVGPHTAATLVTTVDITMFPGHEKLASYAGLAAKTTQSGTSIKSETAARAGNRALKNALFLSAFASLQHDPAARAFYDAKRAAGKKHNTTIIALARKRLKIMYAIMRDNTPYRT

SEQ ID NO: 506032 - protein, 415 aa, unidentified
MAMSCGIDWSEDHHDVAVVDADGHLVAKRRIGDDAAGFAQLLELLAEVGDRPEAPIPVAIETARGLLVACLRATGRPLYAINPLAVARYRERHAVSGKKSDHADAVVLANILRTDRAAHRPLPADSELVRAIAVLARAQQDAVWDRTQAHHKLRSLLREYYPGLLAAFRTARGGILRPEARALLAAAPTPADAARLTPPELVGLLRQAGRQRRLATHAAHLQAVFAAPCLRQPPLVEQAMGRHALALLGALNTACANAEELAAATHQAFEQHPDAKIITSFAGLGPLTGARVLAELGDDRSRFAAAKAVKAYAGAAPVTRASGKSLQVSHRRVKNQRLATAGYQWAFAALTASPGAHAHYQRRRAAGDAHPAALRNLFNRLLGCLHHCLQTRQPYQEHAAFTRLNGTNGRPRLDA

SEQ ID NO: 506033 - protein, 343 aa, unidentified
MQDVATVGLDIAKQVFQAHGADASGETLFNTKIKRENVLEFFSKLKPCLIGMESCATSYHWARQLLEFGHDVRLIHTSYVKPFVKRGKTDANDAEAINVALTQKTMRFVPVKTLNQQAAITIFRTRSLFVSQRTQLVNALRGHLAEAGLVAAKGIQNYSKLLKLMESAADTVLPTVMKQALTDICDQIHRLNDLVTKLDKEIERRVQHDENACRLLTIPGVGPKTAMCVIATIPDIHRFPSGRHFSSWLGLTPRTHSSGGRSVLRRITKMGNSELRTMLYLGGTVIMMRDKKTPIGRWAARLRARRPYKVAAIAVANRLARIIWALLTNGGVYDLTHGREASA

SEQ ID NO: 506034 - protein, 517 aa, unidentified
MIPSGKIYPLSHLLAVTNLVFLASRLSSNQGIGPMSQSKKTRESPSRKKHRRIRKAQARIGKVAVKATAAATDAKPVPAPEVIHPHAAAIDVHSDNHVVCVGPDQVQTFGAYTVDLHAIADHLKQHGVTTVVLESTGVYWVPLFELLESRGFEVFLIEPSQGRHCGARPKTDVADCQWLQRLHTFGLLRPSFRPPESVLALRGYWRQRQMQVRYAASHVQHIQKALEQMNVKLTEVAADIMGMTGTRIMEALLQGERDAKKLASLRDPSCKKGEEEYAKALEGTWRPEHLFALKQAFALYQFHHQQITECDQRVEEELARLPNRAADKQFQPRPRRCGRKSNDVRFHATEPLFKALGVDLTLIDGIEVNTALVILAEIGVDVSRFPTEKHFASWLRLSPQLQESNHTRKKRSPRRGKNRLAQALRMAAQAVSRTKTPLAMFYHRIKGRLGGKGAITATAHKLALLVYRLLKYGVEYVRQSMEEYAAKVKEQLERSLRRKAAQLGYELVPKTPAAQPS

SEQ ID NO: 506035 - protein, 351 aa, unidentified
MPRATSSTNVIATIGIDIGKNTFHVIGLDDKGAIILRHKLSRGQVYARLANIPPCLIGMEACVGAHHLGRQLSALGHDTRLMPARYVRPYSKGQKNDFRDAEAIAEAVQRPTMKFVAVKTVEQLDLQGLHRIRERLVCQRTSVINQIRAFLLERGIAVRQGLRTLRREMPIVLTKTDKLSQRMIHMIEDLCTDWRYLDKRIETVSKEIETLSEQDDGAKRLMTVPGIGPIISTATVAAIGTGEVFSKGRDFGAWLGLVPKQMSTGGRTILGPISKRGNRYLRMLFVQAARAVLLRPQSWEKHGLKLWIEAAARRLNRFKLAIALANKIARIAWAVLHGGRDFEVRPMNQAA

SEQ ID NO: 506036 - protein, 375 aa, unidentified
MPLGDSIQAGADLDPTRRERPVTILAQIIDAAVGVDTHRDTHEAEITSPTGAVLATTQVPNTSAGFIRLLDWITEHAPGPNVVVAVEGTRSYGIGLTRSLTAAGLTVLECEQPTSTARRGKGKTDAIDAHLAALFVLRQDDRHLPTPRADGIREGLRILLSARSELTTTSTAQTNRLRALLLTGDDEDRDTARRALTDTALAGLARRRRPTATHPHERVRHGELRRLAVALREASRALKANRAQMLELLHEIAPGLTDRPGVGPVSAAQTVVSFSHPGRVRNDAAFAALAGTSPLAASSGQRTRHRLNRGGDRALNRAVHTITLTRMRSCPRTRSYVARRTAEGKTTREIRRILKRYITRELYRALSHPPELDNT

SEQ ID NO: 506037 - protein, 247 aa, unidentified
MTQHTSIVAGMDVSKAHLDVYLHPNGSYRRFTNDKTGWRALHKWLPTTTSLQSIVYEATGPYHKGAERYLAAHGLPIARLDPRRARRFAEALGVNAKTDPVDARVLAQFGALLEPAVRSLPGPALEQLKELVPARRGLVKQRTSIANKSKTATVPLLKRQFRNAREHAARQIEQIHAQCHQIVRTDPALAQRFDILMSIPAIGIITAMTLLADMPEIGALNDKQAASLMGVAPIARDSSAFKGKPHS

SEQ ID NO: 506038 - protein, 316 aa, unidentified
MDIAPIFMGIDVSKARLDVAMRPSAEKLSVSNDEAGIEALVKRLSEVKPALIVLEATGGLERSVSGTLGSAQLPVVVVNPRQVRDFAKALGQLAKTDRIDAEVLARFAEVMRPPLRPLPDEVSLELRALIARRRQLIEMMVAEKNRLRAASKAVRKRIEAHIRWLETELDRADKDLDHSIRQSPIWQEHEDLLRSVPGIGPVVSRTLLAELPELGKLNRKQIAALVGVAPLNRDSGTFRGRRGIWGGRATVRAVLYMAALVASRRNSVIRDFYKRLRLKGKAPKVTLVACMHKLLTILNAMIKHKTRWSEIIFQTT

SEQ ID NO: 506039 - protein, 331 aa, unidentified
MAEAKRFVGIDVAKAQLDVAIGPNGESFSVANDETGINELLRRLEPADLVIIEATGGLEVPVASALATAGIAVAVVNPRQVRDFARATGQLAKTDALDAQVLARFGEAVKPQVRALRDAQAQALEALVNRRRQLVEMLTSEKNRRANSPKVIHKSIDEHIRWLEKRLAGFDDELADLVRETPIWRERDELLRSVPGVGKVLSTTLLAHLPELGALNRKQIAALAGLAPFNRDSGSLRGSRCIWGGRAQVRRVLYMAVVAAVRSNPVIKNFYAQLRARGKYPKSALTACMRKLLVILNAMLRSKISWQTPALAASTATLSSLLDALPEHGCC

SEQ ID NO: 506040 - protein, 355 aa, unidentified
MLIIGSDYHPGFQQIAFMDTETGECGERRLEHMEGAGQFYRDLQARGITVRIGIEASGYTRWFEQLMAELDFELWIRDAAAISRKRVRKQKTDKQDAELLLKLLIENRFPRIWVPSREDRDLRQLLWHRHRLVQMQTRLRNQLHAVALNEGVRLKKRLWRPKGRAQLESLALMPWAGRRRQDLLQLLDQVDGTIAELTASIEQEAEKRPEVVRLMTHPGVGALTALAFVLILGTPERFATSKQVSSYLGLVPTEESSGERRHLGHISKQGNTLLRFLLVAAAQVTARSDPDWRRCYLHLAMRRERAIAKIAMGRKLAVRLYWMWRNGSEYTQLPKLGSHAGQPGNRLGQAVGRPR

SEQ ID NO: 506041 - protein, 405 aa, unidentified
MIVAVDIGMEVNWGYCTTLDGRSTKSFKFDNTREGLDTLWGMIMTSRDRLQCNEVVVGYESTGPYGEPLVHYLMKKPVRVVQVNPMHTKRVKEINGNSPLKTDEKDPRVIADILRWGHALSVVIPEGDAAYLRRLNNARERHVRERTALVNQLQQLVFLLFPEFQKVIKDIKGRTPLYLLKQYPTPEAVSVLDKRVLGEAMRKQSMGRFKESHADMLITLARHTIGIKEGAAGLSMDIRHIIIQLEMLQRLMGAIEGEMELALGRIPYSAKLLSVKGLGVVSVAGIIGEIGDFKKFKTRSEIMKLAGLDLYEISSGKSKGQRRISKRGRSLLRKILYYAAIQTIRKGGILHEYYTRLTDRGMKRMKALVAVSRKLLGILYAIVRDDSEYLVRFESMKRQVIKKAA

SEQ ID NO: 506042 - protein, 342 aa, unidentified
MQITTIGLDIAKNVFQVHGIDAAEKVVVRKQLRRGQVMKFFEALSPCLIGMEACATAHYWARELRKLGHQVRLMPAKDVKAYVKRNKNDAADAEAICEAVRRPTMRFVEVKSAEQQGRLMQHRTRDLLLRQRTQAINALRAHLAELGIVAAQGREGLKNLLTIIADEKDERLPIDARASLIVLAAQLQALQMMIGSIEKRIIAQHRASEESKRVATVPGIGTLGASAITATVTDPSAFRSGRDFAAWIGLVPRQDSTGGKQKLGPISKQGDRYLRRILVVGAIAVLRYAKQNPEKYPWLTQLLARRPFKVVAVALANKMARMAWALLAKGGTYRAPALAAAA

SEQ ID NO: 506043 - protein, 316 aa, unidentified
MTMNDYPFSQFVGVDVSKATLDFVLAEGEKSVSIKNTEKQIVDKLIGVITDPLSTIVVLEATGGYEGRLVALLHQHKIAVAVVNPRRVRDFAKGIGLDAKTDSIDARAIALYGQVVKPAAQMAKSVEQKKLKALVEYRRQLLGLINQQKNRLQQTSDLEIQDYIRQSLETLEKQAKTIDQRLEKCVRADTKNARKIEIIESVKGFGPVVVSTFLAELPELGALNRAEISKLVGVAPMNRDSGTMSGKRRTIGGRSYVRRVLYMATLVATRHNPRIKAFYQRLLARGKAKKVALVAAMRKLLTILNTLIKNDMLWQD

SEQ ID NO: 506044 - protein, 446 aa, unidentified
MIMGKAKIAKAIIDLVRSNAAGIDIASEVHYVSVPDDRDSPSVRKFGSFTEDLHKMAQWLKQCNIDTVAMESTGIYWVQPYLILEEYGFEVYLVNARHIKNVSGRKSDVQDCQWIRQLHSYGLLNRSFQPESLTRELRAYMRHRKHLVESTSNQILHMQKAFEQMNIKLHDVISDITGQSGTRMIKAILEGERDANTLAQLADGRIKATQEQIVKSLTGVWREEHLFELKQAFDLYQYLNLKIIECDAQVTNVLTRLIGNNSSNEIKRHKRSHKNSFHFDGTKYLKQILGIDVTRIYGISEITATEIISEVGTDMSKWSTEKHFVSWLNLAPNNRITGGKMLKPKKTNKRNKAGQAFMMAAATLKNSDHWLGAFYRRIRARRGTGIAIKATARKISLIFYKMLKDKIEFDPLSIETYNQYFKERRIKSIEKQAHSLGLKLVPIFVS

SEQ ID NO: 506045 - protein, 388 aa, unidentified
MIYVGIDIAKLNHFASAISSDGEELIKPFKFTNDNDGFQLLISKLDPLDKDSLIIGLESTAHYGDNLVRYLVAKNYKVCMLNPIKTSTMRKNNIRKTKTDKVDTYIICKTLMMQESLRFVTFYDLDLMDLKALGRFRQKTIKQRTRLKIQLTSYVDEIFPELQYFFKSGLHQKSVYALLKEAPTPEAIASMHMTHLAHLLKVNSHGRFDKEMAQQLRVLAQKSVGASDSSLSIQVTHTIQQIELLDSQLERVEAEMTEIMKFNDSVIMTIPGIGYINGGMILGEIGDIHRFSSPNKLLAYAGLDPSVYQSGNFQAKKTRMSKRGSKVLRYALVNAAHNVVKNNTTFKAYYDAKMAEGRTHYNALGHCAGKLVRIIWKMMTDNLEFNLD

SEQ ID NO: 506046 - protein, 366 aa, unidentified
MPMPTVAQAVDAVVGGDTHVDTTSLCVVSPVGAVLAEITIDNDEDGYGAAVTWILQSVPTERFLVGLEGTRSYGAGLCRALQAVGIAVVEVERPSRGERGRRGKSDTMDALLAARKVLAMPVDRVPQPRTGNGAREALRLLTIGREGMGKHRTQLVNQLLAVLLTGSVEQQSLRKRDLTAGTLRNLAKARVGKGMGLDEQVRVLELRRIAEDIVRLDQQLRDNDRRLRAIVTEIAPQLLDLVGVGPVSAAQAIVTYSHHGRCRDEAAFAALAGASPVPASSGRITRHRLNRGGDRRLNRTLHIIAVTRIRNDPRTQAYIQRRSADLSGKEIRRMLKRYIARELFNVLQTIDALDSKNTACVVALAA

SEQ ID NO: 506047 - protein, 408 aa, unidentified
MEILHRRCAGLDVHQKEIVACRRIASGRKVESELARFPTTTPGLLALSAWLTEAKVTHVAMEATGVYWKPVWHVLCADFKLILANASHIRNVPGRKSDANDATWIADLLAHGLIRASFVPPQPIQDLRDLTRTRRELTREVVRHTQRIQATLEEANIKLTSVISDILGWSGRRILKAIVAGESDPLRLAELGHPRLACVRENLVAALQGRLRDHHRFLIGQHLKTIEQIEATIAEFDARLDAALAPFRDAIERLKEIPGVGDNVSQTLVAEIGADMTAFPTADHLVSWAGLCPRLDESAGRKRSKRLRKGAPWLKPVLVQSALAATKVKNSSLRARYFSLKPRLGHKKAIIAVAAAMLRIVYHMLKDGTFYQDLGPGYRRPKNPERAAQNLAKRIRALGFDVELKLAA

SEQ ID NO: 506048 - protein, 343 aa, unidentified
MEAYVGKQFVGIDLHRRRTVIVRTTEAGEVLEAVRIVNDVQRLASVMARAGDCPEVVLEATYGWYWAVDALQAGGANVHLAHPLGVKAFEYRRVKNDVRDAQDLADLLRMGRLPEAWIAPPPTRELRELVRHRAKLVGLRSRCKAEVHAVLAKCGVQVLMSDLFGVWGTELLDRLELPAPYAARIVSLRRLMDDLDFEINLFAGIIRGRLAQEPGYTAVQKIPGIGPTLAAVLVAEIGDITRFASASKLTCWAGLTPKHHESDTHVHRGRITKQGSRLVRWAAIESVKTVSKNSEVGVLRERVADRRGRNIGSVAAARRQLEFVFYALRDGHVRALEHLPRVA

SEQ ID NO: 506049 - protein, 331 aa, unidentified
MNCIGVDVSKQELVTYDGAKERIFSNTRGLEAFHRFLKRSKEPLVVFEPTSTYSRRLETLCRASQISCCRLNPRVVPHLRLVGKGRSKTDSSDAELLYRYGIERGQQEAAQLENDALAESIQARLTCYRVAQKARVAYQNVLEALSQDPATSGELLGEVREEIRELKSKEKQQVDAAQKLIEDDSDTKHRFDLLLSIPGVGPITALTLVALFRKYANSNRSQIVALAGFDPIRIQSGTSVHGKSRISKRGNREVRRRLYEATLSAARYNPSVRAIYRRLKESGKPEKVARTAAARKLLVIAHAIYKSGESFRETNRKRLGVLQEFPSCSPR

SEQ ID NO: 506050 - protein, 345 aa, unidentified
MTTMNYIGLDVHKKTISYCVKDVSGRIQQEGKVGATRRELDCWIKTLPQPWTVAMEATIFSGWIYDHLLPHATQIKVAHPLMLRAIAAAKKKNDKIDAGKIADCLRCDFLPECHMVSTEIRDRRRTLRYRHLLVRQMVQMKNRVSGLLMETGVEHNKQRLHKVGYFHELLSTQPEVPPCIRPLLKISRDTIERCRKTEYALVSSLQRDPILADRIKRLRTIPGVGPITALTWALEIGDVSRFRTIKQAISYCGLCGEEKSSADKVMRMPLSKQRNKHIQHVLVEAAKLAPRQCYELALVHEKEMQKGNRNRATLAVARKMVAYLLAVDRQQRDFVPAEERQAGAA

SEQ ID NO: 506051 - protein, 347 aa, unidentified
MVTLGIDAHKRTHTVVAVDQHGRQLATKTVGTNTKDHLGLLKWAEQFRDDEGLLWAVEDCRHLSRRLERDLLRSGQAIVRVPPKLMAHVRDSARTYGKSDPIDALAVARAAQREPDLAVARLDGPDRDLRLLCDHRESLVNDRTRVICRLRWFLHELDPSWEPKARSLDRVRALQRVTDHITGLEGTVARLAHELIDQAITLTVKINELTVEITELASGMAPALLAIPGCGALTAAKILGETAGIDRFKSNNAYARHNGTAPMPVWSSNKARHRLSRTGNRQLNTALHRMALTQARWHPPAKAMIERRKAGGNSGREALRVLKRRLSDVVYAALQQDLAVNHQLLAA

SEQ ID NO: 506052 - protein, 410 aa, unidentified
MDILNPHCAGLDIHRDTIVACVRLAEDGGVVRLVETFATTTSALEQLSEWLASHGVTCVAMEATGVYWKPVWAVLAETFERVLANAHHVKAVPGRKTDVNDAMWLADLLAHGLIRPSFVPSMQEQALRDLTRARKQLTREKASHVQRIDKTLQAANIKLGSVLSNIMGQSGRALLEALAAGESDPERLAGQVRTKIRASHAQVVEAVRGRLEAHQRLLLRLYLAQVDALDAAIADIDRELGERLEPVRDAVRRLTTMPGLSALSAAVVISEIGLDMSRFPSVAHLISWAGLCPKNDESAGKRRSTRLRPGAPWLKALLVQTAWCAVRAKATYLHALFQRLKARRGPRKAIVAVAGAMLTAIYFMLKRGAEYHDLGPDHFQRTERSRLATRLTRKLTELGFDVTLTQRAAA

SEQ ID NO: 506053 - protein, 453 aa, unidentified
MPKKRQNREVKLPVLRPDAAGIDIGAEEIFVAVPADRDSQPIRRFATFTQDLNALADWLTKCEIHTVAMESTGVYWIPLHQILEGRGFEVYLVNAQYVRNVPGRKSDVADCQWIQYLHSVGLLRASFRPPAEICAIRSLWRHRESLIQMASQHTQHIQKGLDQMNLQIHHVLSQITGWSGLRILDAILAGDRDPIALAKLCNWRVRTSRDVIAKALEGDYRREHVFTLRQSLEGYRYYQKLIVEVDEELHNYLRDLPKAVEAGAGPPPRTKTRVYQKQHNDPAFDLRGELYRIVGVDLTDIPGINELTAHTIISEIGTDVSRFRNASAFASWLGLCPERQVSGGKVLYTKTRPVKNRVAKALRMGAQCLYHANNYLGEFFRRMRRKSGAPEAVTATAHKLARIVYHVLRTKEAYNETVFLRHDNEAIKRAQDRLRKQAAKLGFQIVPQQSTEA

SEQ ID NO: 506054 - protein, 355 aa, unidentified
MTSTKYIGMDVHKESISIAVMNAAGKIVMECVIETKASTILQFIHGLRGDLQVTFEEGTWAAWLYDLLKPHVTEVVVCNPRKIALLKDGSKSDRIDARKLTEQLYLNKLQPVYHGEHGLRTLKELARCYLTITKDLTRVMNRLKALYRSWGIPCAGNEVYAPRHRSEWLSKITEAGVRRRAEHYYQQLDALRSLRQEVRRDLMVESKKHKAWKLLRQIPGIGPIRAALLVALIQTPYRFRTKRHLWTYSGLGLETHDSAQYRVVEGQLKRSKKPVTLRGLNENHNHDLKDIFKGAAMRASTAAGPLHDFYEALLTKGRKPTMARLTLARKIAAITLIVWKKEVRFDANYLKQQAA

SEQ ID NO: 506055 - protein, 341 aa, unidentified
MGEVSTIGLDIAKSVFQVHGVDVAGVVVIRKRVSRARVLEYFGKLSPCLVGIEACPSAHHWGRELQGLGHTVRLIPPSYVKAYLKRGKNDANDAAAICEAVTRPSMRLVPIKTKEQQTALMLHRTRQLLVRQRTMLSNALRGHLAELGIVSAKGRNGTAELLRIISDGRVSPAVCGILKVLARQYGAIGTEIASIDKSIMALHRGSEASRRLAEIPGIGPIGATALVAEIGDWKTFSSGRSVAAWIGLVPKQHTTGGKDRLGSITKQGNRYLRWLLVVGAMAVIRYARKHGTQKRPWLGRLMERRPTKVAAVALANKIARMAWAIMVRGERYKEPKLLLAA

SEQ ID NO: 506056 - protein, 357 aa, unidentified
MAYIGVDLHSDKFTAAFRDKMNKDTLKSYYLDKYEIDNFKKSLKKDDYIFIEASTPTFAFTDLLKDTVKKTIVIDPFKFRAIADSRKKTDKIDARQLARMGKYHVEGDKKFLPEVYVVEKRIRKLRSLFTTYRLLNKEITMIKNRIHSLFKQNLKPYSKTHIFNEIMAGLKPIDLDEEYKIQVEVLFDVLSKLEEEKAKIKEKILLTGEPFIKDIDILVSISGISVFVALGLISDYATVDRFQNVKQFSKYLRSTPKSEESNKKVRTGKTQKNGRKLSIELMLQSINHFRRESLFIDRFYWKLKKGKGGCKARIAVVRKMFVAIYFMLKEREYYRYMNKKLHDKKIREYKRFLVKNK

SEQ ID NO: 506057 - protein, 326 aa, unidentified
MNYDIGIDVAKDKIDCLWLKDITSLKIKTKVLPNSAQGFQQLKLWLEKHVCTELSHIYICLEATGVYHEALAYALFKMGVKVSVINPAFIRNFAKGLGVRGKTDKKDSMVLARYSALIRPRLWQPETEDIRILKALLSRLTGLENDLQREHNRLEKADVSQASKTVIESIELMIEQLSKEVNRIKKLIDNHIEQNPKLKKDRSILKTIPAVGEVLSREMLSVLNSRDFEKASQAAAFVGVVPKLWESGKMKGRTTLCKNGPGRIRAVLYMAAIVATKYNPDIKIQYERLLKAGKTKMQALGAAMRKLVQICFGVLKHQSEYRSQAI

SEQ ID NO: 506058 - protein, 342 aa, unidentified
MSVYVGIDVHRKRSQVAVIDQAGEVLANRSVPNGVQPILGVIGGLPPGTPAAFEAAFGWGWLVELLEGYGFGPHLVHPLQCKAIASARLKNDKVDAAILAQLLRADLLPEAWIAPPPVRQLRALLRHRAQLVRLRTLLRNRIHAVLADHGHDRPGGCWSGPGREWLASLQLPAVSRAVIEDDLALIDALQVPIDRLDWEVRQRARAEPAVKVLTQLPGIGPFTALVILAETGDVSRFGSARKLASWAGLTPTVRGSDRTVRHGHISTQGSTWLRWVLCEAAQTAKRHPDFAASYQAIARRRGKKIATTAIARKLLTRAYHLLTGAQAAPQPAQPARPSPGTW

SEQ ID NO: 506059 - protein, 327 aa, unidentified
MTASVASHNQIFVGIDVGGLSFEAAWHRGGSTQYQNRPDAIAAFVARLSAEKQIIRIAVEPTGGHEKALVKALRGAGLPVEMVHTSRFAAYRKLIGAKAKSDTSDARLLAAYAAAPEEVRGRKAGHVVLPQDDVREQLAELAARRDQLKHMIHAETCRLSTVRSPSIRDEITAHLQALCQADRKTHDAMMLLVRQRDELRNAKRLLQTIKGIGDKTALTSIAAVPELGLISNKAAAALVGVAPFVRQSGTMKAPARIHGGRALVRNAFYMAAVTASRHNPVLAPFYARLIAAGKPVKVAPVAVMRRLVVFANAVLRSGQPWKGAEIG

SEQ ID NO: 506060 - protein, 401 aa, unidentified
MNKFSPEQHWIETGSALERVGNAGQEERHAAYVGLDVHKETITVAVAEPGRGEPVYWGEIANKPKTVEKLLGKLSEAYGGGLLRLCYEAGPCGYVLYRQILASGHDCQVVAPSKIPKTPGERIKTDRRDALKLARLLRSGDLTAVWVPDQEQEMMRDLSRARDDMKSQERKARQQLNAFLLRHGHHWPRGKSRWTPAHENWLAGLKMDHPWQQVVLQEYIDAERAAGERVAQLSDHLMRALPEWSLAPVVDALIALRGVDKLAAIVLLAELGDISRFESPRQLMGFLGLVPSEHSSGGRRRQGAITLTGNGHARRMLVESAWSYRFPARQTKHLKGKARNASPEAKKIAWKAQTRLCGRYRTLTRAGKNTKLVCVAIARELAGFIWDIVRQEMPRLALQEG

SEQ ID NO: 506061 - protein, 402 aa, unidentified
MNAVGIDVSKGKSMVAIMRPFGEIVSAPFEIKHTASDIHSLVELINSVEGESRIVMEHTGRYYEVLAHQLSKANLFVSAINPKLIKDFDNDSLRKVKSDKADSVKIARYALDKWQNLKQYNVMDELRNQLKTMNRQFGFYMKHKTAMKNNLIGILDQTYPGVNTYFDSPARSDGSQKWVDFASTYWHVDCVRKMSLNAFIDHYQNWCKRKKYNFSQSKAEEIYGKAKELVPVLPKDAITKLIIKQAVDQLNSASTTVESLRTLMNETASKLPEYPVVMAMKGVGTSLGPQLMAEIGNVSRFTHKSAITAFAGVDPGVNESGTYEQKSVPTSKRGSADLRKTLFQVMDVLIKTHPQDDPVYQFLDKKRAQGKPYYVYMTAGANKFLRIYYGRVKEYLSSLPES

SEQ ID NO: 506062 - protein, 397 aa, unidentified
MIAVGIDISKAKSTVAVIDSDGTVLASPFTMAHSQPEMEAFVTYLKGLGEPTTILMEYTGHYHYPVLKKLQDEGFPVCIVNPYQMKKYGDVEIHKAKTDKKDALRIAAYALEKSYKLVPYSSMEQKYEDLKFLSRQYNQRISYVAKLKVQLIALLDQTMPGITRILPLNSRNPEKCALLLFIKRFKSFDEIQRIGKARFLASYDVLAKKASERSASSKGLSIYELAVDSITTRGEDPYIWLSQNQCVDLLSATQNAADEIISQMRNIAETIPEYKVLRAMHGVGDRLGPVILAEIGDVHRFHSGKALNSYAGNDAPPYQSGQFESRNRHISKRGSSTLRKACYEVMQALKLTKPQDDPVYLFMLKKEQEGKPFNVAKMAGVNKFLRIYYARAMELYK

SEQ ID NO: 506063 - protein, 355 aa, unidentified
MQTIYIGVDFHARQQTICYLTTESGEMLLHQLKHQDKAAVRAFYAQFTGQVIVGLEASGYSPWFERMLEELGCEVWLGHATEIRRRARWRHKNDRRDAELILDLMLHDEFPRLYLPPLQSREVLRMLRYRQKLIKMRTIGKNSLQALALQSGLAKGPQLFTKAGLQELRSAPMSPAMQWQREQWLQLLEPLNQRLLETMLWLKQQSQADQRVSRLRTHPGVGLLTALCLVHSLEPVSRFANTRKVTAYVGLDPVERSSPERQRFLGLSNGGSRVLRFLLVEAAHTAIRKDADLRRFYQRLAQRHGRPKAKVATSRKLLIRTYIMLRDEIDYAEFQRRAVAARPARLAHGLQCPAP

SEQ ID NO: 506064 - protein, 406 aa, unidentified
MQQSNAKSVIIENSTALETIRRQQKDGNHYAAYIGMDVHKDTITYAVALPGRANGQYRGEIAHTRKAVNKLMGRLSAEFGGELLLFCYEAGPTGYYLYRQMMASGHDCQVVAPSQIPHKPGERIKTDRRDALKLAQYLRSGDLTAVWVPDQEQEAMRDLTRARGDMKGQELKARQQLNGFVLRHGHSWPSNKTRWTKTHYNWLESLAFPHPWQQVVLQEYINAVKAATRRVADLMDQILQALPSWALAPVVDSLVALRGIDKLAAITLLAELGDISRFDNPKQLMSFLGLVPSEHSTGKRRRQGAITLTGNGHARRMLIESSWSYRFQARQTMHLKRKAVNASDEAKTIAWRAQKRLCGRYRRLVEAGKNQKLVVVAIARELVGFIWDIVRIEMARLPVQHSVQAA

SEQ ID NO: 506065 - protein, 346 aa, unidentified
MLIIGCDFHPSFQQVAIFDKQSGEYEEKRLRHRAEAEEFYRGLAAGARVGMEACGHYPWFERLLAECGHELWLGDASRIRASVVRKQKTDRRDAEHILQLLRQERFPRIWVPSLEERDGRQLLMHRHKQVQTRTQVKNQLQAMALSQGVQRGKKLWSQAGRAELEKLELLPYAAERRGQLLQSLAELDAAVAQLDRKVAEEVQKRPAAVRLMTHPGVGPVTSLATVLTLGPAERFATAKQVASYFGLIPSEHSSGGGQRLGHISKQGSSFLRFLLVEAGQTAVRGDRELGRFYRRLAMRKSRGLAKVAVARKLAMRLYLMLREDWTYAQLCQAVVQASPSHSVVES

SEQ ID NO: 506066 - protein, 313 aa, unidentified
MKHSFVGIDVSKNTLDVHVLPEGLSYSFAYEPQKVKALIRKLKQLKPVLIVMEATGGYEISLAVQLSTAKLSIAVVNPRQVRDYARAIGKLAKTDKVDAYVIARFAQDVKPEARELLTLKELQLKELVMRRQQLIDMRTAEKNRLTRAHTPQVLQEIHEHISDLNARIKAIDEQLHNDIKNNPGWNQKLEIIASVPGIGDNTAHSILFCLPELGKLNRRQIAALVGVAPMNRDSGMMRGKRSIVGGRAVVRKVLHMPTLSAVTRWNKRLKAFYCHLRAQGKKHSVALTACMRKLIIMLNVMVKNNQVYNPKYC

SEQ ID NO: 506067 - protein, 350 aa, unidentified
MIIGVDYHPSFQEIAFLVEETGECDEGSLKHSNGEAEKFYRDLKARGISARVGMETTGYSRWFERLLAELGFEVWIGDAAEIKTRRAKKKKTDREDARLLLKLLLEDLFPRIWVPSPENRDLRQLLWHRHRLVQMRTRIMNQLQALAMNENRCWKGKLWSERGRAELEKLPLAFWASHRRQGLLELLDRMNPAIDELTAAAEREAKKRPEAVRLMTHPGVGPLTALAFVLIIGTPERFGCAKQICNYVGLIPSEDSSGGRQRLGHISKQGSSLLRFLLVEAAQAAVRCNADWRRRYRHLAMRRQRNIAKVAMGRRLGARLYWMWRNGCEYSPSLEFGSHAGKLGTGNGGQ

SEQ ID NO: 506068 - protein, 338 aa, unidentified
MTIIATGIDLAKNVFAVHGVNGSGVVQMRQPKVARGKLGALVAGLPPGVIGMEACSGAHHWARQFQAHGHRVRLMAPKLVTPYRMSGKRGKNDAADAAAICEAMQRPNMRFVPVKTEEQQAQLMVHRARQGFITERTACINRIRGLLSEFGIVLPLKAEVVRRQAREHLEDLPGYANLVIGDLLSEVAHLDERIAQYDKHVHAIARQSTPAQQLMQLMGIGETTATALVAMVGNATEFSCGRQFAAWIGLVPGQYSSGGKTRLGRITKAGDPYLRSLLVMGARAVLNAAKNKADSISRWALAVEQRRGYWRAVVAIAAKNARLAWAVLTKGEAFKLPA

SEQ ID NO: 506069 - protein, 319 aa, unidentified
MAQNDLVVFGIDVAKDKVDACIRRFTLRQMFPNTAQGHRKLVAWLRKYQVGKAVMEASGGYEREWRNVLHNAGIEVRIVDPRRVRSFAQSAGRLAKNDPIDAEMIAWFAETFSQAPGQIPDAAREELAALAKARKALVDVKIRLQAQDEHAAPEPARKAYARVLKSLAAEIDKLEAAISAKVKATPEFVERAEIIESVPGLAQATSAILIAGMPELGQVSDEVAAALIGVAPYDDDSGKRRGERYIKGGRRWVRNAIYMPCLGAATQYNPVLKAFYQRLLARGKEPKVALVACMRKLIIILNTMLARRQKWNPGRHAMA

SEQ ID NO: 506070 - protein, 323 aa, unidentified
MYSIGLDVSKSTINVYIPINDLDLIIDNSLNGIKSLYSKLKKLYKKEIDKLVFIYEPTANYSFLLKQFCANKNIKSFIVNPKKSANFAKVMGYRNKNDIKDAQLLSKMIVTAKDKDIKIPIVDTIEEELKELISGYKLIIKQQVITKNHIAALKAKKDKSYLIKEFELQYQFLKKQEQKIIKKIKSIIKKDERLQQSFNNLQTIDGIGEISSIVLLIHFIQYKNANQKQIVSLAGLDPIEKSSGISVNGKTKISKAGSKICRGTLFMPAMTSIRNNERLKKFYDRLKENGKHTTVIQVAIMRKLLIIAYAVYKNNVPYDSERI

SEQ ID NO: 506071 - protein, 344 aa, unidentified
MVIIGIDPHKASHTAAALGDGADVLSQLRIPANKKMLGDLIEWAAAWPQRVWAVEGAAGLGLLLAQQLVGAGETVVDVPPKLVARARVLHTGHGRKTDVLDAVSVATVALHNRALRQVTQEDHGTILRLLSDRRDELTQERRRTVNRLHCMLRELLAGGAPTELSADEAAKMLTTIRPATAVEAERKALTRDLIADVRRIDRRLVANRKRCAEAVAASGTGLPKIFGISDVLAAKILGHTGDITRFATAGHYASYTGTAPIEASSGDVRRHRLCRAGNRSLNNALHLAAHVQLMHPGLGQDHYRRKLAEHKTPREALRSLKRQLAKVVYRELRADHDRLLKAAA

SEQ ID NO: 506072 - protein, 392 aa, unidentified
MTRGQLIIGIDIGKHYHQATVIDETGQILGGSLRFTNTSSGAELLLKRIASVNQEGLPLIFGLEATGHYWLALYSYLIEKGYHVVVLNPYQSDAFRKVYLSSVKTDKEDAFLIAEILRFGSSSQTKLAEEKLLALRNLSRFRLTLNQQITDSKRRVITILDQVFPEFESCFSDIFGKTGRSLLKKYPTPEEMEAVSVRKLTNIISKLSKGRFKNEKAQEVITKAKTSFGITLALDSLTLQLKILLETLEFTESQLKIVDDQINPLIDDGCVLLTLPGVGKTIAASILSEIGDIKRFKTSSQLVSFAGINPTVRQSGNFLGNKNHMSKKGSPYLRLALWQAAITSSRFNPVLKEYYSLKIKEGKNHMTVIGAVARKLTGIIFAMLRDQTAFTV

SEQ ID NO: 506073 - protein, 345 aa, unidentified
MKHYAGLDVSVKESAICIMDETGKVCREVKVVSHPEDLIEVLKDPAWRLVCVGLEAGPLSQWLFSGLAEADLPVVCIETRHTKAFLKAQVNKSDRNDARGIAQMMRVNLFRPVHVKTLVSQKRRALLTARKLLQEKAIAVENDIRGLLRNFGLKVGVVGVIKFEERIFELVDGMTDLAEIMTSLLEARRTLREQVGKLHQRLLSIVRENDACRRLMTIPGVGPIVSLAFTATIDIPARFKSSKAVGPALGLTPILNQSGESNRVGRISQCGDGMMRTLLYEAAQVMLTRTIKWSWLKAWAMNIAKRRGKQKAIVALARRLAVIMHRMWCDGTEFRWTKETVPAAA

SEQ ID NO: 506074 - protein, 345 aa, unidentified
MDHFAGLDVSVKETSICIVDDAGKIVREVKVASEPEALLAVLKNLAYHFKRIGLEAGPLSQWLFSALAEAGLPVICVETRHMQAVLKAQINKTDRNDARGIAQMMRAGLYRPVHVKTIRSQKLRMLLTHRKLLQSKAIAIENDLRGTLRNFGLKVGMVGKVKFEARISELVENLPDLAVLVEPMLIVRRTLREQIVILHRRLLAIVRDDEVCRRLMTTPGVGPVVALTYRATVDVPARFRKSKAVGAVFGLTCAKYQSGEVDRNGRISRCGDEMMRVMLYEAAQSMLRSKKWSWLKAWAMQIARRRGMKKAIVALARRLAVIMHRIWVDGTEFRWTREQATAAAA

SEQ ID NO: 506075 - protein, 328 aa, unidentified
MDQISVGIDVSKAALVIGVYPTGERWTSETTAAAIDGLVGRLRMLSPTIVVVEATGGYERAVVAACAAAGLPMAVVNPRQVRAFAQALGRTAKTDALDADVLAEFGARVQPPVRPISDAETQMLAALVARRRQLVEMIGMERNRLEQAPPTGKITRDLRHHIRWLERRVDDVDDEIGTAIQTSPVWRVQDDVLRSVPGIGPTTARTLLAELPELGRLDRRSIAALVGVAPFNCDSGQQRGQRHIWGGRASVRKAIYMATLSATQHNPVLRTFYRRLCDAGKPAKVALVATMRKLLTIVNAMMKHQSRWNSEVASTPASLAGSARAATV

SEQ ID NO: 506076 - protein, 426 aa, unidentified
MHDNRNQRINQISETTLVVGIDIAKRNHYACAVDERGRELKKSFVIRQSLQGFESFYATILKLMSIHNKKEVIVGFEPTGHYWMNLAAFLTDHGIPYVLVNPLHVKQTKELDDNLQSKNDLKDARVIAKMMPQGYYSMPREMTQIDSELRRGTGYRARLKEESASIQNRIRRWIDLYFPEFASVIKGLGKQAQAILKYAPLPEDLVIFSHEELIDFLHTKGVRYLSKKKVERLLQVAKYSIGLKDSPEMARMEIRMLLDQLSMYESQIQELTENLVTLARQLPDFDYLTSIPGISETTVLELLSKTGSLKRYKDPRQLFKLAGLTLVTNSSGESKGRKRISKRGRRRLRALLYKAVFPLLHSNSAFRALYDYYSNDREKPVTKKEALVILCRKLLQICHGLSHYETTFDLERMMGDMPFLSHPKAA

SEQ ID NO: 506077 - protein, 420 aa, unidentified
MRSIALDVHRDFCEVAIKDAEGLRLAGRVKTKPEELELFAQSLAPDDQVALEASEPALQIARILEPHVGGVAIANTRKLRAIAESKVKTDKLDASTLCELLAAGFLPAVWSPDEFTRALRRRLQRRAKLVRARTRAKNECHAVLARNLKGKPPMSDVFGKKGRRWLAALQLPADESETVACCLREVDFLDSEIALVERELAARALSCQEIRRLMSVPGVSLVSAATFVAVVGDARRFSSPKKLVSYVGLDPRVRQSGEAPARHGRISKQGSPEARHMLCEAAWVAIRTPGPLRAFYERVRARRGTQIALVASARKLSVLFWHLLTREEDYAFERPTLTRRKLRGLELKVKDGRRSWPSGHAVGTKEEREREREFAEQVETAYRRLVADWQPKARRSGAGATRGRASSSHLLDEETAARQG

SEQ ID NO: 506078 - protein, 432 aa, unidentified
MLTLPQTKEANMSEVTFPRLVSRGCGIDVHQKVVATIDGEGLTKETREFETFTSSLTEMRHWLEVNGITHVAMESTGVFWVPVFTILEKSIPNVWIVNARHIKYVPGHKTDRKDSGWICKLLLAGLLKPSFIPPLEQRNLRELTRRRRQLVQEISSEKNRMMRLLEQCNIKLKSVMSHMDGKVATQLLDKLCSGEEVTMEYINSVYHGRLNATPEELYKACQGKIDNDNLFLMYVIKAHIYEMEKLVAQLSERISAKLSPQRAILDMLKAVPGLDLRTSENLVAEIGFDMSKFPSAKHLGSWAGLCPGNNESAGKRKSGRITHGNKQVKAVMTEAAWASTRTKNTFYSERYHRIAARRGKKRALIAVAYSMLTTVYNILANNVTYKELGAEFVTLLIEKKRKKYLTTELTKLGYEVQIVKKQPPLKTEGCST

SEQ ID NO: 506079 - protein, 355 aa, unidentified
MFIVGCDYHPSFQQIAFVDTETGELKEQRLVHREGAEEFYRALAATGQRVCVGMEASGHARWFERLVAELNIELRVGDAAEIRRKRGRKQKTDRQDAQHILGLLLKDDFPPIWVPSWENRDLRQLLWHRHRMVQARTRIMNQLQAVALNEGLRCKKRLWRAGGREQLESFRLAPWASRRRRDLLELLDRLNPTIAELSQAVEREAENNPEAQRLKTHPGVGALTALAFVLIIGDPERFHCGKQVASYLGLVPLEDSSGNRRRLGHITKQGSSMLRFLLVEAAQVTVRSLPEWHHQYSHLMMRRGRKTAKVAMARRLAIRLYWMWREGRDYEQQRSSVRTQDSPEIAMVCTKTPSN

SEQ ID NO: 506080 - protein, 355 aa, unidentified
MNSVRYVGLDVHRDTISAAVLSESGRMIQQSILATRAAAILDFIGGMRGTLYVTFEEGTHSAWLYDLLVRRVARLVVCNPRMNALMKSGNKSDAIDARKLAELLRADMLSPVYHGEKSAMEVQHLARSYALLTEDTTRLMARIKAVFRGQAISCAGQKLYGHKHRDEYLAQLGACALRRRAELLYQELEAVQQLRRQAKHEMIVECRKYPETKLLCSVPFLGPVRAAVLIGRVQTPHRFRTKRQFWAYCGLALEMRDSGEYRMVDGQVERRKRPAQIRGLNWNHNHELKNLFKAAATTASFSNGVFREFYLGLLKKNMQPEMARLTLARKIAAIALKIWKKGEAFDAEQVKLQAA

SEQ ID NO: 506081 - protein, 417 aa, unidentified
MTDFSLYVGVDWGSQSHQVCALGPDRSVKLEQAFEHSGEGLTRLVRALLALEDDPKQIAVSIETPRGAVVETLLEHGISVFAINPKQLDRFRDRHTIAGAKDDRRDALVLADSLRTDMLAFRRVRLGDPKLVELRELSRVHDQLKAERVALGNRLREQLQRYFPQILELGSVYEERWLWALLEIAPTPELGKQLRPGKLRSLLKENRIRKITAESVRQILGAEPLHVAPGVTEACRRHVALLLPKLRLADAQKADVEREIESLLEELSTPVEGKSEHRDALLLQSMPGLGTLVCATMLAEAWEPLENRDYDTFRAVCGVAPVTRQSGKKRVTHMRTACNPRLRNTVHYWAMNAIKFDPRWKDLYAKLRDAGHNHSRALRGVGDRLLSVLIAVLTSNKPYDPEHRRALPTLGPEAAAA

SEQ ID NO: 506082 - protein, 407 aa, unidentified
MIFVGNDWAEDHHDVWVMDEEGERLEYRRIREGINGVAMFHELVGSLVEDPHDVVIGVETDRGLWVEALVGAGYQVFAVNPKSVSRYRDRHTVSGAKSDRGDAKVLADMVRTDRHNLRQVAGDTDQAMGIKVLARAHQRLVWDRQRHVNRLRSTLREYYPAALETFSRLAHRDAVAILEIAPTPAGGARLSKPQIKAALKRGGRQRNLDAKTIEYQTALRTKHLEAPEAVASAFGVITTSTVAIISELNRQIADLETELSNRFREHPDADIYLSIPGSGDVLGARVLGEFGDDPERYATAKSRKNYAATSPLTIASGKNKTVIGRYIRNDWLFNPALRIAFCSLSASEGCRAFYDERITKGDTHIQALRQLANRLVGILHGCLKTRTLYNENTAWAHRQLEETRQAA

SEQ ID NO: 506083 - protein, 331 aa, unidentified
MKTNEIIGIDVSKLLIDVCIYSKQIVQQFENSKSGFKLMLKWSFKNSSFSKEETMFVFEHTGMYSHLLSVSLTEQKLSFFIASGLEIKRSIGIARGKDDQIDAKRIALYGYRLKEELKPSKLPKRSILQLKSLLSLRTKLNKQRAGFKVTLKEQKRIYKAKEYKIIFDVQQKMIAELTKQIHKINTQMQAIIDQNIMLKETYKLVTSVKGIGMQTAIMMIVFTDNFSKFENWRKFASYCGVAPFPYQSGTSIKGRTKVSHLANKKLKAIINMCAISAIQHNPEMKLYYHKRIKQGKSKMSTVNIIRNKLIARVFAVVKRQKPYVDTFKFAA

SEQ ID NO: 506084 - protein, 489 aa, unidentified
MKADKFMGRLIPRLKQAKIPRIRDCVVERVWEIIPYQGKIICPYQAETFMKKRRDRVCGADVHKDLIVATITGDDVLPIQENFGTTRAELERFRNWLVANKCEQVAFEATGVYWIPIHDALSQTIDTIVANPLQIKTIPNDKSDSKDSKRIATLCLNGQIKRSRVFAEEDRDLRMMTRARSGYVKTRTQFRNRIHKYLSSSGIKLSSTMDDIFCKSGRYLLNGLADEKPIEEILKGIPSGKIRKKQDLIRAALENRLNETNRMLVRDALELLDNLESKIENLSHEVLKKVQQKSKDLAIVMSIPGIGFISASVILSEIGNYHDFQTPEQLAKWCGLNPGENESAGKKKKCGITKRGSKHIRLVLVQAAQTIANMGKTKLSRFFQRLIKKKERNVAIIAVARKLICLVYHLLINQELYQENECKKTRKQSQDKSCQAPSFQEEHLTDKVAAIVDAFYHLNARGRKNALMREIADISEIKVGQKRPSKGGG

SEQ ID NO: 506085 - protein, 347 aa, unidentified
MRFYTERHKHYCGIDLHARTMYVCILDQEGQVLLHRNLPCDPERFLRTIAPYRDDLVVAVECIFTWYWLADLCAQEGIPFVLGHALYMKAIHGAKAKNDKIDSKKTAALLRGGLIPQAYVYPPEMRATRDLLRRRLHFVRHRGQLLAHIQNTHHQYNLPTPGKRIAYRSNREGIGEGFEDVSVQTSLAADLALIDHYDVVIRDLELTALRQARGHDLDSFERLKTIPGIGKVLALTILYEIHDIGRFPRVQEFASYSRLVKCQKSSVGKVLGTSGSKIGNAHLKWAFSEAAVLLLGKCPEGKKVMARLERKHSKGKALSILAHRIGRAAYFMLARKRAFDLERFVRS

SEQ ID NO: 506086 - protein, 348 aa, unidentified
MENVSRIGMDTSKSIFVLHGVDASDQVGLRKKLRRKEVVEFFRRLRPTRIGIEACGASHYWARQLSALGHQVLLIAPQHVKPYVRRNKNDAADAEAICEAMSRPRTWFVPAKTAEQQAGLMLAGTREAFVRRRTQLSNTIRSYAAEFGLVSSRGLDKIEPLLARIAADDDLPTLAKEMFADLGEDYALLQKRLEIIERKLRLWHRNDEQSRRLAEIPGVGVVGAALLAMKVPDPKAFRSGRDFAAWLGLTPKDHSTAGKQRLGVITRAGDETLRSVLVVGATALLRQVRLGRSHHSRWLADLLRRKPPKLVAVALANKTARIAWKLMVSGESYDRTRVGIAAREAAPA

SEQ ID NO: 506087 - protein, 371 aa, unidentified
MTSVMKLSEVVDVVIGVDTHVETHAAAAVDVATGGVLAEITVEATGEGYAELVGFADEVAENHGALRAWAIEGTGSHGRGLTMYLHEAEEMVVELDRPERARRRGGVKSDPADAIRAAREAIARTRIGTPRGSGGTREQAATRQALAVRLAIRRSAVQAASDARRQLFSAVLTAPEPVRARLRGLKAGALIAKTANLRTTARWATVNVETATTVACLQTWARRIQQLTAEAAEHEREIRTLVRSWRPELLQESGIGPIVAAIILCAWSHPGRIHSEAAFAKLAGTSPIEATSGQIHTRHRLNRYGDRRLNCALHTIAITRQRHDQATKDYTARRTTEGKNPREIRRCLKRYIARDLYRLLENQAPQPLDAT

SEQ ID NO: 506088 - protein, 420 aa, unidentified
MGFIGGELRRDFIGRIRGADPGRLLAVPIDVGKRSGAAMVCDFWGEIVASPFEFALNERGFQDLAVTLARAEAERDATWVRVGLEQAGHYHRPLQARLEAHGLDVTLFNPAQVKANRNQDLLRSLKSDARDLAAMAELLIRGKGRRSTGGDDAIVMQAAVASHRSRKVKARTALKNQIQATLDLVFPGLSGCFGSLLDTKLGRVLIDEAMTPERVRRLGPERLRRFCSNRGVVVKRAKARQVVDAAQVAFALPEAVSGVHAKLLAADVGLLQRLDAEITWAEAELADILPRTPAQILTTMPLVAVVRASNYGGAVGDVTRFRNAAQVYRLSGLVPRLYESAGKKRAATHISREGKVELREAIIQLGKALRQGHVDFARYATELMSRGKPKGVVACALGQRANRVAFAMMRDQRPFDPARW

SEQ ID NO: 506089 - protein, 409 aa, unidentified
MNPLYVGIDVSSRSNVVYLMKPDGSKIKNFSVANSKNGSEKLVKEILAALTSFALTDVIIGLEATSVYGDNLVCFLREDGSLTPYNRKIHVLNPKQVNKFKESYNDLPKNDFVDSFVIADCLRFGRINKEVYLEDYRYKALQNLTRARFLAVQNLTREKQRFMNVLFKKYSSLAQEKVFTDTFSTTALAVYEEFESADTLAYMDLHELTEFLQKKGKNNFSNPEEVAKAIQKAARSSYRLPKTVNDSVNQVLSISISSMKALESQIKEFDKAIAAQMELIPNTLTSIKGIGPVYSAGIIAEIGDINRFPNQAKLAKYAGLAWQQHQSGGFESENTRLIKTGNRFLKYYLGEAAMSLVRCDAEYSRFYHLKYKEVNKYQHKRALALTARKLVRLVYRLLKDNRLYIAPKA

SEQ ID NO: 506090 - protein, 348 aa, unidentified
MKNKSFVGIDISKNVIDVSIFREDTNIKMFPHEVFNNTRKGFGDMCSWLKKSRVVLSQALFGMEFTGCYSLDLEKFLTSKNYSFCMLSTRIVKHHPMGTIDKRDKNDSAKIADFLYRYDGTECAKPYKLPSKAMQQLKQLVNERKFLVEQRTNFMNRMQMFETKEDSAMYESYIKKLNLDIEKIDQEECELMSKEEDVFDTFQNLLTIPGIGLVNATNIIAITRNFTAFDTARQYARYVGVAPCSHTSGTSVKWRARPSAHCNGQVKADLSMAALRAVEYDVEMQMFYNRKLGGRKDSDTKRKALNAVKFKLIRRMFAIGKQKRKWEVLNTSDDRKNLHIEKSKASEL

SEQ ID NO: 506091 - protein, 391 aa, unidentified
MVYLGIDVAKDKHDCYIVNSDGEILANVFTIPNDQTGFNLLFQRLKSVAPDLSKVKVGLEATGHYSYNILGFLLDNGLHTYVINPLHVNLFRKAGSVRKTKTDPIDARTIAGMIMSNVDLTSYTAKSYHNEELKSLTRYRFDKVQERAKLKTSVARLVSILFPELEKLVPTLHMHTVYALLAGFPGADQIASCHLTRLTHLLSESSKGRYKRDKAIQIREAAKTSIGSVMPAKSLELKHTIHLIEVLTEEIDEIEFSIKQIMDADPSPILTIPGISYRMGAMILAEIGDFSRFSSPDQILAYAGLSPSTYQSGKLDNAYPHMEKRGSHYLRFALFNAARFVCNWDPTFSAYLAKKRAEGKHYYVAISHAAKKLVRLIFALVRSGQAYSPAI

SEQ ID NO: 506092 - protein, 379 aa, unidentified
MVVVQKHLTDRRIKMITDNYTTIGMDVSDRKIQVCIMAKSGINPKIVKEMTIPTTKEGLQKFLSSQDKNAPVVFETGTHCRWMNEVAESMGFKVYVANPCRLRMITESKTKNDINDARTLARIALSDPGMLHPVKLRDAEHQKMLNLHEMRNLLIKQRSGMIVQMRFIAKSMGFRIPKTSTKYFHKMDTTLWPTEFRDIAWPMLKNLEQLDITIKTYEKKIRELAETPTFKAQVDRLMEIHYVGLYAATGFIAVTGGDMDRFERPRDIGPWLGLSPKQDQSGDIDKQCHITKAGSPFMRRLLVECAQMIVRDGAIETDLKIKGMRICVRGAKIAKRKAITAVARSLAVLMVAMLKKMDKPYKPLSEVNEKAFSESQFSA

SEQ ID NO: 506093 - protein, 338 aa, unidentified
MKSWSVAVLSEHSVLKRFSQSPSPESLHKFLTSHYPGADYYSVYEAGFCGFWIQEKLTSLGINNIVVNPADVPTMSKEKLRKTDAVDCGKLARELRSGTLKGIYVPDVATLEMRSLIRLRNRIVKDTTREKNRIKSFLRFHGIDIPEEFTRHSVGNWSKRFLAWLREVPLSTEYGKEALNMHMGQLVRLRVMLLEQTRVLRALSRSEALKEPVRLLTSVPGIGITTAMSLAVEIDDIGRFSSADALASYIGLIPMCHSSGESQANGNITVRKHAMLRCYMIESAWIAIRKDPAMTLAYEGYRKRMNAQKAIVKIARKLVNRIFFVLKHGQEYVPCVVN

SEQ ID NO: 506094 - protein, 429 aa, unidentified
MNYNTQNAKIASITEKTLIVGIDVGSETHYARAFSWRNYEYSKKPFAFSNDEDGVASFKAWMDDIAEKHEMEKVIPGMEPTGHYWLNLGAYLQGQGMRPVHVNPHHVKKSKELDDNNPNKNDRKDPKTIAGLVNEGRFSYPYIPTGIYAEIRNLSNLRIQTQEEITRIKNRIARWFSIYFPEIKDVYRNPDAVSGLMVIKQAPLPCDIKGLGVDGVNKIWRDARLKGAGIKRAKTLVTAAEHSIGNTEAPRSARKEIRNLLNDYEIYKSRMDELMEEIEELLSEIPYIDKLMGICGIGIKTVSCFIAEVGDIERFDNPKQVQKLAGYAIVADSSGKHNGESRISHRGRKRLRYALYEAAISVIGKNKEFKEIHHYYRTREKNPLKKMQSVIAVSCKLIRIFYTILTKGIDYDGQKMLRDIVRPGMQSAA

SEQ ID NO: 506095 - protein, 335 aa, unidentified
MIQKCFIGIDISKEKIDIACIDEDYKLMFEKKIGNAELKIKTFLLGFLRKLKIEKTEVLVCCEQTGIYNRPLERVCVELGITLWVESAIKIKKATSSLRGKSDKMDALRIADYAKRYSDKQRAHKEPKAENQKLKNLLNIRETIIIAISRLSQQVNESKIFDIEKYKLLKASFDKPIKALKKQLAELEKEINDVVEFNAEMKNNAELLLTIPGIGRQNALAFIVYTENFKLFANPKHLACYAGVAPFPNESGTVIKRARVSKLANMKLKTLLHMAAMSCIRAKGDLKEYYIRKVKEGKNKMLILNNVRNKLIETMFAVIKRQSGYVENYFDVDPC

SEQ ID NO: 506096 - protein, 427 aa, unidentified
MSFKIFKFNCCGLDIHKTWIFACIGITDSNNRTQYKQARFSSFTKGLNELCDWLAKYNCTDVCMESTGKYWIPVFNILEPHMHVILTHPKYVKAIKGKKTDKRDAKWIANLFRFDIVKASFIPPADIRALRELSRYRLKLSYMRSAEKNRYQNSMTISRIRIDCVLTDPFGKTASSIMNYLLSDVPFDEKECAKLIHGGIKVSNEEIFDSIRGFEILSEQRFKMSHAKQHMELLSSYMDEIETELFRLSRPYDEVIKRISRIAGFTERSALFVISEIGADMGVFESDKHLCSWAGLTPANNESANKKKSTRCSKAGQYLKPLLIQCALAAVKSRKNPYYAIKYNRLAKRRGRKKAIIAIARMMLTSIYHMILNNEEWKPDDYEAIIHPSKPEKVALTLDNVIQFLGEQGADPETLKLLQQQCAVHSG

SEQ ID NO: 506097 - protein, 351 aa, unidentified
MKTMTKQLQGEELFVGIDLHKHRWHVTIRTADVEIFSNSIVGRWEDLRRVISRYKDCQIHAVCEAGYFGFWLFDHLTQYGVECIVTPPSLIPQEHGNRVKTDRLDSRKLARLLAKGLLKSIWVPSAKERFHRQVIRRRRQLVGDRVRTQNRIKSELCFYGIDLPAARSKWSQVYFANLQRIKFKNHWMQKSFNQLLEQYEFLSTQIDKQTQLLKQLSQLPLYCDRVKILCSIPGIGILTAMEILLELQDFSRFRRAEQLAAYVGLTPSQYSSADKIRMGRITGAGKNSVRSALVESCWHLIRKDKAMRKKYEQIKARAGGKRAIVAVSRKLILCIRRLLLDNRPYVYEPVS

SEQ ID NO: 506098 - protein, 375 aa, unidentified
MTTTTRPEMSVSEPTLYVAFELGKKEWKLAMTSRFGVEPWVRTVPGGDLGAVDRLLRQGRQRFALPAHARVVSCYEAGRDGFWVHRALTALGLANRVVDSASIEVSRRKRRAKTDRLDARKLVTMLVRVCCGEQRVWSEVRVPTVAVEAARQMSRERTALTQDQTRLTNQMRGWLASWGCAFPRHRPDAWWTTVRDWAGAPLPGEVQTRLARAAARMAVLEEQIAALDAQQQAVVTAAPATSAIRQLVRLKGIATTGASVLLDEGLVWRAFRNRRQIGGLLGFAPTPYDSGETQREQGISRAGNNRLQGVSIQLAWSWVRWQPGSALTLWYRAQFGTGKRARRIGIVAVARKLVIALWRYVTTGVVPAGAILKVA

SEQ ID NO: 506099 - protein, 314 aa, unidentified
MNYNTVYVGMDVHKESFSLCAYTIEAEKASHYQRTEADYKKVLNYLEFLRTIYGDDANFICGYEAGCLGYTLYHQLTANNVKCIILAPTTMLEQRSKKRIKTDKRDAEIIAKCLAQHNYSPVHIPTAKDEETKEFLRMRDDHKLALKKVKQQILAFCLRHNYRYDGNSHWTAAHLKWLKALTPKALYKEILDEYMLTYQTLSDKLERLDKRIEELSTQDEYKEAVKKLCCFIGVKTHTALSVLVEVGDFKRFASAQHFASYIGLVPGEDSSGDDQNRLGITKAGNRHVRLLLTEASQCYARGQVGFKSKELKAR

SEQ ID NO: 506100 - protein, 343 aa, unidentified
MSVYVGIDVHRKRSQLAVIGTKGEVLVNRNVPNGVEPILKVIGGLPPGTPAAFEAAFGTGWLVELLEGYGFEPHLVHPLQCKAIASARLKNDKVDAEILAQLLRADLLPEAWIAPPAVRQLRALLRHRVQLVRLRTLLRNRIHAVLADHGHDRPAGYWSGPGREWLASLSLPAVSREVVEDGLALIDATEVRIDRLDWEIVQRARSDPRVKVLTQLPGVGPFTALVILAEIGDITRFPTARKLASWAGLTPTVRGSDRVARYGHISKQGSVWLRWVLCEAAQTAKRSPQFAAGYQAIAARRGKKIATTAVARKLLTRTWHLLTDAERAAPQPATARPPEKQRR

SEQ ID NO: 506101 - protein, 391 aa, unidentified
MIYIGIDVAKDKHDCFITNSEGEVLFNAFTIPNNADGFHDLFQKISSLTNDFSNVKVGLEATGHYNYNLLGFLIDKGLPTFVINPLHTNLFRKSLSLRQTKTDKVDAHTIALMMMSGVNLQSYSNTSYHNEELKSLTRYRFDKVQERAKLKTSISRLVNILFPELEKLVPSLHMVSIYALLAEFPSSAQIASCHLTRLTNLPANASKGHYNKEKAIEIRNAAKHSIGSNMPAKSLELKHTIRLIQELTSEIDEIECSIKSIMDEIRSPILSIPGINYRMGAMIIAEIGDFNRFSSPDKILAYAGLSPSTYQSGQLDGCYSHMEKRGSRYLRYALFNATKFVCIWDNQFSAYLAKKRSEGKHYNVAISHAAKKLVRVIYQLEKSGQLYHRAA

SEQ ID NO: 506102 - protein, 370 aa, unidentified
MQFIGIDLHTNKFTCCYRNEEPSADGKDGKRIETFELSSLGLALFYKTLTEDSYVLLEATITTFCFVRLIQPKVKEVVVANTYELKQISLGRNKTDKIDADKLCRIMKMQVLSGEKAISPVTVPPVIIQNLRGLFSTYRLLKKQSTQFKNRIHSLLKEKLYGFTQEQIFGKSRRKMIREMEGDPVLSFQLNHLFDLLENLEAGVEELEEKIKEQAEPFMKEIEILTSMKGISVLIAISIIADIIKVDRFNDSKSFTSYLRSAPQVESSNTTKGNKGTNKMGRKLSATLLTQVLNHVLAASPKLDKWYTRLTAYKKAGSVRTGLRRRVFAEIYQMLKKGEYHYCRDAKKHEEKLNQYKRFLEKRKYFLKSA

SEQ ID NO: 506103 - protein, 457 aa, unidentified
MGNARARRIPAQLVEDEDYQLRHERVAGIDIAKAKGDVCTRLPPQRDGGRRASRVEDVPARAREILDLAVRLIADGVELVVMESTSDYWRIWFYLLESAGLNVHLVNSSHARQLAGRPKTDKLDAQWIARLAEMGLLRPSFVPPPEIRALRDLTRTRLQLVRDRTREWQRLEKLLEGALVKLSSVVSSLARTKTARDILEAIAAGERDPKALAALAAAHVKGGRAAIEEALEGMMPGGHHQMLIRVHLDHITFLDRSVSAVEDEIRAALDAIPAAWGIGADGVPSPDPGPGAAVLAAAARLAEIPGVSPGLATAIIAETGLDMTRFPAAAHLASWAGLAPVARQSGPRSRKPKKGQGDHYLKGYCTQAANGAARTGTFLGERLRRLSKRLGGNRAKCAVARSILVIIWHLLASPEARFTDLGPDWHARSGDRDRKIRAHLRQLQALGLDVTITPTAA

SEQ ID NO: 506104 - protein, 468 aa, unidentified
MARLGKKRAGKQPKKAKRPVDVTEGLSPINLNTAGIDVGNAEHYVAVPLGRDTQPVQTFGSFTADLYRMVKWLLDCGVESVVMQATGVYWIALYQILEEHGLKVTVTNARYTKMLPGRKSDVQECQWLQKLHTFGLLTQSFRPTEEFRVLRSYMRQRENLVTAAGICIQHIQKAMTELNLQLANVLSDISGKSGMAILRAILKGERDPYKLAELCDRRVQASRKEVAQSLEGNWREELLFIVQQSLDLYDSYDDKVKECDRKIEAHLQTITHKVETATAPLSPPRRPNMQPNRKHIPQFDLRTYLYQVSGVDLTQIDGIGVQTAEVVLSEVGVDMSRWKSEKHFASWMGLSPDNQITGGKVIKRGTKKVINRAATALRMAAQSLQRSQSALGAKFRRLRARLGAPKAITAMANHLAKLIYRMLRFGHEYVDKGAAHYEAKYREQYLQYLKKQAAKQGFQLIPAEGVVG

SEQ ID NO: 506105 - protein, 368 aa, unidentified
MTKSITFVGLDVHKNSIAVALADAGRNAEVRNYGIIGGDLDDLHRLVKKLATPGRELHFVYEAGPCGYEIFRSLTAKGFDCAVCSPAHIPKSPADRIKTDRRDAMILARLHRAGELTYVFVPRSEDEAMRDLTRCREDAKKAQRVARQQLNGMLLRLGYKYSKVRWTKAHIGWLADQKMPTPPQQVVFQEYIHAINETTDRVERLTQQIATLLPDWRMAPVVTALQALRGVSMIVATTVIAELGDLTRFESPKQLMAFLGLTPSEHSSGETKKRGNITKTGNGHARRVLVEGAHAYSFPARMTRLIGKRQEGISQEVRDIAWKCQVRLCARFCRLMARGKSRNTVVTAIARELAAFMWAIANKTPITS

SEQ ID NO: 506106 - protein, 330 aa, unidentified
MKGWNVVLGVDVSKKTIDICWAEHKLFIQISNNSEGFSKFKKWCKGNKIDLEKTFIVLEYTGGYEYRFIQFCESRSIDYRRVPGLEIKKSMGMVRGKSDKTDAFRIGQYGEEKIKRLEPSKPVDKNILELKTLLSFRKRLVRERAGYQSTVKERKHMYEVGDRDLIIRTAKEKMSANTGYIKKVEAQIMELITSDESMHLNYQIITSIKGIGQVNAWMTIAYTENFSSFPDGRHYAVYVGVIPFEHTSGTSKKGRRRTSNLAQKELKQELNQAARIAIQHDPELRAYAERKMRNKEYGLVLNNVKFKLILRMFSLVNRHEMYVENYRRSA

SEQ ID NO: 506107 - protein, 322 aa, unidentified
MQGKVLPERSAEEVYAGCDVSKDFLDLYLHPSGERLRVSNDRQGLGKLKRELAGRPVALLTLEATGKYHRAACRSLSQAGLPVAVVNPLRARLFAKAAGLLAKTDRVDAMMLAYMGKALCPRTTMPTEQAHEDLSELVRARNAASAERTALKNRLAAAATSFLKSELKRCIASLNTHIERLAAEIERRIKANPAFARRAEILASIPGIGPAVAADLLVDMAELGSLSAKAAASLSGLAPVADDSGHRNGPRRIRGGRPQARRALYLAALSAARYNPPLAIFYKRLIEAGKKPKVAIVAVMRKLIVLANTLLSENRIWCPNHP

SEQ ID NO: 506108 - protein, 394 aa, unidentified
MQRNDLSRSLVAFDQNSTLVSVVELSLKTWLVGGVVPGLERTPLKKQGPDAEALLALLHRWRDEAVKAGSKIERIVVAFEAGRDGFWLARWLQARGIEVYVIHPTSIPVSREHRRAKTDRLDAGLLTRALLGWLRGEPKHCGMVAIPTLAEEDARRPNREHEHLVGERSRIINRLKAATIRHGIRNFNVKLSKAAECLDELRSAEGVPVPPNTLDEMRRDMARLRFIREQIKEIERMRLERLQRAPREGTHPMVLLLAKVMGIGVETADMLVHEVLSRSLRDQRAVARYGGMTGAPDESGGKRRDKGLARAGNARVRRGMVQLAWRWLMFQKNSALAHWYRARTANARRDIRKTMIVALARKLLIALWRYVTTGEVPAGAVLRPATGAVPRLAA

SEQ ID NO: 506109 - protein, 369 aa, unidentified
MNEQIHEQSIIVGVDAHKYSHTAAALNAWGQDRGRLQFTNDSLPQALSWLQTLGQREHVIVAVEDANSYGWHLAAALAKERFVVRSVPAVLTERDRQHSTSRDKSDYEDARRVAKVILTKYEETLPVMASIANPEELAIAEELNLLLNERRDVIKQQTILKNQLHALLHRYYGDHYADAFSKPFHQTALAFYEDDLAKNTDNALVAQSILRRIERLKLFTAQSSEMLGQIAGVGQTSPAVSALSEQIHGCGTLTACAIMAEIVIIRRFANEDRLAKYAGIAPTMKSSGSHNRLHTNPFGNRLLNRALHTIALSQIAIKGDPRGKEYYQKKLTEGKTKLWALRCLKRQICNLVFRALQAVETGNSGKTAS

SEQ ID NO: 506110 - protein, 343 aa, unidentified
MVVIGVDAHKRTHTMVAVDELGRTLGERTVAATSDGHLQAVQWAARWPGARFALEDCRHLTRRLEGDLLRAGFAVVRVHTRLMAAARRGGRQRGKSDPIDALAVAHAALREPDLPVACLDGPARTVKLLSDHRQDLVAERTRLCNRLRWHLHELDPGLDVPSRGLRRYHVLDGLAARLAVMDGVVARIAAGLVARCRELTSQVNALERELGTLVRQLAPALLAIPGCGVLSAAVIIGETATASRFRSRDAYARFTGTAPIPVWSGNTVRVRLNRGGNRAVNCALHMIAVTQARGIGPGKDYIARQLAAGKTTTEALRLLRRQLSDTVFRALLADEHRQAHGTA

SEQ ID NO: 506111 - protein, 415 aa, unidentified
MQTLYQRVVGLDVHKDSIMACVRITDSRGQATEAIRTFGTMTEDLLALSDWLAENQVTHVAMESTGVLWKPVWNILEGGNWKMLLVNARELKQVPGRKSDVKDSQWIAQLLACGLLRSSFVPERGQRDLRDLTRHRAQLAGECTRCVNRIHKVLQDANIKLSSVATDVMGLSGRDMLDALVKGETDPAALAELARGKLRAKIPDLKRALCGKVTPHHQFMLEQLLDHLSHLEEQLGHFNQRIEEALRPFVDEATFERLDAIPGVNRETIENVVAEIGVNMEQFPTEGHLASWAGVCPGNEESAGKRKRSRTTKGDVWLRRALCQAAWAAARKKDSYFQAQYRRLAGRRGKKRAAMAVGHSILGVIYHLLKDPQLTYQELGGNHFDNIDPKRLCRHLVKRLESLGYDVSITKRTAA

SEQ ID NO: 506112 - protein, 333 aa, unidentified
MYYLAFDVSKSKLDGILTNLRTKNKYFQINNDYQSITDWLNDVKLPKKLISGCESTGGYHLLVLRILVERGFIFKLINPLLVKQFIRTTIRKKKTDATDSLIIAKLLAQGEGYQIDSKELDLTAKTLQRGLEKLTEEKHKFSLMGQGLKFQEQNEDLMSLDNKFKEIEDKIGETIKEQVSFLKERYSEETVVRLLESIPGIGFKLAFTIWTEIGDVKKFDGYKKMVAFAGLDPRIRQSGHCLNNQGKLTKRGSPHLRRALFVAASVARRYDPELKLYYEKKRSEGKKYTVAVCAVTRKLVSRIYAVWKRGTPYLKKEIPSLNMLKAVATMATA

SEQ ID NO: 506113 - protein, 430 aa, unidentified
MSTAYKDVAHVGCDVHYKFSTVTLRDEAGRVVARERLDHPDRAALRERLRRWPAGTQVVLESSFGWGWLSDEMLAEGLCPRLANAFKVAKMRKARGQVKTNTKDADLLSELPQEPHAWWEAWLAPPAVRDRREFMRQRGRLVRLQTQIKNQVHSVFHRHGLFHEFSDLFGGQGRAFLWALCRDGHEHLPASGRHTLASLLALLESVRGQLAEILKQLQHRVERTEIARLLKTIPGIGVILAQVIEAEIGEIDRFRGQRKLASYALLAPQSQDSGEAVPGQAPKGRHLGRRGNHTLKWAFIEAAHGAVRSGGRWRAMFERVTNGGKRDRNRGYIKVARELVKVVYAVWKHRRPYQDQPPARPGTKAPDSPSPVRGREAVEAFFGCSSESSSGSPGAGEPGRSASDRGRAASPRARQNRKTRRTRRPASRQP

SEQ ID NO: 506114 - protein, 372 aa, unidentified
MTNHEAFVGFDVHKETIAVAIAKGGAGGDVCGFGTIKNSKQAVALLARKLARTHGKLSFCYEAGPCGYAIYRQLADLGHDCQVVAPSLIPTKPGDHIKTDHRDAVTLARLLRAGELTAVWVPDQAHEAMRDLVRGRIAVMQSVRKARQQLQGFLLRQDLRYPGKSPWTKLHRDWLRSLTFAYPAHHVLVHELLHVIEEGQRRQQRIEQQIQALLPTWSMAPIVGAIQAMRGVSVIAALTLAAEIGDFRRFDNPRQLMAYLGLVPSEFSSGKRVTRGSITKAGSAHARRVLIEGAWAYQQRAGISKLHMQRLTNLPTQIREIAWDAQLRLCARYRRLAAKGKCKNVVTTAIAREMAAFVWAIAREVEPVRIAA

SEQ ID NO: 506115 - protein, 307 aa, unidentified
MNGIGIDVSKAMLDVVVHCGPFARFHNTPAGHRKLLSWLATREACQIVLEASGGYEQRVLDALFDAGHQVVRADARRCHAFAAATGVSAKTDRLDAANLACMAATLELRPHQPMEPWRRKLREFVRARQQLVDLTMSAENQLEHVTETILRRALQANINQMKKNCLRLEKHIAEQVRQQPQLEAMRAFKGVGATLQAVIASYLPELGTLDGKAIAKLVGVAPIAHDSGSMRGIRRIRGGRIEVRNVLYMACLSAIQHEPRIREFYRSLRARGKPGKVAVVAAMRKMLVILNARARDTLAGVAQAIPT

SEQ ID NO: 506116 - protein, 346 aa, unidentified
MRFYNGQHRYYCGVDLHTKRMYLCILDQEGNTRLHRNVRAKPYDFLSAIAGFRDDLVVGAECMFTWYWLADLCRDEKIQFLLGHALYMKAIHGGKKKDDKLDSEKIARLMRGGTFPLSYVYPREMRATRDLVRRRMFLVRRRSELLAHVQMTNQQYNHDPFEKMLQYASNRDVLDRFEQPSVRLSVEADLKTVDHYDQLLTQLEQDLVRQATLHDPRACRLLRTIPGIGKILSLVLLYEIHTIDRFPSVGDFLSYARLVTPKQTSDGKVTGHGGAKIGNVHLKWAFSESVLWMLRYSDDAKAFLKRKEKKYGKCRAMTMLARKIARAVYQMLKRNESFDAVKFFAC

SEQ ID NO: 506117 - protein, 401 aa, unidentified
MHYVIGIDVSKATSQVAVTVDGKVTQHFKITHDVLGFNQLNTIIMQFNEFPDIVFEATGIYSRRLKSFLDWHNYPYTFLNPLAAKKQLDQLRPNKNDLNDAKNLAETQFILARAKSYVQNPIYIELQYMSRFYQQINHDIVSTKDRLHRILQLTFPEIEGLFSATDSPHYWELLTIVPHAIITRRSRQALMDTIHGGISWHIGHERLRKLVDQLMSMGQISAPAVAANSYNVAQVIYYAKRLIELHGPKCDILTAMVDKAKDLPEYSIYQSIPGFSDKTVVSLIAELGDLHRFRTANKLNAFVGIDLRFNDSGDYKSTGFITKRGNSTARKVLFRAISNIASTASYGHPSHINDWYQKKKQSSLSKGTKKIAIGAMSRLLRTMHYLVINHQLYDYKAVSKH

SEQ ID NO: 506118 - protein, 454 aa, unidentified
MATRKKSISLKPGKGREALRITFPNAAGIDIGSASHFVAVPPDRDDEPVREFPSFTADLHAIADWLTACKVDSVAMESTGVYWIPLFELLESRGFKVFLVNARHVKNVSGRKSDVLDCQWLQQLMTYGLLAGAFRPAEDVCVLRALWRQRGMLLKTQARSVQHMQKALTQMNIQLANVISDVAGETGLKIIRAILAGERDGHVLAAMRNARIQASAEEIAKSLQGSWRTEHLFALKQAVDAFDFTGTQLAEVDHELERQLQVLKTEEGEPAKGKKRGKARNSPKFDLRTQLYRMCGVDLTRIDGIDVTTALAVISETGSDMTRFPKVGNFTSWMGLCPGTKITGGKVMSGKTKRCANRAAQALRLAAASLRTSQSALGAYFRRMCSRMDKPKAITAAAHKLARLIYTMLTKGEEYTDQGQDYYEKRYRDHVVQNLSQRAAKLGMKMVPLEEAVP

SEQ ID NO: 506119 - protein, 370 aa, unidentified
MKYVGIDLHTNRFTCCYLFDNSKEKQMETFELDTEGLQRFYLTIGKDTYILVEATINTFAFVALFKDLVREVIVANTYQLKSVGIPGKKTDKLDAAKLAEKLKAQIVSGVQQIVPVTIPPKEIRDLRALFATYRTLRKEIGRTKNRIHSLLKENLFPFTKEYIFGKKARAEIRGISSDYLLSFQINLLMDTLERLEDAFETLVVQIKGAGALFMPQIDILTSMSGISVVTAIAVIADIIDVSRFRNSKHFASYLRSTPRVESSNDKTVIKSTTKAGRKLSITLLSQSLNHFRDGNKNLSRWVEKMSGHKKKGIVRMALCRKVITEIYQMLKKEEYHYFYNPVLHGKKMAEYQKFLGHENIIFPKDLQISA

SEQ ID NO: 506120 - protein, 458 aa, unidentified
MNRNKSTGRVRRTMAVVHPNAAAIDVGATMHTAAVNADRTPEPVRSFGTFTTDLRRLVDWFAECGVDTVVMESTSVYWIPIFELLDARGFAVFLVNARDAKHVPGRKTDVSDAQWLQRLHSFGLLRASFRPKGQIAELRAYLRQRERLLEYGASHIQHMQKALTEMNVQLHHVVTDITGATGLRIIRAILGGERNPAVLAHMRDRRCHATVETIEKALAGNYRAEHLFALEQALALYDTYQQKASACDARIEAVLKELSARRGRKAGPLPSPRQNRSRQQNSLVFDVRTALFALLGKDLTQINGLGPYLALKLIAECGDDLSAWPSAKHFTSWLCLAPSNKISGGKVLSSRTRRSGSRAAALLRLAAVTVGRTDTALGAFYRRLSARIGKAKAVTATARKIAVLFYNAVRHGMDYVDPGASSYEIRYRARVIDNLHRRAKAFGFMLQPMAPTPGMAVS

SEQ ID NO: 506121 - protein, 317 aa, unidentified
MDNTNNQNEINVGVDTGKTQLDIYIRPLDIYFTVKNNESGIKEAMKTLKKYPITRVLIEATGRLEQPFIMACAAANIPFVIANPVNIKRFAGAIGQKAKTDKLDAHLIAHFGEAIKPSLSTLKPEQMRLMSDLLSRRRQLMDMQTMEKNRSQIMPKTIASFIKPVLTALKNQIEKVDSKLQKLIEECDEYKAKNDIIQSVPGVGNVVAFNLLSDMPELGYVNNKEAASLVGVAPFNRESGAYQGKRMIRGGRPKIRTAMYMAMMSAIQCNPKFKEIYHRMVAAGKPKKVAIIACIRKLVVIINSMVREGVMWDPKMV

SEQ ID NO: 506122 - protein, 453 aa, unidentified
MDQPKYRPRGNRETLTTVNPDAAGIDVGSQFHVVAVAPQRDAEPVRTFQSFTGDLHCLADWLVACGVKSVAMESTGIYWIPLFEVLEARGLEVFVVNARDVKHVPGRKTDVNDAQWLQQLHAYGLLRGSFHPPADIAALRAYLRQRERLSDYAAAHIQHMQKALMQMNLQLHHVVSDITGQTGLRIIRAIVAGEHDPATLARYRDLRCKASAETLRQALEGHYRPEHLFALQQSVALYDSYQQHIAECDRAIEAVLANLRRPAATAAPPTARRRSRQPNALRFDARTALYAVTGVDLTQIHGFGPYLALKLVSECGTDLSRWPTAQHFTSWLCLAPSNKVSGGKLLSSHTRRTKNRASALLRLAAVNVGKTATALGAFYRRLAARIGKAKAVTATARKLAVLFYNAMRHGMSYHDLGATYYEERYRERVLHNLERRAQQLGYTLAPTAVVSVS

SEQ ID NO: 506123 - protein, 379 aa, unidentified
MAIKQESVGRQETVYAAIELSKKTWVLGIALPDRDRPSIHRVAGGNLGELVARLRAAARENRRILVCYEAGYDGFWLARALAKIGIECRVLDPASIQVSRRARRVKTDRIDVLALLRALIAIDRGERHVCAVVRVPSVEEEDARRSHRERQRLVRERTGHINRIKGLLFAQGIRGVEPKLRRTRIDFAALKTAEGHPLPDRLRRELEREYARHDLIEAQLREVEKERDTADAQDPVVERKRQMLVALQGVGGTSAAILAREVFARSFASRRQLGSYLGLTPSAYDSGSMTRCQGISKAGNSWARRILIEVAWLWQKHQPASPLSHWYIQKTTGQSSRIRRIMLIALARKLAISLWRYVETGLVPEGVVIARAESRCAPA

SEQ ID NO: 506124 - protein, 408 aa, unidentified
MYYAGIDIAKYNHEASVIDADGQALADSVSFSNTREGCMKLFKLLERLGIASDALVVGMEATGHYWLSVYAYLTEQGFSVRVINPIQSDAFRKMYIRQTKTDSKDSFLIAQIMRFGQYASTSLADENMVALRQLSRFRLSLVDTVGDCKRRVIALLDQVFPEYERLFCDVFGTTSRELLLRCQTPEDILEIPTGELTALLSKASRGHFGENKAREIQQFASGTFGITYAKEAFAFQIRQLMEQICFSEKQLTQLESQIAELLHRTNSVISTIPGVGDTLGAVILSEIGDIQRFDSPSKLVAFAGLDVKVNQSGEFTGTKNHISKRGSPYLRRAIWLAASRAAFCDPVLSEYYQSLKKRGKHHLTAVGAVARKMCNILFVILRENRPYEPMPPKRTQPQLSEPEPTGRR

SEQ ID NO: 506125 - protein, 316 aa, unidentified
MENFVGVDVSRKCLDVHVAPSGEAFQVSRDADGIERLVQRLKRCAPAIVAIEATGGFETVVAAGLAAAQLPVVVVNPAQVRAFARALGQRAKTDPIDAAVIARFAQAARPVVRPLPDAQTVALAELVARRRQIVQMLVAEQQRRSRTGDQRLARSCERLITALARELADLDASLEAAVRQTPAWREKEDLLRSTPSVGPVLARTLIADLPELGQLTRRRISALAGLAPWTRQSGQWRGRSFIGGGRATVRGALFMAALVATRHNAPLKAFYQRLLAAGKAKLAALTAVARKLLTILNAMVRDNARWDEAKHAAPSI

SEQ ID NO: 506126 - protein, 403 aa, unidentified
MRAFAGVDWAVEKADVCVQAPDGKRLAERTFAMSEAGIVELCQALIALKVCRVAIERPDGVLVERLLAAGLTVMAIHPNQVKAARPRFTAAGGKSDRFDAFVLCELARTDSHRFRVLAVDGDDTKALRALTRARDELVDARKALANQLREQLLAFWPGASTVFADLDSPIALAFIERYPSPADARGLGPRRLQAFLDRHGYCGRQRPQTLLARLRAAPTGTAGELETDARRATVLGLIAALRPIVGQIRQLTSQIHGAVRAHPDGPIFLPLFRDHKTAICPATLIAELGDQRARYPTSATMIADAGHSPVAVESGKRKVAVFRRACDKRLRNAVATLADSTRHWHPWAATVYATARARGHDHQRAIRTLGAAWLRVLWRCWHNHQPYDPTRHGALTRQLARAG

SEQ ID NO: 506127 - protein, 365 aa, unidentified
MIPLFQVVEHTPEALDIWLNELHQKVKGRIAIALELKKGPVVYVLQKYPFVTVFPVHALSLARYRQTFWPSGAKDDPQDAELALELMLRYPQKIKAIEPDNGDIRLLQQLVEQRRLLVEDKRRFVNRLINTLKQYFPQPLEWFSHRGSLLLCELIIRWPSLQQLKRARRDTIRNFLNAKGGRAMALTEQRVASIDNAIPLTTDPSVIEANALMAAALATQIKVVSEIIKTYDERIETLFDTLPDAGLFKSLPGMGPCMGPRMLAALGDNRDRFNSAEEIQNYAGIAPVTERSGQKSWVHWRWQCAKFVRQTFVEWTAKTINSSYWAKLYYQGQREKGKSHQSAIRALAFKYTIIMPLATTTREDP

SEQ ID NO: 506128 - protein, 311 aa, unidentified
MEEIIIDKGCGLDVHKETVVGCVMGSGIKKEIRTFSTMTGDLFRLKGWLSEKGITHVAMESTGPYWKPVFNVLEDSFEVILVNARHIKNVPGRKTDVKDSEWICKLLRSGLLAASFVPPQGIRELRDLTRYRRKLTQTISSEKNRIQKVLEDANVKISSVLSDTFGVSGMEMIEAIMEGNLSVEQISELAKGRLKSKKAEIRESLVGNFRDHHRFMIQASLGQIGSLEKTIADLDQEIDRKLEGYHQEYELLQTIPGVKEQGAASIIAEIGVDMDTFPSEGHLSSWARMNPGNNERAGKKKVARRPMAIRI

SEQ ID NO: 506129 - protein, 405 aa, unidentified
MVPVMDDNDSGFEVWCGLDVGKQAHHACALDTRGQRVFDKELPQDQRRLEALFTKLQAHGRVLVVVDQPNTIGALPVAVARSMGIEVAYLPGLAMRRIADLHPGNAKTDARDAFVIADAARTLPHTLRRVDLGEETLAELKVLAGFDEDLAAETTRISNRIRGLLTQIHPALERVIGPRLSTKQGLAVMKAFGGPQALAKAGKARLLKTITKANPRGAQKFADNILAALSEQSVVVAGTAAAEQVLPRLATSLTNTLDQRVELAAQIEKVLDAHPLAEVLTSMPGVGVRTAARILLDVGDATMFPTAGHLAAYAGLAPVTRRSGTSIRGEFPSRSGNKHLKRALFLSSFAALRSDPVSRAYYDRKRAEGKKHNAALICLSRRRCDVLFAMLRNQQPYRTPTPTAA

SEQ ID NO: 506130 - protein, 382 aa, unidentified
MAGTEPHAWGTGRMDDITYVGLDVHKATVCVAVAESGRGGEVRQVGVFQNRPEILCKMAAKLGRGGRRLSFSYEAGPCGYGLHRLLTACGHSCVVVAPSLIPMKSGDRVKTDRRDAMMLAKLHRAGELTAIWIPDATHEAIRDLVRARATAGRVLSKARQHLQGFLLRHDRIYRGARAWTQAYWRWLTTVRFEHPAQQIVLQDYIHAVEDAEARRDRLTRQIEEMLPSWSMAPVVAALQAMRGVALVVAVTVVAEVGDFRRFANARQLMAYLGLVPSEHSSGSTTRRSGITKAGNTLVRRVLIEGAWTYRMTARVSRKLHDRLEPLSPVIRGIAWKAQVRLCARYRRLAASGKPKVVVTTAIAREMVGFIWAIACIAQLALA

SEQ ID NO: 506131 - protein, 387 aa, unidentified
MHTVTSTTVVATAARANDNTLFASLELSKSKWVVTINSPGSEKFSKHVIEGGDGAGLLELLSRLRAKAEQRCGAGVKVVVIQEAGLDGFWIHRLLLAAGIESHVVDAASIALPRRHRRAKTDTIDGETLLRTLMAWARGERRVCSMVRAPSPEDEDRRRLTRERGTLLKERIQHTNRIRGLLSGQGVRDYNPLRRNRFERLEALRTGDGRELPAMLKAEIRRELDRIALATTQLAAVERARDALIRTDAEEPNNPAALLLKLKGLGPEFASLLWLESLFRSFGNRRQVAAYGGLAPSPWQSGGVERDQGISKSGNRRLRKTMIELAWFWLRHQPDSALSHWFQARVGAAKGRIRRIAIVALARKLLVALWRYVTQGVVPEGAVLKAA

SEQ ID NO: 506132 - protein, 366 aa, unidentified
MEKIYIGVDFHARQQTTCYLKTETGELVISELRHQEKEQVRAFYQQFPSPVIVGLEASGYSPWFEALLEQLGCEVWLGHATEIRRRARWRQKNDRRDAELIWDLMVHDEFPRLHRPAATSREVLRMLRYRQKLIKLRTMAKNSLQAIALQAGLAKGKQLFSRAGQEEFQSAAMSPVLQWQREHWFQLLQPLNQQLLETMVWFKEQSKDDLSIQHLRTHPGIGLLTSLCLLHTLQPVSRFRNTRKVTAYAGFDPVERSSAERQHFLGISKAGSRLLRYLLVEAVQTAVRYDEDLKRFYKRLAERRGRPKAKVAAARKLLIRAYIMMRDEIDYAEFRRRAVAARLARTGQGPSNVPEVLIGQPASPGA

SEQ ID NO: 506133 - protein, 342 aa, unidentified
MQITTIGLDIAKNVFKVHCIDANEKVVVRKQLRRGKLMAFFEALSPCLIGMEACATAHHWARELTKLGHEVRLMPAKDVKAYVKRNKNDAADAEAICEAVRRPTMRFVRIKSPEQQGQLMQHRTRDLLMRQRTQLINALRAHLAEFGIVAAKGDGGVKELLAIVADKEDTRLPINARASVIVLAAQLETVQTVIGAIEKRIKMQHRANEASRRLETIPGIGVIGATAIAATVSDPTVFRSGRDFAAWIGLVPRQDSTGGKQKLGPISKQGDRYMRRILIVGAHSVLRRAKQNPGKYPWLTQLLVRRPFKVVAVALANKMARVAWALLAYGGTYRAPKLAEAA

SEQ ID NO: 506134 - protein, 480 aa, unidentified
MNLKKGVFVQALVTLFEEAGNGAKVMCVPIDYAKKDHFAMLCNGNGHILRKPFSVKNSPEGIEYLIEQVTRSCNHRQIDLKHVFFGGEDVGSYAENFVNTLRSGGWIVAGVNAHDAKEQRTNMQASTDRLDLMGIASMLLNRRSNCSPAQSGIYRNLRTVVRHRKKLVAMSTEVRNRMHTVVDRLFPGFLDEKKSGIYSFSKSSLYLMEDRFSPRQIRRRKRQKLIEILKRCGTAKPESTAAKLQEYAARVLNTPNEYITTLQLSLTQHVKHLRCLQDSIDQLEHEIAVWLAQTQGAFLTTFRGIGIVLAAGVSAEIGNPHDQEPLNNLVSYSGIIPRVKQTGGSEGKTYTGKVAKRCNHILKDYVVQSGNHMGLHGPEELMADYKRREAAGQHDDFGIGRRYLRTAMCLMRTSQIYMPEQLRNTKVQPEERAGYYLTIWPYLRKKWKKAGALDAAFEKDRPLGQWRCMVQELYEIKLKL

SEQ ID NO: 506135 - protein, 338 aa, unidentified
MTLYCGIDLHSNNSVLSLIDETDRLVSEKRLDNNLELIEHHLQPYQDEISGVVVESTFNWYWLVDGLIEQGYPVHLANTLAIQQYNGLKYTDDETDARFLAHLLRLNILPTGYIYPKALRQVRDLLRRRLLLVKQRTAQLLSLQSMIGRHTGLRLSSHQVKQLKPEGLAHYFGSAATLFAAQQSHQLMQQLNTQIEAIEGFVLVRCEDSEQYALITSTPGIGKILGMTILLETGPIERFAQVGNYSSYARCVPTDKISNGKSKGKGNAKNGNRYLAMAFVEAAHYATIWDPTIKRYYQRKCKKRPVMVAKKTVANKLTRACYHMLKDGTMFDVTRAFG

SEQ ID NO: 506136 - protein, 349 aa, unidentified
MRTYLSLTEAGMKKYSGIDLHSNNSVVQVGDEADRVLYRRRLPNELGKILEALEPHREELVGVVVEATYNWYWLVDGLQAAGYTVYLAHPAAMKRYEGLKHSDDDDDAGHLAQCLRLGILRTGYIYPREERGLRDLGRRRMQLVRQRTMNVLAVENVQARETGTRMTGDRIKRLDEQSVERFGLSEDVTLGIQANVAVLNALEVQIRKIERHLAGQLAPRPGYVVLITVPGIGRRLAPVILLETGAIERFAGAGNYASYVRCVDSVRLSNDKKKGRGNVRNGNRYLMWAFIEAANMARRWCPEAKRFYERKKAKTNGVVATKALAHKLARACYHVLKTEQPFDMQRCFG

SEQ ID NO: 506137 - protein, 316 aa, unidentified
MPQALNFVGIDVSKLWLDVWIETTKHHHRFANTADGHRALFDALAPLGQPGAVILACEASGGFEHDLRHAALTAGFDFRRVNAARVRLCAESLGRKAKNDRIDAQIIARYAQIADTRPEILDKAREKLAELVSHRRRLIDARVAASNQAAALRLPALLKQNKAHLALLERQIAATDKLIRDSIAEQPELDRKVRLLNSLKGIGEVTAATLLALLPELGQINRRAIAALAGLAPFDHDSGRHKGKRAIAGGRAPVRAVLYMAARAAARSHSPLKTHYEKLINAGKKPAVATIALMRKMLVTLNAILRDDQPWKHAKA

SEQ ID NO: 506138 - protein, 394 aa, unidentified
MNKLKSNVACAGMDVHYKFSNVTFRDAGGKLVSRRRLEHPDREKLRQHLGQWPSGIPVVMEASFGWGWLSDLVEQAGMEVHLSNCFKVEKMRKARGWVKTNKKDADLISLLPFEMSDWWEVWRAPPDVRNRREQMRFRADLVGTQTMVKSRIHAVFHRHGVFHEFSDLFGAKGRKFLAELCSDNPANLPPEALAALRGHVMLVDHLRRQLAAVARVLHSQMRKNRLTSRLKTIDGIGLVLAYILAAEIGRIGRFRNHKSLAAYSLLAPRADDTGEEDPSHSPKGRHLGIRGNRTLKWAFIEAAHGAVRSGGRWRDMFDRVTGGGRKDRGRGYIKVARELVKVVYVVWSKCVDYQETPPARPGSDKNKKSKKNKKKQSRSGTGQLLHPMVHAVSA

SEQ ID NO: 506139 - protein, 358 aa, unidentified
MKIVGCDLHARQQTIAMVDTETGEFTEKTLCHEGNAVREFYAALEGPVVVGIEATGAMQWFLEVLEELGIECRVGHPAKIRAAETRKQKHDRRNARLVLDLLVMEDRFPQIWMPSTEQRDLRTLLRDRHQWVKMRARLQHTLQAIALNHALRQGHALWSAAGQSALQALPLPPYTSQRRTELQSLYVQLQKRIQELDKEVEAQARQRPQARRLLTHPGVGAVTALATEVFLGDPSRFATGNQVASYIGMIPCEHSSGKRQRLGKLTKEGNSLLRYLWTEATMHAVRKDPELKRFYRRKLIQKGMGKARIAAARKLGIRLWIMMRDQIDYEEFCRRGKLRQKGEAHAGMPDFNSGPARQ

SEQ ID NO: 506140 - protein, 338 aa, unidentified
MAIVTIGIDLAKNVFAVHGINEAGKPILVKPTVARSKLLELIASLPPCTIGMEACSGAHHWARLFMAHGHTVRLMAPKFVAPYRLSGKQGKNDAADAVAICEAVQRPHMRFVPIKTVEQQGQLCIHRVRQGFIEQRTATINRIRGLLSEFGIVLPLKATTIRREAMAHLEDLPGWANTVIGDLLSEVSHLDERVEQYDQHIAQIAKEDSRTQQLMRLPGVGPTTATAILAMIGNGHEFKCGRQFAAWLGLVPGQYSSGGKARLGHITKAGDSYMRSLLVLGARAVLNSAKNKSDSTSRWAVALAERRGYWRAIVAIAAKNARMAWASLTLGERFAMPA

SEQ ID NO: 506141 - protein, 351 aa, unidentified
MEEYIAFDSHKRYTWVDRQDRLTGKHNGDRLEHAPGAVRDYLIGSKPGTAVAVEATGNWYWITDEIEQAGLVPRLVHPRKAKLMMGQINKTDKLDAQGLNRLQQNDTLPTVWIPPGPLRDLRELTRTRLVLVAQRTRLKNRLSATLAKWGAPASEYSDPYGKKGRQELAGQLRQLPEQTRWVSEQLLAQLDFVSGQIQELERRLEKIVEVSEPMQWLMTMPGVGVILAATIALEVGEVQRFPDAMHLASYAGTTPRVHASGGKVRYGPLRADVNRYLKWAFAEAGNSVAVNHTRHPQRHVSQLYRRLRVRKGHHKAIGAVARHLAEAAFHVLRGKQMYQDPGLGRGRTSQG

SEQ ID NO: 506142 - protein, 424 aa, unidentified
MYGGVAGISQGSNEFQEGGFSLVRYHVGVDVGKHRHHVSIRDLSQDDYCKAFSFTNDRDGFIKLIAVLEKLSSERTDFLIGVEACSYALNLSYFLMAMRFTLVEVNPFRAGQFRKAQGKKAKTDKIDARTIAAILPLGDHKSLSIPDPILDNLKELTRFRVDLVDEKSTVIIHLREALSVLFPEYEKVFRQLDSAGSLALLAAYPGPEHMIGAGEETVGKTLSLASPRRMSRGMARRIIEAAKRTVGVVQRQPSLGIKISILAKRIADLQATIRDLDRQITTLFNSLPCKPLGFPVGRAPSLATIISEIGDIHRYPTLKKFLSHLGWCPQSFQTGNYCLKHPKMSHAGNKYVRRIIWMLSIFAVQFVPRYREYFQRRVNEGKTKMHIIVAVGRKLLSALYAMLKNGVAYDPNWEENSRLALARR

SEQ ID NO: 506143 - protein, 358 aa, unidentified
MQRNKISFKGQKIFIGIDVHAKNWEVAIAPEVGIVRRHSQKPSAKELFDFLKKNYPDGDYLAAYESGFSGYSTYYALTEVGLGCMVIHAADVPTTQYEEVMKTDRVDAVKLARSLKAGLLKGNYVPEKQYIDDRSVVRIRKTIQKQLSGYKSRVKHLLHCHGVEFPERFSKKQTHWSRAFITWLTKDVRLMSDTRASLDLLIRQVEVLRGTLLEATRQLRKMSQAERYKHRYDLLRTIPGIGLIVTMCILTEICDIKRFHNENEFAAYLGLIPTSHSSGEKTVHGEMTFRGNKQLGPMIIEAAWITIGRDAGLGAQYFQYKQRMEPQKAIVRIARKLSNIIFSVLKNEKEYVPYQTGN

SEQ ID NO: 506144 - protein, 415 aa, unidentified
MALKIVYKICCGIDVHKTFVVACIASTNSKGVTTYESHRFSTYTKGLKDLLQWLLDRNCKDVCMESTGKYWIPVYNILENDCTIVLAHPKYVKAIRGKKTDKKDAKWIADLFKHDLVAGSFMPPADIRQLRDLMRYRFKLTCFKSSEKNRLQNCLTVSNIQLGNVVSDTFGKSAQAILDKLLENPADTSFDLEPLVYKSLKKKLPELRDAIDGFITPEQAGKLKVIKGHFEDLESRKAELEELILALAAPYQQELAILQTAPGISSIFTAIGIIFEIGTNMEAFPSAKHLCSWAGLTPTNNESAGKKKSVRVSKAGCCIKPLLAQCANAVVTSKKHPEIRNRYLRLKKRRGHKKAIIAIARMLLTALYHMLKNGENYNAELYRKSDLPPADREITIEQAIIIARNQGYKIKSATA

SEQ ID NO: 506145 - protein, 343 aa, unidentified
MQTITTIGLDIAKSVFQVHGVDAGGQVIVRRQLKRRSVVAFFQKVPPCLVGIEACASSHHWSRELQALGHTVRLIPPAYVKPYVKRQKNDAADAEAICEAVTRANMRFVPAKTPEQQSGLVLHRARHLFIRQQTAVINAIRAHLAEFGIVAPVGRHGVEELLNIVADPNDKRVPEIARACLSAFGTQLCRIKEQILEFDRLIRAWHRSNEMSMRLDEAPGVGPVLATALVAAVADPKSFRSGRNFSAWIGLVPKQHSSGGKNRLGSISKQGDRYLRSLFVAGALAVIRYAKIHGTKHRPWLTALLARRPTKVAAIALANKIARMVWAMMARGARYKEPVALAR

SEQ ID NO: 506146 - protein, 429 aa, unidentified
MNCTQNKKIEQVKETTMIVGIDVGSEKHYFRAFNWRGIELTRKPVAFSNSMEGFNSFYNTIVELMQKSELEEALVGIEPTGHYWFDLGQFMGEKDIKFVMVNPHHVHKTKELDDNSPSKNDRKDPRVIAGLVRDGRYFYSYMPTGAYAELRNASNRRFVLVEEQTRAKNRLQKWIAVYFPEYKGIYTHIDAKGGMLVLKKAPTPEEIVRLGVEGIIKIWKDAKLRGNGHKKAMLILAAAMRSIGLKAGLTEARMEIQDLIEDYELQTKRLERVNDLIKGLCQQVRYADKLLEIKGIGITTVAGFIAEVGDITHFDSTKELQKLAGLELVADSSGKHNGKTKISKRGRKRLRYLLFEAAISVVGKNEEFKEIHRYYTTREKNPLKKMQSLIVVACKLIRVFHAILTKGIRYDASKMLKDIRHPGEQLKAA

SEQ ID NO: 506147 - protein, 347 aa, unidentified
MLADELDYVIGVDPHRDSHALAVVRAPNGRVVVEASAAASSRGYRSVVRLAEQHAPGRRAFAIEGTGSYGKGLARFLAEQGERVIEVSRIKRDGRSTGKTDALDAVQAARSVLARAKQAEPRSGGKREALRALTVARAGALAAKRAGLCQLRDLLVTCPEPLRGELRHLTRTRLLQRLQALRPTRHHDPELRGTLLAMRAVARRVHHLTIEERELKHEIETLVRELAPKLLAEPGIGPVSAAQVLISWSHPGRVPTEAAFARLAGSAPIPASSGQTIRYRLDRGGDRQLNRALHTIITIRRSNHAPTRAYIDRRTSEGKTTREAVRCLKRYLARHLYRLLQAAPITT

SEQ ID NO: 506148 - protein, 427 aa, unidentified
MGSDEVWICVGEAVPDDPVRKFGTTTAALRAAGEWMQACGVDTVAIEATGVYWIPAYEIWEQMGLRPVLVHSQSIYSVNGRKKSDFVDAQWLQILHTFGLLQPCRRVEADMVRLRAIMRRRRELTEGASGCIQHMHAALTLMNLRLDQAVTDVTGVTGMRIIRAILAGERDPHKLAAMRDERCQKTAAQIAEALTGHYRSEQLFVLRQAVGLWDYYQVQLRECDTEIEPLLESLPKKAERKDLPKSRVAATGKPRKNQPHLDGRTLLFERLGVDLTLITGIQVLTILTIISECGIDLSRFPTDKHFCSWLGLCPGTNKSGGRVLNSRSRRTANRAATALRLAAQALHRSPTALGAFYRRMKARLGPEKATTATANKLARIIYLALTKGLVYQDPGPYYLDDQTHERRLRQLTKQATRLGFQLTPIAA

SEQ ID NO: 506149 - protein, 324 aa, unidentified
MIDGILGIDVSKNTLDVSISSCSKVRTKSFANTSDGWHHLLEWLVAQKIRRVHACLESTGRYSLGIACALYEAGHIVSIINPAQVRDFVRTKLGRNKTDGIDASRIREYCELFKPLPWAPPSEAHRRLSELQTIRSGIIAGLTEWKNRKNSGIVDAEAQALADATILHFTSQIGAVDKAIALAIENDSDLRSKRDLLLSISGVGDTLAGVVLAELPGPDVLHSSGEVVAYAGLNPRQHQSGTSVDRATRISKIGNAVLRAALYMPALSAMRYNPAIVALVTRLKSRGRLKPKQIVVAAMRKLLVLCFGVLKTGKPFDPAIAMGC

SEQ ID NO: 506150 - protein, 368 aa, unidentified
MMGWMAPLRHRGAKMLVGQRPPANREPSVSEVTTVGLDLAKHVFQVHGVDAEGATVVRRQLRRGQVLGFFSRLPRCLVGLEACATAHYWARELQALGHEVRLMPAQYVKAYVKRNKNDAADAQAICEAVLRPTMRFVPPKTAEQQAALLLHRGRERLVGQRTMLVNALRAHLAEFGVVAPQGLRNVGQLIAIVRDAGDARLPDLARQVLEVLALQIEQIEAAVAALEKQLMAWHKANPVSQRLATIPGIGPIIATAIAATVVEPSGFRSGREFAAWLGLVPRQNSTGGKTRLGGISKRGNHYLRRLLINGASANLLRSKATNADPWVIGLRRRRPSLVVAVALANKTARIAWAVMQRQEDYRRMVAAA

SEQ ID NO: 506151 - protein, 315 aa, unidentified
MLYDGIKGRIKTRNIQNNRHSVENIIRWLRLQHCGPEDVHVVMEATCVYHERLATELHDAGFRVSLANPHRSREFARGMGIMTKTDKVDAYMLACYAFLKKPHRWEPPAPEIRYLGALLRRRDVLLGDALREENRLEKYLSTDTPADIISSCRRMAQLLREEVSNIERQIKAHIKACPALRRDYTLLTSIKSVGPLLGMHMLVVLRSHNFTSAEQAAAFLGVVPIEKRSGTSVRSRPRMSKIGPPQLRAKLYMSALCGKIYNKRMRNIYDEMCLRGKPKLVAIGALMRKLVHWCYGVLKTGTVFNDESLKQVLST

SEQ ID NO: 506152 - protein, 338 aa, unidentified
MKVYAGIDLHSSNNYIGIINEQDQRVYQKRVPNKLNNILQSLAPFKDSMEGVVVESTYNWYWLVDGLQAHGYKLHLANPSAIKQYEGLKHTDDKWDSFWLAHMLRLNILPEGYIYPKDKRPVRDLLRRRLLFVRHRTAHILSLQSSITRNHGSTLSSREIKRLDQSDAATLFENPFLILAARNSISTIRFLTTRIAEIEKAVKSHIQLQPEFHYLLTIPGIGTILGLTIMLEVGDICRFPQVGNYSSYCRCVTAERLSNSKKKGAGNRKNGNKYLSWAYVEAANFAIRHYPEIQRFYQRKKAAANGIVAIKALSNKLARASYYIMRDQVPYDPEKFFR

SEQ ID NO: 506153 - protein, 423 aa, unidentified
MEVVAARCAGLDVHKATIVACALIAQEGRARPRKEYATFPTTAAGLASLAAWLKGLGVEQVGMEATGVYWRPVYAVLEAQGGFELIVANAQHIKTVPGRKTDIKDAEWLAMLVRHGLMRKSFIPDQPFRDLRDLTRYRRALVETQASERHRLIQVLESADIKLSGLVSDVFGLSGRLMLRALIAGEQDPAVLADLARGQLRKKRDALREALAARLGEHQRRMLAIQLSRVEAAEADIAVLDQEIDQRLEPYAEEMALLITIPGVDRVVAAAVVAELGTDLSSFPSAEHLAAWSGTCPGNRESAGKAKPARARKGNPHLKTALCNAAIAATRKKGSYMRAKYYKLKARIGGGKAALAIAHKLVVVIYHVLSKRVAYRDLGEDYLDQINAKRTAQRYVQKLNALGYGVSLSLLTRPAPAPQAEPL

SEQ ID NO: 506154 - protein, 455 aa, unidentified
MARKRKQNKGWCGPTRPVLEPNAAGVDVGAREMYVAVPPDRDPEPVRVFDTFTNDLQALVKWLQQCRITTIAMESTGVYWIPLFQMLEDAGIQPCLVNARGLKNVPGRRTDWHDCQWLQYLHSVGLLRAAFRPEQEVCAVRSVWRQRTELVSMASQHVQHMHKALTQMNLQIHHVINDITGVTGLAIIDAIVAGERDAEKLAQLREPTIQASPETIRQSLVGDWRREHLFVLAQSRRLYQSYREQIAACDREIQALLGPLPPRADPRDLPPPSKPVRKTKRTAGAITFDYRAEAYRLFGVDLTRIPGLEGSVLALFSEVGRDLSRFPTAAHFVSWLGLCPDNDKSGGQVLWRGARKIQQRAGQIFRLAAHSLHRNRSRLGEFLRRMKAKLGPKAATTATAHKLAVIFYTLVSRQIEYDESIWAAHDEQNRKRMEKRVKRQASLLGFQLVPIEVPQ

SEQ ID NO: 506155 - protein, 332 aa, unidentified
MNAHPFIGIDVSKQRLDIGVGADGEFWQESNDEAGIQATLTRLVEWQPALVVVESTGGLEWPLVSELAAHHIPVALVNPGRVREFAKSLGLLAKTDKLDAHLLARFGEAAKLLPTLLPEEAVQQLSALMGRRRQLVEMLVMEKNHLLSARLSLRAGVQEHITWLEHEIEQLTEQIQKELQATPSFRDKDRLLRSVKGVGSITSLILLADLPELGQLDRKQIASLVGVAPFNDDSGSRRGPAAHPRRAGQGPAGAVHGECGRFPLQPHDSHVLSTLAGLRQEEESRPGSLHAQAAHDPERHDPRHDPVARASARLTGNTVAQSFLASFLGPHP

SEQ ID NO: 506156 - protein, 328 aa, unidentified
MDLFIGIDVSKATLDVAGCTAEGPLPDLACSIANTDAGLATLVPQLVARAPALVVLEATGGYERLATATLAVAGLAVVVINPRQVREFAKAVGQLAKTDRLDAALLARFAERIRPAVRDRPPVETSPLAEQILRRRQLVDMITAESNRRALVSPSVRRRLEAHIRWLERELVHIESELQRAIETSPVWRTRDDVLQSPPGIGPRVSHSLIALLPELGTLNRQHIAALVGVAPFNDDSGGRRGVRHIKGGRAAVRTVLYMGALVGVRYNPVLKAYYHRLRAAGKAPKVALVACMRKLLTILNTMVRTNTRWRSTAPMPSQPAGLVVSPT

SEQ ID NO: 506157 - protein, 353 aa, unidentified
MSNLPVFVGLDYHQDSIQVCVLNQQGQVLLNRSARNDAAELARIVQPLGVVQRVGIEACCGAADLGEELVQQLGWNISLGHPAYIAHMKSSPDKSDYSDGRLIADLTRVGYLPRVWLAPAHIRDLRQLVNHRQRLVNEKRSLKLQVGAILREQRVKIDKQYGVRWSKRWIGKLREHVEVVEMPGLSEQARWIINELMNDIAATQIKLARAEARLEQATQDDPVVAKLRQQPGIGPVTSWVLRACIGDFNRFKTAKQLSRYCGLSPCNASSGNRTADAGVIDGCNKLLRMTLVQAAHRLIRTSKRWQKLALGLMDRGKPMNVIVVAVGNRWVRTLHHVMKNPIGLVAPEGAAEK

SEQ ID NO: 506158 - protein, 316 aa, unidentified
MASFLGIDVSSSSLDGWVRPQGVKIAVSNDPTGFEELVEILRSFSIKRILLEATGGYERNVMRYLQDASYKVIRVNPARARKFADSMGVKAKTDAIDAEVLAHYAEVIPDLPSLQISPARALLRELLQQRDRLIQQRDDDRRRLKQAQSLVVGNFLKANLQHFRAQIKLVEQEIEQQATQLNDERIAQLIQVKGIGMVTASKLVAFLPELGRVESKEIASLVGVAPFNHDSGKSVGKRSISGNRSEVRRAVYMALLVAVKYNPALKSRYESFRDRGKLAKVALVACMRTFIVRLNAMLRTNTPWRDLILPQPAGAI

SEQ ID NO: 506159 - protein, 523 aa, unidentified
MASKRPAKKSRSKAAQFLQKPSGVIHPRVQKVGPEHFGIVCFDCHKLSSTWMLTDFYGKVLVLPTEVAHNRVELDDAVARVRLALTQHDLRDCIVAVERTGRYHHAVKNVFAKAGFETRMVHPFATKQFRQPASPDQKSDPADLAAMRCAAVNGFALIETPLSEQWRQLQLSIRHRRDLVRKASALACQIREHLDAVLPGYAACFDKLWDSNIAFRLVRQFGTAQAMLDQGVAGLSLYLRQQKVRYQERSLDTVIVWAKNAAAADVGADLHRQIALAYEDDRQQKNQQIIALERDIAQRLAQTPYVLLMSFPGINVVTSADFGGEMGPIENYASARAITGRAGLFPSRHQSGSTDHADGPLVRRANRSLRAVILGIASNLICCNQHFRALSGQWKMAGKDPRHTHVKVGSRFCRIAYQIVAGRQVFRHPSLRERGYILDKLLAFHMAHQTPWPEVLRDLQNATDQIPKSEYAAEAKPLADRILATRERGKTGPQPLSEILAIVLARLGVGMIPSTPSGEKDPT

SEQ ID NO: 506160 - protein, 390 aa, unidentified
MILVGIDVAKDKHDCCIINSDGNFPEEVFSILNNREGYETLYKRICSLAVDFTKVKIGLESTGHYSSNLLAFLLDKHLTAYVINPLRVNLFRKGQSLRRTKTDKIDSRNIAHLLMADSSLKPYSLSSYHMEELKSLTRYRGTKVRERTKLKTSIARLVTILFPELEQLVSSIHIHSIYAMLEKFPGSAYIAATHLTRLTALLLKASRGRFGRETAIRIRDTARRSIGAVSPAKSMELQHTIAHLRVYDQEIGEIESEIEKIMDDVNSPITSVPGIGMQMGAVILAETGSFRRFDSPDKILAYAGMSPSMYQSGKLTVSYSRMEKRGSRYLRYALFNVTRYVCHYDPGFTAYLSKKRKEGKHYYVAISHAVKRLVRVLYAMEISSNRYQTA

SEQ ID NO: 506161 - protein, 309 aa, unidentified
MKEEVVYCGVDVAKAYLDAAIGKQKRRLPNDAMGHRQLITWIKQIEAQVQVICEPSGGYERGLIRALVGAQIKVSLVQANRVRQFARAAGILAKTDSIDAEVLCAFGEAMRPQILTASKVQQGQLRELESQRRHLSRLLVMEQNRGARLSDSSVRRLNRSLSKQIQKQIERIDLLINEHIAGSQELSAKAHKLTAICGVGPRTAALLLAQMPELGQLNRREVAALVGVAPFNRDSGKLRGKRTIFGGRRHVRHGLYMAALVAARHNPILRAFYRRLRAAGKPAKLALTATMRKLLIVLNSSLKPDPIYA

SEQ ID NO: 506162 - protein, 418 aa, unidentified
MKVVYPICCGVDVHKTFLVATIITSQGITPYYSKKRFSTFNNSILQFKQWLFDNNCFDVCMESTGKYWIPVYNLLEDSIRVTIANPKWVKAVKGNKDDTKDSKWIGDLFRLGLVPGSFIPKKPIRISREYTRYRYKLVSCKSSEKNRFQNAFTVCNVALDAVVSDMFGKSASSITDYLISSDSFDPQHCSSLLQKTLKKKADTVIESIEGYQMTQEQKERIVMIRSHLEFVQKSIANLDEKLDKMMVPYESAIKLLCTIPGIDRASAITIISEIGDDMSQFASSKRICCWAGLSPGNNESAGKKKSVRISRAGVYLKPALVQVAHASVKSNNSPYYKIKYERIYKRRGKKRAIIAIARMILTAIYNMFVTGEEWNPSDLYKIDMPQEMQEKQKQKAIKQAMKLLISQGIIKASDISLA

SEQ ID NO: 506163 - protein, 307 aa, unidentified
MFIGIDVSKDRLDVHVRPSSEAFAVTRDSEGLEALVARLQTLAPQLVVVEATGGFETVVASAIGAAGLPLAVINPRQIRAFATACGQMAKTDRLDAQVIAHFAEAVQPEARAIPDESARALGELVTRRRQIIGMMVAERNRRRQLTQPRLLKTVDRILATLQEQLSAIERDIDEAIRGTPAWREKEELLTSAPAIGPKIARILIADLPELGTLTRRKIAALAGTAPFSRDSGKWRGQRSIAGGRGSVRAALFMAVLVSIRRNLPLAALYHRLRAAGKPAKVAIVAAMRKLLVTLNAMLRDKTEWRAA

SEQ ID NO: 506164 - protein, 427 aa, unidentified
MALRELVGRDRAIVAVDLASQRQAAVVCDHDSVVLARRMFRGSAWCIGEILAWAAPVARQAGFTGVVLACEPTGHRWKPLVVTGRAGKIPVVCVQPLLVRRAREGEDFTRSRSDFGDAVIIARLTAELRCYVPYLPEGPWARLRHLGARREGLVRRAVAAREQVRDLLECAWPAVLEAAADPLESRTWRAALAVSADPAVLAAMSEQEFLAALRERLVALGGKKVWRRIAVAVHAAAADPGGIAAEREAILERAAFAYQDWTCALAAQADIEARMAAVLDELALTALVTTIPGLTSVGAAVILAQTGDPARYDSPRTWVKHAGLAPQANESGTYRGRTPSSGRGRPGLRTAAWRAMFGAVRCNPVYAARLTYLTSREVNRLTSGQAHTALAAALLRQLHVVITRRVPWQAAIASGTSTPATVVMPAA

SEQ ID NO: 506165 - protein, 340 aa, unidentified
MPLYGGIDLHANNSVVVLLNDQDQVIYQKRLPNHLAVILEPLSLYHREIEGVVVESTYNWYWLVDGLMEAGYHVHLANPAAMQQYNGLKYTDDRSDARWLAHLLRLGVLPEGYIYPKAERAVRDVLRKRAHLVRQHTANVLSVQNILARNTGARFSLKRIHEFTTPELEALLPEAAQVLAVTSSLAVLDCLSYQIKALEQSVHQRLHHTPTYEQLLTVKGIGPILAQTIALETGDSRRFPTVGHYASYCRCVASTKLSNGKRKGQGNVKNGNPYLAWAYMEAAQFALRFQPAAQRFYQRKLAKTNNNTILARKAVAHKLARACYYIMRDLVPFDAMKAFG

SEQ ID NO: 506166 - protein, 378 aa, unidentified
MTRIMRYVGMDVHAETIAIVVVEADGSERDLGVIANRPEAIRKCLKRLGPAEELHCCYEAGPTGYGLYWQLTQMGIECTVAAPTLIPTKAGDRVKTDRRDARKLARYLRSGDLTAVWVPDTAHEALRDLVRARQAAKIDEKRARHRLQKFLLRHGQRPPQGVKAWTARHRAWLAVLQLEPPTLQVVLQEYLHEVLHSEQRVRRLDTAIEQAVEGAPEAIRAVVEALQGLRGVRTVTAVGVMAEIGRFSRFAHPRQLMGYSGAVPSEFSTGGPGKHQRGAITKAGNAHLRRLLGEAAWCYRYRPAVRYPLKKRQEPLSPKVIDISWKAQLRLCHRYRRMVARGKLKQKVVIAVARELLAFMWAIGVEIEKRHEPPRAAA

SEQ ID NO: 506167 - protein, 457 aa, unidentified
MNANNARFQSASKIRISLLLIVLQCPMKGGDFMKNNFLSTLFVGIDVSSKTNVLCALDFQGNKLLNLKALNNQPGAESILESILDCLNSNSLNFVVIALESTSFYSTHIANFLSSNEVLLAYSPMVYCLNPKTIANYRKSFVDMDKTDPLDAYIIADFARCGRIKSQPWRGAQFLALQRLTRHRLHLVEAIAKEKTYMVSNVYLKFSQLTVLEKADRPFSNTYGATSEAVLTEFLSLEDIAYSSIEDLVAFIKDKGKNRFSNPVGTAELLQKAARDSYRLDKVLYEPINIAIVSSFNVIKALQIEIKEIDKAIEKNIKGINTTEYQSLISIPGIGPVFASGILAEIGSITSFSSNDALAKYAGLTWRIKESGDYSASETNMTKTGNKYLRYYLIEAANSVKNNIPESNVYYRKKFNEVPKHQHKRALALTSRKLVRLIFGLLTKNQIYSSSKVGEIQ

SEQ ID NO: 506168 - protein, 411 aa, unidentified
MEVLHRRCCGIDIHKKFLVACLLILSESGQAQKEIRRFSTMTGDLLECVNWLKEAQCTAIAMESTGVYWQPPFNLMEGHFEQVMIVNAQHLKRVPGHKTDQKDAEWIAELLQVGLLKPSFIPKRSQRELRHLTRLRTTLTQERTRLINRLQKVLEDANLKLTSVLSDVMGQTSRQILEAIIRGEENPSVLADLALRRAPKKRDALVLALKGQVRDHHRFLLREVLDLIHQHEQAIFRLDQDLIERLKPQEETIQRLDAITGLNRRSIEVLFAEVGWDMTPFPDAAHLASLVGICPGNYETGGKRLKGRIRQGNRYVKAILVQAAHGAATTQTYLGAQYRRLAARRGSKRAAVAVGHSILVIYYHMLTTGEAYQEKGVDYFADLDQQDKERRLTKQLEQLGYQVTLTPTQLA

SEQ ID NO: 506169 - protein, 335 aa, unidentified
MSLKLLAIDLGKRLFHCHGIDSDGVILSRKVSRSKLIETIKELAPETVAMEACATAHYWGRCFLADRRRVLLINPWFVKPFVKGSKNDAADAEAIYEAASRPTMRFVPLKSTEQQDLQSLHRARERVVCARTALINHLRGLLGEYGVILPQGAWRFVKEAQDAIAAADLSDLARRLFVDLFDELRALDGRLGKLDQTLLSLCRTNEACRRLSKLPGVGPVIAPALVAAVDDGRHFRSGRELAAWIGLVPRQYTTGGKPRLGGIGRRANHYLRRQMIHGARAVMFRLTKHNDRRSEWLKGLAARRGFNRAIVALANKTARIAWAVLTRKEDYLAAA

SEQ ID NO: 506170 - protein, 506 aa, unidentified
MAQTAKAARQKEKESVSKRRSTPVTAESKAAKPKGKVKRGDRRRRTQKWGAIENRPVFEPNAAGVDSGAREVYGAVPPDRDKQPVRICETFTADLQELANWLTACGITTVAMESTGVYWIPVYEILEAHGIRACVGNARHLKNVPGRRTDWHACQWIQFLHAVGLLRAAFRPEPEVCALRAVIRHRGELVQMAAKHVQHMHKALTQMHRQIQHVITDLTGLTGWAIGDAILKGERNPSRLAQLRDPRVKASPETIEKSLVGHWQPEHLFTLKQSRRLYAEYQREIGECDAEIERLVGTFQPRVDPEVKPLPPDQKKRNRNYAKSRKRRARPQSSTREFDLRTEVYKLYGVDVTQIPGLEFLALQLFSELGRDMSRWASAACFVSWLALCPDNDISGGRVLWRTKRRVHNRAGQLFRMAAYALDRSPTPLGAYLRRMKAKLGPQAAHTATAHKIAVIFYAMIKNQTEYDETIWEQRDAQRHQRHMTGLKRQAQRLGYKLTPIEEEAA

SEQ ID NO: 506171 - protein, 416 aa, unidentified
MKLFVGIDVSSEKLDTCYLTDEMVVLLNHTYGNDTQGAWELKEQILSFHETYSFDQIVIGMESTSMYSYHPAVNFHQDEQLQAIHAITTIENPHRIKQYMKMFDADKTDPIDAFMIADYLRIQRYTNSPIKGEKYMALQRLTRTRYQIVRQLVEVKQHFIENLSYKCNTLKKELREAEGSTTVFSAAIMDLFTQDLSLDDLANLPLKDLAEWLQSKGRGRFKDPEGLAKTIQRAVRSSYRLDQVVSESIDMILGILVREIRSLEKAVKDCDQGIEDLVQTVPEYQCLTSIPGVGPVYAAGLLAEIGQIERFPDQTSLAKYAGLTWPKHQSGRHEAENTPLTKKGNRYFRYYLIEAANSVSRHLPEYQAFYRKKYQETPKHQHKRALVLTARKFVRLVDTLLRNHQLYTPPRSVIEK

SEQ ID NO: 506172 - protein, 360 aa, unidentified
MEQFIGCDAHKKYSVFVAVNERGEPSQEVRVGHDREQYRRYLERLPAGSQIAVEASGHYYWMVDEMEAAGHHPRLTHPLEAKKRMGKTGKKTDKLDANGLGILLRNGTLPEVWIPPAGLRDQRELLRLRMFLVQQRTRLKNRIQGALARYNIQLGARDVFSGEGRQDLGARLEEFPQHTRQSVELELATVDFLEVQIEEVEKHLEEIMQVTAEADLLKTLPGVGRILSMVMTLEIGRVERFASAAHLASYAGLVPRVHASGGHTRLGQICGDVNHYLKWAFIEAGNLVVVHQKHLLGEHVVRLYQRVKRKRNYQKPVVAVARHLAEAAYWVLKKQEVYRSPQPQPKAQAQAAQALSSTHG

SEQ ID NO: 506173 - protein, 342 aa, unidentified
MQISTIGLDIAKNVFQVHGIDAAEKVVVRKRLRRCQVLEFFKAVPPCLIGMEACATAHYWARELTKLGHRVRLMPAKDVKAYVKRNKNDTADAEAICEAVRRPTMRFVQIKSAEQQGRLMLHRTRDLLMRQRTQVINALRAHLAELGIVAAQGREGIKELLNIIASEHDARLPVDAHTSLVVLAAALRAMQTLIGSIEKRIMAQHRGNEASQRLESIPGIGVIGATAIAATVPDPKVFRSGRDFAAWIGIVPREDSTGGKQKLGPISKQGDRYLRRILVVGACAVLRYARHRPEKYPWLTQLLARKPFKVVAVALANKMARTAWALLAKGGTYRAPALAAAA

SEQ ID NO: 506174 - protein, 341 aa, unidentified
MEQATTIGLDIAKHVFQVHGADAAGHVLFRKRITRGKLLGFLAAQAPCVVAMEACAGAHYWAREIGKLGHHVRLIAPAYVKPFIRRQKNDAADAEAICEAAQRPSMRFVPVKTEEQQANGIVFRARDLLVRQRTQCVNALRGHLMEYGHVFPKGITHVETLVAVVEDPRSSLPDSVRVILKLLVDTFTALEAQITALDAEINQRSKSDPTARRLMTIPGVGPIASTAITALVPAAEGFPAGRDFAAWLGLTPLQKSTGGKQKLGAVSKRGERTIRRLLIIGASAVVQHASRRGAPKGSWLAQMLARKPKMLVTVALANKMARIVWALLVKGGTYRTPTAAA

SEQ ID NO: 506175 - protein, 382 aa, unidentified
MKKHRYVGLDVHKESISIAVAEAGRRGEVRDYGRVGGSLIAVERALRKLKQSEGDKEVLLHCVYEAGPCGFVLYRRLKQIGIDCAVVAPSLIPRKPGERIKTNRRDAIKLARSHRAGDLTPVHVPDARDEAIRDLCRARTDAVRDQRRSRQQLKALLLRLGYRYTGKSSWTEAHLRYLRELEMSHPAQKAVLEEYLIAISQAGERIARLSTQIELHVASWRMKGAVEALMAMRGIQLIAATVLISELGDLRRFAHPRQLMDYLGLVSREESTGDRQHRGAITKCGNTHARWFLIECAQHYALPPKVSKELSKRQEHQSQGIKQLSWKAQIRLHRRFFALMQRGLCRQKVVVAVARELSGFIWALLRQVPLDLGNHGSPNPSS

SEQ ID NO: 506176 - protein, 323 aa, unidentified
MKKRPARFVGIDVSKDHLDLACRPEDTRWRVANDNAGIAQCLVQLRQLKPTLIVLEATGGWQGALVAALAVSKLPFTVMNPRQIRDFAKATGQLAKTDALDAGVIAHFAEAVRPTPRPLPDATTQHIDALLQRRRQLLEMLVAERHRVALAHPAVRASLARHIDDLQQIITETDEEVATIIRTSAAWREQDDLLQSAPGIGPVLSATLQAALPELGVLNQREIAKLVGIAPLNDDSGKRSGARHIRGGRAEVRTVLSRATLTATRCHPVIKAFYQRLLARGKAQKVALTAAMRKLLIILNAMVNTRTPWNARVNHVPVLEHAA

SEQ ID NO: 506177 - protein, 455 aa, unidentified
MAQTKQSRPSRDMPRVHPRAAAIDIGAKIHVAAVGPDRDQEPVRTFNTFTGDLHRLADWFSHCGVRTVVMESTGVYWIPIFEILEQRGFEVMVVNARDAKHVPGRKTDVSDAQWLQRLHEYGLLRASFRPQAEMAGLRAYLRQRERLLEYGAAHIQHMQKALTQMNLQLHHVVSDITGVTGLLIIRAIVAGERDPAVLASYRDRRCHSSVETVRQALVGNIREEHIFALTQALELYDVYQAKVIACDGQIEAILKRLKKSAPPPASKLPSVRQKGRPPNALAFDARAALHGILGVDLTQIHGLGPYLALKLVGECGTNLAAWPSAKHFTSWLGLAPHNKISGGKVLSSKTRRTSNRASSLLRLAALTVGRTDTALGAFFRRLSARVGKAKAITATARKIAVLFYNTLRHGMSYADPGAAYYEDRYKQRVLANLQRRAKSLGFALEPVQPGAEGVS

SEQ ID NO: 506178 - protein, 369 aa, unidentified
MLIIGCDYHPGFQQIAFVDTETGELQERRLQHREEAEKFYRDLAAQGMKVRVGMEASGHARWFELLLAELNIELWIGDAAEIHRKRERKQKTDRQDAQHILRLLLKDDFPKIWVPSWENRDLRQLLWHRHRMVQARTRMMNQLQAVALNEGLRYKKRLWRDAGRKQLEAFRLAPWASRRRHDLLELLDRLNPTIAELTQAIEREVEKCPEARRLQTHPGVGPLTALAFVLIIGKADRFQCGKQIASYLGLVPLEDSRGNRRRLGHITKQGNSLLRFLLVEAAQVTARSLPEWSSKYVHLTMRRGRKIAKVAMARRLAVRMYWMMRKGWDYEQVKKFGSHAGQPGYRHGVKSNIEQLIGASRSSSQRSSK

SEQ ID NO: 506179 - protein, 388 aa, unidentified
MIYVGIDIAKLNHFASALSSDGEILIEPFKFTNDNDGFHLLLSKLSSFEKSNIIIGLESTAHYGDNLVRYLVAENYKVCVLNPIKTSVMRKNNIRKTKTDKVDTFIICKTLMMQDSLRFVTYYDLDLMNLRTLGRFRQKTIKQRTRLKIQLTSYVDEVFPELQYFFKSGLHQKSVYALLKEAPTPKEIASMHMTHLAHLLKVTSHGHFDKETAQQLRVLAQKSVGASDSALSIQITHTIGQIELLDSQLERVEAEMTEIMKFNDSVIMTIPGIGYINGGMILGEIGDIHRFSNPSKLLAYAGLDPSVYQSGNFQARKTRMSKRGSKVLRYALVNAAHNVVKNNATFKAYYDAKMAEGRTHYNALGHCAGKLVRIIWKMLTDEVEFNLD

SEQ ID NO: 506180 - protein, 358 aa, unidentified
MKHYIGCDAHKKYSVFAGISEAGEIIPSQRVEHDRESYRSFLRSLPPASKIAVESVGNWYWLIDEMEKAGHIPILVNAGKAKLMMDNINKTDKLDARGLAVLSLNGTLPAVWIPPGELRDQRELARMRIFLVHIRTGLKNRIHATFAKYAITFQEVSDLFGVRGRNLIEEHLAELPPETRNSVKEQLKLLDQLQQQIDSVEERILQIVKVTPKMQLLRSIPGIGAILAILIALEIGDVVRFGDGAHLASYCGAVPRVKSSGGKTYYGKTRPDVNHYLKWGFTEAANVIVLRQHLMTGRHVVRLYRRIHQNKGHAKAIGALRRHLAEAAYAVLKSGQPYHEPILAKRHFVTKEVCARLA

SEQ ID NO: 506181 - protein, 315 aa, unidentified
MSQPLFAGIDVSKSQLDIAINQGDELLEFCSVPHTEEGISTLMQKFRNAMPQLIVVERSGGLERSLVALLAEAGLPVVANNPRQIRDFAKAMGILAKTDKIDAKTMAHFAATVKPPQRPIKDAERQQLSDLVARRRQLVNMLTQEKNRLSRSVGPARADIEHHITYLKDRLNKTNKNIEQMIANSPIYQETVEILVTFPGLGRVTSAALVADCPELGSLNRRKIGTLTGTAPLNDDSGTRTGQRYIRGGRKTVRSHLYMATISAIRCNYKIKGFYQRLIAAGKKPKVAITACMHKIITILNAMIKHRKPWQTDAV

SEQ ID NO: 506182 - protein, 347 aa, unidentified
MTDIIRIGIDTSKSVFQLHGVNAAEQPVLRKQLSRREMVKFFQKLPPTLVAIEACGASHHWARLLSSFGHEVKLIAPQLAKPYVKRGKNDAADAEALCEAVSRPTMRFVPIKTADQQAALMLVGVRTRLIKRRTQLANAVRGFAAEFGVTTASGMCRIEPLLETIAADETIPALARELFALHAEEYGALKREIERVEEKLMAWHRSDECSQRLAKIPGVGPIGASFLMMKTPDPRLFKSGRDFAAWMGLTPKDHSTAGKTRLGGITRAGDELLRSTLIVGATAVIGHVRRTRGRNASPWLLGLLDRKKPKLVAVALANKIARIAWKMMVSGEQYRRSTTRAVQAVAA

SEQ ID NO: 506183 - protein, 360 aa, unidentified
MFTERTSVGLDVHARSVAAAAIDSVTGELIQAKLTPAHDHIRSWLSDLPGPVAVAYEAGPTGFGLSRTLRAAGIRCEVVAPSKLQRPSGDRVKTDAKDAVHLARLLRLDEYVTVSVPSLAQESARDLVRAREDARGDLMRARHRLSKLLLRQGIVYSGGQAWTGTHDAWLRRQHFDSPALQMTFESDYDAVLNVKARRDRLDEAITVMAADSEFTPLVRRLSCLRGVSTLTGFALAVEVGDWHRFTGNTIGSFVGLVPSEHSSGASRVQGSITKTGNTHVRRLLVEAAWHHRARYAPGKTMRDRWELASPAARARGDAGNRRLNARWDAFRARRKRHVVANVAIARELAGWCWSLAVLEE

SEQ ID NO: 506184 - protein, 341 aa, unidentified
MNHYAGIDVSLECSSVCVVDAGGKIVREAKVASEPEALIAWFRSSGFALERIGLEAGPLSQWLFAALKAAGFAIELLETRHVRKAFEAMPVKSDRNDARGIAQLMRLGWFRPVHCKSLGAQETRALLTARKLVQSKLRDVENSLRGILRGFGLKVGKTTGRQFAGRIEELVSGHPHLQMIARALLAVHAVLRSEFAAFEKQIRKTARSDPRTRLLMSTPAVGPIVALTYGSAIDDPARFKSSKQVGAHFGLTPKKYQSGETDYTGRISKIGDGSVRTALYEAAHVMLTKPIKGCSQLKSWAMRIARRAGMSKAKVALARRLAVIMHRMLADGTPFNAAAAA

SEQ ID NO: 506185 - protein, 372 aa, unidentified
MKGMIRFVGLDVHKDFISVAIADDDRGEVTSHGEIANTSAAVSKLARKLSHNGCDLCFVYEAGCFGFVLYRQLTKMGHSCVVAAPSLIPRKPGDRVKTDTRDALKLARLLRSGDITPCHVPGETDEAMRDLVRARGDAVCAYRVSRQRLNGFLLRHGKVYDGKSRWSTAHMRWILDIKLPHEAQQIVMEEYRRRVKHDSDCVDALTAQIRRLNEAWHWAPVVEALQALRGVCLITAVTVVAEMGDLRRFAHPKQLMAAIGLVPSEYSSGGKRHQGPITKTGNGHVRRILVESGWNYRFPARLTRNIEHRQRGLDKEVIDIAWQAQTRLCARYSQLNMRGKNTKLITTAVARELCGFIWDIAQQVEPKATPNR

SEQ ID NO: 506186 - protein, 338 aa, unidentified
MSIVGGLDLHRQQITFDYLDTESGQVSRGRVAPADREHLREWLRRVERQEAAFAVEACTGWRFVVEELERAGARAHLAEPADTAALRGPKRRAKTDRTDARHLRELLMAARLPESWIPPSHVSDTRTQIRLYKALVDERTAWLQRVHAILFQHGAPAVPGLARASGRARLDPAALPAAARSAVEVALRSVDRVNEEIDGLRPGLVRFSRAQSGCRALQAHYGIGPLTSVAIWAELGDCRRFSSSSDAVRHTGLDVTVHSSDTRRARGRLARQGPGVLRWALFEAAVCAARPASPDHAYYLQVRARLGHQRAVLSVARKLARWSHHTLRALGDQALAPA

SEQ ID NO: 506187 - protein, 371 aa, unidentified
MFAVVSQQEEGDDERMIYVGIDVHKHKCHSALMTENGTILDELTFQNTAQGLSTFIERIQPLGEAKAVLESTGNFWIKTYEALEAATIQTTLSNPLKTRAIAEARIKTDKIDARTLAHLLRTNLVAASYVPNKETRARRSLLRHRANLVKTRTEIKNRIHNLLDKYDLKSDFSDIFGKQGLEWLRGLQLPTIDKTILNSDIALLDSLETQIQNINIEIAKLACNQEDVKLLMTMPGIDYYSAMIISSEIGDVKRFSTAEKLASWAGLAPSIRQSGNQTKRGHITKQGSRMLRWILVQSAQISHRSDPRFQSLHQRIAARRGNNKATVAVAREMLTIAYYMLTRREEYRGMDMERYKEKLKRLERTANRGLQ

SEQ ID NO: 506188 - protein, 408 aa, unidentified
MYNAVGIDASKLKSTITIIQPAGVIIRKPFDVLHTSDELNTLVTYLKSLVGETRAVIECTGHYHEPVVKSLSEAGIFISAVNPKLIKGQKQNTLRKVKSDPADARKIAKYALDNWAELREYSSMDTTREQLKTLNSQFTFFMKQKVAAKTNLISLLDNTYPGVNKLFDSPTRDDGSEKWVDYAYSFWHVDCVRKIGLKAFTERYEAFCKKHHYNYQKNKPALLFEESKQLIAVFPKEKSYKLLIQQSIQQLRLASEHIEIIRKEMNELASTLPEYETVMSMYGVGETYGPQLIAEIGDVSRFTHREAITAFAGVDPGVNESGQFKQRSNRASKNGSTRLRKTLFQVMSTYLQNKPVNEPVYQFLDRKRAEGKPYLVYMTAGANKFLRIYYGKVKECLRNLEQSQIEES

SEQ ID NO: 506189 - protein, 348 aa, unidentified
MMTHGIDLHKRDLVIATVDAQGAEIKQKRVRAREADVLRYFSGLPGPHRAVVESTGSWYWVADLCREHGIDLTLAHARKLKAISSAKVKTDTVDSLTLAPLLRADLIPKAHMISSELRPVRHVLRARLRPVEKRSSCLNSIARLLEKYNVDAVASLPPLAQLQATCQEEQIQLLEQQRKRLETSLPPQLVPNEDVQRLLWIPGVGKIAAFTLYLEIDGIDRFATERDFFSYRRLVPGADNSGGKVRHKRSKEGNRYLKTSLQQCRRARRSVLPRDQSLRAEEGTQEEPLRRARSPPRRSRASSTMYSRSRPTSTLNSRGVPLSRTKQSQWPRRASPTAQLTPLGSHPH

SEQ ID NO: 506190 - protein, 366 aa, unidentified
MAKFLFVGCDLHEKEMLLLYAADDGDVRRRRFRSERRWRKGLVRWLRYEAERVGAREVVFAYEASSAGFILYDDLVAAGVKCHVVAPTKLDRSPHHRHRKSDANDARVILDVLRAAYLAGAQLPGVWVPDGMTREAREVVRGRLRTGQKVAATKNEITSLLKRFGVERPRGVGRPWTKSFRQWVEGLVDCQGPLGPWVGATLGSLLSQLKMLEAEIEHFDSLIKALSHTERYEATSQALDEVKGVGLLAAMTFLVELGDLARFSNRRQVASYLGLVPSCYESGEADDRKGHITRQGPGRVRGVLSQAAWAWVRWDERAKRKYDRLVARNPKKRKIALVAMMRQLAVVLWRRGLEAQRRATARSKNT

SEQ ID NO: 506191 - protein, 373 aa, unidentified
MNYTTVYVGMDVHKETFTLCCYTNEKEKAEYPQKVDGHYSKVLNYIDAMRKHYGDDAVFVCGYEAGCLGFTLYHQLTEHNVDCVILAPTTMPQQQGKKKVKTDKRDAMLIARCLAHKDYSPVHIPTDIDEQVKEFIRMRDDHKLALKKIKQQIVAFCLRHDYRYTEGKSNWTEKHLQWLRSLEPDGVYAEILEEYLLTYEYLTSKLEMLESRIKELAELDEYKESVQKLRCFIGIDTIIALSLIVEVGDFHRFATAGHFMSYIGLTPGEDSSGQDQNRLGITKAGNRHLRKLLSESSQCFSRGKVGAKSVALKKRQQGNPPAVIEYADKANIRLKKRFYHLVLNKGKHRNVAIIAVSRELAGFIWGMMTEQYA

SEQ ID NO: 506192 - protein, 408 aa, unidentified
MQVLYTRCAGLDVHKDTIVACVRCVSPPMHQEVRSFGTTTAQLLELADWLAEHDCTHVAMEATGVYWKPVWHVLEAEFELVLANAAHIRNVPGRKTDVNDAMWIADLLAHGLIRSSFVPPQAIQQLRDLTRTRKQLVREVSQHSLRIQKVLEDANLKLGSVLSDVLGKSGRAMLDAIVAGEIDPARLAGLAQGTARNKTAELREALRGRITEHHRTMLRLHLQVVDALQRTLGELDAAVGKALAPIQQRARLLTTMPGVSDLTASVVVAEIGVDMSRFPTAGHLVSWAGLCPRSDESAGKRRSTRTRKSGTWIKTTLVTAAWAAVRVKTSYLRAQFLRIKARRGAKKAILAVAASMLTAAFHMLRDGTEYNDLGCEHFDRQDKSKTIRRLLKRLQDLGCNVPETIHTA

SEQ ID NO: 506193 - protein, 345 aa, unidentified
MIYIGMDISSKSFVVHGIDEKKRVLVNGEIEPTRAGLKGMIKGLGVQKKLVIFEAGNQLKWIAKTLKDMEGVEIHVVHPNEIKWISQSSGKTDKIDARKLAHLGRGDMLPRKVHIVEGKIRELRELLSARQRLQSKRVALINSIRGQMKQEGHSLPAKFFQSRHWREKLRGMKIIGEVQKLIIESYMDSIAGLLIAEKKLTEKIGTIKDKGIELLESIPSVGILSSRVIISALDDVGRFDSKKCVAKYGALTPRIYQSGGITHLGRINRDGRQEVRRVLLQCAHVIVRMRSYGARPLREFFERIMKRRGKKIAIVAVARKLLTIAYGVLKSKTAYDPSRLTGVTA

SEQ ID NO: 506194 - protein, 398 aa, unidentified
MKVSGLDVHKDNIFCAVYNGKEYSEVKEYETTMPKIRQMGEYLRSEGVTKVAMESTSTYWVPVWDVLLEMGFELMLVNPVLIKQMPGRKSDVKDSQWIACLLHKGMLRGSMIPSATIQQLRIYSRKYTKLQEQMTRSLQKMDRVMVMCGFRIGSCMSKLGTKSMMLIIRALIMGETNPDVLEKLVYGNTANKKSGKLREALTGNLKEHFRQQLEWEREEYDLFEKQTEQCLTQMQGICQEHYQQEMELIKTIPGVSDVSAMIIIAETGGDMSVFENSGKITGWAGLRPRNDESAGKYKSTATTKGNKYLRSVLVQVSWAASRVKNGWFKEKFNRLAIRKSRKKALIAVARKLLTVTWNVLYYKTPYDPLMVHIYDPVKVEAKINYHQREVERIKKFLN

SEQ ID NO: 506195 - protein, 391 aa, unidentified
MVCVGIDVAKDKHDCCILDSDGTIRADCITIPNNMDGFKQLLQTIRDCTKKSDKIKVGLEATGHYSYNILGFLLDNDLAVYVMNPLHTNLYRKSLSLRKTKTDRVDARTIATMLLSDVDLKSYTDTAYHNEELKSLTRYRFDKVRERAKLKQSVSRLVTILFPELEKLVPSLHIASVYALLSEYPGAKQISEIHLTKLTNLLVTASKGRYGKDKAIQIRDAARTSIGSVMPAKFLELKHTIKLIRELTSEIDEIEVSIQKIMDELNPPILSIPGVGIQSAAMILAEIGDFSNFESPDKVLAYAGCSPSTYQSGKLTNCYAHMEKRGSRYLRYALYNATKYVCHWNPVFAEYLAKKRAEGKHYNVALSHATKKLVRLIYALQKSGKAYLVAA

SEQ ID NO: 506196 - protein, 427 aa, unidentified
MYRIAGIDVHKKKLAVVVTDVEVHGEYQFERCWFAANPEQLRLLSQWLVEHQVEEVVMESTALYWKPVWGALERYWQPICQKRESAGPTSGILHLAQAQSNRGPRGRKKDFRDAERLVKRLVADELKLSFVPDTEQRLWRTLTRRRYQLTRARVQFQNQLEALLEEAHLKLSSLVSDLLGVSARRMLQAIAQGETNPDALAGLADRRLRATPAQLCDALGACTELHPVYRRLIKMMLEELKVIEEHTAELNQELATLLRPHQEAVERLAEVPGLGVDSAQQILAEVGAKAATFASDKNLCSWVGVCPGDEESAGESSSHRSPQGNRQMRRLLNQAANAAVKTKGSIFEIVYRRLVPRLGHNQTIGAVAHRLCRLIWLILRKGVRYEERGPAVSQRSRQNRTSKMIRELRTLGYRVEFLNAVPSNPMP

SEQ ID NO: 506197 - protein, 343 aa, unidentified
MKVTTIGFDLAKNIFQVHGVDERGHVVVRKQLRREQVAGFFANLPACLVGMEACGSAHHWARKLQEFGHCVRLISPQFVKPYVKSNKNDAADAEAICEAVARPNMRFVPIKTMEQQAVLSVHRVRQGFVKARTAQANQIRGLLTEFGLVLPQGITNVMHRVPQLIDAATDLPASMRQLIARLLENMKMLDQQVNELEAQIKAWHQGSELSRKLERIPGIGALAASALVASIADARSFKNGRQLAAWLGLVPKQDSSGGKPKLLGMSKRGDTYLRTLLIHGARSAIVAAQRKGKPNVWLSGLLARRHPNVAAVALANKNARTIWALLAHEREFRPDYMPRLATM

SEQ ID NO: 506198 - protein, 411 aa, unidentified
MDRIYDKCCGIDVHKKLIVACFKKGNRQEVREFGATTRELLILADWLKDSGCEMTAMESTASYWKPLYNILESSGLKAMVVNAHHMKAVPGRKTDVKDAEWIADLLQHGLLRPSYIPDKDQRELRELVRYRKSLVGERTSELNRLQKMLEGANIKLSGTVSDINGKSARSILEYLLTGESIDGAKYDEMYEKKIIAHNLKATKEQIVDDLNGIMSPLQRRMMKELLNHLDELNIHIKNLDDEIDHFMKPEEKKASAAIQDVTGIGNTSAQAIISVIGTDMERFPTDSHISSWAGLCPGDNESAKKRKSGKTRKGNALLRTTLITCAHAAVKNKKSYFYAQFMRISSHRGKKRAYVAVAHSMLIAIYHILKDGVVFKDLGAEYYNQFNKERKINAYLKKLKALGWEAPVVAA

SEQ ID NO: 506199 - protein, 354 aa, unidentified
MEYGAIDLHKRESQVRIVTADGEAIDRRILTTRDRLTAIFWGRARMRMLIEASTESEWVARHLESLGHDVIVADPNYGAMYARRSRRVKTDRRDAAALADACLDGNSRPAHRRSAQQRIVQSMLNVRRELTDSRTRAILIARAITRAEGVRIRSGRTETFLDRLAALELPASMRSTLLPLRSVIEVLDDELAAADDQFAKLVAEDPVAKRLMTVPSIGPITASAFVAALDDAARFDGAAQVTSYLGLVPREYSSGEHQRRGRILRSAHPHVQSLLIQAAWRMSRSSDKRTAGLRAWADAITHRRGKKVAMVALARRLARILFAMWRDNAEYQAKHIRVITGTAPAIVEGETAVV

SEQ ID NO: 506200 - protein, 334 aa, unidentified
MSSIAHTRQVTVTRTICGVDISSQSLDARIGHEGAFAQFPNTTEGIAALLSFCQAHQVGLIAMEATGGYEQQAFAQLSEQGLPVAILNPRAVRQFAQSMGSLEKTDRIDAGMIAWYAEVKKSPPLCLAAKSQQHLRALVTRLRQLTDIRTAQLNQQRLVTDRAVQSSFKKLLAMLARQIRDLEQRIAVLLDQDPLWRELNQAFRTIKGVADRTVARIMADMPEIGMLSNKTISKLAGVAPLANDSGQHQGRRAVRGGRATVREILFIVASVVGRHEPDFIAFQQRLRAAGKPPKVVRIALAHKLLVRLNAKAREVRQRLAALPPDRMALPAASL

SEQ ID NO: 506201 - protein, 410 aa, unidentified
MDGNYQHFVGIDWASVEHEVCAMDGSGKQIDARSFKHSGDGLAELCAWLRKLGDPPTIAVAIEVPHGAVVETLLDGGVAVFAINPKQLDRFRDRFTVAGAKDDRRDAMVLADSLRTDGNLFRLLAIQPAKIIELREWSLMHQELQGDRNGIINQMRAQLTRYYPAFLALVEDPGEDWATRLLELIPDHAAALNIKPGRVTKLLKDHRIRRLDSEAILSHLRGTPVYSAPGTATAAIAHLELLAERVRLINKQLKGCKARLEALLEGMATESPAGQKDEQRDVAIIQTMPGIGVIVASTLLGEAAGPLQARDYPALRALAGVAPVTRRSGKKKSVVMRTACHPRLRYAVYHWARVATQTDDVAKARYAALRARGKSHGQALRSVADRLLGVLCAMLRNQTDYRSPRVTAAA

SEQ ID NO: 506202 - protein, 338 aa, unidentified
MALYCGIDLYSTNCWISIIDEERKVVREKKLGNDLAAILEFLEPHRAEIEGIAVESTFNWYWLVDGLAESGYQMHLTNTWAIKQYEGLKYTDDRHDARWLAHLLSLGILPEGYIYPKHERVVRDLLRRRAFMVRKRTSFLLSMRGAFECRTGMRTTSNDIKEWTPADIEQHFDDPLAALGIICLSEPMAALNDQIKILEKEALKRAKLRDEFKQVQTVWGIGKVLGLTIMYEVGDIGRFAKVGNFASYCRCVKSDRLSNGKRKGRGNTKNGNPYLSWAFSEAAHFAVCHHEPARKFVQRKKAKTNGIVAIRALAHKLARASYYVMKDEVAFDPEKTFG

SEQ ID NO: 506203 - protein, 390 aa, unidentified
MEARTVNNLLPAAPHHDAVGCLVAIELSKKSWIVAVNTPLADKISRHTLKPGDGKELLDLCERIRTRVARETKRRVEIVSCYEAGYDGFWLHRLLEAHGIRNYVIDPASLQVDRRARRAKTDHVDVERLLRSLMAYLRGEPKVWSVVCVPSVAEEDDRRLNRERGRLINERIQHVNRIKGLLAIHGIYDYQPLRRDRMLRLERLRTAADGQTLPPRLKAEILRELQRLELILGMIKTIEAERDAIASPKTETEHTNAKKIQDLAKIKSIGPEFATTLIGEVLYRSFDNRKQLASYVGLTPAHFQSGAMCRDQGISKAGNGKARTVMIELAWLWLRHQPDSPLSVWFRERVGKLKGRIRRITIVAVARKLLIALWRYLETGLVPKGAILKA

SEQ ID NO: 506204 - protein, 347 aa, unidentified
MKILALDLGKYKTVGCEYEGESGAHRFQTCGTAAANLQRLVEQSRPDRVVIEVCNMAGWVCDLLRGMGVEVQVANTSDDAWRWRKVKKKNDRGDALKAAQLSAVNQLREVHIPVIEVRQWRALIGYRQQLVRRRGKVKNHIRDLLLREGQILPRGAKCWTQLGMVRLAAMARPLGAVGLNELWRGELELELRQLVAVQQEITVAEEKLDAIAAADPRVQLLRTIPGVGPRLSEAIVALLDRPERFRKPSEVSAYIGMVPKELDSGETERRGRITRHGSRLVRSLLVEVAWAGLRYNPWVRETYQRISGGKKSRKKIAIVAVGRRLLVRCWAMLRDGTSWQWAPTPTA

SEQ ID NO: 506205 - protein, 336 aa, unidentified
MKEQQIKHEEGQIKKFIQKLKSEGTEIHCCYEAGVTGYPLYRYLKTLGVNCIIAAPGKIPRQSSDKIKTDKRDAIKLARLLRSGELESIHVPSEEDEAVRDYLRSRDSLRLDLGRNRQRLMKFLLRKGITYSTTKYWTASHYKWLNNLHFENEILQATFNDYYSRVRVQKENLKAMDQKIREIAESEPYREKVGILRCFRGVDYLTAMFLLSEVNDFKRFKTAGSFMSFLGLVPGEYSSGSKRKQTSITKTGSPRLRRILVEAAWQHRFPGTGSKVVAARRVGQSALVVSLAEKASLRLHKKFKSMQLRGKTPQVMITAVSRELSGFLWAAMNLVA

SEQ ID NO: 506206 - protein, 347 aa, unidentified
MLIIGCDFHPGFQQVAIFDNLTGEIQEKRLQHRAEAEQFYRGLAGQEVRVGMEACGHYPWFERLLAELGFELWFGDAAKVRASVVRKQKTDRRDAEHLLDLLRENRFPQIWVPSLEVRDVRQLLVHSHKQVQARTRTKNQLQAMALSQGVQKKYKLWTKAGREELEQLPLLPYAAQRRKQLLQSLDGLEAEISELDRRVADEARQRPEAVRLMTHPGVGPVTALALVLTLGPADRFESAKQVGSYFGLIPSEDSSGGKQRLGRISKQGSSFLRFLLVEAGQTAARLDPQLKRFYRRLAARKNRSVAKVAVARKLATRLYLMLREDWTYTQLCQAVMQVSPSHSVAGQ

SEQ ID NO: 506207 - protein, 313 aa, unidentified
MNFVGIDVSQSTWDVHIRPQGRWLSVPADHDGATLLREQLVALGPCLVVLEATGGLERGLVAELIDAGLFVAVVNPRQVRDFARALGRLAKTDRIDAETLALFAEKVQPRRSQKCPEKQAEIDALVTRRRQLVQLRSMERTRQHQATIKAARRSIDKLLKVLDQQIAALDKAIGQLLESDDDWRTRCELLQSVPGVGATTSATLVAELPELGRLNRQEIAALAGLAPFNHDSGRFRGQRRIRGGRSAVRSTLYMATLTARRCNPILQRFAERLEQAGKPFKVVITACMRKLLTMLNTIVRNGTPWAPSSMAQR

SEQ ID NO: 506208 - protein, 443 aa, unidentified
MSKKRTAHLRGARGQAFADLTRSISSEHILCVSLDISKYFHVVMIHNGLGEIVTPTFEIDIFQSGFDQLCQAVDQARSRTKAQLVLIGMEPTSHYFENLARHLLQRSQPVTLINSFAVKQNREQQLMRREKTDEIDVAAIGDLLRRGEGTLFKPAIGVYLQLQQLDRVRLGKVKIQAMLKNQILGHLDRIFPGLVLLGDEAKERYTPLFEADFWTCQTLQHLIRVCPNPHQLSRMLPAQLVQLFHAQQYRLGPAVAAKLIAYAQKVLLPDPQLALVRCELLQHDLTLLEEVQAHIAALERRLADLLAQTPYQVWTKIKGLSTVQVASLAAAIGDPANYTHAGQVFRRSGLVSGRNDSGRRQRKGKGNRVLKTGDVYLRRALMNAVATLILHQPIPGRYNQLLQKTKPAGVARVATARRCLGILWATLRDQYPTTLIACKGAEM

SEQ ID NO: 506209 - protein, 368 aa, unidentified
MKQVTTYVGIDAHKKDLFVAMLKGTETTPVTWTVANEANAVRRLVRKLEREAPGAIRVFYEAGPCGYALQRQVTTSRVSCDVVAPALIPRKPGERVKTNRRDARKLVELGRAGLLTAVQPPTPEDEAVRDLARARDDAREDLQRCRHRLGKLLLRRGLHYAGRNWTRGHRQWIDSLTWAHAAERAVVDDYVLAIDHTEARVLELDARLSEIAESDPYRERVGWLRCFRGIDTLTAMLILAELHDFRRFGSAPALMAYLGLVPGEDSSGEKHRRGRITRTGNALVRRLLVETAWHYQHRPGVGVALTKRRTGQPSRVIAIADKAQQRLCRRFRKLAAEHKPAPKIAVAIARELAGFLWAALQPAPVAVK

SEQ ID NO: 506210 - protein, 371 aa, unidentified
MITVGMDVHVRNSFVHAKDAEGEVIRKGRCKNTLMDLSDYLAPVERQAVQHGERVRVVLESTTNSRAIQRILTQYGNSAGIDLTAEVLDARKIRIIAESVCKCDRLDSAVLCELAGSNLKLPVCYMPDDEEFALREHLRARNDLVRIRTMLKNRVHAALHRRGILSPKQLFTLAGRAFLASLNVDESGRDILDRYLDMVDQIDRTIDESTASLRTLARRARWSKQAALLQTMPGVGLLTSLTILAELGDLERFRSRAAVANYAGLVPVVRDSNTSHYSGGITHRGSKHLRAVLVEAAWISVTRVPVYQHLFDRIAEKKNKPTAIVAVARRMLEDAFTLLIRDQAFRYVEAPALPDASAPRSDCEVASSVAG

SEQ ID NO: 506211 - protein, 411 aa, unidentified
MENILARCAGLDVHKESVEACVRRIEPNGRVHSETRRWGTMTRDLLVMADWLAAEGVTDVAMESTGVFWKPIFNILESRFTVLLVNARHLKQVPGRKSDVRDCQWIAQLLQCGLLKGSFIPLRPQRELRDLTRHRTQLVEEKTRTINRIQKVLEDANIKLASVASDVMGVSGRAMIERLIEGETDPHKLADLAQKQLRGKIPELVKALEGKLTDHHRFLLKLLWKELAQQEELVADLDAKIEEHMRPFTREIERLDVIPGVDHRVAEVLLAEAGADMKPFPSDQHLSSWAGMCPCNEESAGKRTRRRITPGNRWLKKTLAQAAWAASHTKNTYLASQYRRVAGHRGKKRALIAVGHSMLVIFYHMMRSELTYADLGGDFFDRLEPQRLTRYYVKRLERLGHKVTLEATAAA

SEQ ID NO: 506212 - protein, 345 aa, unidentified
MKHYVGLDVSMKKTSVCIVNELGKIVHESEVKTDPNVLSDAIEKTGLKIELVGFESGSLSHYLAQGFKERAMPAVCMDARKMSTILSIRVNKTDKNDARGIAEALRAGMYTRVHDKPQESIDRGAVLSMRRIAVQHRTDIKNHIRGILKTYGIRLGSVGPTKFSQRVKNCLDNMDHLVRLSIEGLLEIFDKLNEKIDAIDKELLLIAQQDKEVKLLMTAQGIGPITALTYKTEIFDPSRFQDSRTVGAYLGMTPKQYSSGETTKLGRISKCGNKELRFLLTEAGLVILTRSKKWSKLKAWGLRIMRKKGVKKASVAVGRKLAVIMHRMLIEQKEFVFGEAQNKVA

SEQ ID NO: 506213 - protein, 385 aa, unidentified
MQASNARTPITGHNGTIFVALELSQRSWLVTMHSPDKDRFSRHKLDGGDDAKLLALIEHTRGRAARALGTMPSVVSCYEAGYDGFWLHRRLVAAGITNLVFDPASIAVDQRARRAKTDRIDGELLLRTLMSHWRGEPRVVRIVHVPTPEQEDARRTTRERERLIKEQTAHTNRIKALLRTMGTATGHPRRRDWVTWLEAQRDKNGDPLRPHLVAELRREHARLILVGEQLRELGQAIDAAPVSDDAAEMARRGGALRQLKSLGPVFGATLTNEVFYKDFHNRRQVGGYFGLAPSPWRSGGTNREQGISKAGNPRARHKAIELAWLWLEHQPESALSRWFRERTAQGKGRIKRIAIVALARKLMVALWRFLTTGLVPEGAVLKAAV

SEQ ID NO: 506214 - protein, 370 aa, unidentified
MKKYSEAFVGFDTAKKKHAVAIADVGRAGEIRYFGEVDSSPAAIEKLLGKLAERYARLHVCYEAGPTGYGLYRQVEALGHDCTVVAPSLIPRKPGERIKTNRRDAVTLARLFRAGELTSVWVPDAVHEAVRDLGRAREAAAADLRKKRQQLLSFLLRHSRIFSGRKHWSLAHRRWLAGQKFAHPAQQIVFQDAVDAIAEAAARLRRLDEQLLAIVPSWSMAPVVAAYQAMRGVSFIVAVTFVAEIGDVRRFDNPRQLMAFLGLVPSERSTGERVRRAGLTLAGNRRARRVLVEGAWTYRYPARVSETLRSRLEGLPKTIRDIAWKAQIRLCARYRRLIAGGKKTPVVIAAIAREMAAFLWAIGHHVEPAA

SEQ ID NO: 506215 - protein, 346 aa, unidentified
MRFYTVKHEHVCGIDLHARSLYLCVVDHESEQPLLHKNIRAEPAAFLPAIAPFREDLVVGCEATFPWYWVSDLCVDSSIPFVLGHPLYMRAIHGAKVKNDRVDSHKIALLLRSGMFPLAYAYPRAWRATRDLLRRRSFFMRKRAELLVHVVNTNSQYNLPPLAAKLTFARNRAGVAESFDDPAVQKSVATDLTLVAHYDDVLRDLELTILRSAREHAPQQLHLLRTVPGIGKILALNILYEVGDIHRFETVAHFVSYCRLIRPDHTSAGKHLGFGPKKIGNAHLRWSFGEAAAGFPRNNPTGRRVVERLKRKHDKNTMNVLAHKLGRAVYFMLRRNEAFDMNRLTS

SEQ ID NO: 506216 - protein, 337 aa, unidentified
MKYCGIDLHSNNSVVMITDETDHVVFSKRLSNDLSQILAALEVHRAELSGVVVESTFNWYWLVDGLQEAGYRVHLANTTAIKQYDGLKYRGDESDARQLAHLLRLGLLPQGHIMPKAARAVRDLARKRMQLVQQRTSQILSIESSLSRFTGGRISSDSIKCLREADLNEMQLGDMQTLGLKAHVAVMQALQVQIDRLEEVLAKHCRTEPGYRLLKTVDGIGEVLATVILLETGSIERFAQVGNYASYCRCVGSAHVSNGKKKGEGNTKNGNRYLAWAFVEAANFAVRFCEPARRFYQKKKAKRNSTVAIKAVAHKLARACYHMLKSNTAFSVERCFA

SEQ ID NO: 506217 - protein, 421 aa, unidentified
MTDVTMQEFAAFIGLDWADAKHDVCLQVAGSDKREGKTLDHRPEVIEAWVTDLRQRFEGQPIAIALELNKGPIVEALRKYDGLVLFHINPMMLARYRQAFTPSRAKDDPTDAELQLELLLRHRDKLKPLVPQSPEMRALAQLVEHRRRLVGERVRITHRLTSTLKTYFPHVLQWFPHKDTILFCDFLSQWPTLKAAQLARRRTLECFFHQHHVRDAQRIHACLVAIKSAVPLTTDEGVMMPNALMAQALIAQLRVLLEAIERFDHAIAERAQRHPDYALFDALPGAGPALAPRLLVAFGEQRERYGSAEEMQQYAGIAPVLERSGKQSWVHWRCQCPKFLRQTFVEWATGSIRFSGWARAYYEQQRDKGASHQAAVRALAFTWIRIVLRCWQTGVPYDESVYVAALQRRGSALISHLAPSS

SEQ ID NO: 506218 - protein, 402 aa, unidentified
MNAVGIDVSKGKSIVAIMRPFGEIVSPPFEIKHTASDIKSLVSFINSVEGESRIVMEHTGHYYEVLAHQLSEANLFVSAINPKLIKDFDNDSLRKVKSDKADAVKIARYALDKWHNLKQYSVMDELRNQLKTMNRQFSFYMKHKTAMKNNLIGILDQTYPGVNAYFDSPARSDGSQKWVDFASTYWHVDCVCKMSLNAFTCHYQNWCKRKKYNFSQSKAEEIYGKAKELVPVLPKDDITKLIIKQAVNQLHSASATVESLRTLMNETASQLPEYPIVMAMKGVGSSLGPQLMAEIGDVSRFTHKGAITAFAGVDPGVNESGIYEQKSVPTSKRGSSNLRKTLFQVMDALIKTRPQDDPVYQFLDKKRAQGKPYYVYMTAGANKFLRIYYGRVKEYLASLPES

SEQ ID NO: 506219 - protein, 461 aa, unidentified
MQIIHRCCCGLDVHKKLIVACLISLNEAGEFQKEIRHFTTMTKDILVLADWLTSVGCTHVAMESTGVYWRPIWNLLEGQFELLLVNAQHMKTVPGRKTDIKDAEWIADLLQHGLLRPSFVPPAPQRHLRELTRYRSTLLAERARLVNRLHKVLEDTNLKLTAVVTNIMGLSARDMLDALLQGETNPEVLATLARGKLRKKREDLEQALVGRVDDHHRFLLTSLLTHIDFLDEQVADCNGEIEQFLSEPSHEKAELVSSALDDQPQEQAPLSSMPVGTEAMLAQDRVPEDGPKVPLSYQQAIALLDSIPGVNQRIAEIFLAEVGTDMQRFPTAGHLASWVGICPGNHQSAGKQIRGTTRKGDRWLRQALIEAAHGAMRTKDTYLSAQGRRLTHRRGKKRAVVAVAHSILIIAYHVLQRQQPYQDLGSNYFDERERSAVARQSVRRLEQLGFKVTLETAGEAA

SEQ ID NO: 506220 - protein, 392 aa, unidentified
MTIPAQVSVYSPIFVPRDYDVFAGLDVDHHSIAATFTDHQRLMQSLRLPYSARQLLNYVGKHFPGQRLAFVYEAGPTGFGLYDELAAAGHACLVVAPPMVPRAPGQRVKTNRLDSRKLSTALRGGELQSIHVPAPKYRELRHLVQLRDTQVGQLTATKCRIKALLLYEGIPFPAEEGKEKPWSQQVLNELLELPCSESVRFKLDQLVGTLHFHFNSAAAAQKQIRHFCQKDPELRQRLAWLKSLPGIGEIIATHLVARLGDPALITNVRQIAGFLGLVSSEHSTGDKQHRGEITRSGDSRLRNKLIQSAWVAIRKDPELREFYQRVYQRHPRQVAARKAIVAVTRKMTTRIYAVLKQQRPFVLREVATAPLTTEETAGHRGRLDGQQNKRSR

SEQ ID NO: 506221 - protein, 350 aa, unidentified
MRFIIGCDFHPSYQQVAMLDQQTGEFVAQALRHGGAEEVKKFYGSLPEAAEVGIEASGQSQWFERMLREMGHCVRLGDATKIRKAEDRKQKHDRRDAELILRLLQERRFPEIWVPTPEERDLRQMLLHRHKLVRLRTQVKNQLQALALNQGLQWKHKLWTAAGRRQLEGLALLPWAARRRRELLQLLDQLQAPIAELDAVVQQEAERRPEAQRLMSHPGVGPVTGLGFVLTMGPVERFASSKQVSSYLGLIPSEASSGGRRQRLGHISKQGNSFLRGVLVEAAQSAVRYEPELRREYRRLAQKKNRAIAKVAMARKLAVRLYWMLRGNMDYAQLLQGSHVGAPESSCGRR

SEQ ID NO: 506222 - protein, 424 aa, unidentified
MQYALPLVLPDVPAGGVCAGIDWATADHVACVVDMAGRVTDRFSAAHDKAGIAAMITRLRQGKVTEVAIERGDGPLVDALLAAGLTVVVITSRQVKNLRSRFGAAGAKDDRFDSFVLADTLRTDRARLRPLVPDTPATISLRMTVRARRDLVRHRVAACNQLRAHLAVAFPAGIRLFHDLDSPISLAFLARFGSQDAAADLDEQAIGAWLTTIAVRGRPAPASVLCARLHAAPPGATGADGAAQACITAALTATLTALSAQIKALETQIAGQLAAHPDRHIFTSLPRPGTVRAARLLAEIGDCRSRFPDPESLAGLAGVAPVTRRSGTRIAHGFRWSVNRQLRDAICDFAADSRHASPWAAAIYHDARARGKDHPLAVRITARAWTYVIWRCWHDSTAYHPAKHNALQAILAQQAAGSATQDNR

SEQ ID NO: 506223 - protein, 355 aa, unidentified
MSESYAGRQYVGIDLHRRRTVVVRMSADGQRLGSMVRVPSTPEALRSAMAAAGPAPRVVIEATYGWYWAVETLQGLGAEVHLAHPLGVKGFSYRRVKNDERDAADLADLLRMGRLPEANIAAEPIRALRELVRYRAKLSRWRSSAKSSIHAVLAKRGVVVPMSDLFGAAGNELLDGLVLEPAYAARVSSLRELLSMLDTEITGFDYVIAQLLAGHRGYRAIQRISGVGPVFAAVFVAEIGEVGRFAGPEKLASWAGLTPRHRESDTKIHRGRITKQGSTLVRWAAVEAVQRSSEPRINQIRTRISDRRGRPGQPGSGRNIAKVAAARTLLGLVYYGLRDGHIRALDNAGAAQQPA

SEQ ID NO: 506224 - protein, 460 aa, unidentified
MCLAGLAVIDAPWGVCAGCVFFRAPVQGSAKIGVARVVRTGEEGVTNDKRWYAGVDWASESHHVFLTDDDGRKIGERVFRHGGEGLAEMAAWLMATSGAAEGPQIQIAIEVPHGPVVETLIEREFKVHAINPKQMDRFRDRFTLAGAKDDSRDAQVMASALRTDPRCFRLLAVADPIVIELREWSRIADDLAAERNRLTNRMREQLWRYFPAMLELEHDLGAEWFLDLWETVPTPDKAARIRRTTIAKLLKRNRIRRFDVAHVLAVLRKLPVKVAAGATEAASAHIATLVVRIRLVNRQLKQAHHQLDTLTARLIPTEEAGPGQRKQHDVEILASLPGVGRVVLATLLAEAFDALQRHDYAALRSLTGVAPVTKRSGKSCIVVRRQACHDRLANAMYHWARVAIQHDSRSRSKYSALRSRGHSHGRALRSVADRLLNVACAMLKSRTLFNPSLAAPKTTC

SEQ ID NO: 506225 - protein, 423 aa, unidentified
MSYFIGLDVSDASTNVHVLDKTGSIIKKFKTETNPKSLDLAFRQLNMPIEKIGLETGPKSNWLVRELRKKGWTVVLQDSFKMAKLIETAVNKTDDNDAHLIAEVTLAGCLIPGFLNMGVHLKSPESEDIRTLIRSRQSILRQNIDIYNQVRGILKAYGIAIPKTSPVAFSNVVTKAIEGLSFEVQLSISSLMQPYDPNRKLIDTMDNHLSFLADKDETVQLLKTITEVGNITALYLKASIDDPSRFTNSRSVGAYFGLCPLQYSSGENHQQGKISKRGDEIARSLLVGVANRILKPSAKPSVLKVKSQELMKRCGKGKATVAIARKLAVIAHRIMVTKKPYIEEMQHPPKTKKDPIKLSTEEIQRLAKLAEKTGHVEFRSAQHIKKLIKEPSELNHSRPINKNKKSKPFVNRHKRSKKEGACC

SEQ ID NO: 506226 - protein, 359 aa, unidentified
MTSEIKYIGMDVHKEAITIAVRNGSGKQVMESIIETQAATILQFIQSLRGELHVTLEEGTWAAWLYDLLQRHVHELVVCDPRRNALLKEGNKNDKVDARKLSELLRAGLLRPVYHGENGLRTLRELARSYSTLSKDMTRVMNRLKALYRGLGISCGGIQVYDPRYREQWLEKIPEAGVRRRAELFYGHLDGLHALRQQARRELLSESRRHKASKKLREIPCIGPIRAALLVAQMQTPHRFRSKRQLWNYSGLGVTTRDSAQYRYVRGQLQRSKKPQQLRGLNQNHNHQMKEIFKSTATSATRCAGPFQDFYARLLAKGMEPDMAQLTLARKIAAITLTIWKKGDRFDANQLNQLNVQAA

SEQ ID NO: 506227 - protein, 389 aa, unidentified
MLCIGIDVAKRKHDCCIIDSDALKTVESFTFPNSREGFDMLLSKISELGIPKDKIRVGLEATGHYSSNLAHFISEHDLPLLTFNPLLTNRYKQGFSLRKTKTDKVDACAIAQMIVSGKGSQTYSSSLYHNEEMKSLSRYRSQTMQKCSKLKISVSRLVTILFPELEGLTSSIHLASIYALLKAYPGHEQIAHCSMKRLTRLLSDASQGRFDKSKALEIHQAACRSIGKVSLSASMELVHTITDIEVLKQHIAEIDEKLKEMVDQEESSIIDIPGIGYTLCASILGEVGDFKRFPDVDKLLAYAGMSPSKHDSGDYHSKHNKMEKRGSPYLRKTLYLAARLVAQNVPKFKEYLEKKLSEHKPYKVALSHVAKKLIRLIYRLGISGCPYLA

SEQ ID NO: 506228 - protein, 401 aa, unidentified
MNAVGIDVSKGKSMVCVMRPFGEVVLEPFEVLHTAQNLNDLARKLKALDGETRIVLEATGNYHKPVAFVLHNAGLFVSVVNPVLIHDYDNNSLRRVKTDRKDAVKIANYTLDKWTRLRQYLPEDDTRLALKNCYRQYQQAVAVRTMLKNNLISSLDLTFPDANKLFSSPAKSNGCEKWVDFIGDFWHSECVSSLSSDAFAKKYLKWCQKHGYNFTRSKSDTIYACAVNAASLPKSPTSKLLIQQQVAQLKAVSQSVAAFQQEMLRLSQQLPEFDTVMEMYGVGPSLGPQLMAEIGDVRRFSSKKLLIAFAGIEPQPNDSGKIVGNDSGISKVGSAVLRRTLFLIMTVILKTQPQDEPVFQFMNKKRSEGKPYKVYMMASANKFLRIYYARVKAVMDSKHSK

SEQ ID NO: 506229 - protein, 400 aa, unidentified
MDKDRIVAGLDVHKDTVYLCVLDTAETVIFANVYGTLTPDLQLMCSDMVSHGVTEAAMESTSTYWVPVWNALCDSMSLKLVNPYFIKQLPGRKSDVKDAQWIAECLLKHLIRGSFVPEKTVQDMRKYNRRIFDLNEDLTYNTNKLDAALQRCGFRLSNYVSRVNGKSYQKCVRAIITGITAPEELVKLIHGKTLRKYELNIIKDAVTGDFHQADICLLKQYAELIDVIGRQIEECRQALIAMCQEHFPKQFKRLQSIPGVKERAASAIIAETGADMKPFEKATNLVGWCGLKPRNDISNNKVKSNRTTHGNRFLRQILVEISWGASRTRNCFFSNFSYVQCTQRHKNKMKIQVAIARKLLVAVWHMLTKEEDFMDVYLKRLEKEAEWQNKIRELESLLVG

SEQ ID NO: 506230 - protein, 338 aa, unidentified
MSIVMGLDQHRGQITGEWIDTETGEVQRSRVAPADRAHVRKWLERFRGQELEVALEGTTGWRFVVEELRRVGAVVHLAEPAETAGLRGPKKRAKGDRADARHLRELLMVKRLPESWIPPAHILDLRARVRLRHTLSEQRGEWQQRIQATLYHHGCPQRRSLMTGDGREWLAAQPLPATAREQVTVALAMIDGIETQIAPIDKELRAYAHRQAGCKALMAHYGIGPLVAVTILAELGDCTRFSSSRLAVRYAGMDITVYQSDQRRAPGHLSRQGPPALRWALFEAAQNACRQGSPDREYYREAAERLGHNRACLSVARKLLKRSYHTLRELGEEALAPA

SEQ ID NO: 506231 - protein, 406 aa, unidentified
MICIGIDIAKRSHVASAVDEDGGTVVESFKFNNTASGFAKLLKRLRKADATPENSLVGMEATGRYWVALFDFLSSHGYEAAVINPVQTDAFRDVWTVRKVKTDALDAAMIADLVRYKRYSPSALGDEATEELRNLARYRMSLVERSTALKNRATAILDRTFPELAGLFSNAYCPTRRELLQHCATPDQVLGTDVGTLERILREASRGRCGRAKAERLKALAEESVGVGFGSKTLAFEVRLLMEELDFVQGQIKEVEGELESLLERTRGKWLVTIPGIDVPLASVIAGEIGDPDGFDDPHRLMGYAGMDPTRSESGETVRSDGHMSKRGPGALRWAFMQAADCARKNDPYFGDYYDRKRGVDGKHHYVALSGVARKLMGVALAVMKEGRPYEPAPPRNHRPGHLKEA

SEQ ID NO: 506232 - protein, 422 aa, unidentified
MLQETHDDEQIIERVAALDIGKAELVCCVRVPGESDPGRRRQEVNTYSTMTRSLLVMADRLAELGVSRVVMEATSDYWKPPFYLLEARGFDVWLVNAKDVKHLPGRPKTDRLDAVWLCKVAERQMLRPSFVPPPPIRRLRDLTRYRAALVSDRSGEKNRVEKLLEDAHIKLSVVASDIFGVSGRAMLNALIAGERDPKVLAQLARSRMRAKITKLEEAFTGHFGDHHAFLLTRMLARIDQISVDIADLDTRIEAEIAPFAAAVQRLDEIPGVGPTAAHVIIAETGIDMSRFPTPAHLASWARFAPGVKESAGKKKGTGTTGHGNPYLARVLGEAAVAASKTDTFLGARYRRIARRRGKKKAIVAVGRSILTITWQLLSDPECQFHDLGSGFYDNRISASRATRNHIAGLQALGYKVTLEAAA

SEQ ID NO: 506233 - protein, 377 aa, unidentified
MKKVRFLGLDVHADTIAIAVAEPEGEVRSLGIIPNREESVRKLVKKLGPAEHLQACYEAGPTGYVLYWQLTSMGVKCEVVAPTLVPVKPGDRVKTDRRDARKLAQSYRAGDLTAVWVPDAAHEALRDLVRAREAAKQDQLRARHRLSKFLLRHGRRASAGIKPWTLKYMQWIRQQVQFEQPAQEYTRLDYLHEVEHANERIGRLEEAIREAVKLAPRPMQEVMHALQGLRGIAQISAVTIVSELGQISRFDRARQLMGYSGAVASEDSSGKRVQRGPITKTGNAHLRRVVMEAAWSYRHRPAIGAALRKRQEGLSQEVKEIAWKAQHRLHKRYCSLVGAGKDKRKVVTAVGRELLGFIWAIGVQVESNRNSRIQVAA

SEQ ID NO: 506234 - protein, 387 aa, unidentified
MPQPNDLSRSLVPLDQDSTIIAVVEMSQSSWLVGGVLPGIERQPRKKLEPSPERLLALLHRWRDESVRAGRTITRIAVAFEAGRDGFWLARWLEARGVEAHVIHPSSVAVSREHRRAKTDRLDTELLKRGFLGWLRGERGHCSMVRVPTIAEEDAKRPNRERECLVKERTRLVNRMKGTLARLGIRNFRPTLRNAAEHLAALSTPEGSPLPPNVAAELERDIARLRLVISQIKQLEEVRRQRLEEQPERGPHAMVRLLARVVGIGIETADMLVNEVLSRPLRDRRAVARYAGLTGAPDESGAKRREQGLAKAGNARVRRGMIQLAWRFLRFQKNSALAQWYQARTADHRGATRKTMIVALARKLLIALWRFVTIGEPLDGVTLRPAS

SEQ ID NO: 506235 - protein, 304 aa, unidentified
MYVCILSQDGEILLHRTMKTRPEVFLKAIAPYREDLVVAVECIFTWYWLADLCAQEQIPFVLGHALYMKAIHGGKAKNDKIDSQKIAVLRRGGMLPQAYVYPAAMRATRDLLRRRVPLTRQRAELLAHVQQTNSQYNLPEIGKKLAYKANRDGVADRCPEPAVHKSVEVDLTLIDYYARLLRDVELTSGQTAKEHKAQALYRLQSVPGIGKILRLILLYEIHDIHRFPSVQDFVSYCRLVTCAKESAGKRYGTAGATIGNTHLKWAFSEAAVWFLRNNPAAQKYLARLEHNHGKGKAFTLVAHQ

SEQ ID NO: 506236 - protein, 346 aa, unidentified
MKIAAVGIDLAKNLFQVHGVNEHGKVALKKQLKRGQVTEVFANMPPCLIGMEACGSAHHWARTLQSLGHTVRLMAPQFVKPYVKTNKNDAADAEAICEAVARPNMRFVPIKNAEQQAVLALHRARQGFVKARTAQVNQIRGLLAEFGIIVPQGIAHITRRVPELIEDATNELPGSFRLLMQRLVEQMKDLDRQASEVEAQIIAWHRNSEISSKLAKVPGIGPITASAVVATVGDAKNFSNGRQFAAWLGLVPKQNSSGGKNVLLGISKRGDTYLRTMLIHGARAVIHATQRKKKQIDGWLGELLARRHKNVAVVALANKNARILWALLRHDRRFQLDYTPASLEIH

SEQ ID NO: 506237 - protein, 464 aa, unidentified
METVRLGIDVACTAKHQASLADESGRFLWQGWRFRTLPAELEALWAKIPDGVQVHVVMEPTRNAWVPLAAWLQAKGAAVSVVPPEQSADLRDYYNKHAKTDRLDSKMLACMPMHHPKGLRVIDDLGPAVPLKRAVRHRDSILVRRQACTGRVDALLELMGPHWLGIFGALSYNKTAVAVLEKYANPHALRKLGRSRLIKLMIRSSRGHIRDAKADELLEAVDLTLQLWADSGLDFDELAADIEIEIAQIKLFDDQIKALDDRIEDLYEQADPHGIIVSVPGVLTTLAAGILGRTGDLNRFDTLAGVRAFTGLVPATDQSGNTDKKAGITKHGDPGLRRTLFLAADHLRKVDPTIAARYHRLFVEGGKHHNSATCTIAAVLITRIAACWRNGQTYELRDTDGRVITEAQGREICKTRYRVDPATRAARRNSTKAKRLKQRTSPDKEESQSAPVTSPPQQHTSQAA

SEQ ID NO: 506238 - protein, 336 aa, unidentified
MLCGAIDIHKHVFQAVVLDPESGESVEDRFPASREELGRWVEQRLAGRECVVAVEATTGWRWVWRELVRAGIDVRLAEPVQARALRGRRRAAKTDRLDARWLALLLARDMLPEAWAPPLEIQRLRDLTRLRHALTEDRTRWAQRLHAFLAHEGWLCERGRLLTATGRRWVRALCLEPAPTRHAERLLGVIEALDAELAEVEREVRVIAREDPRARALQTLYGIGPVLACTLLAEIGEARRFRRGAQVVRLAGLDPVVEESADHRRRGHLAKAGSPHLRWALVEAAVQARRPAHVDHALHQQICTRADATRARLSVARKIGRRAYHVLREHELAQAA

SEQ ID NO: 506239 - protein, 371 aa, unidentified
MVAKRVAGTSPRRSGSSVGTLELAKATRPRKKVPVSREYVGIDLHRRRSVIVRKNADGELLSKTRIVNDPEEMIRAVAAAGPEPEVVLEATFGWYWAADLLAELGAHVHLAHPLGNNWGNRRVKNDERDANDLVDLLRLGRLSEAWIAPPEIRELRELVRYRAKLVRLRSGLKAQVHAVMGKHGVLPTRVDMFGLGGTAQLNALDLPGGYAWRLKSLRDLIGVYDKEVARLDKTIAAQMRNDRGYRAIQAIDGVGPVLGAVMVAEIGDITRFPSPDRLCSWAGLTPKHRESDTKVRRGSISKQGSRLLRWAAVEAAAKNHAGGDFKVFYRRIAERRGRNVAKIAAARKLLTLVFYGLRDGEIRCLANPARG

SEQ ID NO: 506240 - protein, 316 aa, unidentified
MNSQVFVGLDVSKQHLDVAVRPQGRHFVTPNDDRGIKQLVKRLAALKPQLIVLEASGGYEFLVTAALAEVQLPVALVNPQAVRKFAGATGKLAKTDKIDAQVLAHFAEALRPEPRPLPDQAQQMLKAALQRRLQVVKMIGQEKNRLEKTFMPAVRQDIQAHLTWLSQRLEQLDRDLSDQIRQSPLWRDRDRLLRTIPGIGPIVSRAVIAQLPEAGALPGKKAVALVGVAPYNRDSGRFRGKRMIRGGRSYLRRMLYMAAVVASRWNPVIRAFYQRLLAAGKPKKLALTACMRKLVLILNAMLKNNQPWNQFINQVP

SEQ ID NO: 506241 - protein, 362 aa, unidentified
MEESTTIVAFDQHAATTVAAVLLPGYRTPALHPLTSELSALRRFIRRLGRPGPVRCCYEAGPCGFELQRALAADGVPCDVIAPALIPRRPGDRIKTDRRDAGQLAVLYRAGALTAIHIPTEQEEAARDLLRCREDIRADLLRARHRLSKFLLRHGRRFTGTKKAWSRRHDTWLRAQTWPIAALAQTHRAYLRTVEEAVARLRAVEDDLRALLDLEPLRARVTRLRCFRGIDDLTALTIAAELGDPRRLGTAPATMAFVGLVPSEHSSGGKRAQGAITKTGNAHLRRVRVEAAWPYRHHPFVGRALQRRQADAPPAVVARAWTAQQRLHRKYARLAARGKPKQHVVTAVARELTGFVWAALTQ

SEQ ID NO: 506242 - protein, 347 aa, unidentified
MKKVTVIGMDLGDKNHKAVGLSDSGEEVDRAEVVCTPEGVRAYLERHPGAMLAIETGAHCRWVARLAEELGHEVLVGNARKLRMIWQSSRKDDWRDAEMLARVARADRKLFHPVKLRDAGNQRLMRLVKARDVLVRNRTAIINQVRGFCKAEGARLPRCSAEAFVNLKASLPPEVMDVASHLFKMLRDLNDLIKRYDRILAKALKRLRGEDAALLEPIAGVGPMTAAAYLAAVGDVGTFGGAREAGPYFGLAPRRDQSGATDKQLRISKEGNEIVRRLLVTAANYIMGPFGKESDLRRHGMRIAERGGKNARKRAKVAVARKLAVVMLAVLRNRTAYRPLADVGAVA

SEQ ID NO: 506243 - protein, 469 aa, unidentified
MAPTKANTTVEGCQKSPRKYHKALDRINPCAAFVDIGSGEHWVCIPEDCCAENVRRYDAYTSNLYEIRAWLKENGVTSVAMESTGVYWIALYQILEEENIEVCLVNARDLNSVKGRPKTDKLDCQWGQRLHSYGLLKASFRPPAEICEMRSIWRMRSQLVQEMSRTIQRMQKSLHEMNLLLPKVVSDITGKTGMSIIEAIIKGERDPVKLAQLKDARVKASNEEIAEALRGDYRSEHIFLLKKALEHYRFIEGQLFDYDEAIKERLEKVQKVKELNDGDKISNEVEHLKYKKRYPKAPSFASRTLAHEILGIDLGCVPGLSSVILLGLILEIGPDLSKWPDAGHFASWLGLCPNPRISAGRDLGTRTKKCSNRAARYFRLAAASLRRSQCSLGDFYRRMQSRNGPAHAITATAHKLAVLYYKLVKEGEQYKEIDRHEYQKAMAKMRIERLKKRAQGLGFQLIPIEEKAS

SEQ ID NO: 506244 - protein, 407 aa, unidentified
MIFVGVDWAQAHHDVYVEDEDGKRLGGGRLPEGVEGIARFYDLVGGHVEEPAEVVIGIETDRGLFVAALVAAGYEVFAVNPMSTSRYRDRHSTSGAKSDPGDAKVLADMVRTDRHNHRPVAADSETVQAVKILARAHQTMIWSRGRQTNLLRSTLREFYPAALAAFDDLSCADALEVLRVAPTPELGRGLSTSRIAAALRRGGRQRRIDERAGEIRAVLRSPQLAAPAAVSTAMGVSVAASVAVIAAMVTQIAELGREVEAGFESHPDAEVVRSLPGLGTVLGARVLGEFGDEPNRYTNAKSRKNYAGTSPITRASGTKRVVLARYARNQRLADAVYLWAFAALTASPGARAFYDAHRGAGDTHHAALRALGNRLVGILHGCLAHHVGYDETIAWGHRANQKVQKAA

SEQ ID NO: 506245 - protein, 345 aa, unidentified
MTEAYDGRQVVGMDLHRRRSVLVRMTADGRKLETARIANSPAALRAVIARAGQNPQVVVEATYGWYWAADVLEAAGAEVHLAHPLGVKAFSCRRVKNDERDCADLADLLRLGRLPEAWIAPPPVRALREVTRYRHKLVGQRTSCKDQVHAVLAKCGIPVVRPDIFGRGGGIWLDGLPLPQPYAGKIASLRALIGVLDSEIARLEEQAAGLLAGDRGYAAIRQLPGIGPVLGAVIAAEIGDITRFRTPGQLASWAGLTPRHHDSDTKVIRGHVSKQGSRMLRWAVTEAIQRQPAGTRPQQAKEAIIARRGDQARSIAKTAAARQLLTLVFYAMRDGHIRRATSLAA

SEQ ID NO: 506246 - protein, 398 aa, unidentified
MAKRREKRERRSVVLEPDAAGIDIGAEEIYVAVPPDRDEESTRRFSSFTRDLHALADWLGQCRIQTVAMESTGVYWITGSRCFRSWRSAGSRYLVNAHYLKSVPGRKSDVSDCQWIQYLHSVGLLRASFRPPEAICALRTLWRHRGSLLEMAAEHILHMQKALSQMNLQLHHVLSDITGTSGQAILDAILSGQRDPLALAQLCHSRVQSPRDKVAQALVGDYRPEHLFTLKQSLEGYRYYQKLIWELDQETSRLMQALPSSTEDPLPPRTKPTAYHRKGNDPQFDLRSELYRIAGVDLTDIPGVSAATAQVILTEIGTDVSRFRNASAFASWLGLCPEKRVSGGKVLSCKTRQVKHRAATALRMGANSLCRAKGYFGEFFRRMRAKLGTAQAITATAH

SEQ ID NO: 506247 - protein, 436 aa, unidentified
MSDANDRGGGGGGGGIIGFDQFTHFGGFDWASAEHLFVVVDPRGKIVLSWRFPDDAEGWAQFHRRVADFPRLGVAIETSCGPAVERLLDAGLAVYPLNPKAATRYRDRKAPAGAKDDALDAWSFGDALRTDGHGWRPLLPQDPLTTELRLLCRDEVKLIAQRTALVNQLRAALCEYYPAALDAFDDWVCESSWRFVIAFPDPQALVAAGRRKWERFLHAHKLYRPETAQRRLAGFADATKFASPNPAVTRAKTLLAVALAKQLCLLQSQLDAYRARIVELFHDHPDHDCFGSLPGAGPKIAPRLLSELGGNREVFATAEALQNYAGTSPVTRQSGRSRIVTVRRACNKTLRATVHLWADLSRRSCAWAEAYYRKKREDGMAHAAAIRCLGQRWVKILRRMWRDHAPYSEALHMKNQTEHGSWVIRLLPGTPAATGG

SEQ ID NO: 506248 - protein, 343 aa, unidentified
MAKTPIAVLGIDLGKNSCSLAGLDAAGAVIMRRRMTREGTIKFVATLPACVVAMEACCGAHFLGRTFACQGHTVRLMSPEYVAPYVKAQKTDNRDAEAIAEAATRPTMRLVTLKSEAQLDLQVLHRARERLVAGRTRLTNQLRAMLLERGVILPKRRAPLIKRLDELMAGELPISQRARQLLLDLRDEWMDQDRRIKAYDDELMALTREDGAARRLATIPGIGVINATALLAAVGDASAFAKGRDLAAWLGLTPRQHSTGGKTKLLGISKRGNKYLRTQLIHGARAAMAHFAKKATPVGTWVRQLLTRAHPNVVVVALAAKLARIAWAVLRHGSNYDHRAATV

SEQ ID NO: 506249 - protein, 343 aa, unidentified
MQNDTRIAVDLAKAVFEIAVSHHPGQVARRERLARSQVLSFFAQQPPATVVMEACGSAHFFAQRIQELGHKVVLLPPYHVRPYVRRNKTDRADAKGLLEASRNEEIRPVPVKSQTQQLLTTLHRLRSSWVTERTARLNTLRGLLRELGVFIPVGSTKVIPAVWALVEDADSVLPEALRPLFAEACHEVRSIEARIKQVERQLEALTEQLPVIEHLLTIPGIGLLTASALFAFIGDIHRFPSGRHLASWLGLTPREHTSGLKRQLGHISKRGDSYLRTLLIHGARSTLVRARTRQPDRLRKWAHKLGQTHPHNKATVALANKLARVAWAVLARDEPYRPAVAPA

SEQ ID NO: 506250 - protein, 351 aa, unidentified
MTEIKRIAIDTSKSVFTLHGVDDGGRPVLRRNLRRGELLRFFERLPPVEVALEACGGSHHWGRALSAFGHRVRLIPPQYVKPFVKRGKNDRNDAEAIAVAAAQPSIGSVPIKSAEQQAAAMLLSVRELLVRQRTQLVNAVRGHAAEMGVVAPLGEKGLKELQAEIAAADEAAVPAAASQAIALLSREVERIEARLRTIEAELMQQHKANPVSRRLAAIPGVGPIGALSFALRVDAGQFASARHLAAWLGLVPRECSTAGKQRLGGISRAGDERLRQLLVLGATAVIQHANPRVKPAGGRPTGRPAPSQWLLNLLNRKPRKLAAVALANKMARIVWAMMTSGEAYRPPPASV

SEQ ID NO: 506251 - protein, 443 aa, unidentified
MKNHSYRCLELQEVNVEKITSSVGAAPVVVAIDVAKTKMVAAIASGAGAPLAIVKWRQPAQTMEFVSLVKALGACGRVVTCVMEPTGTYGDALRYQLESVAVPVHLVSANHVHDAAEIYDGVPSKHDAKDAAVIAWLHAQGKTRPWPQRDEKRRTLRALITERELYYQPMQRTLNKLGALLARHFPEADEVFALERQKSAWAVLSALPSPARMADDSDETRRILQRASYNNLSREAIERVVIAARTSTGVPMCDAEQHLLQRFVQEIARCSSECDRVDEDIAAVIASEPSWTEMRAVLGAVTLAVVLAHVGEPASFTSANALQKAMGLNLREHSSGNRKGALHITKRGPGIVRRYLHFAAMRLIYTHPVAEHWYRQRKQYLAGHHLAALTAVMRKIASSLIYVARGTPFEATKLFDARAFPDDIARAPRRRRTMKLVAPMVVV

SEQ ID NO: 506252 - protein, 330 aa, unidentified
MKKQDFTLGVDVSKNTLDINCAEIDEHIQIENGTQGFRLLIKWCKDFKINLRKSVVVMEFTGGYEYKLIQFCETKKIPFIRIPGLAIKRSLGIIRGKNDKVDSSRIAQYGVEKYQSLQPSKPLNKRIIALKELLNFRKRCVRDKAGCQATIKERKHIYPDIKKDIIIKESENKIKLNAKIIENIEKEIMHIIEENEDFKRNYDLITSIKGIGKVNAWMTIAYTENFTCFPDGRTYAVYVGVVPFDHSSGISIRGRKRVSKLANKELKSELTQAAKSAIQWNKELREYAERKLMEKDWGKVLNNVKFKLILRMFAVVKRGSKYVENYQVAA

SEQ ID NO: 506253 - protein, 409 aa, unidentified
MGKTLFVGIDIGSDTNVVRILDDTGKDVCGFNVSNDLPGAERLVERIVNEAELIDADKVKIGMEATNLYWWHLSQALHEAPELAAFAAEIAVINPKVIDGFKNIYTDVVKTDAVDAWVIADCLRFGRVRPTPPPDMTYAPLQRLTRFRYHMVSNLAREKNRALNLIFLKFSTYQKECPFSDLFGQASRAVVGNLTPDEIANMPVEELADLMLQHGNNRLKDVPEMAKVIKQAARNSYRLNPKMRDAVDVTLAMSLETIRFFESQQKKIDQVIAKELKAIPQTLDTVPGLGPVYTAGIVAEIGDISRFKNHNALAKFAGLTWRQHQSSKFTAEDIPLTRSGNYYLRYYLIEAANSVRVREPEYAAFYRKKFTEARHHHHKRALVLTARKLVRMVFTLLSEGQIYKQRRLG

SEQ ID NO: 506254 - protein, 407 aa, unidentified
MYCLSFDIAKGKSVVGLFNGQLEPLIVPYEIHHVKEEFVALASKLDISQTEIILESTSMYHYPVVSFFKNLGYVVIILNPIISREHKRNLRKTKTDLIDCVNLAAIYFEKKFNLQKEHLPIYHQMQSISRHIFTLNESMVRYKNRYHQLLELIFPLYEYTLTNDIKFKSDHMALLKSFPHPELLVNTRVDRLATVLASMHKRMDCRFLKTAQRIKDLARMTLYSVSQDDVVVDEFVELSNLILDLDEKISGHQNHLIDLAQTRTDYHKIVSIFGISPYMAALLVAELKDLSSYRTVKQLTAACGLDPTIIQSGKSIDYHGHISKRGNKHARKALFNAVCTIIRSSSRLNPQNPILVYYRKKRSENKHHYASVIACTTKLLRIIFTLCKNDLTYSNQYNQNHLVTPIV

SEQ ID NO: 506255 - protein, 356 aa, unidentified
MHTQVTKKIDFTGQSLFIGLDVHKKSWSVTVVVDGIEHRTFTQPPDPKALNNYLQRMFPGGAYNSAYEAGFCGYGIHRELNSLGIRNIVINAADIPTNQKDKLNKRDPVDSRKIARELEKGSLHGIHIFDRDLEELRSLNRTRFYLMRDLRRSKNRIKSFLQYYGEPIPPEFDNNQWTLKFVSWLKQVQMKTPGGQDAFSYLIRSYEHQREQMVSLSRQVRVRIREYDNELYSLLKSISGIGPLTASALITELGDINRFANIDQLGSYVGLIPRIRESGETTHTGGITFRCNSFLRTLLIESSWQAIRMDPAMMQYYHSHLVNNKGHKVVIKVARKLLNRIRYVMKNRKPYITGVV

SEQ ID NO: 506256 - protein, 400 aa, unidentified
MSGSRRPFQGFVGIDVSKDKFDACGIREDGAKLFQFSATMDRNGFEKLKSHLSSVSMGSVLIGMESTASYHVNLFSYLVSEGYAAVVLNPLLISNYVKMQLRKTKTDKKDAWVIAQFLLANKDSLIRRATSPLISDLRELARQRESLVDQMTSLKNDIKRILNITFPELEHMTGIFTKSILKLLQRYPSAYALQEVDPDQLTRMLIEDSYGRKRGAFAEALLKAARSSIGTPSPMKDVILKQKVSLHFHLEEALQEITEMLLQTSRGMMGDDMDILNSIKGIGEKTAASFLIEMGGDIQQFDDPNKIIAMAGIDPAVRQSGKHEGSSRITKRGNRHLRRIIWLMTTQVIHYSDVFKVYYQKRRKDGLPYKKAVLATSHKLIRVIYAMLTQRTFFCQAVNS

SEQ ID NO: 506257 - protein, 343 aa, unidentified
MQIRSVGIDLGKTTFHLVALGDNGKVLLKKKFTQKQLIAFTANMQTCLIGMEACSGSHFLGRALREQGHDVKLIPAQFVKPFVKSNKNDFIDAEAIAEAVDRENMRFVPIKTDDQLDLQALHRVRDRLMARRTSLINQIRAFLLERGIVFAKSPIRLREALPEVLENVNENLTPSMRNLVAMLWSEWKDLELQIVQMNDEVERIASSDAACRRLRQIPGIGPLVATAIVASIGNGAAFRKGREFAAWMGLLPKQHSTGGKARLYGISKRGNCYLRKILIHGARAVVLRSKRDRIAMGAWMTSLETRAPRNVLIVATAHKLARIAWAVLSTGQDYRAVPEALTV

SEQ ID NO: 506258 - protein, 433 aa, unidentified
MKVLYERVAGIDVHKDMVKVAIRSPGEKPWTRKTEILEFRTFYGVLQEMARELRRRGVTHVVMEASGVYTEPVYYALCEQDFTQVAVINPAHAKALRGHKTDAKDCARLAELFECGLLRGSYIPPAELKEVRDLTRYRMKSVQARTSEIQRLGKALESAGIKLGSVASSITGTASTAMIEALIDGERRGGVLADLAIGRMRAAGKLTDLSMALAGRFTEHHALLCRLHLDRIAVFDDAVDGLDKRITGKAARWQREAGLLTSVPGFGDVVAQAWLGEIGPAPHRHFATHEKLASWVTLCPGNNISARKRKHARTGDAGTYIKPMLIQAAWAAIRVRGRLQARYNRLVRRFGGDKNPGAKKKAITAIAHTLLKIAYQVLKSGTPYQEPGADFYTRRESPEQKQAWLERQLQKLHPGCTITVTISPPEAALPAGT

SEQ ID NO: 506259 - protein, 346 aa, unidentified
MEHYAGIDVSLEFSSVCVVDAQGKIVREAKVASEPEALVVFFASLGFAVKRIGLEAGPLSQWLHAGLKRAGFDILLLETRHVKAALSAMMVKTDRKDARGLAQLIRMGWFRPVHAKSMGSQEVRALLVARKQLLGRLIDVELSIRGILRGFGLKVGVVTRKGFEGRIRELVAGHITLERIAGAMLSARATLKVEYEKLHKIVLTIVREDAVCRRLMTVPSVGPLVAITYKSAMDDPNRIAKSKAAGALFGLTPKKYQSGEKDVTGGITRAGDEMVRTALYEAANVLLARITRFSKLKRWGMDVAKRRGSKRAKVALARKIAVILHRMWVDGTTYRWTDARLTAPQV

SEQ ID NO: 506260 - protein, 461 aa, unidentified
MKPEKIENQEAGRELDGLPVLRRNVAGIDLGSQMQWVCAPSLDGQSWEEKAFGATTPELERMAEWLKQRQVESVAMESTGVYWIAPQEVLEGHGLEVLLVSTRELTHVPGRPKTDRIDCRWIRRLHSCGLLRGSFRPPEQICMLRTLVRDKGRLLEERADWVRRMQKSLDQMNVRVHRAVSDIQGTTGMKIIRAIVEGQRDPLELAKLRDPGCHKSELEIAEQLSGHWREDYLFSLQQSLKMYDAIGERIAAYEKEILRRLGEMEKPDLPDRAAPELKNKNKAKKIRDRGEEPVRQALYRMSAVDLTSIDAVGAGAAQAVLSEYGPDLSRFPSEKEFISHVLLAPRRGITGGQPIHKKKRNSASCRVSEILRSAALSLQHSQTALGAYYRHTAQRLGPDVAAFATARKLATMIYRMLRWGQSYVDEGAAAYEQRYQQARFNRLHAAAADLGFQLVAQTANP

SEQ ID NO: 506261 - protein, 400 aa, unidentified
MRFYTRQHRHYCGVDLHARSMYVCILDAEGSVLVSKNIPAAPELFLELIAPYREDLAVAAECMFTWYWLADLCEREAIVFVLGHALYMRAIHGGKAKNDRIDAHKIAALLRGGMMPQAYVYPRAMRATRDLMRRRNHLMRKRAELLVHIQNTNSQYNLPAFGVRLAKPHLRQEAASHFAEVAVRKSVELDVSLIDHYDRALPELERYIESSAHAHDPVALALVRTVPGLGAILGLSILYEIERIERFPRVQDFLSYGRLVKPTKESAGKILGHSGRKIGNAHLKWAFSEAAVCFLRGNRRAQALRVRLAAKHGKGKSLAIIAARLARAVYFMLKRRRPFDAERFFAHSGSAGAKGSSLNVPTGATLQGARPEASSTNLTVPTSTAVERGRKRMRLAAQPR

SEQ ID NO: 506262 - protein, 408 aa, unidentified
MQVTFGIDVSKSTSAVCELIGESKNELTIANNRPGFIQLLKELAAFSKHPQIIFEATGVYSRRLQAFLEDYGYEYVILNPLKAKKEMDMGLRHNKTDKTDAYHLALTQRLHHHPVNQLQSQTYKQLNSLSRFYDQLTSDLVMAKNRLHQSLQSTFPEIETLFCSAKGKNYWQIVLHYPHCDLVRKDNQKQIIDWLMQLKGIGFKHAQKTADKLIELAHKAYPVVSSDSVEVEQVQYYAHRLLGLSEQRKQIIERMVKLANSLPNNDLKNLESIPGFAQTTAVRVLAELGDLRRFSNPNKINAFIGIDPGRYQSGEMDSSLSITKHGNAVARKLLYRAIGQIDNASKTNLCHIADYYESKKLSSQTKGFKKIAIASIHKLIRTMYALISNDQLYDYNVAKHNQKDFSRN

SEQ ID NO: 506263 - protein, 324 aa, unidentified
MIDGILGIDVCKNTLDVSISSYAKVRTKSFTNSPDGWRHLLDWLIAQKIQRVHACLESTGRHSLGIACALYEADHVVSIINPAQIRDFVRTKLGRNKTDGVDASHIREYCELFKPSPWAPPSEAHRRLGELQTIRSGIIAGLTEWKNRKNSGIVDAEAQALADATISHFTSQLGAVDKAIALTIDNDCDLQSKRDLLLSISGVGETLAGVVLAELPGPDVLRSSAEVVAYAGLNPRRHQSGTCIDRATRISKIGNAVLRAALYMPALSAMRYNSAIVALVTRLKSRGRLKPKQIVVAAMRKLLVLCFGVLKTGRPFDAAIAMGG

SEQ ID NO: 506264 - protein, 415 aa, unidentified
MGDRQQWYAGVDWGSQSHCVFLTDGDGRKIGEKIFKHGGEGLAEMAAWLMTASGAAEPGQIHVAIEVPHGPVVETLIERGFAVRAINPKQMDRFRDRFTMAGAKDDSRDAEVMASCLRTDPRCFRLLAAADPIIIELREWSRIAEDLGVERNRIVNRLREQLWRYFPALLELEADLGAEWLLELWEAAPTPDKASRLREATIGKLLKRHRIRRLDAAFVVNTLRRPPVRVAAGTVEAASAHVALLVPRIRLLNRQIKDAHSRIDGLTARLMPAEEAEPGQKKQHDAEILASLPGVGRTILATLLAEAWDALRRRDYAALRSLTGVAPVTKRSGKSCIVVRRQACHDRLANAVYHWARVAVQHDPRSRAKYSELRRRGHSHGRALRSVADRLLNVACAMLKSGTAFNPSSVAQKPA

SEQ ID NO: 506265 - protein, 416 aa, unidentified
MSRKFMRTNTCGKLSQLLNIFERWFSHMYSYFVGIDIAKNTHWASCLSSDGEIILEPFSFSNDNSGFQKFISKLESLDKTKILIGLESTAHYGENIISYLFNLDYNIGLINPIQTANLRRSNIRKTKNDKVDTKIIIKALTLDNYSLITSRDINNLKLKGLCRSRRNLITMRSKAKIQLVSYLDQIFPELAQFFKGNLHLNVSYQLLKEFSSPRQISSLHLTKLSNILHDNSHGRYGKQDAIRLRVLAENSVGIDNPSLSLQIKHAILQIELYNEQIAEVESLYKQILDEMNTPILSIPGMSYNQAAVILGCVGDINRFEHSCQLLAYAGLDPSVIQSGNFQARSTKMSKRGSGMLRYSLVYSAHNVVKNNQTFRDYYELKRSQGKSHYCALGHVAHKLVRVIFKMLKDNVIFNLD

SEQ ID NO: 506266 - protein, 340 aa, unidentified
MRQLYVASDLHGNNNLLGIIDGEGKRIFKKKLPNDPLLINDILKPFKEEIVGIVVESTYNWYWLVDALMEEGYKVHLANPAAIQQYSGLKHADDKHDAFWLAEMLRLGILPEGYIYPKEERPVRDLLRKRGHLVKLRTSLILSLENIISRNFGRKLPANDVKGLRKDYVTPLFEGKEDLGLAGRVSKETIDFLTHQIRQIEGVVEKRVMLKEAYRNLLTIHGVGKILGLTIMLETGPIGRFETVGDYTSYCRKVPSQWISNGKRKGSGNRKNGNKYLSWAYAEASDFARRFHPESRAYYNRKMQQSNPAVAHSALSHKLARAAYYIMRDQVAFRPEKLFG

SEQ ID NO: 506267 - protein, 331 aa, unidentified
MENALQIVGADLSKKTIDLRIHQAKDGIRIENSSTGFKQMMTWFRRATKDLSGIIVVMEHTGLYSFCFEKFLFEKGIRFSKVNPVDIKFTIGFTRGKSDKIDAARIARYGAEKQGSLPIQTPTSKALEDLKMLSTSREKLVRTRASLKTSVEEFRNIGMSDREPPLKAQLKIIKSLDKEIKILDDQIQSTIQKEKELKQTYTLLTSIPSVGAVVATNVIIKTGNFKRFPNSRKFSCYCGIAPFEHTSGTSIRGKTRVNHMADKSMKTLLDLAAKTAIRCDPEIRDFFLSRTAAGKPKMSTINIVRNKIVGRIFAVAKRQTPYVIARSLQAA

SEQ ID NO: 506268 - protein, 345 aa, unidentified
MTIVESRLITGGVDTHADTHVAAALDPIGGLLGVEEFPVTPAGYARLLGWLGAFGTVGLVGIEGTGSYGAGLARHVTAAGIRVVEVDRSDRQDRRRQGKSDPLDAVSAARAAQSGRARGAPKGRDGAVEAIRALMVAKRSARAERTQTVNQARSLLVTGPDDLRARFAGHTVAALVSELATLRPRPGDVVGYATRIALRELGRRAEFLDSQLERLDELIVPLVTVRAPGLLALHGVGPDTAALLLIAAGDHPARLRSEAAWAHLCAAAPIPASSGKVTRHRLNPGGNREANHALWRIVITRMSAHAPTRAYVERRSEQGLSKKEIIRCLKRYVAREVYRHLRPAA

SEQ ID NO: 506269 - protein, 341 aa, unidentified
MSVAIIGIDLGKNTCSVAGMDTSGRVLFRRRVSRSGVVLLVRKHSGCVIAMEACCGAHHLGRIFAEAGHEVRLMSPEYVLPYVKAQKNDDRDAEAIAEAAMRPTMRFVPVKSQAQSDLQALHRARERLVSERTALINHLRALLLERGIIVAQGRRKLEKEVRELLAGEGADLSHRIRVLVGDLLEEWTQIDRRIEAFDSEFVTLARSDETTRRLATVPGIGPINATALVAAVGDASAFAKGRDMAAWLGLVPRQATTGGRPKLLGISKRGNRYLRKNLVHGARAALPGLAERDTPIGHWLRALLARQHKNVVVVALANKLARICWAVLAGGRNFSEAPAMR

SEQ ID NO: 506270 - protein, 343 aa, unidentified
MPHYVGLDVSQKTTAICVVDAQGKRLWRGVCATDPGPISARISQHAGVDAKVGIETGSMTPWLVHGLRAAGLDVACLDARRVKAALQMQLNKTDENDAEGLAQIMRTGWYRAVHVKSLDAHRARALLGARAQLVGMTTRLSNMIRGVLKTFGLLPGAGRGLRFDRKVEALLEGAPEIALVVRPLLATWRQLRQQIAVFDKAVLQQVRADPICRLLMTVPGIGALSSLMYVSTVENPSRFSRSRAVGAHLGLTPRRYQSGETDRSGHISRCGDGLARTLMYEAAIVILHRVKRSLHLKDWAAAIERRSGSGKARVALARKLSVILHSVWRSGEPFRWSAPVMAA

SEQ ID NO: 506271 - protein, 353 aa, unidentified
MDTITRVGVDLAKNVIQIHAVDAAERVVARRAIARNRFLSWFANLKPCLVAMEACSAAHYWARKLRALGHEVRLIPPQFVAPYRKGGARVKNDARDAEAICEAASRPQMRFVPVKSPTQQSVLVLHRMRTGYVEERTALVNRLRGLLAEFGLFFPQRINQLHKYFVDCVEDGSNELAGPAREALMRAWVQWQALDQEIAWFDQQIAEHANQDTQAKRCMEMCGVGPLTASATVATVVDARQFRNGRQLAAWIGMVPKQNSSGGKRRLGRITKQGNDYLRTLLVLGARSAIAAAARHDDRLSRWIVQLQARIGYQKTLVAVANKHARILWAILAKGEKFDPSHAPARPRPTAGA

SEQ ID NO: 506272 - protein, 331 aa, unidentified
MIKYSFFVGIDVSKAVIDVSYWQNGQAIYLGQYKNSKRGFQSMREALECLTATSSDLWFVCFENTGSYSKALLYWLIDQSIPCLEENPLRIKMSLGLRRGKDDKTDSKDICQYVFEKRDTIKPTVLDKPMIIKLKAVLSRRDLYVKQRTGLKLTHQHANMDASLHEQLSSINEEAIKQCDKQIKALEKILQDLIQSDPEAEKNDQLLQSIIGIALVTSAYLIATTNNFKSITEANKYACYCGIAPFPNSSGIKRGRSKVNHMANKKVKSILSNCILSAIKHDPGIALYYARKLEEGKSYGVISNAIKNKLIHRAFAVIKRQTPYVKLMAYA

SEQ ID NO: 506273 - protein, 365 aa, unidentified
MELSNIFVGIDLGDKNSVARIAVDRGKAERYGFVNNAEGRARLFEEVKRRAAAVNGKVWMAYEASACGFVLADEAQNRQMWCTVLAPTKMEKSVEQRKHKNDDRDADGVVETLRGHVLAGNRLPGVWIPDRQVRDDRELIRTRLELAEKQTKLKSQVQMLLKRYGLEKPSGLGAGWTVGYRQWLQALAETSSPPLGMGGRQALGSLLRQLQLIEEEIQRMDQYVKQLANEARHKPFMDELMKEPGVGRLTALVYRTESGYAGRFRRGRQVGKFVGLTPSSYESGQQNDRKGHISHQGPPRIRKMLCQSSWVGIGSGDGGDRPLYDRIVSRNPKRKKIAIVAVMRRLAVRLWHRMRQVEMKLAATA

SEQ ID NO: 506274 - protein, 388 aa, unidentified
MAAILRPYGEIVSSPFEIKHTSGNIQSLIQQIKSIEGESRIVMEHTGHYYEPLARELSLAGLFVTAVNPKLIKDFGDNSLRKVKSDKADAVKIARYTLDSWTELKQYSLMDEIRNQLKTMNRQFGFYMKHKTAMKNNLIGILDQTYPGVNTYFDSPAREDGSQKWVDFAAAYWHVDCVRKLSLNAFVDHYQKWCKRKKYNFSRDKAEEIHGAARELVPVLPKDDLTKLIVKQAIAQLNTASKTVEELRTLMNETAAKLPEYPVVMGMKGVGPSLGPQLMAEIGDVTRFSHKGAITAFAGVDPGVNESGTYEQKSVPTSKRGSSSLRKTLFQVMDCLIKTKPQDDPVYAFIDKKRAQGKPYYVYMTAGANKFLRIYYGRVKEYLMSLPE

SEQ ID NO: 506275 - protein, 426 aa, unidentified
MNCTQNYKIDQVTEQTLVVGIDIAKRTHYACFVDDRGRVLRKSFPIFQSKKGFRQLYEAIQEAMQAFGKPQVIVAVEPTGHYWLNLAYFLEEHGIPLVMVNPAHVCRSKELDDNLPTKHDAKNALVIARLAKDGRFLVPRLLHEIEADLRVGSTLKEKFRKEQTAVKNAITHWTDRYFPEFWTLFRDVGKTALSVLEWTPLPADMAGRSAEELIEVYRQSEGLKSPQKTKIRALIDAAKDSIGVTEGTTMARFEIAALVRRYRQLEAEIAALDAELKALVQTTMEYQWLKTVDGLGDATIIDLLAEIGSFAHYRDPRQLVKLAGLTLKENSSGQRKGQKHISKRGRKRLRSVLFRAMIPLIRHNEAFRELHEYYTTRPVNPLTGKQSIVALCRKLLNVLFAICMKKQAFDAERMKQDVLSQVQRAA

SEQ ID NO: 506276 - protein, 414 aa, unidentified
MDVLHARCGGLDVHKSSISACILLREAGRVQKHQRRFGAMTQDLRELAEWLRQFGVTQIAMESSGVYWKPVWNILEREFTIVLANAQHIKNVPGRKTDQKDAEWIAQLLQYGLLRASYIPCEIIRDLRDLTRMRARLSQEASRLSSRIQKVLEDANVKLASVATNVLGKSGRAMLEDIINGKDDPKHLASLALGHLRVKIPQLRLALEGKIRSHHCFLLRRLLDQVQFVEHEIAFLDQRLEDIGGQRPELAQAVERWDTIPGVDRVAAWALLAEIGDNMAQFPTAEQLASWAALCPGNHESAGKRLRGTTRQGGPWLRRMVCQCAWAAARTKNTYLSSQFRRLAARRGKKRAIIAVAHTLIVIAYHLQKNKSNYDDLGGTYFDRIHSEGLKRYLVKRLQQLGHKVTLEPMEAVI

SEQ ID NO: 506277 - protein, 344 aa, unidentified
MGEVSTIGLDIAKSVFQIHGVDRDGEVAIRKRVSRAKLLEFFAGLPPCVIGIEACPTAHHWSRKLQTLGHTVRLMPPSYVKAYLKRSKNDANDAAAICEAVTRPSMRFVPIKSEQQQSGLMLHRSRQLLVRQRTMLSNAIRGHMAELGIISAKGRNGTAELLKIIATENDDCIPAAARFSLDVLARQYVAIAAEIGVIEKRIHAWHRSCAESRRLEEIPGIGPIVATALVAEVGDWKAFSSGRNLAAWIGLVPKQHSTGGKERLGGISKQGNRYLRWLLVAGAMAVIRYARQHGTKRLWLARIMNRRPIKVAAVALANKIARIAWAMMVRGERFKEPRLLPAVT

SEQ ID NO: 506278 - protein, 424 aa, unidentified
MTTLHNSAANTNHPAILAFDVSKDLLNLTANFAGRMVDMEFANRTQVIDEQLAILARRARMAGHDRVLVVSEPTGCYHQSLMNSARRLGLETAWVSGEAVCKMRVIETNDSGKTDLKDPHVIHTLARLGKTLVQRHLQETYALLREWNNLYERAERGVVESKGLLHRQLKVLFPDYGFQKDFLYSNSGVALVERYGANPYRIVRAGKARFCRTMRKQVPYIRQGTLDRLYQQAESSTRHILSPRQHKLLEFRLQQLWEDYRLHQRRKQEARVQMEALYEEARQDDHKLPVAEKGVINTFYLARILAETGPISDFGSLRKFLRYAGLNLRERQSGTFRGKTRLSKKGRRGLRKILSQVVLPLVRKGELFGAYYHAKRERDGMPGTKAMTVVMRKFLKLFYGWYQSGGAFERDRVFVCQSQYHRAA

SEQ ID NO: 506279 - protein, 343 aa, unidentified
MQTVTTIGLDIAKSVFQLHGVDATGQVVIRRQLRRRYVLAFFEKLPPCLVGIEACASSHHWSRELQSLGHTVRLMPPAYVKPYVKRQKNDTTDAEAICEAVTRPNMRFVPTKTIEQQSCLMLHRARHLFIRQQTAVINSIRAYLAEFGIVAPVGRRGVEQLLEVVADAADRRLPEVARVCLAALGGQLRRLKAQILEFDRRIMAWHRSNATSKRLDAIPGVGPALATALVASIADPKAFRSGRDFSAWVGLVPKQNSSGGKDRLGSISKQGDRYLRSLFTAGALAVIRYAKIHGARHRPWLTALLARRPTKVAAIALANKLARMAWAMMARNERYKEPAALAA

SEQ ID NO: 506280 - protein, 429 aa, unidentified
MNYNTQNAKIASITEKTLIVGIDVGSETHYARAFNWRNYEYSKKPFAFSNDEAGFSSFKDWMDDIAEKHGMKVVIPGMEPTGHYWLNLGAYLQEQGMKPVHVNPHHVKKSKELDDNNPSKNDRKDPKTIASLVNEGRFSYPYIPTGIYAEIRNLSNLRIQTQEEITRIKNRIARWFSIYFPEIKDVYRNPDAVSGLMVIKQAPLPCDIKELGVDGVNKIWRDARLKGAGIKRATTLVTAAEHSIGNTEAPRSARKEIRNLLNDYEIYKNRMDELMEEIKETLSEIPYIDKLMEINGIGIKTVSCFIAEVGDIGRFDNPKQVQKLAGYAIVADSSGKHNGESRISHRGRKRLRYALYEAAISVIGKNKEFKEIHSYYRTREKNPLKKMQSVIAVACKLIRIFYTILTKGVDYDSQKMLNDIVRPEIQLAA

SEQ ID NO: 506281 - protein, 330 aa, unidentified
MNHIGIDVSGKELRVVVSVNGKHRKAQSYENTPEDHKRLVALIQKLQGESIVCMEATGMHHFDLAVALSHSKTITVTVINPKAAHNFAKALMQRCKTDSIDADTLASYAERMPLIEWRRPSEEALALRALARRISATNKIKAQVKNQLGALMLTQETPEVILAQTKSLIGTLEEQIASFRINALNIVNRNRELREVFALITSMKGIAEASAIQLLGELLTMPDDLTVKQWVAYAGLDPKHFESGSSVVKKTRISKAGNRYIRQALYMPALVASRSEPHVAAYYKHLQEKCGLLKIQAICAVMRKILHAIYGMLRSRQPFDGRMFFRMETA

SEQ ID NO: 506282 - protein, 338 aa, unidentified
MEQVITIGLDLAKNVFQVHGIDAAGKVLVRRQLRRGDVLRFFGGLPRCLVGMEACATAHYWARELTKLGHTVRLMPPAYVKPYVKRGKTDVADAEAIAEAVTRPTMRFVAVKTADQQAALMLHKVRDLLVRQRTMLINALRGHLAEFGIIAARGPGGVTAAIISLHEAQDSLPELARVALHGLIEQLRMVRGEIARVEKRIVAWHRASNPSRRLATIPGIGPITASAIAAAVPDATLFQSGRQFAAWLGLTPRAHSSGGKERRVGISKQGDGYIRRLLVTGATAVIRLARQGNASKTWAAKLLERKSARLVSVALANKTARIAWAVLARNQSYVAPAM

SEQ ID NO: 506283 - protein, 319 aa, unidentified
MAQNDLVVVGIDVSKDKVDACIRALALQQTFPSSAQGHRQLVAWLRKHQVNKAVMEASGGYERGWARVLREAGIEVRIVDPKRVRSFAQSAGRLAKNDAIDAQMIAWFAETFSQAPGQVHDAAHEELVALVKARIALVDLKTRLEVQHQHAAPASVQKARARVLKSLVGELAKLEAIIAATIKATPCLAERAEIIESVPGLAETTSANLVAGMPELGQVSNEIAAALIGIAPYDDDSGNRRGERHIKGGRRWVRNALYMPCVGAATLNNPVLKAYYDRLIAKGKKPKVALVACMRKLIVILNTMIARGQKWDPSRYALN

SEQ ID NO: 506284 - protein, 298 aa, unidentified
MDRSGKILYHKNIQTDPDDFLEAITPFKDDIVVCVECIFTWYWISDLCVEHKIPFVLGHALYMKVISGGKTKNDRIDSEKIAALLRGGLIPQAYVYPARMRATRDLLRRRQYLVKRKSDFLSHIQNTNHQYNMPPISKKITYGANRKDLPEHFEIPLVQISVQTDVEIVNVLAKQITRLEYIVLKSARYHDPVAFILLKTIPGSGKILGLTILYEIHDIKRFPKVQNFVSYCRLIRCPRESSGKSMGSKNSKIGNAHLKWAFSEVAVLFIKGNDFSKKYHRNLVNHYGRAKAMSIIAH

SEQ ID NO: 506285 - protein, 412 aa, unidentified
MEVLHPLCCGLDVHKDTVVACVRRTAGGVVDEQVRTFATTTVGLLQLGDWLVERGVGIAAMESTGVYWKPVWNLLEGRLQLMLVNARDIKQAPGRKTDVKDSQWIAQLLACGLLKASFVPPPPQRELRDLTRTRASVLQDKSRVANRLQKILEDANVKLGSVASDVLGVSGRKMVRALIAGEADAAEVAELARGRLRKKIPALTEALRGNVSAHHRFMLKLHMGQIEQMEGQVAELDERIDQVMGPLARAGVELLDEVPGIDRRAAQNILAEIGWDMSRFATEGHLAAWAGLCPGNNRSAGKRGSGRMTEGNRWLKATLNQCAWAASRKKDSYFAAQHRRIAYRRGLKRATMAVAHSLLGVCWQLLKNGECYRDLGRDYFDHIDEERTRRQLVKRLEKLGYHVTVERTNQAA

SEQ ID NO: 506286 - protein, 343 aa, unidentified
MTKLNVIGVDLAKNVIQVSVLSPSNQELRNSALTRRKFAEFLGRQRPSLVAFEACATSHYWARVAQRQGHEVKILPAKAVFPFRQGHKTDENDALAVAEAARRPNVKLAPLKTVEQQGMQAIQRSRELLVHERVSLANHLRGLLMEFGMVIPQGFASLYRLLPEILEDGENELPDLYRPTLNLLYGRLCDLREDLERLNREIEVLVQANPVCRRLTALEGVGPIGSILLYATLGTGEAFTNGRQFSAYLGLTPKQFSSGGKVNLVGISKRVANRRLRAVLITGARAYVYHMKEPKTAKDRWLWAIVERSGKCKAAVALANKNVRTAWAMLTQNTEYQHYPIAA

SEQ ID NO: 506287 - protein, 354 aa, unidentified
MTASYDYHIGVDYHKSYSHLVVQDSSGKTLRSGRVKNDRQSLGGFLERYRENSHAVIEATRNWMVMYDWLDDICDDVVLAHPLKVKAIADAKIKTDKIDATVLAHLLRADLVPEAWAPSEKSRELRVALRERMFYVRLRTMTKNRIVTVFDRYPEQTAQLKKLGDLFGKAGRIQLAEVNVSDIDRIQIDRGLAFIGDINERIKQSETTIRAMTKANANVKLLKTIPGIGEFFARLIDAEIDDVSRFRNVKKFAAYAGLVPSTYSSGGKTYHGKIIKQGNKWLRWAFVEAVAPAIASDAQLRAQYEQLKIRGTNKARVAIARKLLTIAFQILRDQRAYEPRGTTTEGASTISRLS

SEQ ID NO: 506288 - protein, 332 aa, unidentified
MENVEETIGIDVSKKTLDVHLHQKQHHKQFSNDETGYKKILQWIKSHKVAITSAVICFEHTGWYCLHLSYYLHQQQVRYCCVNPMEIKRSIGLKRGKIDKADAKEIARYAWLHREELIASVPPPEKLIELQRMMSLREQIAKQLRALKCLEKGMQVLTVNKQTEDVSQAMIADTIYHLEQQMKKLESAMVSLIKTDSQMLKHYKLSRSVKGVGLVLAVQMLVHTHNYTRFASWRQFSCYCGLVPFPHQSGTSINGRMKIHPISDRKMKSLLSMSAISAIQHDKELKRYYEKRVEEGKPKMVVLNIIRNKLVSRVFATINRGTPYVELSQFAA

SEQ ID NO: 506289 - protein, 340 aa, unidentified
MARYLGIDLHRNNFTVCTIAENGRRYFREYEIRSLRKFAGQLRPTDEVAVEVSTTTRLFHEAVAPHVARVVVVNSSQFDVIRKSVKKTDRNDAEALALFLSKGMLPEVRMKDKLHAELASLTQTRDTLVKQRTALKNKINNIMAARGLSPRREQLSSEKGLRMVEALPLGPIVMTEVQALVAQIRSFNRTISELEKTIKTEGEKLPGHKNLKSIKGIGDTSATILLSIIGDIDDFESEGKLASYFGIVPRVRNSNETERTGRITKRGTKLGRTTLVQCSLIAMRYSRYLQRFFHRIAARRGKGKAIIALAKKFLGVIFKTLKNDWVFEDFPNFVIAGESP

SEQ ID NO: 506290 - protein, 410 aa, unidentified
MHGIIAASNHSTEFDRIVALDLGKFNSVACVYDHATQGHVFKTISSSPQTVHDLLAEHAGGEDASRVLVIFETCDAAGWVHDVAAALGLAIAVANPSDEAWRWRKVKRKTDRDDALKLVRLALFGQLRTVHMPSPQQRQRRRLIHHRKSLVERQTQSKNAIRSIFSQQGLSHELPRGHQLWSKAGVEQLLSTHARPLAECEVDDLWRGRLHVELQLLEALSTQIALVDKKLEELGRSDDRVRLLRTVPGVGPRLAEAVVAHLDDPHRFRTARQVSAYAGLVPKQLESGTMKRVGRITHQGPSLLRGLLVEVAWMAYRYNAWAKGVVEHVSRGVKQRKKIAVVALARRLLVRLWAMLRDNTPWREPTTTTTTTTTTTTRANRGGGRGVSPPEDTGPLTPLSSVVAAATAMG

SEQ ID NO: 506291 - protein, 370 aa, unidentified
MNTAKYVGLDVHKDTTVVAVAEGDRSGEVRLFGTISSDLRALEKLLKRLGGEGIKLLVVYEAGPTGFVIYRRLLQLGIDCTVVAPSRIPQPNAARQKNDRRDAVMLARLHRAGELTAINVPDASDEAIRDLTRARADAVHDLTRAKQRLKSFMLRQGFHYPGKANWSEEHQRYLRALKFPIPSVRCVLEEYLLAIDQAVQRVQRIDELMEVHVPQWRMYPAVEALMCMRGFRLTAASTLVAELGDIRRFSHPRHVMAFLGLVPKQNSTGETRRMGSITKAGNTHARWILVEVVQHALMTPKISRPLSLRQEGQPEAYRTLAWKAQVRLHHRGWHLMRRGVMKAKVNIALAREMVGFVWDILQHVPAPQPK

SEQ ID NO: 506292 - protein, 426 aa, unidentified
MNTQNTDSIPIPEFAAYVGLDWGDQKHAWAGTAATVKTAPQTGTLVNSPEVLHAWLQELGQRFAGRPVALAVETSRGPLIHLFGAYPWLTVYPIHPATSARYRAAFKPSGAKDDLPDALLLLELVRDLRHKLRPLQLPDAATRQLAALVELRRDLVDRRTQALLQLLALLKSYFPQAVELVGQDLTSGLALAFLRRWPDPLALQAARPGTLQSFYYQHSVRSEALVTQRLARVQQLRPLTTDEAVLMPARLHLAALLEQLRTLAKHIALVEQKSHTLFREHSEAYLFRELPGAGQALQPRLLVAFGEDRSLYPEPGSLQKYGGLAPVVERSGRQAWVHWRWHAPRFLRQTFIEWAGQTVVYSAWAKAYYQHMKAKGKTHHVILRALAFKWIRILWKCWQTRTPYDEARYLKQLLARRSPHAAKLNP

SEQ ID NO: 506293 - protein, 341 aa, unidentified
MKQEMNVLGIDIAKRVFHAVGMDERGNVVVRKRLSRHDLMPFMAKLPPVLIGMEACGGAHYWARRFRAHGHAVKLMAPQFVKPYVKSNKNDMRDAEGIAEAVTRPTMRFVPIKDIDQQDLQALHRIRDRLMSARTALVHDVHGLLHEYGIVIPKGVAKFRQAVVGKLESEKDKLTSLSQELFGKLIDEFAALEKQLAYYQEKLEALATTHPECQRLMTIPGIGPLTATALVAAVSDANAFKNGRQFAAWLGLVPRQHSTGGKERLLGISKRGDSYLRKLLVHGARTTIRWVGRKTDRRSQWIRQLVERRGKNRTAVAVANKNARIVWALLTGHQDYQPATS

SEQ ID NO: 506294 - protein, 339 aa, unidentified
MNKITLIGIDTAKQVFHLVGVDARGHYGLRRKVSRSRLLSTLVQLEPCEVVLEACAASHHWGRCIEEFGHRVRLIAPQHVKAYRRGQKNDYRDAEAIVSAALSPGMQFVGIKTVAQQAEQALHRVRSRLQSHRNAAANGLRGLLGEYGAVFARGLKPLRQGARGFAETEQAVALGLVEPIHDMLDEIALLEQRMDDYERRIEARVKSDAISTRLRQELRGVGPLSASALRVKVADARDFCNGRNFAAYLGMAPSHRGTGGKVTIGKIKRGHDRYLRQLMIHGARAALRHLGDQQDSQSRWMRALLQRRGFNIAAVALAHKNARQAWAILAHEQEAAAVN

SEQ ID NO: 506295 - protein, 428 aa, unidentified
MDELNRNRLEEFRQLRREVRHSEKYLIVGIDIAKDQHHAFFGTATGKTVLRRLVFSNDYEGFRKLLDQAEALRVRHGLTKVVYGVEPTANYHKPLGEYLIHLGRTVVLVSGVTVKQNRESLDGRWDKHDVKDSANVADLISQGKCLYYEYPPAGIRGLRGLLSLKKRLKKQEHGTRVRIRNHLIAQYFPEMDRDYERLGAEGLSIMKWCFPPSHMTELDVGPFIQRVTPRRIRMEKRQRLEGVWEKAGETIGCDGVPGVEHEARVMVEGLKQIREMIKETEDKIEEICEEFPEYPCLLTIPGFGPDVSSKVLGAIGDPDRFENGKQVLKLAGLDLSADRSGKGSDKAIPQISKRGKADLRYALYQAALIASTRDHGFVRYFTDKLRGREREKGIQTKMWVKLSAKMLLIAWTLMKKKEVFDPAYLSAE

SEQ ID NO: 506296 - protein, 402 aa, unidentified
MTVTLHLASRVIGGADTHADTIHVAAIDEVGRDLGDREFPTTPAGYRDALVFLTAFGEVSCLGIEGTSSFGTGLTRTAKAAGIAVREVIRPERSVRRLQGKSDPIDAYQAARAVLSGRAQSAPKGQDIDALRSLLNTRRSAVKARTAAMNQIHAMLITAPVELREKYRHLKEKPLVSALATCRPGTKAGLVRSVLTALKMLAQRHQFLTTQADALEDQLRDLVAASNLALLAAKGVGPITAAQLLVTAGGNPDRLHTEASFAALCGTAPVPASSGKTTRHRLSRGGDRHANSALHTIAVVRMSSDPRTRKFVSEHRAKGRDNKELLRILKRAIVRDVYKHLCRPNSVATIDDLRRTRQAKNIPLSKASAALGTCAIHVSRIERGIVHDRDFADRYRAWLTAA

SEQ ID NO: 506297 - protein, 388 aa, unidentified
MQFAADRLEAPTAIRTDLGAIFISLELSRSSWVSTSLSPGGGEKMSKHTVRGGDVAGLLKRFAQLREKALGRTGKVFPLIVIQEAGLDGFWIDRVLQNEGIESHVVDPASVATSRRRRRAKTDGIDGEALVRALLAYKRGEPRVCSMVRLPTPEDEDRRRLCRERKVLTMERVQHVNRIKGLLFSQGVSGYEPLRRDRRERLDALQTGDGRPLPPHLKAQVRRELDRLELLLAQIKAVEAERDVLLAAEQTKAPVAPAMLLGVKGIGPEFAAVLWSEGLSRPFENRRQVAAYAGLAPTPWQSGSVDREQGISQSGNPRLRTTMIQLAWLWLRHQPDSALALWFHDRVKRNGGRLRKTTIVALARKLLVALWKYVTAGVVIEGAVTKTA

SEQ ID NO: 506298 - protein, 317 aa, unidentified
MKRSEISMKSAGIDVSKATLDVALAETDERLKTANRAEAFAALAEWLQGHGVRRVGLEASGGYERAVAEHLRGSGFEVVVHQPAEVRAFARFKRIKAKNDRIDAEVIALATAQVEGVKAANDPRLVELAEWMTAYEQAADRVAQMKTCLEHVTLAELKAGELEQIKQAQLWKAKLLRAILKRIKACPDVARRYGLLQSLPGCGPVVAASLVVRMPELGALQHGRAASLIGVAPFDRDTGQSSGKRYISGGRGRPRRMLYIAALAASRFDPGLRAFAQRLRAAGKPPKVTLAAVMRKLIEAANLVLARGTPWVPNPAN

SEQ ID NO: 506299 - protein, 344 aa, unidentified
MNYHTALDVSLRSVSICIVDDEGPIQFEAKVPAEVEEIVACLRRFSAEINSVGFEAGALTQYLTYGLQAAGYEVICLEARQVSAALAAMRNKTDKNDARGIAQILRTGWYSRVHVKSMESHLIRALLSSRKTILKKCVDIENEIRGLIRLLGIRLPGTLKHGAYDAVLRQAIEADASMVNSLIPLLDARLMLYQTYLKLDNQVKALVREDPICQRLMTVPGVGVITALTFKAAVDDPRRFKRSRTVAAHFGLTPRRFQSGEFDNPGRISKAGDPDVRCALYVAAHSLVVRSDQWCSLKVWGIKLMKTKGHRRAMVAVARKLAVILHQMWLNGTDFRYGSSEATT

SEQ ID NO: 506300 - protein, 349 aa, unidentified
MLADEVDYVVGVDTHRDQHVLAVVVASSGGVVGQRSVRSNARGYAEAMRFAGDHAPGARVWAVEGAGHYGAGFARYLSSRGEMVHEVSSTARGERRLQGKDDLLDATRVARSALARTARALPRSGDRQEALRLLLLARRSAVDVRRIAIVQLRSVIVTAPESLRDELRKLPLGELLRRCSRFRRSSSRTPDQLATILVLRSLAQRIQAATHEASELEREILTHVRALVPELLDEPGVGPIVAAQLIVTWSHRGRVTSEAAFARLAGVAPLPASSGLTTRHRLSRGGDRQLNRALHTVILHRRQHDPATKDYIARRITEGKSTRDAVRLLKRYLARHLYRVMQNASPTMT

SEQ ID NO: 506301 - protein, 434 aa, unidentified
MSQQNISTPSAPPVYAAFVGLDWGDEKHALSLCAADATVIERTTLPQTPEALADWANVLRSRFPSGKIALCLEQARGALLAGLMQYEHIVPYPVNPKTLARFREALYPSRSKDDPIDADLLLDLLLKHREHLRAWQPDTVQTRQLALLNEQRRHFVDHRTALTNELLSHLKAIFPQALELVGQSLASRLATDFLKKWPTLQAVQKVKPAVLRQFYYGHNSRSEELITGRLQRVKNAVALTSDPALLAVHSLAIQTLAGQLQALRPFLDQHEQQIAELFAAHPDAALFDSLPGAGSALAPRLLAALGSDRSRFPDALSIQCYSGIAPVTERSGKTQYWVHLRWSCPKFMRQSWHEFANCSLKFSTWARACYQDLNKRMDHHEAIRKLAYKWQRIVWRMWQERQPYDETRYLRSLQKRGLKIYADLAPQPVALAGE

SEQ ID NO: 506302 - protein, 328 aa, unidentified
MKNYQEVIGIDVSKNKLDAFAYNRRLHREFSNDVLGYKSLLKWAKSNELKVFFCFENTGHYSLKLALYLSSKNAVYVQENPVVIKRSSGVIREKNDVVDAMMIARYGWLHREELSASELKDKELLEVGRLLALRDQLVRSRTGLKSTLSELKKLLNSSSTDTCCKTLVSSIAHLTSQINKIEKQLKSVIKDSEALSQNYRLITSLKGVGLVVGAQILYHTNNFKRFDSWRQFSSYCGTAPFGHSSGTSIHKRRKCHPMGDRQMKSLLSMAACTAIQHDSELRRYYKKKLEEGKLKMIALNNVRNKLLSRVFAVVKRGTPYVELHKFAA

SEQ ID NO: 506303 - protein, 436 aa, unidentified
MKIIYPRVCGIDVHKKFIVAVICISESVEPVYLKKRFSTFHNDLIRFREWLIQNDCQNVCMESTGKYYIPVYNVLESHISNIVVANPKWVCAVKGEKDDDKDAKWIADLFKFGIVRSSFIPQKDFRILRELTRYKYKLVNMRSSEKNRYQNALTSGNCKLDMVFTDVFGKSASNIIDLILSDNPYTDEDILSKVHKNCKASPDMILNSINGTDLTPVQKSRIELVNDHIKQLSSNIQRLDKLIDLMIEPYEDYISFLCQIPGVSRNSAIIILSEIGVDMNQFTSSRRITSWAGLTPSSNQSAGKKKSVRISRAGVYLKPCLVEVAHAAVKDKNHSYYANKFNKISKRRGKKRAYIAIARKILVAAYHMLLTGEIWNPADLAEVETPVEQRIKYVKNNLKSDIKQLLDIGLTVEELTLMIQQNANTCLLYTSDAADD

SEQ ID NO: 506304 - protein, 344 aa, unidentified
MKTNYIGADVDCMMTELAVERNGVIVARDRVPTDIRSLSGFLSSITGKKIMVIEEGTMAGWLYRNLKSKVDEFIVCDPRRNKLISCDGDKDDTIDAGALAMLLRGGYLRKVYHTDDDDRLALKEVVALYHDRVRESVRQMNKLRDCCRSHGIKIPAGTIKHLPVRAQWLKQLGPPVLARQLSIRWIGFDAVATQVKMARQEMTRRSKSYPIIGFWKDLPGVGPIRAITLFAYLDTPWRFGGPKKLWKYCGIGLKRFASGSDKEGRPKTGKLRLFRGVNRRLKDAIMGAALSAICQSSNPFADHYERMVRNGVTPSNARHTVARKMLSVIWGMWKTNCRYDENLV

SEQ ID NO: 506305 - protein, 397 aa, unidentified
MYIVGIDIAKRKHEAAVIDGEGAVIIKPFSFTNNCSGYNRLLAMLTKAKLPLDEVSFAMEATGHYWLALFTRLQKEGFRVQVINPVQTNSIRSFYIRQAKTDPRDALLIAEVIRFGHFSESTLHPENIYELRELCRGRHAIVSMQADVKRKVVALLDQVFPEYETAFTNLFGDTSMAILQTCPTPKELSEMPLEELCHLIEVSSHKRFRMAKAQELQELARNSFGFAMAGDVFSTMIRLYAKHLDFLKQQVREMDRKIAEIMETLDTPITTITGIGLTLGAYILSEIGDISRFSSAAKLAAYAGIDPTMRQSGEYNGVRNRMSKRGSPYLRHAIWLAASSAVLHDPALKLYFQKKRDEGKPYMASVGHACRKMVSIIYAVMRDNKAYTPYIPNEISA

SEQ ID NO: 506306 - protein, 337 aa, unidentified
MKVTLIGIDLAKSIFQVCGVNQAGKCVFNRQLRRAKLMKFLLQYPDATIAMEACSGSNYWGRELQQSGFKVKLIPPQHVKPFVKGNKNDRNDAFAITEAARRPNLRCVEPRTLAQTDMIQVHRVLDRMVRQRTALINQIRGFLNEYGIVVSRGKERLLVAIPDLLEDAENGLTPSSRALYQAMYDDWRQVNESIKRVEKAIKAQAHADEAARRLMKMKGVAERIATATIAHAGNGHGYQNGRHFSANLGLVPREHSSGGKQKLGGITKRGNGYLRRMLIQGAWSVVNNAEKSDDRMSRWAKQLIERRGKHKAVVAVANKMARIMWSMLYHQTEFRAN

SEQ ID NO: 506307 - protein, 408 aa, unidentified
MERYYLGVDWADKFHQVWVSDAQGQKVAENKVVENKEGLGEFSRWLNESRARGIELWAAIEKPQGRIVDFLLDHGVVVYPVNPKALDRARDRFRMSQSKSDSFDAHVLAEFLRTDHGHLRALEPNSDDAQELKLLTRDQHRLGRQKTRLLNQIRVTLKEYYPRPLEVFSDLEAQIARDFLKQYPTPRALSDLTQRKWNRFAKREHHLGEGRCKELWEKLNQPQLQVPDHVVRAKAQLLLVLLAQLEASSDAVQTYNERVKHFFASMPAAKLVKTLPGAKTGTIVAMLWAELGDSNNRWESFHHLQAEAGVVPVTKASGKSHVVHFRFSCNKVMRHASYWLAFVSLNQSEWANHYYRDQRAKGHNHHQALRALGAKWLKIIFVMWRDHKPYDENYHLANITRQKMRQAA

SEQ ID NO: 506308 - protein, 391 aa, unidentified
MEVVAESVVGIDVHQKQITVSILVGLANAKPKKISKRFETITCRLKDCGEWLKQRHVEQVLMESTGQYWRPVWQILEPFGFKMILCNPRIVKNIPGKKTDQKDSEWLSELARYGLVSASFVPPKSIQALRESTRLRKKITQSMTATKNEVHNLLQRSNIKLTTYISDIFNGTGLKLLKLLIDGEVITLQAITKCRHTRIKASVEQLFAAMDGILPRNDRRLLGLNMELLADFRRVLAELDAQIDEQIMEFNDLYLRLQDIPGISQRIAQIIIAEVGSDVSPFPDAHHLASWAGLCPGNYESAGIKHGAHILHGNVYLKSAMVSAALAAKQSKETGLKDYFWRLHGRMTAQKALVALAHKLLRIIYVMIDEGTTYVDYKKDQRKAITLIPQT

SEQ ID NO: 506309 - protein, 366 aa, unidentified
MRKISTVGLDGIEIFKDQKLTIGLDLGDRWSHYCVLNEAGEAILEGKLPTTPKGMEDVFSKIPRSRVALETGTHSPWISRQLTRLAHEVIVAHARNVRLIGDSSRKDDSFDARTLARLARIDPGLLGPVRHRSAKAQIHLTVIRARAVLVSARTALVNAARGLTKSYGERLQKCGTQQMNRETAKGLSQELREALNPLLQEIESLNERIAEYDRRIEQIAKEVYPQVALLKQVKGVGTLIALTYVLTLDDPHRFRRSRDAGCFVGLRPGRRNSGMSQPQLHISKEGDRYLRTMLVQGAHYILGPFGEDSDLRRWGMRLAERGGKNAKKRAVVAVARKLAVLLHKLWVNGEVYEPLRNNHKVVGRVA

SEQ ID NO: 506310 - protein, 412 aa, unidentified
MKVVHEICGGIDVHAKMLVACLILANGEKEIRTFSTMTDDLLHLRDWLVAAGCTHVAIESTGVYWKPVFNILEDALTVILINPEHAHALRGRKTDVKDAEWLADLLRHGLLKASFIPPPEIRELRELTRYRESLVRERSAVANRVQKVIESGNIKLGQVASDALGASGRAMLRALAHGETDPDKLASLAQRQLKEKVPQLRRALQGRLTVNQRFVLGELLQRWEELERADRRVTSEIDKYLQARPKLARAREIVDSIPGIGPRVAEVVVAEIGVEMEAVFESDAHLASWAGICPGNKATGGKRLSGRTRKGNTYLRSALVQAAWGATMKKNCYLSSQYFRLVKRLGRKKALVAVAHSLLVIIYHVLQSDQTYTELGGDYFDRHHAEQQRDYYLRRLQMLGLKVTVEELSTAA

SEQ ID NO: 506311 - protein, 428 aa, unidentified
MNETELNRVKEFRQLKKQIQGSETYLIVGIDVAKERHHAFLGTVTGKTLVKKLIFENSASGFSELLARVEAVRAQNGLSEVVFGLEPTSNYHKPLGRYLISKGYHVVLVGGKAVKNNRELLDERWDKHDTKDAANIADLVSRGKCFYYDLPSREIEELRELHSLRARLKKEEHSLNLRIRNNLLAKHFPELDSFYTACERETLAIVRWCLNPQQIAGMPFDEFFKRVAPNARGIAQKLRLQKIHRLAHESIGCPVGGAVQFQAGLLVEKIKQVREQILEVEQGIQQLCVQFPSYEYLLSIPGFGPYVASKVLATIADPRRFDSAKQVIRTSGYDLCAERSGKRSDQAVPVISKKGNSQLRYALYQAAMIASSRHRFFMAYFARMLQGREREQGIRTKMRVKLAAKMLVIAWTLMKKGEPFNPEYLNVQ

SEQ ID NO: 506312 - protein, 439 aa, unidentified
MKTSTTSVNPGMAREHLVAWIGLDWADNQHQISIHDIASGQVESYALKHSPETLQRWLDDLRKRYSGGKVGVVLEQSRGGVLYALMNCDFVVLYPVNPLALASYRKAFYTSGAKDDPRDATLLMEMVSKHPERFRAWEAEDPDTRSLRLVVEARRKLVNQLTRCTNQLTSHLKSYFPQAIEWAGDLDSRQACDFLEQWPTLEALQQARPSRLRKFYLNYGRPRVEIIEARLGQIKQALPLTQDPAAILAGSLMVRALAAQIRPLLATIEKFDDEIKRLFQKHPDRQLFESLPGAGTVLAPRLLAAVGADRERWTSAAEIQTFSGIAPVTKQSGKTRFVHRRLACSKFVRQTFHEFAGSSIVWCDWAKAYYDHLIAHGKGRHVALRALAYKWIRILFACWKNRTPYQEEIFLQALAQRGSPLSQLAQAAQRTKTAKKRVA

SEQ ID NO: 506313 - protein, 335 aa, unidentified
MLFIGLDAHQATSSFCILNEKGHRVKRQTVRGHWPKVMDELRKVDEPFEICFEASCAYGHLYDQLQTIARRVVVAHPGQLRLIFRSKRKSDRVDAEKLAKLLYVGEVPTAYVPSIDVRNWRRLIEYRRRLIDKQTRCKNAIRALLRSHGMRASRGLWTAKGRAWLAGIEWPNLAAQVQRDLLADELTLFQRQIKTVTKALDEMGSGHPAVVLLRTIPGVGARTAETIAAYVDDPSRFGRSGEVASYFGLVPCQDSSAGLNRLGHITKQGPPTARKYLTEATWQAVRHSPTVRAYFKRICDDKPDRKKIALIATAHYLLRCMWAMLRSGEAWHEAG

SEQ ID NO: 506314 - protein, 342 aa, unidentified
METVYVGLDMGSSSFQQVAIKPDGSIKVNRSFTTSEANLRSAFADQHGEIHVHLEAGELAPWAASIIAPLVTRVVCSHPKDNAWIAKDADKCDRVDAYKLAELLRLNRFKEVHYAPDQPRRNFKQLVQHYDELTGQQARMKTKIKARFRMQGVIVTGERLFSSKGRQEVLARVESPDLRTAIRQLYEVLDQSVAAQAQARLLMLRAAQAFPEIKLFRTAPGVGPIGACRFSAYIHTPSRFSSKRKLWKYCRLSVSHRSSNGKPLRRPRLDRSGCGRLKDVSRKAFDVSIRSRHDNGFKRTYQRVLETTHDKTHARLTVQRKIVSTLRAMWITRTPYCDELSR

SEQ ID NO: 506315 - protein, 322 aa, unidentified
MSGYLGIDVAKHELVVARDGVAGCTTYPNTTAGHAALCAALQAEAGARPVELIVLEATGGYERGVVAALGGAGLPVVVVNPRQVRDFAKATGQLAKTDALDAHVLAAFGARVQPALRPLPSELQEELRDFLARQHQVQQMLLAERTRLQQTLGHRARRPLRQRITRHITFLERELRLLDSDLDDRLRDCPLWRAQDDLLQSATGIGPQTARMLLGHLPELGRVSAAEISKLAGLAPLNRDSGTMRGQRHIRGGRARVRAVLYMATLSAVRHNPVVRAWYDRLLAAHKPKKVALVACMRKLLVVLNAMLKSGSRWQSPAPLRA

SEQ ID NO: 506316 - protein, 418 aa, unidentified
MDEIQSWFAGVDWASQKHDVWLTDASGKRLGKRTFAHSGEGLAQMCDWLIATSGGKPEDIHVAIEVPHGAVVETLLDRGFKVYSINPRQLDRFRDRFSPAGAKDDSRDAETLSSSLRTDRRAFHQVSLAGPAIIQLREWSRMADDLRADQIRHANRLREQLQRYYPQMLQFDSDLAEEWVLKLWEAAPTPAKAARLRQAEVEKLLKRHRIRRISAAEVLAILKEQALIVAPGVTEAAVAHIRVLIESIRLFTQQLKEAHRQLDKLCKLLAEPIARENEQTGPEPEQTLGAILQSLPGAGRIVISTLLAEAFETLQRADYPILRKLCGVAPVTRRSGKSRAVTRRLACNPRLRNAIHYLADAARRCDEKSKAKYLALKARGCSHARALRTIGDRLLYVACAMLKNRTLFNPGLESQKCA

SEQ ID NO: 506317 - protein, 417 aa, unidentified
MNNIIMIPNTLILGIDIAKENHYGQFVVNGEYIKKPFLIKNTKESFDCLLETIKELTNKYGTVHTLVGMEPTGHYWKNIAYYLKNRGINICLVNPYHVNKTKELEDNSPTKNDKKDAKIISKLIYQGQYLTCMFEKEIYINLRLCSNNRQELKRQLIAEKVRLIVLLDEYFPELTRLFSDILSKSSIAILKSCPFPKDILDIGIEKLTRILKDATKNRVGLKKSILVYEVAKKSIGVPVGLEGAKYRLELVLRKLEWLQKEIDAVEEMMKQYLDKTGYADFLLSIQGVGIVTAASFLAEVGDISKYDDYKQIQKVAGLNLKETSSGMKKGKTKISKRGRSNLRNILYQAAMVMVAKNQAFREIYEHLTKRQDNKLTGKQAIVALSVRLIKAMYTLCTKKLMYSHDKVHGLNNYQQVA

SEQ ID NO: 506318 - protein, 338 aa, unidentified
MKLYGAIDLHSNNNVTVLIDEQDKVVYEKRLANDLGLIAQQLAGYQSSLEGIVIESTYNWYWLVDGLMNKGHQIHLANTAAIQQYEGLKHTDDTSDARWLAHILRLGILPEGYIYPKEERAVRDLLRKRGQLVRQRTANLLSIQNLMTRNTGSSMNSNRIKTLQPQQVDELLAEGDRALAVKANVAMVQCANGQIEILERTVRDRVKLRPEFCFLKTVPGIGQTLALTIMLETGDIGRFAGVGNYASYCRCVGSQKLSNGKKKGQGNTKNGNKYLSWAFVEAAHFAIRFSSRIKSFYQRKKAKSHGVVAIKAVAHKLCRACYYIMKNRVAFDVTKAFA

SEQ ID NO: 506319 - protein, 399 aa, unidentified
MLAVGIDISKSKSVAAILNQDGSMHTSPFEFHHTQPELDAFIKYILNSNQSATILMENTGHYHYPVLKAFQEAGLPVCMVNAYQIKKFGDMDLRKAKTDKKDAVRIARYALEKSYSLVPYTSMEQKYEDLRFLARQYNQRMLTLKTNKVFLLNLLDETMPGITNILPLTSRTPETSLSVLFINRFKSYDRIKKMGKNRFLDAFEKIARKSRNRQTKTYGLAIYEAALRNITTRGENEYILAAQDQCLELVCESQKAADSIILKMQTLAETLPEYAVLRSMAGVGDRLGPLILAEIGDIRRFHSGKALNAYAGNDAPPYQSGTFESHNRHISKRGNAALRKYCFEVMQALKLTQPQDDPVYLFLLKKEQEGKPYNVAKMAGVNKFLRIYYARAMETLKQQ

SEQ ID NO: 506320 - protein, 347 aa, unidentified
MKRYVGIDVAQELCALCIVDDAGTILFEGTCATDPDEIVRTINAEASEVAKIVHESGPLSIWLTRELVKRGSPVACIDARAAHKVLSARMNKSDKSDAVGLAQLARTGWYGEVHVKSEASDQLRLILAARERLIRIRMDIEGQVRGLLKAYGIRLGPVNAGYSRQSFRDQLGAAIKGDQSLQMIFVSLVTVHETVCLETTAIDARVQRLAKDTPLARRLTSIPGVGPIVSLSFIATIDDVARFGKATDVGAYLGLTPRRYQSGETDWSGRISKRGDGGMRKLLYEAANILIQRVSRFSPLKAWAMRLVARRGMKKAIVATARKLAVIMTRIWRDGTTFAWTKEELPA

SEQ ID NO: 506321 - protein, 389 aa, unidentified
MTLYVGIDIAKYVHVASIYDPSSGELILDSLHFDNNLKGFKLLLSKLKSLHDSDVVIAFESTAHYHQNLFNFLSDQNYKCYLINPYLTSRFRSVSLRNAKNDNIDSRAIAYFISLKHKDLLEEEFQMNELKELCIHRDDLMKQSSALKTKLLTYLDRVFPELESIVDKPGIHSKALRAILKDYPTAKAISSTRVDHLIKLASDSSNNRYSSDKVRKIKEAAKSSVGFDSLALALKIRQTIQSLESLEKQIDEVELSISSLPSVMDSPLHKLKGINSIEIAYILSAIISITRFPSEKKLVAYAGLDPIIRQSGTWQASRTRMSKRGNKLLRYALIWTANNMCKHDSAFKDYYEKKRSEGKSHYNALGHCAAKLCRYIFFILNHPDLDFVM

SEQ ID NO: 506322 - protein, 486 aa, unidentified
MAKRKQSTFERLTNGKLNRKQRKELIRRIHADDPGLEIVHPHSAGIDIGNESHFVAVRPGSDAQPVREFGSWTEDLQKMADWLQACGVKQVVMQSTGVYWMAVYEVLQKRGFQVCLTNARDTKNLPGRKSDVQESEWLRKLHSYGLLRNSFRPPEEIRMIRTIWRLRDRHVAEAGRAIQHMQKALTTMNVQLANALSDVSGVTGQAIIGAILKGERDPYQLARMKDYRVKASEEEIARSLEGTWQEDMLFELQQAVDGYDFCHKQMDECDQRLQRYLKALPNRSIVAKPAAAAASGSGAEGGKKERKKRKPGKPRKNEPAFDLEAELARLCGVNLTTIDGVKLMTIMTFVSELGTDMSPWKTEDHLVSWLTLAPRRQISGGKVIKHEQNRSKNRVAGALRMAASTLKASDSYLGARFRHLRARLGPGKATKAMAAHLARLIYRMLTRGEEWVDRGAQEHERRRAEREKVSLQRKAAALGFRLEPAA

SEQ ID NO: 506323 - protein, 407 aa, unidentified
MRLFVGDDWSEDHHDVELMDATGRVLARKRLPEGVAGMARLHELIGQQLGEDAEDAEVVIGIETDHGPWAAALVAAGYVVFAVNPLQASRYRERHGVSGAKSDRGDAHMLTDMVRTDSHQLRAVAGDSPGAEAVKVVARAHKTLIWERTRQVQRLRHQLREYFPAALDAFADLDAPDALELLGKAPDPARAARLTRAQVSAALKRARRRDIPVKATAILAALRSAQLGQPPAVTAAYAVTARSLIAVTTTLNEQVKTLQGQVEADFGRHPDAEIYLSQPGLGTILGARVLGEFGDDPDRYATGKARKNYAATSPITRASGKKKIVMARFIRNDRLTDALMAQAFTALSTSPGARALYDAERASGTEHNPALRKVANRLVGILHGCLKTRTLYDEATAWPHHEIKLAA

SEQ ID NO: 506324 - protein, 331 aa, unidentified
MSVYAGLDIGAYSVDLVTRQADKPSKAKRYKQTSDGHNALIAQLKKSKPALIVMEATGIYYFDLAVTLAEAGLPVAVINPKSFRHFAELKLQTSKTDAIDSELLAEYGQRMAPAPWTPPDHHHQALRSLGRQINRLVGCRAQAKNRLHALKATRSTPGLLIEDEQDGIAMLERRIDRLRQAALDLLAEAPALQRRYQHLLAAKGIGEASALSILAELCVLPTSLKSGQISRHAGLDVRQHQSGTSVNRPARISKAGNVYLRSALYMPALSAVRYDPHAKAFYEALVARGKKKIQALVAVMRKYLTGLWACLKTDTPFDSARLFQTAGLQNA

SEQ ID NO: 506325 - protein, 404 aa, unidentified
MWDGSWERAPVRRVATTGFGFRELTSWLAELGVPPGLIRIGMEPTGGWYGRTVAAWLERHGYRVDWLQNFALHERRHLMIGKQTKTDALDARLIARLLFERERLGLKGGFLQRPPRNADAVRMLVRNRARLVEQRTRCRNQLTAIEDVLFPELKDFFRKSVTSSSARLLLESFPTPNHVAAADPADLHRVVVRQGHAGALAARLMDLQLAAADSAGLATDTDAIVQTQEWLLYQLRLIDSQIQQVDAAVESVLEEWPAQERAILASFPAMTATRQAVLLASIGDIACFRNDRQLRKLLGWYPEARESGSSLAKHRLGRSGNRMARRELWFWALELLAPSHPSTPFRDYYRRLRERGMAGQVAMGHLAGKLVSVLFHCLRAGSLYDPQRHARELGSVDACRRTEA

SEQ ID NO: 506326 - protein, 376 aa, unidentified
MSPARATIQEGPVMQNSITWVGMDVHAENIVLAALRDSSDAILFRAEFPNTPKGRERLAGRLAENAPARCVYEAGPCGYELRRFLEEKSIDCQVAAPALIPRKPGDRVKTDRKDAEKLARLHRLGELATVFVPTPAQEALRDLLRTREDAREDLLRRRHRLSKFLLRQGRRYTEGVRWTTRHWDWIRAQTFTDHNTETVFREYIVAIEQEVERIRRIEQQIIEESRSPEVGKAIARLRALRGVDTITAMTIITEVIDLNRFRSPRELMAFIGVVPRERSSGGRERRGSITKTGNAHIRRVLIESAWHYQRLPAGTPKSILVRREGQPPEVIETARKAELRLHRKFMKLLGRGKPKGIAAVAVARELAGFIWALGRE

SEQ ID NO: 506327 - protein, 430 aa, unidentified
MKSNTQNAKIEAITEKTLVLGIDVGSEMHYARAFDYRVIEYSKKPFKFSNTEAGFATFKEWVLDLKERHEKDKVVPGMEPTGHYWFNLGKFLQDNEMKPVLVNPHHVKKSKELDDNNPTKNDRKDPKVIAGLVREGRYMIPYLPDGIDADLRTASNIRFQLQAELTRIQNRISRWFNIYFPEYKTVYGKPDAKSGMLILKAAPLPEDILTLGIDGVNQIWRDAKLRAVGKARAKTLIEAAEHSVGSKEGAVSARMEIRMLLEDYESRNTRLQEVMVLIEELVRKIPMAEKLLEIKGVGIRTVSGFLAEVGDISRFNNPKELQKLAGLALVENSSGKHKGETTISRRGRKRLRYLLFEVAMSLVSKNQEFRELHNYYTTRRLNPLKKMQSLMAIAAKLIRVFYAMLTKGVDYDPKKMVSDIKRPAVYLQAA

SEQ ID NO: 506328 - protein, 339 aa, unidentified
MRLYSGMDLHSTNTYTAIMDENRKRVIDHRLPNQPKVILDFLEPYRADLEGIVIESTYNWYWLVDLLQENGYRVHLANPSAIQQYSGLKHVDDRHDAFWLADLLRLGLLREGYIYPKEVRPIRDLLRKRAHLGRLRTSLLLSAQNIVLRNQAIKVASKDIKKLTADLLTPHLQESEGLFLTGKISKELIDAFTRQIKAIETWVMKRLQPDKLFLNLLTIPGVGEILAMTILLETGCIARFPKVGNYVSYCRLVASQRISNDKVKGKGNDRNGNKYLAWAFSEAAEHARRHYPMCRSFYNRKLQQNNGKVAHCALARKLSRAAYYIQKDQVAFDETRLFC

SEQ ID NO: 506329 - protein, 427 aa, unidentified
MKYTQNEKILQVTDKTLVIGVDVASEVHYARAFDFRGIELGSVFRVPNDAEGFHNLTLWINELKVKHGKKNVMVGMEPTGHYWFNIGHYFRTHGIKVVLVNPFHVNRSKELDDNNPTKNDRKDPKTIAMLVKDGRYMIPYIPEGVYSELRIAMESRWHLVKQLNMIRNRVKRWLSIYFPEFNTVFKSWEGKCALIALREFPTPAQVLSKGTEAIAERWKKDKIRAVGLKKTMQLVAAAKSSVGVQEGLWAAENDLMMLLEDYEIKMKQLDRLMKMVESLVNQIPGIHEVLKIKGVGLVTVAGFMAEVGDISRFDHPKQIQKLAGLNLRENSSGKHKGKTTITKRGRKRLRALLFLAMMPLVAKNAEFRTLHQHYISRANNPLKRKQSLILLGCKLIRIIYALLKKQIAYDPEKMMNDIQRANASLAA

SEQ ID NO: 506330 - protein, 369 aa, unidentified
MEQVTKYIGLDVHKERTVVAIADGGLRGEVRDYGSIGTTRRSIEQLAAKLGGQGYRLSFCYEAGPCGYGIHRWLQELGQDCIVVAPSLIPRRPGERVQTDRRDARKLARLHRAGELTAVWVPDAAHEAMRDLVRARDAAGRSLRRARQQLSGFLLRHSRSYGGGKTWTGKHRRWLATLTFDHAAQQIVLEDYIDAIEAAERRRASLTAQIEALLPDWSLAPLVQAEQALRGVALLNAVSVVVEIGDPSRFTNPRQLMAHVGLVPSEASSGETVERGGITKAGSRLARRALIEAAWTYRWPARRTRELLARQEGVPQAVRDIAWKAQVRLSGRYRKLVAAGKPTTVAVTAVARELLGFIWAVARARQPAA

SEQ ID NO: 506331 - protein, 318 aa, unidentified
MDKEKVYVGIDIAKERIDVAVHSSEQRWSFSNDDVGITKAVSCISGVCPVLVVLEATENFQASLVAALVVAGITPAVVNPRQVRDFAKATGSLAKTDVIDAHVIVHFAAAIHPTPRSLPDTQAQELKDILARRRQVSEMLTAERNRFGSGHKTVRDRIQAHITWLQQELDEIDDTLRRVIRESPVWREKDDLLQSVPGVGPIVSATLLAQLPELGTLNRRQIAALVGVAPFNRDSCTLRGKRTIWGGRSRVRAALYMAVIVATRYNPIIRNFYERLCNASKAKKVALTACMRKLLTILNAMSKHRVPWNYKPPMAEVS

SEQ ID NO: 506332 - protein, 429 aa, unidentified
MKNSAANKLKQVPVGYLVIGIDPHKKKHAAVIMTQDFTTHSKFKFNNSKEGFEMALERTRMEVVRIGSRGAIFAIETGGHYWRNLAYFLDERGIPFRFINQFTLKRRREGKDLNRRKNDYRDSEVAAQLLCTGEFTDTKLPHGVYAELRAAHNAYRRLVKERTRIINLVKGLLDGLFPEFTQVLKDPCGLTALSVLSICPVPEGIAAMTEDEFVNTIRTGHRGLLMRKKLRALHYAAQTSIGVKADAQSVSYELSFLVEKLQLIKRHFCRIDETLVRLVNEAEEGKYLLSIIGLNYISVAGILAELGSFRSYKSAKQLIKMAGSNPTESESAGKRSSHTPMSKKGRPVLRYCAWIAVIPMLRFNPDFRAWAKKLRERPVHANPLSGREIVGAALNRLLRLAFVLVKNQTFYQVPEIESMPEPELLLVAS

SEQ ID NO: 506333 - protein, 429 aa, unidentified
MEEVDEVELVVQRVAALDLGKATLEACMRVPHPGKSGRRMQEIRGYATTTAALLEMAIWLRQWGIERVVMESTSDYWKGVYYLLEAEGFDCWLVNAREVKNVPGRVKTDRADAVWLAKVAERGMCRPSLVHPPPIRRLRDLTRYRRALVSDRSREMQRVEKLLEDAQIKISSVLSDIHGVSGRAMMEALIAGQRDPWSLARLAKGNARKKTDRLEEALRGFFTDHHATILQMMLDNIDRIGAQIAALDARIAEAIGPFSRQAAQLADIPGVDTVAAAELIAEIGVDMARFPTAAHLVSWAKFCPQTHQSAGKSRSKARGKGNPWLAGTLGRIVFSATRTDTFLGARYRRLARRRGKPKAIVAVGNSVLTVVYHLLSDANLSFCELGPAHYESRINKHRRARDLATQLQALTGQHIVIRDGKAIITDAAA

SEQ ID NO: 506334 - protein, 407 aa, unidentified
MDLLKTVFGIDVSSRKSNVCIMVNGQKVNDYAISNDMVGFNQLLGDLKQVTNPQIIFEATGVYSRRLQAFLDMHELRYVMMNPLEAKRKTKDDLHQNKTDKLDALYLAKLQSEHPQRLAYVQSEEYQELMANNRIYEQASHDLITNRNRLHKAIQLTFPEIEHLMVNPRGKNYWSIVLRFPHPDIVLETKEADIIDFLKGLTGIGKKRANDIAQSLIRLAKVACPAVKKNSAHIRGLKMAINNILSAEEECQTALQEMAKLAPKRDLEILTSIPGIGKNTTLRIISELGDIRRFNNPSQLNAFVGVDPQVYESGNLTAHLSISKLGTAIGRKVLYLAINQIQSAKKVGNPCHIADYYEKRKRSSETASHKKAAIASIHKLLRTIFALIKNDQLYSYDVAKHNQRLLS

SEQ ID NO: 506335 - protein, 355 aa, unidentified
MQISKENTQISLKEQEFLPEIVYDHYFAIDWSQETVAIAHMRSNSRRPNVIEMKSDIRNLIKYFKQFQGKKILTIEETTSTHWLFVKLRGEFRRILICDPYRNALLSEGPKTDSIDASKLCLLLRAGLLREVFHSLEHDYWIRKLVMSYISLVRNGTRVLNQKSAIYRALGLRYKKEEFISDNKMINFVYDHLEDSIAQYREHKQNYEKLFSQLCRTDPVIGYLSNISGIGVINAVKTYAIVLDATRFIDKYHFWSYCGLVRHDKQSGGRSYGKRSGRYNGILKSVFKSAAMAAIGGNNDIRNYYDTLLSQGLSPDKASHAVSRYIATSCYAVMKYKQPYKPYNWRQVIETSKLN

SEQ ID NO: 506336 - protein, 365 aa, unidentified
MSGASTSRRRPSNDKTRASHSNTNDKGGPTVERQYVGIDLHRRRSVIVRRTPAGETLETVRIANDPVALALELAKAGPDPEVVLEATYGWYWASDVLQANGANVHLAHPLGNNWGHRRVKNDERDATDLVDLLRMGRLAEAWIAPPELRELRELVRYRAKLVALRSGLKAQVHAVLAKEGVAVPMTDLFGVAGRALLDTCELGRAYTTRVESLRDLIELFDREVGMLEGLVNRQLANHAGYRAVQTICGVGPVLGAIFVAEIGDVHRFPAAPQLCSWAGLTPSHRESDTTVRRGHITKQGSRLVRWAAVEAVQRQRGGSFLQAHHHRVADRRGKGIGKVATARKLLTLVYYGLRDGEIRCLAKAG

SEQ ID NO: 506337 - protein, 315 aa, unidentified
MRNCIGIDVSKGSFDVFVLEKNKALVMTNDSEGICKCVELCQQIQPELIVMEATGGYETLLASTLQAKGFPVAVVNPRRIRDFAKAVGQMAKTDKLDAQIIARFAATLEPMPHELIDSNSRKLKALMSRRKQLVEMHTAECNRKEHAIDIEVTRSIEAIVNAIESQLSNVEKELDSWIQQMPELKQKAEYLQSIPGIGKTTAHMLVIELPELGVFNRRQIAALVGVAPINRDSGVFRGKRMTGGGRRHVRARLFMPTLVATQFNPVLRKYYRTLVDAQGKCKMVALTASMRKLLCIMNAMLKNEQYWQPNLIENA

SEQ ID NO: 506338 - protein, 343 aa, unidentified
MNEITTIGIDLAKSVFQVHGVDGSGATVIRRQLRRRQVLAFFRKQPPCLVGMEACATAHHWSREIAALGHQVRLMPPRYVKPYVKRNKNDAADAEAICEAVTRPTMRFVAVKSAERQSVLMVHRTRELLVRQRTMLVNALRAHMAEFGVVARVGLPQVKKLLAVIADGDDDRIPALARTCLEGLARQLLSLEREINGAEKRIHAWHRANGDSRRLETTPGIGPITASALASSITDPHIFKSGREMAAWIGLVPRQYSTGGKQRMGRISKQGDQYLRWLLVAGAMTVIRHAKRRGTTDPWLARIIADKPTMVAAVALANKNARIAWVLLRHGGTYRKAVSTQAA

SEQ ID NO: 506339 - protein, 409 aa, unidentified
MDILITRCAGLDVHQATVVATVRVPDDQGGRRVVTDTFGTMTADLLALRDWLHAYGVTHVALESTGVYWKPVYYMLEDAFTLLLINMQELKRVPGRKTDVKDSEWLAQLLECGLLRPSFVPPPPIRELRDLTRYRVQQVRDRSQEVNRLCKVLEDAGLKLTTVITDVMGKSGRAMLQALVDGTTDPAVLAELARGKLRKKLPELRRALQGRFRPHHAFLIEQIFAKIDFLDEALERLTTAIDQRLVPFEPMLTALDTIPGVDRIGAISIVAETGGDMTRFLTAGHLCSWGAMCPGQNESAGKRRSGKTRKGNRYLRGTLIQAGLGAMRKNGSALQARYHRVARHRGHKKAVVAVGHQILEIAFYIMRDGVTYDELGADYFNRRHAEKAVRRHVRQLEALGFHVTIEKAA

SEQ ID NO: 506340 - protein, 333 aa, unidentified
MDTHLDVHVAAALDPVGGVLGVESFAASRSGYAALLEWLSSFGTIAKVGVEGTGAYGAGLYRFLVDAGIEVVEVDRPNRQVRRRLGKSDPADAVEAARGVLSGRSTGRPKSRDGKVEAIRVLLVAKRSARQGRLRAIHQMRQLSYTAPEELRARFKGLSTTDLVVEAAALRPRAGGDTVIHATKVALASLGRRCLELGEEIDHIDSLLAGLVEEAAPELLGVYGVGVDTAATLLVTAGDNPERLHSEAAFARLCGVAPIEASSGKVTRYRLNRGGDREANAALWRIVMTRLSFDPRTRDYMERRTKEGRSKREVIRILKRYVAREVFRHLPRP

SEQ ID NO: 506341 - protein, 391 aa, unidentified
MPRNGQVTQIGLDCHRRFSNATGRDAAGKIVWRERLDHGNRNTLREALEEWPKGAPVILEGTFGWGWLSDELIAAGLDPHLASSKKVAAWRDARGLAKSNRVDADLLSELWTQQPRWWEVWLAPQEVRDQREWLRYRMALVGMQTGLKNRIHAILHRHGIVNDCPDLFGAQGRRCLQALLTPESLLRDSARAVLKSYLQVLDYVRRQITGATKTIRRFVHRTPAAQRLRTLPGVNYILAYTILAEIGRIERFRGARQLASYSLLAPLADDSGEDDGAAPRGRHVGHCGRRTLKWAFLEASHSAIRGDPRMRAIFDQRTNGGKRERNRGHITVAHELCRVAYVVLKKEVEYTLEPPARPGKKRRRKPSRPGTGQPDVAMVAASTRSKLQTSL

SEQ ID NO: 506342 - protein, 408 aa, unidentified
MRLFVGDDRAEDHHDVEVMDEAGKVLARERLPEGAAGMAQLHGLAGGFLGEDADAAEVIVGIETGRGPWVAALAAAGYLVLAVNPLQAARFRDRHGVSGAKSDSGDAHALADMVRTGSHQLRPAAGDSPEAEGIKVLARTRKTMTRERTREVQRLRHQLREYFPAALEAFAGLDAPEALELLGKAPGPARAARLTRAQVPAALKRAGRRSVTERATAILAALRSGQLARPPAPAAAYAAAVRALTAVITALNEQVKVLEQQVRDHFGRHPDAEIILSQPGTGPVPGARVLAESGDDPRRYADGKARRDYAATSPVTRAPGKRKVVAARFVRNDRPVDALNAQAFSALTASPGARAYCDQQRANGHGHNDALRRLANRLVGILHGCLKTRTLYDEDTAWGHRQQTQQAA

SEQ ID NO: 506343 - protein, 354 aa, unidentified
MNTTQNSTKSKIVKVIGVDLAKDHCDVIGYDENGKICLRLDGCSYAKLREILANLPQAVVLMEACKGSMFHARSIADLGHEVRLVKGADVKALRNVNHKNDLRDAAYIAKLYFVPGTTYVYIKSQQQQSLQFLQNEYKSLQELRIQVGNQIHAGLEEFGCPVRKSSKFIKTRMVAHLEKHAELIPEDVMASFKRRREIWLNLLQQEEEAQRRMEQVAATDANAKRIMTVPCVGPQTAVGLLVHIGVDIGRFKNSRQFAASLGLVPKQNSTGGNSRLNHITKCGPKRLRSNLVQCAQLVLMHADKWKGNFGDWVRKMRDSGKKHGVIVCAIAAKLARIIYRLMKDKVDYTPVLSC

SEQ ID NO: 506344 - protein, 391 aa, unidentified
MSMYFIGIDISKYKHDCCIISAADQKVVSKVTIKNNKAGFNELLTIIHSLANPADIRIGFESTAHYALNLELFLENSLLTFMEVNPVLISEYKKSKTLRRTKTDSVDCESIARWLMTVEYKPHSKGFYHAYSLKSLTRLRDKLIRQRSFYLIKITNVLDHTFPEFKPFFNERLSKTALYLLENYGSAEKMARMNSASYEKLRSVSRGKFSPQQFLRLKELAVNTVGVNNSIFDVELNSLLSLYKSLVKEINTIEKEINKLIEEVHPHYMSVPGIGPLSAAVIYSEYGDISNFTNPGQMLAFAGIEPGINESGTESHGGKMVKRGSSQLRYTLINCCLPLIRFDMTFATYYAKKRGEGKPHRVAITHVAKKLIRVIYALERQDIDFNAQKLR

SEQ ID NO: 506345 - protein, 320 aa, unidentified
MAQQGRIVGIDVAKLKADACIRSLQLRLSQPSTAQGQQDMITWLRRNEVGLAVMEASGGYERVWAEALRAAAIAVRIVDPKRVRYFAKSAGRLAKNDPIDAEMIAWFAETFAAAAEPAHDADRDALNRLVTARRLLVRLATPIRQLGEHGQPRVVENAQRAILKTIKAQLAKLEAAIEAKIAANAQFVARRAIIASVPGFGDHFVAGALAWLPELGRISNKAAAGLVGVAPYDDDSGQHRGERHIKGGRRDIRTLLYMAALGAATRHNPVVMAYYKRLRAKGKKTKVALVACMRKLVVILNTMLARGEMWNPTPRTTAVA

SEQ ID NO: 506346 - protein, 415 aa, unidentified
MKVVFPTCCGVDVHKTFVVATIITTPADSLQPHYQKKRFSTFNSDLNRFADWLLEHNCLDVCMESTGKYWVPVFNILEKRGIRVVIANPKWVKAVKGNKDDTKDSKWIGDLFRIGLVKSSFIPELNIRILREFLRYRYKLVSMKSSEKNRFQNAFTVCNVALDSVVSDMFGKSATAITDYLTSDESFDPDHCVSLLQRSLKKKAEKVLESIEGYSISDEQKARIKIIREHYDFVEKLIAKVDTCVNEMVEKYEGEINLLCTIPGVDRNSAITIISEIGADMSQFGSSKRLCCWAGLTPGNNESAGKKKSVRISRAGVYLKPALVQVAHAAVKDKTNPYYALKYERIAKRRGKKRAIIAIARMILTAIYTMLCTGEVWNPVDLFKIDMPEHLKEQQLAKAIKQATRFLEKQGLTVA

SEQ ID NO: 506347 - protein, 410 aa, unidentified
MVRRVIGMDIHRSFAEVMFWEAGRLRWHGRVDMTRSGLEAFGRSLTRNDEVVLEATGNAMAVVRVLSPHVARVIMANPLQVKAIAHAHVKTDKIDAGVLASLHAAGFLPEVWLPDAETERRRRLVARRNQIVRHRTRVKNETHAILAAHLVPPCPHAELFNGPGRAWLARQILPDDERAAIARHLRELDRLGEDLAVLDREIAEATVDDPAVRRLLTIAGVNVTVSAGLVAAIGDIRRFSSPQKLVSYFGLNPRVRQSGLGFAQHGRISKIGRAHARGLLVEAAWAAAKAPGPLHAFFLRIRARRGHQIAAVATARKMAVLVWHLLAKETDYLWARPALVAHKLRALELQADRPMKKGNKRGPAYAYNVKALRNQEMVIAEQAERAYQHFVAQWQPKPVRKRRGAATTAA

SEQ ID NO: 506348 - protein, 425 aa, unidentified
MKSRAYRAVDVNRVEPAALSQGRDEAIVHAGLDVGKESILCTLRWDGGDFDRPWRARNPTEVVRLAELLSAVGRGRRLIVALEPTGTYGDPLRQALERAGLEVHRVSPKNASDYAEVFDGVPSQHDGKDAAVVAELSAQGRSWPWPMPVPTEAEQELAYQVEWMDGQRRQMMLWCGRVEALLSRHWPEATRLLPLGSGTLLRVLAEYGGPRGLAAAADALQRVQGWGRHYLSAEKAQALVDSARQTMGVTMGRWEEERLRRYALQIQHCQGETRAARRRLRELTRDQAAIQGMGAVVGVPTACVLWVELGDPSAYHCGSAYRKAMGLNLAERSSGQWQGKLKISKRGSSKVRRWLYLAALRWLKEEPVRSWYLRQKAQRRGEGKAAVIGVMRKLALALYQVGGRGEVFDRKQLYRSLTTVSAESV

SEQ ID NO: 506349 - protein, 314 aa, unidentified
MKNTQEINVGIDTSKTQLDIFIRPIGEFFSVENNTQGIKEALKRIKPYQPTRIIIEATGRLELPFACAASRAKLPIVVANALKVHKFAASSGQLAKTDKLDAQMIAHYGEALKPRITEIKADSIQRISDLLVRRSQLIDMRTMEKNRKSIMSSEIKRSNQRLIKHLQKEIDWVEKMLDKLIEDTPDWSNTLKILLSVKGVGKVLAYTLLSDLPELGQLNRKEVAALVGVAPMNRESGAYRGKRRIRGGRARIRTVLFMAMMSTIQSNAKFKREYHALVAKGKPKKVAIVACMRKMITILNTMVKNGEVWDEKLA

SEQ ID NO: 506350 - protein, 364 aa, unidentified
MEQITRGECSRVVVRVGVDLAKRVIQVHAVDAAGRLLTGRALARERFIAWCSQLPAGCIVAMEASSSAHHWARKLCSLGLDARIIAAHLVKPYRKQGSSGKNDANDAAAICEAASRPSMHFVPIKSVEQQSILCVHRLREGVKEERTACINRIRGLLAEFGLVFAQSPKVLRLVLADVIEDASNEMGALARLTLQRAHAQWRELDEHLAWCDERIAEHARTNGQVKLATTLLGVGPVTASAVVATVGDFRQFRNGAQFGAWIGLTPKQHSSGGKTRLGRITKRGDTYLRTLLIQAAKSAVLTAHRRSDRISSWLCTLRERSGWQIAAVALANKNARILWALMTKGEAFDANHLSVKSGMSLQPT

SEQ ID NO: 506351 - protein, 345 aa, unidentified
MRLKERETDMNYCGIDLASKASAICVMGDSQEISLEGTCTTDGDGFRRLLKGYSGLRCVVEASPLSEWVADIVESLGHEVIVIDPRKAKAVLTSKKKTDKLDARNLARMAATGWYTAVHRKSAESRLLRSALIARKGLVDTQRQQNNRIRGLLRAHGIVLGRVGSQVFERRVLDQLEQRCPGLIPAIRPLLEIWSTLRVSITRLTRQIRQMARQDRTSQLLMTVPGVGPLISSAFIATIDDPGRFARSEQVAAYLGLVPRVSQSGETEYRGRITKDGDRLLRWLLVEAAHVLLTRSGQDCALKRWGKRIEQKKGAAKAKVAVARKLAMVLHRMWLTNTPFEARLV

SEQ ID NO: 506352 - protein, 375 aa, unidentified
MEHHSEAFVALDTAKLRNAVAIADAGRNGEIRYLGEIDNTEAETRKLVAKLASKHARLTFCYEAGPTGYGLYRLIKSIGHDCIVVAPSLIPSKPGDRVKTNRRDAVNLVKLLRAGELTAVWVPDERHEAMRDLVRARDAAVKDYRIKRQNVSSLLLRLGRHYPGKKTWGRTHINWLTGLKLEHREQRIAFEEMLLAVRQVRERIERLEQAMREAVADWTLAPVIEAVQAMRGIDMVGAIAFLAELGDLSRFENPRQLMAYLGLTPSERSTGESVKRGGITKAGNTRARRLLIEAAWSYRFPPRVSKDMQTRIGAAPRTAREIAWKAQMRLCGRFRTLTRKGKRPTIVVTAIARELSAFIWAINREFVGSHATANR

SEQ ID NO: 506353 - protein, 347 aa, unidentified
MKEYAGLDVSLKAVSICVSDDGGRVFWRGEVVNEPDVVIAALARHAPNLVRAVLETGSCSVPLYRGLEAAAVPIICICARHAKGVLKCKVNKSDANDAEGLAQLARTGWYRQVYVKSAEAHVIRAHLLARKQVVKARRDFENQIRALLRVSGIKVGAVAKGRFEDRVRRLLEQIPALHSPLDQLLMARRSLLASQDALEAEAKRLAKDDHRCRTLQTMPGVGPLTALALVSTMDGPARFAKSSSVGAYLGLTPRGYQSGDVAWTGRISKTGDGVARALLYEAANSLMVRVKAGAPVKSWPPLKVWAVNLAERVGGKKARVALARKMAVILHRMLMDGAAYRWTPETA

SEQ ID NO: 506354 - protein, 422 aa, unidentified
MQNTAARKIRQVPEGYLIVGIDPHKKKHAGVAITQDLSVHDKFKFDNTMDGFDFLLKRVRADMVKADCRGVMFAIETGGHYWRNIAYFLDSKGIPFRFINQYTLKRRREGKDLNHRKNDYRDSEVAAQLLCTGEFVESGLPQGVYAELRAAHNAYRRLVKERTRITNLIKGLLDGLFPELVRVFKDPCAVTALCILSCSLTPGDIAGATLDEFRATIEAQYQGHRLMRRKLAALYQAAKTSTGISAGARSVASEVAFLVEKYELIKKQIRTIDKTLVGLVDQTEEGKYLLSITGLNYIAVAGLIAELGCFKTYRTAKQMIKMAGSNPTESESAGKRSARTPMSKQGRPVLRYCAWTAVIPMLRFNTDFRAWAKQLRERPVQANPLGGREIVGAALNRLLRLAFSMVKNRTFYWSPRLEPVTG

SEQ ID NO: 506355 - protein, 354 aa, unidentified
MSEITTVGVDLAKDVIVVCAGDAAGRTVYFRQFSFRAFAMWAANLPPCIFGMEACSSAHHWARRLASFGHTPRLMAPEFVKPFRKSQGAKNDRNDARAILSAVREPDMRFVAPKSEDQQAILAWHRMRAGWMAERTALVNRLRGLLAEFGLWFSRSPNKLLRALPELASSTALPERFKPIIAQAQEQIHALDQRIKECEREINVHAKASLDAQRIRAIVGIGSLTSSAAVATAGDTANFRNGRQFAAWLGLVPKQHSSGGKDRLGAITRRGNAYLRGLLTQGARSTVQVALRRPSAQRSRLEHWIVTLHNRVGYRKTLIAVANKHARIIWAILDKREDYDPNAWQQSTVTSANT

SEQ ID NO: 506356 - protein, 316 aa, unidentified
MQTTVLYIGADVAKAELVISVAGQRPCIIANTTTGITRWLKTVSEHALIAMESTGNYHALLAQLAYLHGLTVYILNARDVFYYARALGSRAKTDNIDAEVIVRYLQEHQSSLQAWQPLTPEQQQLRQLLSRRAQVITHQSALRQAFTDVDLSGVDTQALQHGFDVVLASMDQQIQHLIANDPQLEQGYQRLRSVSGIGQQTAALLTELLNRIPFANADALVAYSGLDPRPNDSGTKRGRRRISKRGPALLRRQLYLAAMSACRSAACKPLYEAYRARGLAGTESIVILARKLLRIAYAVWKSGQAFDPSKLSPKTA

SEQ ID NO: 506357 - protein, 357 aa, unidentified
MEKKWFIGIDISKKTLDVVIYVPTKKHADETNYERFLNKEEGYKSLLCWLKKKNMAKKRLVISMENTGIYSFDLCLFLEAASIDYCSFNPLHLKRSLGLVRGKNDRVDAERIAYFAYLHRDELSYSKLSGSSIIRLRDFAAERKRFVKQQAEYKGFLTDRKDCEMTSTIERAAHMVKILDEEIASVEEEMLQIINSDPSILRNYELLNSIKGIGTINAMNTIIHTNNFQAFETARQYACYLGIAPFEHSSGTSIKGKTRVYPTGAKLLKADLSQAANSAIVWDKEMKEYYERNVLRTGGHHDSRASCRLRQQAVNYIHQTLCFFCKFFFFPIRCHNINSLRVSRQTPKDYLHKFRQS

SEQ ID NO: 506358 - protein, 413 aa, unidentified
MKKHSSFSKSGKMSAKEAKPMRRESQDVMSELVERLRKQLDGELVVEPGDKGAADWERPNLDRLTVGVDVGDQWSNYCILGLSGETLAEGQFKSQPAEVREFFHGLAPSRVAMEVGTHSAWMREVISGLGHEVLVANSRRMQGSKRRRRKNDRIDAARLARLGRVDPASLYPIQHRSTEVREDLLVLRAREVLVESRTKLISAVRSMVKTVGARVPSSSSDAFSRKAAAEIPQQIRDTAQPLLNLIAQLSEEIKSFDKRIEQMADEKYQHTQLLRQVSGVGPVTSLAYALTLETPLRFKKSRDVGPYIGLVPKQEDSGDIQPQLGISKAGDRMLRKLLVGSAHYILGPFGPDTDLRRFGMKLCERGGKNAKRRATVAVARKLAVLLHRLWISGEVYQPLGYVSCRSTAQTAAA

SEQ ID NO: 506359 - protein, 355 aa, unidentified
MNSVRYIGLDVHRDTISASVLNESGRLIQQSILATRAAAILDFIGGMRGTLHVTFEEGTHSSWLYDLLSRRVARLVVCNPRKNALMKSGNKSDAIDARKLAELLRADMLSAVYHGEKSALEVQHLARSYALLTEDTTRVMARIKAVFRGRAIACAGKKLYGHKHRDEYLAELGTGALRRRAEFLYQELEAVEQLRRQAKRDMIVECRKYPETKLLCSIPFLGPVRAAVLIGRVQTPHRFRTKRQFWAYCGLALEMRDSGEYRMVDGQVERRKRPAQIRGLNWNHNHELKNLFKAAATSAAACNGVFHEFYLGLLKKNMQPEMARLTLARKIAAIALKIWKKGEAFDAEHLKLQAA

SEQ ID NO: 506360 - protein, 370 aa, unidentified
MTQCIKTRFVGLDVHKDTIVIAVAELGRQPARVIATVPYEGKALRKVLDKLGPRAQVACCYEAGPTGYGLARALLAAGWACDVIAPSLIPKRHGERIKTDRRDAVKLAENHRAGQLVAVFIPDEQTEAIRDLERAREDAKKAERVVRHQLSKFLLRHGRRYPGKTTWNDAHHAWIAKQAFVEPAQKYVLADALASVEGATLRASELTTRLKEVTVGWSQEPLVKALQAMRGVEFVTAVTLVAEVGDFRRFARAEDFMGYVGLIPSEQTSGNHRRQGPITKTGNAHVRHVLVESAWHYRRQPRMSKALRERSAGISPRVCAIAWKAQKRLHGRLNRLIGRGKNKAEAVTAVARELAGFVWAISREEKLLVS

SEQ ID NO: 506361 - protein, 364 aa, unidentified
MDEFTHIGLDVHKDTIAVAVLRPGASECEERMIPNAPEAIRKLLSRYPDRAALRTCYEAGPTGYDTYRLLSSQGIACEVIAPSLIPRRAGVRIKTDRIDARNLARLQRAGELTAVRVPTPAEEALRDLVRAREDLKNDRRIARQRIRSFLLRYGKRYPSPGASWSFRFEVWLRALRFEEAAAQAAFDHLVGAYSVRDAQLAAIDKQIEAVAGEAPLAEAVARLRAFRGIDTLSAVTILTETCDFRRFPSAASYMAFTGLVPSEHSSGASRHQGSITKAGNAHVRRVLVEAAWAYRHRPAVRGKLAKRLEGQPPEVAAYSWKAQCRLSSTYRKLAARKGPNKAVVAVARELSGFVWGAMTGRMGA

SEQ ID NO: 506362 - protein, 428 aa, unidentified
MLENSTTHPEPEFVGFVGIDWADQKHAWCSQRAGATQREHGEVEHTPEMVEVWVSQLAQRFGPGPIAVAVEQVKGALVYMLSKYESLHLFPVPSTMSASMRKSLYPSGSKDDPRDAELLLDLLLQHRKKLRRLTPDNEVTRRIQNLVEERRTLVDEKTTQLNRLTGYLKVYFPQMLGWFEKLDTKLVCDLLERWPSLEELQKVPPAELRKFFRQRRGRHQELTEWRLEGIGQAMPAIRDRAVLEAKRAMVQVSAQLLRTLLEGIANLDSKIEEAASAHPDFFIFESLPGAGSALAPRLLAAFGSQRDRYGSAEEVQKHSGIAPVMEKSGKKKWVHFRWACPKFLRQSFHEWAGHSISQSTWARAYYQQQRGRGKDHHAAVRALAFKWIRILFRCWQDRVAYDENKYLAALARRGSPLSSVLTVTAANL

SEQ ID NO: 506363 - protein, 423 aa, unidentified
MEDWLGRLRYSAFPFFTARSINNMNKTSFCGFLGIDISKDKFDAYCMDMKGEKHFYISCSMDRTGFEKLMSRLEILPISKEGLLIGMESTACYHMNLFSFLLVSGYMAVIINPLLISNFVKMQLRKTKTDKKDAFVIAHFLSMYADGLIQSSVSTHISDLRDLSRQRESLLSQMTALKCDMKRILTIVFPELERLTGVFTKSILKLLGRFPSAHAIVQADPAEITQLLIDHSMGKNSAKAAEIIIKAARSSVGTTSPAREVILKQKAEVLIHLDGHLKELTALMIELCRSDMGDDIEIMTSLRGIGDKTATNFLVEMGGDIRKFKDHKKLIAMAGIDPAIYQSGKHDGQGRITKRGNRHLRRVVWLMSIKVIQFNDFFRNYYKKRMQDGLPFKKAVLATAHKLLRIIFAMLTQRTLFRCVVNS

SEQ ID NO: 506364 - protein, 349 aa, unidentified
MEFYAGLDVSLETTSVCVVDREGKVIREGKLASDPDAIEMFLAEWGIHLKRIGLEAFSFSGWLFTGLEEKGLPVVCIETRHAKAAMNAMLNKTDKNDARGIAQMMRTGWFRAVHVKSGEAQTLRALLVGRKAMLGKVIDMENMIRGLLRPFGLKVGPISTGQFDARIRELVAGMAKLEAIIAPLLDARYEMRLQLAKLHRLAVVAAREDKAVRRMMTVPGVGAVVALTFRATVDDPTRFKKSANVGAHFGLTPRRYQSGETDYTGRISKCGDEMTRTMLYEAAIAILTRIPKNFKLRLWGLRLMKKRGLKRAATAVARKLAVLLHKVWVDGTVFRYGAGMKRGRIAAAS

SEQ ID NO: 506365 - protein, 356 aa, unidentified
MKSTIKYIGMDVHQSTISVAVLDAEGKLVMQSILATHAAAILDFLHGLRGTLHVTFEEGTQSAWLYDLLVQHVAEVVVCNPRKNALLKAGNKSDQIDARKLAELLRADLLSPVYHGENSTRILKELVRSYSTLTEDTTRIMGRLKALYRSHAISCAGKKPYGKRHRQEWLQQVQQPGLASRAQRLYDQLDAVQTLRRAAKREMLAESHKYSVYRLLCSIPYLGPVRTSILIARVQVPNRFRTKRQFWAYCGLALETRNSVEYRFVKGQLQRSKKPVFIRGLNLNHNHDLKNVFKGAATAASIHDGPLRQFYDRRLAKGIKPELARVTLARKIAAMALILWKKGESFDPQYLMSQAA

SEQ ID NO: 506366 - protein, 479 aa, unidentified
MNNKAKKAKKQAVINNSTVNILSKKELARRIAMLQESMKAATWRELETNGKFTKNDKLTFISDDMLIIGCDIGSEMHYVRAIDSRGRELSQDAFPFSNSSEGFQSAKAWALELAAANDKHQIVLGLEPTGHYWFCLAAWMVSNDISVVQVNPYAVKQTKELEDNSQRKDDRKDPKLIANLVKDGNYGMPYLPEGLYADLRRLSMLRDQLTEDRIRNTNRLHREMKIYFPEYREAFGKLDGAFTLEALKVTPFPEDIVRLGVDGLKDIWHSAKLRGRGYSKADQIVQYAKESVGLKHGRAGGRKAVKIFAEQIGSLSEALDGIEAELHQKCREIPYAENILEIRGIGENILAGILAEMGDITRFDDASEIQKLSGLGLVACSSGKHKGETKISHRGRKRLRYWLFQAAKSAVSHGEEFKELHAYYTTRKDNPIKKMQSLIVIACKLLRIIFTILRTGCRYDPMKMHRDIKRPKRAVAQAA

SEQ ID NO: 506367 - protein, 337 aa, unidentified
MKYSGIDLHCNNSVVTVTDEEDRVVAEKRLPNELTRILGLLMPWREELVGVVVESTFNWYWLVDGLQAAGFKVHLANTTAIKKYEGLKHSGDEVDARYLAHLLRLGILPTGTILPPEQRAVRDLARKRMQLVRSRTAHILAVENITARQYGTRMGSHQVKRLTAAAVDQMPLPDEVGLAVKANVAVIGTLSEQIGVLEKRLQEQVGARAEYGLLTSVPGIGQVLATTILLETGPIDRFAAAGNFASYARCVDSVHTSNGKKKGEGNTKNGNKYLAWAFVEAANFARRYCAEAKRFYERKKAKTNNVVAIKALAHKLARACFHILKERQPFDVTRCFA

SEQ ID NO: 506368 - protein, 414 aa, unidentified
MEKERIDIYHKRNTCFVGIDMHKDAHCAVVIDCWMNKLGEVNFENRPSRFPAFVEDVRKICGIKEIVFGLEDTRGFGRNLAAYLVGRKFEVKHVNPAYTSAVRLANPIIYKDDSYDAYCVARVLRDMVDTLQDAKHEDIFWTIRQMVKRRDLLVKSNVMNKNQLHSQLAYSYPSYRKFFAMIDSKSALCFWENYPSPEYIWKTTPEEIYQTIKPVHQALKIQRIHEIISMIERDGDTRKDYQPERDFIVRNIVKDIRHNKALIAEIDDELRKLIPLTGYKLHTMPGIDLVTEAQIISEIGDINRFPDSDKLARFMGLAPVQFSSAGKGKDQRCRNGNRALNAIFHFLAIQMVAVSASGKPRHPVFREYFEQKVKEGKNKPQALVCVARRLVRIIYGMMKTRTEYRPYEKVDDKN

SEQ ID NO: 506369 - protein, 367 aa, unidentified
MSDSITWVGLDVHKESVTAAIVEDTSEDVQVVKLSSDLMKVRRLFRRLSKTGTVRACYEASGAGFVLHRVLERDGFHCDVVAPSLIPRKPGDRRKTDRLDAIGLVKLYRSGHLTAVRVPDEDQEAVRRLVRLRTAYMQQVKSTKHRIFGILYNQGLTFRGTKSLWTKQHRAWLRECLDEARGALQTCLRVELEHLEYLEMQLGALDDEIERYAQREPYRQTVECLKCLRGVKTLTAMTIASEIGNILTFRSPRQLMAWVGLVPSERSSGDRERRGSITKAGNEHLRRFLIEVAWNNRHRSGADLILSRRRQGQPPEVVAMALKAQHRLSKRFWALMHRKHPNVVVVAVARELCGFVWAIMKAAPQAA

SEQ ID NO: 506370 - protein, 395 aa, unidentified
MEVRTGASPHVIVGCRAGIGSWPVEPQMWEAPVSGNRTSVGLDVHARSVVGCGLDGRTGELFERRLTPDHGDIESWIKSLPGPVAVTYEAGPTGFGLARWLTGQGIECQVAAPSKLQRPSGDRVKTDVRDARHLARLLHLGEIVAVAVPSVEQEAARDLVRAREDVRGDLMSARHRLSKLLLRQGIVYYGGKPWTGSHDLWLRAQRRSAVFTLGGLRLAFDIAYDTLLATEARRDRLDAAIIEMAAASEFTAVVTRLGCLRGVSTLTAFGLAVEIGDWYRLDGRSIGAYLGLVPTESSSGGTRSQGSITKTGNAHARRLLIEAAWHHRKPYRIGVDLRRRQDRAGPAARDRGQRANRRLHTRWAGFDARRKRPVVANTAIARELAGWCWSLAVLD

SEQ ID NO: 506371 - protein, 333 aa, unidentified
MDIVGIDISVEPRGSPDKAKFDAALLLGERVRHAAFSNTEAGFGQLLAWLAKHRPDPAAPLHVCMEATGNWGLELADFLHAQGVRVSIVNPARIKAYGESELARNKTDKLDAGLIARFCRAHVPPAWVPAAAHLRELRELVRRCDALKAARVQELNRQKSGFASSAAARSIAAHLAWLDKQIETVMSEVRHLIAADPVLSKNLALVRSITGFGEISATILLAELPNIADFTPKALAAFVGLSPSEHSSGTSVRRPGKVSRIGTERLRSTLYMCALSAKRSNKPLAAFVARMTAAGKPSKVILVAVARKLLVYAHAVIRTQKAFKSSPNAPLPA

SEQ ID NO: 506372 - protein, 400 aa, unidentified
MVFVGIDWSDRFHSFCVLDADGNKLDGFEIPHGQEGFESAQARLRKHARCVEDIVIAIETKDSLIVDFFSEMGYVLHFLNPKQTDRFRDRHRMAHLGSDGFDAYVLADALRTDAHLFAALSPLDEQSLALRVLTRSRVNLVKRKVAVVNELKAALKRYFPLALELFDDLEQPGSMDFLLKYPTYAQARTVSAARIVSILVKAGAREKSAAKRAEQMRQKLRSAQPTTSKSAASAYPPAEEHRDRAGMPRSEIGTISRDHPNKELIQSLPGIGEALGPVFAAEIGADVARFSELKTLKAFCGSSPVTARSGRYQSVHFRRACNAHLRRALHLASAGAIITCAWARELYDRLKAKGKSHGRALRAVGDQLIEILYAVLRRRRPYDEAYHLRMKSLHGKPVQY

SEQ ID NO: 506373 - protein, 330 aa, unidentified
MMLHAIDLHKRTLEVATMHGDGENVPQVVRMPACERALGSYLRQWPLSRHRVVVETTGSWYWIADLLRAHRAELKLAHAAKVQAITAAKVKTDSIDALTLLTMLRLNLVPEAHVISPELRELRDLLRLRLRLIEKRTSSLNSIARLLEKYNRASVEALPELAQVQAGFHQGQISLLAAQIKALEKRIHRELRPNRTVRRLRRIPGIGRLTAWTLYLEIDGIERFASERKFFSYSRLVPGADNSGGRTRNRRSRAGNRYLKLAFSHAAVRAVQRYAEVGAAYRKKLRKKNKPLAHAWVRKELARIVYHVLKDDVDYDDTFRGVALSRPKRA

SEQ ID NO: 506374 - protein, 427 aa, unidentified
MKYQVAAIDVHKKMLAVVVADVAGEGEYQFERRKFGTTPEQLHVLAQRMIQQEVEEIVMESTAQYWKPVWGALERLWKPARQQREGATKMSGKLHLCQAKSNRGQRGRKSDFLDAERLVKRLVAQKLVLSLVPDAEQRLWRTVTRRKYQLTRDKVRLHNQLESLLEEAHIKLSSFVSDLLGLSARRMLKALVEGATDPAAIAALADGRLRATPAQLRDALGASTQLHGVYRRLLKMMLEDLKQLEEQMEQLDGEMATLLEDHQEVVQRLAEVPGLGVSSAVQIIAEVRPQAEVFNSAKELSSWVGVCPGSEESAGESQSTRSPKGNRNMRRLLNQAAQAAVKMKGSIFEVTFRKLVPRLGYKAAIWAIAHRLCRLLWILLRKGVRYQEHGPAVSAKSQRARTTKMIKELRKVGYRIESGPLPAGAVA

SEQ ID NO: 506375 - protein, 412 aa, unidentified
MSQMLVGIDVSLRSHHVHFMHGEGHTLADFSVSNDVEGADTLIQKVSRTAEKNQLHELKIGMESTDQYSWHLAHYLKKQLHRVLPHVQTAIYMLNARKVARFKKGYDTLPKNDRVDAWVIADHLRFGRLPHEMQETLIYDALRRLTRTRFHLTHEIARNKTYMLNQLYLKFSGLRQDNPFSDTFGATSVAVIEELDPEIIAEMPLEELVEFLQEKGKNRFAEPEEIAKYLKKLARNSYRLDKVMADPVNLSLSVILSTIQHMESQVKRLDKEIERMMKGIPQTLTSVKGIGPVYAAGLIAEIGDIHRFDDHHALAKYAGLVWTQYQSGEYEAQDTSRERTGNKYLRYYLVQASDAIRKHDTEYKAFYQKKFKEVTKHQHKRALVLTARKLVRLVHSLLRTKQLYIPKEERRE

SEQ ID NO: 506376 - protein, 354 aa, unidentified
MSQKLNSAIAVIGIDTGKNSFHVVGHDRRGAIVLRQKWSRGQVETRLANLSPCLIGMEACVGAHHLSRRLKAFGHDTRLMPAKYVRPYAKGQKNDFNDAEAIAEAVQRPTMKFVATKTADQLDLQALHRVRERLVSQRTGIINQIRAFMLERAIAVRQGIRFLRTELPIILASRTDVLSPRMLHTIEDLAGDWRRLDERIETLSREIEMIARQDAGCDRLMSVPGIGPIISSAVVAAIGSGDVFSKGRDFAAWLGLVPKQISTGDRTILGKISKRGNRYLRVLFVQAAWVVLVKPQSWERHGLKSWIEAAKKRLHHNVLAIALANKLARIAWAVLAKGRGFEATRTVNGSTQSA

SEQ ID NO: 506377 - protein, 370 aa, unidentified
MLDTTTFVGLDVHARSIKAVSLDVMTGEVRCATFGYDAGAVAEWVRSVDPGARCVYESGVTGFDLQKRLSGLGVDCVVGAVSKMIKPSADRRRKNDRNDAEFLARMLSVGNVVEVWVPDDECEAARDLTRALEDARDDLSRAKQRLSKFLLRHGLAFDERTPTGRRKGNWTRAHWSWIESIRFAEGADNDVLAYYVDAVRRAAEEKARLEGLVEAEARKPRWRRRVDSLRCLKGVDTATAADLVFEAGELSRFGNARSFAAWVGLTPSEHSSGESDRRGAITKAGNKHLRKALVEAAWHYLTCSGRPKDLARGQAPDRVARRHAAKGVRRLAERREALLARGVHNNKANVATARELACWVWAVGLMAEEA

SEQ ID NO: 506378 - protein, 422 aa, unidentified
MNQEIGMNSHLNNANYKAFVGIDWANDKHDLCIQDPLTGKREFSVIKHDVSEIDKWIKGLCKRFGSPIAIAVELTKGPIVYALQRYDFVVIVPINPTTLAKYRTAFKPSKAKDDPTDAELALELMLRYPNHFPPLNQQSVNMRKLMFLVEHRRKVVDDKQRVVNQMINAIKQYYPQANEWFCKKDTHIFCDFIARWPTIQQAKKSHKSTLVKFFNDHGIHNDTIVNHRVSLIKKAKPLTNDKAVIDSHTMLVIFYVERIVNSMKCIKEYNKSILKLMDKLPDAPIFTSLPGAGAALSSRLLAAFGEQRDRFKSAQEVQQYAGIAPVTERSGQKSWVHWRWQCSTFLRQTFIEWATHSRLKSYWANLYYLQQREKGSSHQAAIRALAFKWIRIVYKCWQDGKPYNETQYLRALKDRGSPLISG

SEQ ID NO: 506379 - protein, 376 aa, unidentified
MSKLLFVGLDVHAETIAVAVAEQGGEVRSVGGIANRLESVRKMVHKLGPVQHLRACYEAGPTGYVLYWQLTQLGVACEVIAPSLVPSKAGDRVKTDRRDAEKLARCHRAGELTAVCVPSAAQEALRDLVRAREAAKKDQLKARHRLGKFLWRHGRQRPEGIKAWTKKHREWIKSHVRFEEAALEVTLADYVEEVDHVATRIVKLEKAIDEAIRQAPPELRAVIEALQALRGVAQTTAASIVSEVGSLSRFPTAPQLMGYSGLVPSEHTSGNRVQRGGLTKTGNGHLRRVLVEAAWAYQHRPNVIGHLARRQKDLAISEEAKQIAWKAQQRLHKRYKAMAARGKNKNQIVAALGRELLGFIWAIGVRTEQQKLAKAA

SEQ ID NO: 506380 - protein, 310 aa, unidentified
MKIICGVDVSKATLDARIGPDGPMTSVARTPEGIAQLHQFCIRHEVELVVMEATGGLERLPFGLLWEAGLACAIANPRHVRRFAEAMGYLEKTDAIDAGVIADFAQAKRMVGQAPATPGQERLRALVTRLRQLTDLKVAQANQRRLLQDPDALASIDEMLALIRRQTRAFETEITALLGADPLWCALDEAFREIKGVADRSVAHVMAHMPEIGTYSNKAIAKLAGLAPMARDSGKRSGKRSIRGGRTQVRSILFVVASVVGRHEPDFIAFRQRLLEAGKSKMEVRIALARKLLVRLNAKARDARKAFAAA

SEQ ID NO: 506381 - protein, 347 aa, unidentified
MDMVVLGADLHKRNHTIVVIDGTGRQLAEKTIAASDAGHLELRRWAAQWPERTWGLEDCRHLSRRLDAELVRAGESVVRVAPKLMAGARRSSRAPGKSDPIDALAVARAVLREPDLPVATLDGPDRTVRLLVDHREDLVGERTRHEQRLRWFLVELAIAEPAPRSLGRPVVQTAVRDALVGRPEPVARFARDLLARVVELSAAIRALEGEIEGAVETLAPTLLAMPGCGPLTAAKIVGEAAGIRRFRSKGAFALHNGTAPVPVWSGNVVRHRLNRGGNRQLNVALHRIAITQIRLDGPGKAYLDHRLSRGDTRTEAIRALRRRISDEVFRRLRADEAARSTDLAAAA

SEQ ID NO: 506382 - protein, 349 aa, unidentified
MKIVGCDLHARQQSIAMVDTETGEFTEKTLCHEGNAVRAFYASLEGPVVVGIEATGAMQWFLELLDELGIEGRVGHPAKIRAQETRKQKHDRRDARLLLQLLSEDRFPEIWMPSTEQRDLRTLLRDRDQWVRMRTRVQHTLQAIALNHALRQGRALWSATGQTALEALPLPPYTRQRRDELLALYAQLQKRIQELNKEVEAQARQRPPARRLLTHPGVGPVTALATDVFPGDPSRFASGNQVASYIGMIPSERTSGKRQRLGKMSKQGNALLRYLWTEAAMSTVRKDPELQRFYRRKLIQKGMGKARIAAARKLGIRLWIMMRDQSDYQEFCRRGKLRQTGETHAGMPA

SEQ ID NO: 506383 - protein, 358 aa, unidentified
MQPQIRELDFSGQNIYAGIDVHKKSWKVSIYSEDLYHKTFNQPPEPEVLHRYLSRHFPKGTYHSVYEAGFCGFWIHDHLLSLGVNNVVVNPADVPTTDKEKKRKTDRIDSNKLARHLRSGNLEALYVPDRAIREDRNLVRMRGTLVKELTRYKNRIKSDLNYFGIQIPEQYATRSSYWSKRFMNWLGGLEHQQWSGTEAFRILIKHVQALREHLLEVNRKIRILSNDPHYRKRVDWLISLPGIGLTIAMILLTEIDDILRFHNQEKLRAYVGLTPTIHSSGDNDFHGEMINRGNKFIKSALIESAWKAVRVDPVLHMDYIRLCKRMKKNKAIVRIACKLLNRIQFVLKNEVPYVSGVK

SEQ ID NO: 506384 - protein, 338 aa, unidentified
MQVTTIGLDIAKNVFQIHGIDANEKVVVRKQLRRGKLIAFFEALSPCLIGIEACATAHHWARELTKLGHEVRLMPAKDVKAYVKRNKNDAADAAAICEAVRRPTMRFVRIKSPEQQGQLMQHRTRDLLMRQRTQLINALRAHLAELGIVAAKGDSGVKELRAIVADEEDTRLPIDVRASVIVLAAQLGAVQTLIGSIEKRIKTQHRANEASRRLETIPGIGVIGATAIAATVADPTVFRSGRDFAAWIGLVPRQDSTGGKQKLGPISKQGDRYVRRILIVGAHSVLRRAQENPEITQLLARRPFKVVAVALANKMARMAWALLAHGGTYRAPELAQAA

SEQ ID NO: 506385 - protein, 410 aa, unidentified
MYPLYVGIDVSSKNNVIHFMKPDGSKHSQFSVKNSLDGARELSKRIVSAMNSEALTDLIIGLEATSVYGEHITMFLREDASLASYNHKVFVLNPKQVNKFKAAYPDLPKNDYVDAFIIADALRFGRINKDIYTDDYRYVALRNLTRARYFAVQNLTREKQRFLNYLFMKYSSFTQEKVFSNTFGTTAISVFEEFDSPDELAYMDLHDLTDYIIKKGKNRFDDPEAVAKAIQKAARSSYRLPKTVNDSVNQVLSLSISSIRALESQIKEFDKAIAEQLALIPNTLQSIKGIGPVYAAGIVAEIGDINRFSNQAALAKYAGLAWTQHQSGNFESEYTRQIQSGNRYLKYYLCEAALSLVRCDTEYKRFYQLKYNEVNRYKHKRALALTARKFVRLVFRLLKDNRLYIPAVQK

SEQ ID NO: 506386 - protein, 398 aa, unidentified
MDQHRFDVFVGLDVGKEHHHATALNAGGKRLHDKALPQDETALREVFTKLTAHGLVLVIVDQPATIGALPVTVARAMGIEVAYLPGLAMRRIADLHPGNAKTDARDAYIIAEAGRTMPHALRRVGGDDDLIADLAVIVGFDDDLAGEVNRVSNRIRGLLTQIHPALERAIGGNISHPAVLALLAKYCGPTGLADAGRRRLTTTAKALAPRMHERLVEAIVKALTEQTVTVPGTRAAELVLPQLAAQLQGLLTQRAEAAKQVEEALDAHPLSQLLMSMPGVGIRTAARLLLDVGDGSAFPTAGHLAAYAGLAPVTRRSGSSIRGEHPSRGGNKHLKRALFLSAFAALHDPDSRAYYDRKRAAGKKHNAALVCLARRRVDVLHAMLRNGTYYQPRTPAAA

SEQ ID NO: 506387 - protein, 340 aa, unidentified
MNIKRIGLDLAKNVFQIHAVDHREHVVLRKTLRRDRMAAFFTQLSPCLIGIEACGSAHYWARELTRMGHTVRIIPPRLVKPYLKGQKNDANDAEAICEAVSRPGMRFVAIRTERQQTLQAEHRVRARLIRARTALSNEIRGLLGEFGVVLPAGIAQLRKALPEIVSQQVQWDECFIRLLCELSEELRGLDERVARHDRRLQQSARDDIRIKRLLAIEGMGPVVASALVAAVGDGRQFRSGREMAAYLGLVPRQHSSGGKARLGHISKRGDRYVRTLIIHRARAVLNACQNKTDRRSQWLQGVSERRNRNIATVALANKNARIAWALLSREEDYHGIQVTG

SEQ ID NO: 506388 - protein, 319 aa, unidentified
MQDILETCCGLDVHKETVVACLLKGDRNNKPEAITRTFSTLIPSLEELKTWLEEENCRHVAMESTGVYWQSVYNVLESAFDGTIVLIVANARHMKNVPGKKTDMKDAEWIATLLRAGLLQGSFIPSQPIRRLRDLNRYRKSIVEEITSQKNRIEKHLQSCGFKLSTFLTDIFGVSGRAIIDHLARVGSISPEEVDPLVKKRARNKLNDIKQAVNGDMDRLQKDFLTILLKRLDESVEHLQLIEQKIDEELLKYEQQLKQLDGIPGINKIAAAAILAEIGIDMAQFKTAEHICSWAGLSPGNNESAGKKSPPVHSVGIPI

SEQ ID NO: 506389 - protein, 413 aa, unidentified
MEDLLTCCMGLDIHKDTIVACLLVGETDKKPEREIRTFSTLIPGMNELRKWVEETKCNHIAMESTGIYWQPIYETLEDCFDSEIRLLVVNARHMKNVPGKKTDMRDSEWIATLLRAGLLNGSFIPAKEIRELRHLTRYRKSIVYDVTSQKNRIEKFLQSSGFRLSSFISDIFGASGKNILRHLISCGSMTIEALNTCLKTKTRKNINEIMVAVNGTLSLHQREFLKMMFNQLEQLEKHRKEVENSINSFIEQFSEAMSLLCSIPGIDIIAASAIIAEIGVDMSKFPTSEHICSWAGLAPGNNESAGKRKTASITKGNPYIKSMLCEVSWVIAGKRNTYLSGWYWRIKQQKGAKRGIIALARKNLVIIYTLLKFKHPFNESAFEQRKQKCQQKRTSKLISELTRLGYHVERTAI

SEQ ID NO: 506390 - protein, 343 aa, unidentified
MQTVTTIGLDIAKSVFQVHGVDAEGNAILRRQLKRRYVLAFFQKLPPCLVGIEACASSHHWSRELQALGHTVRLMPPAYVKPYVKRHKNDATDAEAICEAVTRPNMRFVSTKTPEQQSCLTLHRTRHLFIRQQTSVINAIRAHLAEFGIVAPVGRQGVEQLLGVVSDASDKRLPDVARACVAALGAQLQRLKVQILEFDRMIRAWHRSSEASRRLDDIPGVGPALATALVASIADPKAFRSGRDFSAWIGLVPKQNSSGGKDKLGNISKRGDRYLRGLFTAGALAVIRCAKIHGTKHRPWLTALLARRPTNVAAIALANKIARMAWAMMAKGERYKEPAALAA

SEQ ID NO: 506391 - protein, 396 aa, unidentified
MKAVSGLDVHKDTIFACILQKGNPSFIREYSTLTSGIEALRDDLLAMGVKTVALESTGIYWIPVWKILEADFQLILVNPYYIKQVPGRKTDVKDAQWIAILLQKGLLKGSFVPDELLRELREYERGYVRLGSHESRLEQAIERQLIKCNIRITSFASQIGSATVMKIVQAICEGQTDASELEKLVHGRIRNKHKEKIYQSLQGAVRPSDKLLLSQAYQQYQLIKQQQSELFEQMSRICHDHFEKEMKALCTIPGVNNLSSMMIIAEVGVDMQNFPSDKHLVSWTGLRPRNDESAGKIKSKKVTHGNKYLRRVLVQCAWAASRTKGSWFQGKFQQLCVRKSEKKALIAIARKQLMIIYHLLQAKTDYIAPVLVLTEKQKERKIKYLQKQLEELLNMG

SEQ ID NO: 506392 - protein, 350 aa, unidentified
MTTNTVQAQPVREIVAGIDTHQDTHHVAVLDTSGALLEDAAFPATTAGFAILLAWIGGFGVLLRAGVEGTSSYGAALTRYLLAENVDVIEVPPGDKAQRRRRGKTDAFDAEAAARRALAETSPRIPKDTTSSVEALRLLSNTRNLLVKQQKEIAGQIDQFLITAPDTLRELSREGTRKTRMRRLAELPETATGDVVTDTLTRLLRQHATRWITLDADATSIEKQLRTLIEIRAPKLLEVYCVAAVTAAQLLVAVGENGHRIHSEAALAKLFGAAPQPVSSGKTNRHRLSRGGNRQANCALHQISIARLCHEQRTRDYRDTHLADGKTKKDILRLLKRALCRELFPLLCRP

SEQ ID NO: 506393 - protein, 435 aa, unidentified
MNHSETQIRTSTNEPFAALVGLDWADEKHAVVLQVANSQIKEHTSLEHTPEALSDWVAQLHQRFAGGKIAVILEQSRGSLLYALLPHAHLVLYPINPQMAAKFRKAFYPSGAKDDPLDADLLLEILLQHRDRLKAWQPDEPVTRQLQLLVEARRRFVADRVRLSNRLEHALKSYFPQALQLVGESLTTPMACAFLQKWPTLAAVQKAGAQRLRTFYYGQHCRAENLIQQRLLLLAQAKPLTTDAAVVAAQSLLVKSVAHELAALPAILAEYDQQIALLFAAHADYRIWDSFPGAGAALAPRLAAAWGTQRQRFESSDAMASYSGIAPVKQASGRSVWIHMRWACPKFLRQTFHEMARTSLSFCVWAQCYYKLQLDRGKGRHAAFRALAFKWQRIMWRCWQDHIPYDDAKYLASLKRDNHELYTRIVAFQSATSGA

SEQ ID NO: 506394 - protein, 407 aa, unidentified
MEVIIERACGMDVHKDSITACVMTPKGKEIQTFSTKTVFLLQLIDWIKEHGCTHVAMESTGVFWKPIVNLLEAENIEFLVVNAQHMKAVPGRKTDVKDAEWIAKLLRHGLLKASFIPDRNQRELRELVRYRRSIIEERARQHNRIQKVLEGANIKLGSVVSDIMGVSSRDMIRAIADGEEDPEKLASFARRTMKKKKDELELALRGYINPHQRLMLKTILTHIDFLSEQIELLNLEVATRLSSHQEDIERLDSIPGIATRMAEQILAEVGTDVEKQFPSAAHLCSWAGLVPGHNESAGKRKSTNMKKGNKYLKSALIEAAHSVRGSKTYLGAMYRRTASRKGKKRAGISVAHAILRIAYYLLTRKEMYVDLGEDYFDKQKEQSIVRYSVRRLENLGYYVTIVEPDAS

SEQ ID NO: 506395 - protein, 345 aa, unidentified
MQTHTLGIDLGKTTFHLVGLSDRGRVLIKRKFSRRQLLAFTANFPPSLIGMEACVGSHFLGRALREQGHEVRLIPAQFVKPFVKSNKNDYADAEAIAEAAGRENMRFVPLKTDDQLELQAVHRVRDRLVSRRTSVINQIRAFLLERGISFHTGRPHLRRHLPELLEDANQKLTARLRRLLHLLWQEWQHLETQIDSLTEEIEQIANQDEGCCRLRQIPGVGSLVATAVVAAIGNGAAFQKGREFAAWLGLVPKQHTSGDQPKLLGISKRGNCYLRKLFIHGARAVVFRRKRESSPLDQWMTGLEVRAARNVLVVAVANKLARITWAVLSSGENYRSLAAPTGACH

SEQ ID NO: 506396 - protein, 432 aa, unidentified
MEEVTDEPLYRDRVCGIDIGKAQMAATIRVPSDANPARRAQETRSFGTTKREVLALADWLRCWQVPAVVMEATGDYWKPVFYRLEAEGFDCVLADAKQVKHLPGRPKRDPSDSRWLAACFERGAVTSCFVATPEFRLIREHTRYRRDLTGERTREKQRAEKLLESAAIKLSSVVTDLHGVTGRDIMDHLIAGERNPKTLAQLARARARRKISELEAALEGAEFFTAELAALLARMLGRIDQLNAAIGELTTVIETLLEPYEEQLQQAESMPGWARRSAQDAIAETGVDMTRFRTGAHLASWAGRTPLDSQSGSRKGKARSKKGNRYLAAITGETAVAAGKTQTREGARYRRLARRRGKAKAGVAVGNTQLNVYHALLSSPGTRYQDLGVDYYDNRSTGRQLRALIQRAHDLGYNATLTPIPDLTGCPEVTSS

SEQ ID NO: 506397 - protein, 422 aa, unidentified
MLEETHDNDQIIQRVAALDVGKAELTCCVRVPGQGSSGRRLQEVRTYQTMTRWLLVMTDRLAELGVTRVVMEATSHYWKGVFYLLEAHGFEVWLVNARDVKHLPGRPKTDTLDAVWLCKLAERQMLRPSFVPPRPIRQLRDVARYRADLVVARTAEKQRVEKLLEDAQIKLSVVASDIFGVSGRAMLAALVAGERDPKALAQLARTRLRAKLGPLVEAFTGFFTDQHAFLLAKMLARVDALDADLAELDAKLAELIAPFAEAVDRLDEIPGIGQLAAHLLIAELGVDMTRFPTAGQLVSWAKFAPGVKESAGKRKGSGSTGHGNPYLARVLGEAAVAASKTNTFLGERYRRIARRRGAKRAIVAVGRSILVIVWHLLADPTARFQDLGAGFYDTRINAERAKRNHVRQLEALGYKVTLEPAA

SEQ ID NO: 506398 - protein, 362 aa, unidentified
MFRPHTLYIRIRIVRKVHEPVFAMRDQDVSDVIKTKNRTAMQYIGIDVSKATFVVAYSSDKGGEIRTFNNTTAGIKQFIGTLPKDGSIHCVMEATGNYSALLLYMLNVAGITVSMENPLKVKNFARAMLSTVKTDKIDARLIALYGEKMNPQPFKVQGEAILRLRQKRTVIRQLTKQITAMSNLRGSLACLPVPDKGATHTVDETIEFLEKRRDRLQSELTDLVEVEFSRQLALLTTIKGIGITLATALILTTGGFTYFQNAKQVSRYLGICPTYEQSGTSVNIRGHINRNGDAYTRGLLYIAAWPASRFNAQCKETYTRLRQNGKPGKLAMIAVANKLVRQAFAVVAHDKEYIDGFVSNRP

SEQ ID NO: 506399 - protein, 436 aa, unidentified
MTSHCQSYNYKSQEVILLSFKILKNNCCGLDVHKTWIFACIGITDPYNRTEYKQARFSSYTKGLQELCDWLAKYNCNDVCMESTGKYWIPIFNILEKNNIWVTLSHPKYTKPQKGNKTDRKDARWICDLYMCGMVKPSFIPPADIRQLRDLVRYRFKLICMITGEKNRAHNCLTVSNLKLDDVFSDIFGKSSRSITEQILQHPGEYFDVAPFVHGRCKTPIEEIQAAVDGAISNEQAVKLRQCLSHIDELEMHKTEIEREILRLSEKYEDALSLIRTVPGFDKNPMTAIQVLSEIGGDMSVFPTDKHLVSWAGCCPRNDKSDRKIKSTRISRAGSYFKPVLVQVANALIKSKKNPEFAIRYRRIKARRGHKKAIIAICRMILTAIWHILSDLKPYTPEGFLAPPSVNESKVLTTSQALNLLKQRGYVINDAASPVI

SEQ ID NO: 506400 - protein, 303 aa, unidentified
MIVLGADMHKSSHTIAAVAAASGELLGDKTVRVGDRGFAAALDWARGLQDERVWALEDCRHVSGAFERFLLGHGERVVRVATRLMAGERRGGRDRGKSDLIDAMAVGRAALREGVDRLPVAELAGVELDIRLLVDHRERLVRMRTALYNDLLWHLHDLWPEQTFPACALLSKKWTARIARRLARAEQTARVRIARDELRHLRELSDTINLLEAEIADLVAQVAPQLLAEPGFGPLTAGKLIGEIAGAHRFSSDAKLARAAGIAPIPVSSGNTNRHRLDRGGNRQINTAIHRVAITRLRCHPET

SEQ ID NO: 506401 - protein, 418 aa, unidentified
MNVKTRRTKKQVNVENQAIKLLAKEELGRKIEVIKKELRSYTWRDLETNGKFAKNDKLSFITDDMLIAGCDIGSETHYIRAIDVRGRELSSGAFEFSNTSEGFANAKAWVLALAAKNDKKQIVLGLEPTGHYWFALAAWMISNGISVVQVNPYAVKQSKEIEDNSQLKDDRKDPKLIANLVKDGNYGMPYLPEKVYADMRRLSMFRDQLTEDRIRNINRLHRELKIYFPEYMDAFGKIDGAFTLEVLKVSAIPSDITALGAEGIKNIWYNVKLRGRGYSRANEIVSYAEKSVGLTDGTDAGREAVKWYAEQILKLVACSSGKHKGQTKISHRGRKRLRYWLFQAAKSAVSHADEFKQLHEYYTTRTNNPLKKMQSLVVIACKILRVIYTILKTGTTYDPQKLLEDIKRPTASHAPMAA

SEQ ID NO: 506402 - protein, 351 aa, unidentified
MSDTISTRQVVVGVDTHQLTHHVAVIDTAGNRIEDREFPANTAGCRELVGYVTALGRVRAYGVESTGSYGAGLTRYLLSVGAEVYEVTRPERSTRVKAGKSDPIDAYSAAEQVRAGRALGRPKIKTGIVEALRTVKIPRDSAVKERARVYSQIRDLVTTAPAPIHDALIGRTARQRVTIAAAYRPDLARLDEPAQAIKHALRALARRVQALDSEIAEADKLITALTKQAVPTLLAMTQVGPQTAARLVITAGQNIERMRSEAAFAKLTGVAPLPASSGKTSRHRLNRGGDRQANSALYMVIVGRMRNHPETLIYAQRRRAQGLSNPEIIRCLKRHLARSIYRALRTDLMTP

SEQ ID NO: 506403 - protein, 310 aa, unidentified
MERISVGIDVAKDRLDVHVLPSGEAFAVARDGKGLEDLTARLGGLGASLVVLEATGGYETTVAAALCAAGLPLAVVNPRQIRDFARSTGQLAKTDALDAAAIARFAEAVAPEPRPVPDEQARALGELVARRRQIVDMMTAERNRQSRMASRRALKSVERLLKALQRELNDLEDEIDATVRRSPAWRRTEDLLRSVPGVGETTARTLIADLPELGSLDRRKIAALVGVAPFNRDSGHMRGKRTVWGGRAKVRACLYMAALVAARCNPVLQHFYDRLVELGKPKKLALTAVMRKLLTILNAIVRDQKPWQNV

SEQ ID NO: 506404 - protein, 354 aa, unidentified
MEQVTRIVMGFDIGDRKSVVVSLDRETGELRELPAVPTSRKSVRGFFDGLQEPVTVIVEASTPARWIALEGRKRGHQVIVADPRRLAAVTENIRKSDEQDAAMLARLGASEMRLLRETWVREESMSEDLAVVRMRDALVAARTLVVNASRSQAKSLGERLRSCSTASFAAKGNAGMPARLKPVLDEAFAAVKGLSESIKGYDRQIAAICERRPAAQRLAEEIPGVGELTALCYVLTIADPARFRCVRDVAAYIGLVPRRSQSGSIDRQMRISKTGNGLLRRLLVQSAHHVLGPFGKENDLRTAGLALAARGAKTGKKKAVVAVARKLAVVMLSVWKSGDPYEPVRKKKPTPAAA

SEQ ID NO: 506405 - protein, 420 aa, unidentified
MTALSNQQFKAFVGIDWADTKHDICLQQTGDDRREFDCIPHQVTRINEWAKALHQRFGGPIAIALELARGPIVSVLQKHAFFTLFPINPAMLAKYREAFKPSRAKDDPTDAELALDLLLRHPERFSPLRPQSAGMRSLLSLIEQRRELVGDKTRFTNRLTNALKQYYPQALEWFDDIDTVLFCDFLTRWPTLPAVRRASRKTLETFFHAQNCRRAKLIEGRLESIRCAVSLTDDPGIVAPHRLLALMLVAQLRTALAAIDVFDKEIATVARTLPDFDLFDSLPGAGPHLTPRLLAAFGEQRDRFKGADELQKYSGIAPVTERSGKKCWVHWRWQCPTFLRQTFVEWAGQTINKSFWAGAYYRQQRAKGSSYQAAVRALAFKWIRILYRCWQTGTRYDESVYLNALRKRGSSLLRNLELPG

SEQ ID NO: 506406 - protein, 334 aa, unidentified
MQNITLIGIDLGKHSFHIHCQDKSGKALLRKKFTRTKLMQFLATCPPSVVVMEACAGAHFMARCISDFGHETKLISPQFVRPFVKSNKNDFVDAEAICEAASRPSMRFVQPRTETQQAMRALHRVRESLIRDKVKTTNQIHGFLLEFGISLPIGDAVIKQLSLVLAEHEIPEYLSRLLVRLHTHYFYLVEQIAELESELSQSINADDTAQRIMTIPGVGPITASLLSSQLGDGKQFSCSRDFAASTGLVPRQYSTGGKSTLLGISKRGDKNLRRLLVQCARSFIMRLERKHGKLAEWVREQLNKKHSNVVTCALANKLARIAWAITTQKKEYQA

SEQ ID NO: 506407 - protein, 343 aa, unidentified
MQAVTTIGFDIAKSVFQVHGVNAEGQCVIRQQLRRSRVLGFFTKLLPCVVGIEACASSHHWSRQLQALGHTVRLMPPAYVKPYVKRQKNDAADAEAICEGVERPNMRFVPTKSPDQQACLMLHRTRHLFIRQQTAVINAIRAHLAEFGIVAPVGRNGVEELLDVIADPDDGRVPEIARECLEALGNQLQRLKAQILAFDRCINAWHRSNETSRRLDELPGVGPALATALVASVPDPRAFRSGRDFSAWIGLVPKQNSSGGKERLGNITKQGDRYLRSLFCAGALAVIRYAKIHGTRHRPWLAKLLQRRPTKVAAIALANKIARMAWAMMAKGERYREPVALTR

SEQ ID NO: 506408 - protein, 408 aa, unidentified
MRIIGLDVHRTFAEVAIREHGRVRPAGRISTTTAGLQLFARSLTHRDEVVLEATCNTHAIARLLRAHAGRVVVSNPLRTRAIAEAKIKTDKIDAAVLTQLHASGFLPEVWMPDATTEALRRQVSRRAQIVRHRTRLKNQIHAILHRNLLPRCPASDLFGRKGRAWLTTQSLPADERAAVTSLLRALDHADEDLTELDRDLASSILEDAGVRRLMTIPGVDFAVAVGLVAAIGDVTRFRSPQKLVSYFGLNPRVRQSGLQPAHHGRITKQGRAHARGMLVEAAWVAAKTPGPLRAFFVRVRGRRGHQIAAVATARKLAVLTWHLLTKQQDYAWARPSLTEQTRRALELRAGQPAERGRRGRAHAYNLTTLRTRERAIGEQAERAYQTLVTHWRPQRSKRGTGATNAARR

SEQ ID NO: 506409 - protein, 414 aa, unidentified
MSVTDTAAPARGNSAGVDWAKDDYAVCVVDTDGEPVERLTLTYTKTGLRRLLDLLDRHQVDAVGIERPDGPIVDALLPADTTVYVIPPSQVKALRRRYGSAGNKDDRFDAYVLADTVRTDRRRLTPLVLDSEATTGLRKLCRARKDLVAHRIAVANQLRAHLATALPATVELFNEIDSSISRQFLTRFTTQDDLDWLSPKRLAAWLKSVSYSGRTDPTVLHARINAAPHGATGDYGQTLAGITRAYLATLAAVMTQIDTLNQQITDALDQHPDRDIITSLPRSGTIRAARLLAEIGDARGRFPTPAALACLAGVAPSTRESGKVRIVAFRWAVDKQLRDAVCDFAGDSRHANPWAANLYAQARARGHDHPHAVRVLARAWLGIIWKCWTTNTAYDPDHHRALQQLIRQDQLAAA

SEQ ID NO: 506410 - protein, 358 aa, unidentified
MVYGAIDLHMRYSQIRIVDEDGAVVRDQRVVTSRERLTQAFASHGPMRILLETGTESEWVAQALEMAGHEVIVADPNYAPMYGELRRKVKTDRRDAAALAEANRRGWYRRAHRSSPAQRETTQMLRSRRFLVQTRSGAVSLLRSLLRQSGHRLGTGSCETVPTRVSRLAVAPELGETLAPLCRQIATLTTEIHALDARLQTRTATDAIVARLRSVPGIGLIVATTFRAFVDRHERFGHAGQVSAAIGLVPREDSSAERRHRGHITKAGPREVRSMLIQAAWVCWRHPGSATLRGWTDRLAARRGRRIAVVALARRLSRILFALWRDETTFDGRTLAAAEASSRQLAKPRAGGRARSES

SEQ ID NO: 506411 - protein, 453 aa, unidentified
MSLPQEPDFAAFIGVDWADREHAWSLQVAGSTERETGILQHTPEAIEAWAMQWATRFGGRPVAVAVEQSRGALIYALSKFPHLVLYPIHPSTSYDYRKAMFPSGCKNDPQDADLLLDFLTLHRNRQRALQPDTEQIRQLRILVEQRRQLVDDRTAHTNRATGQLKLYFPQVLDWFDELAAPICRDFLERWPTLPHVQAEDPEQLRSFFYQHGSRSPERIESRLRQIREAQPLTQDAAIIVPGVTMVRTMLAVAAALQEGIRKLEKSIEQVTSTHPDYPLFASFPGAGPAMAPRLLAAFGSLRERFASVEEVLSFSGIAPVMEASGKQRWTHFRWACPKFLRQTFHEFAGLSIQQCSWAREFYDSHRRKGKSHHAAVRALAFKWIRILFSCWKSHQPFDENLYLAARAARACPLPAPTSVPPSSSCPPLPSCGKRKDSRLKSAGQILKSLMAEA

SEQ ID NO: 506412 - protein, 342 aa, unidentified
MNLPIRIGMDTSKSVFQLHGVDENEAVVVRRQFRRAEMIRYFERLPPVLVAIESCGSSHHWARLLQSFGHEVKLIPPQYVKAYVKRGKNDAADAEALCEAVTRPSMRFVPVKSKERQAACMLMTVRERLVSVKSQLSNAFRSYAAEFGIVGPAGRQNVTALIKRVLEDDNLPEMARDLFRLQAEEYAAVEARLAKIEAKLMKWHREDDVSRRIATIPGVGPIGSSMLSMKAPPPETFKSGRDFAAWLGLTPKDHSTGGRQRHGGITKAGDSILRSTLIVGATALLRHIRKGRHKPTPWLASLLERKPPKLVAVALANKFARIAWRLMISGGVYNRPVTAAPI

SEQ ID NO: 506413 - protein, 383 aa, unidentified
MKSVCGLDVHKDSVYLCILSEFGELIEKVFGVLTFQLEEMRDLMLHHHVVEVSMESTSVYWIPIWRVLSPHFKLNLANPYFIKQLPGRKSDVKDAQWIAECTMKELIRGSFVPPEIIQQLRQYDRRIFDLNEEIVRKLSKLDAVLQRCNIRLSNYVSNVDSKSYKAVVRAISQGITDPEELVKLIHGRIIKHHGMDVITASLKGVVSLAEIDMISQLRDELDMAEAHKEKCQARMLEICEREFPEELKRLQTIPGIKERAATSLIAEIGTDMNKFETANHLASWSGLKPRNDESNKKIKSRSITHGNVYLRKTIIECAWAASRTKDCFFSRFSFHQTQVRKKNKMKVLVAVARKMLVAVWHVLHDNTNYIDFTTDRKTSRTKG

SEQ ID NO: 506414 - protein, 347 aa, unidentified
MVVIGVDSHKRTHTVVAVDEAGRKLGERTVAATAEGHLELLGWSRSWPDHVWALEDCRNLTRRLEADLLRAGEAVRRVPTKLMAGARRSAREPGKSDPIDALSVARAALREPDLPVARLDGSERELRLLVDYRDVLISDRTGHQSRLRWFLVELGIPEPPARGLTVLVLSGLDLQLVARNEPCARIARNLVARILEMTTAIDDLARQIGELTETLSPNLMGLFGCGPLTAAKLVAETAGIGRFRSRAAFAAPNGTAPIPVWSGNLVRHRLSRGGNRQLNSALHRIAITQLRCPSLGQAYVAKRLAAGDTKTEAIRALRRRLSDEVFRRLQADEAARTRTEGVVRAAA

SEQ ID NO: 506415 - protein, 343 aa, unidentified
MYFIGIDVSMKESALCILDGNGKIVRETKLPTDPAIIAGFITDTGLAIERIGLEAGCTAAWLFAGLQRYGWPVICIDARHAAAALQAGFRNKNDRNDARGIADLMRVNKYRPVWVKSPEAQRQGRLLTARAALQSQLVALENTIRGLLRQEGIGLTGRRTAFEAAVREVIGEDRLLHAAIHPLLETRNAVLCQRAALDRQILLIVRADPVCRLLMTAPGVGAIVSLAFKVAVDDPRRFSRSRNVGAHFGLTPREHSSGELHYQGRISKMGDREVRRLLYVAASRMLRRDAALWCPLKAWAVRLAQRVGIRKARVALARKLAVALHAMWSSGQVFQWQRTEASA

SEQ ID NO: 506416 - protein, 394 aa, unidentified
MIYAGVDIAKTDHVIGAVDERGAEMCRPMPFKNTEAGLERAVAWLEGLAGSPSDVVVGMEATGHYWMACYSFLVARGYSVAVINPMQVKAVRKLKKLDKVKNDRIDAWLIAETLRIGQYDETRLATDEVASLRSLSRYLQSLRGMAAELKTQCVCLMDAHFPEYAGIFSDMFGAGSRAVLSKSPLPFELARRRADSLARDIAEASRRGGKSAGYAAKIKAAARSSIGVRLGQEAASFQVKSLIRQIEFADSECAGVEARLRSLLDEVEPLVLTIPGVSYATGAQIVSEIGDVSRFRNASALVSYAGLNSSVSQSGQFDSGGGPITKHGSPYLRRALWLAANRARQYDPGLRAFYDKKRAEGKPHRVAVTAVARKLCHIVFAVMRDQVPYDPGRE

SEQ ID NO: 506417 - protein, 425 aa, unidentified
MNSKVNHKINQVTERTLVVGIDIAKHKHYATFVDERGRELRKAFPISQTSDGFEEFYQEILNGMNTFKKSDVLVGVEPTGHYWLNLAYFLEDHGIPMVVINPFHVKKSKELDDNLQTKNDKKDALTIARLMKDGRFSHPKLLRDLEADIRSYFSVKEALIKDRSALKNKLHRWIDKYFPEIFKVFSDFGAMVLAVLEARPLPADIVGMTPTELADVCAEVGSMKQRRPKLAAELIKVAQTSIGITVSPSGARREIAYLIRQYRLVEEELKEIEKETEELIVQTADYEYLSSFPGISNGTITGLLAEIGSFTDYESPRQLIKLAGLTLIENSSGKQKGVKKISKRGRKRLRSLLFKAMLPILRNNSAFLKLHQYYTQRPNNPLRKKESMVVLCGKLLKILHALCTKRRRFDGEQMLADLHCLQVAS

SEQ ID NO: 506418 - protein, 356 aa, unidentified
MKTYRLQEHVVKGKEIFVGLEDSKRTWKLAVRSEKMVIHQVSMEAKYPVLIGYLRNKFPECTIHLMYEAGFKGFNLYDELTDDGIDCVVIPPHVVTEPKVNRVKTDKRDARRLAKVLENHDFKDACSVPDKERREDRQVSRTLIAVQKDIIRTRNRIRKLLQFHGIEVPFPDRWGRGEFRALRKLELSEPLRISLDIFLAQLEELWAHQVSLRAALRKLCRKERYHKAFTIARSLPGIGWFTAIRLVLELGEDLSRFTSGKKIASFVGLTSSEYSTGETERKGRITGMGSGFIRATLIENSWTAIRKDPVLLAKFTRVWHASGSKKKAIVAVARVLIVRFRACVMSGTPYVIGVAA

SEQ ID NO: 506419 - protein, 336 aa, unidentified
MSNKLILGVDMAKKDFAAAIWVDDVAEELGAFANDASGRQSLYEQVKVLCEQQDVRQIHLIIEATGGYEAGLVAYAYEQGWLVSMPNPKQVRDWAKGVGYRAKTDRVDARILAHYGQERNPPLRPPLAGEVSELDSLLKRRLDLEQALHKERNRLTEAAYRPGLSSKVQESFQQVIEALEEALAEIERAIQDLQQSYEPFQQNVSRLLDLPGVGPKVVLPLLVKLFQWQNLTSGQGDAKGLTAFIGLDPQLYESGRSVRKRPGISKMGDSEMRRLLYMAALGGVGGKNALKQFYDRLVGRGKAKKVALVAAARKILTWAWTIFSRQIEWDPAFHAN

SEQ ID NO: 506420 - protein, 322 aa, unidentified
MAQETVKFNQVIKCGCGIDVHQQVIVATVRHSDTEEETREYDAYTSSLTSLREWCKSKGVTHIAMESTGIYWKPVFNILEEDFEIILVNARHVKNVPGHKTDKKDSRWISKLLLSGLLKGSFIPPLDIRELRDLVRYKRKLTNQAASEKNRLIKTLEDCNIKLSSVVSDVNDGVSATKIINDIIKGITDADKLMTHLHGRIKASREDIRKALEGRITEHHRFMMRIIKESIEETEKIIQKVEKQIDKAVKKYQIEVDLLQTVPGIGKDSAISIISEMGVDMNQFPNEQHLSSWAGMSPGNNESAGKKKVPEPPMETNISDQH

SEQ ID NO: 506421 - protein, 392 aa, unidentified
MIYVGIDVAKDKHDCFITNSDGEVLFKSFTIPNNREGFETLFQRIESVSDDLTKVKVGLEATGHYSYNLLGFLLDKGLTTFIINPLHTNLYRKSLSLRKTKTDKVDSRTIATMMMSDMNLKSYSDTSYHNEELKSLTRYRFDKVKERAKLKSSVSRLVCILFPELERLVPTLHMASVYALLCEFPSADAVANAHLTRLSNLLFDSSKGRYGKDTAVMFRDAARSSIGSHMPAKSLELKHTIKLIRELTIEIDEIEAAIKRIMDEEIQSPILTIPGISYRMGAMIIAEIGDFSRFDSADKILAYAGMSPSTYQSGQLDNCYSHMEKRGSRYLRYALYNATKYVCHWDKSFGAYLEKKRSEGKHYNVAISHAAKKLVRLIFAMEKSGKAYLPTA

SEQ ID NO: 506422 - protein, 348 aa, unidentified
MRFYTKQHKFYCGIDLHARSMYLCILDQKGKTVLHRNFKTSPEAFLRAIKPFRDDVVVAVECMFVWYWLADLCAQQNIPFVLGHALYMKAIHGGKTKNDKIDSKKIATLLRGGTLPIAYVYPRTMRSTRDLLRRRNHLMRKRSELLAHIQNTNSQYNLPEFQKKLAYKANRNGVPEHFPDPCVQKSVEVDLQLLDFYDRLLTELELYIVRKAKGHNSRTFYLLRSIPGVGKILSLILLYEIHTIDRFPRVQDFVSYCRLVKCPRESGGKKAGSKNSKIGNVHLKWAFSEAACLFLRGNEQAQLYHGRLVSKHGKGKALSILAHKLGRAVYFMLKRKEPFNMDVFFARA

SEQ ID NO: 506423 - protein, 462 aa, unidentified
MSKIGQPKRQSAEVRPFAGMSRVHPHAAGVDIGAHEIVACVPGADNTQLVRTFGTYTIDLHAIADWLLEHGIQIVAMESTGVYWIPLFETLEARGLECCLISATAIKRFPGRKSDVLDCQWIQTLHSYGLLAPSFRPEADLVALRTLLRHRARLIEHRSPHILHMQKALLQMNIQLSQALSDVTGETGQRIIRAIVAGERDPLKLAALRNYRCKKDEAEIAQALTGTWRPEHLFVLQQSLALFDFYTAQLQACDAEIERAYGAIRPDWGDPEPPHDLPARKPHSHSKNAPQDGQVRIHLKRIAGVDLVAVHGLSASLAQTILAEVGTDMSKFPSEKHFCSWLGLAPKNDISGGKVLKSRTLKTHNRAGQAFRLAASAVVRADCAFGAFYRRTKAHLGPAQAIVATAHKIARVVYRMLSLKVEYDPMGADEYDKRFREREIKYLQRKAARLGFSLLPAQATLT

SEQ ID NO: 506424 - protein, 322 aa, unidentified
MKTITNNPGIGIDVGKSELVTCIRHSNGAAEPPVAFANSSMGFRKFVVHLTNQKVQRDTPILLESTGPYHWNIARYLADEGYLSKVVNPLHTKQIARYSIRKRKTDKIDAGQLAFLASQNYGYAFVETKEIARKKALVRHYWKLKSVIGNLSKHERYLKQHRGITRATVTPYLIAKCESLKEKIIQDWENGNNLKYLDSIPGITPFLGAAILAELAPLERFQRTEQIIAFAGLDPSVKQTGGKSGTHGKLSKRGSRVLRTTLYLAAFGAFNRSLRPLYDTYRKRGLRHSETLCIIARKILRIAVALLKKRRMFDPKYLEVIP

SEQ ID NO: 506425 - protein, 392 aa, unidentified
MYIVGIDIGKNHHEASIVSPEGKQIGRSLRFATTHKGADSLMSFIFKNIGNSPCVFGMEATGHYWYPIYSFLKAKGYTIYVINPIQSDSLRKMYIRQTKNDSIDSFLIAEVIRFGQFGTTSMADENILAMRQLCRYRDSVISSRTEIKLRIGTIMEQIFPEYEKQFSSLWVSTSMGILEKYLTPENIENAPIDELFEIIKNKSHNRLTKAKAISIKEAAADTFGIKIAQDAFSFQLKQLIDRMNFHDKQIEALDIEIMKYYEQFDCYLHTIPGIGIIAAATILAEIGDINRFKSSSALVAFADIDPTVRQSGEFSSTHNHMSKRGSPYLRHAIFLAATTCSFHNSPLNAYYKKKRDQGKHHLTATGAVARKLTTVIYAVLRDSKPYEPKKFC

SEQ ID NO: 506426 - protein, 354 aa, unidentified
MNTTQNSTKSKIVKVIGVDLAKDHCDVIGYDENGKICLRLDGCSYAKLREILSNLPQAVVLMEACKGSMFHARSIADLGHEVRLVKGADVKALRNVNHKNDLRDAAYIAKLYFVPGTTYVYIKSQQQQSLQFLQNEYKSLQELRIQAGNQIHAGLEEFGCPVRKSSKFIKTRMVAHLEKHAELIPEDVMASFKRRREIWLNLLQQEEEAKRRLEQVAATDANAKRIMTVPCVGPQTAVGLLVHVGVDFGRFKNSRQFAASLGLVPKQNSTGGNNTLNHITKCGPKRLRSNLVQCAQLVLMYAEKWKGNFGDWVRKMRDSGKKHGVIVCAIAAKLARIIYRLMKDKVDYTPVLSC

SEQ ID NO: 506427 - protein, 356 aa, unidentified
MYYLGIDHHKRFSQVAVMDEKGKIRINSSMVNEKASFESLKEILKEPCKAVVEAGRNWGVMYDLLEELGIETVVAHPLKGRAIAEAKIKFDSIDASTLAHLLRANLIPPVHVPPKEIREQKNLLRHRVWLIRLQTMTENRIHQLIDRNHVKAPKVKNLFGVAGRKLLQALNLSGIDQKLLSDHLQLLDTLQEHIKKAEAWIEKELKDNPLIAVLNTLPGFGKVLSALAALEIDDINGFATKAKFASYCSLIPSTFASGGKLYHGDLIPTGNRWLKYVFIEASWVAIRTSPYCRAYFDRIKRGKGPNVAIVALARRLSEIAYRCLKGERYYVEHPYIPYTRQTPCGCPPKFLASQGL

SEQ ID NO: 506428 - protein, 408 aa, unidentified
MKTLHQRCAGLDVHKQEVVACLRLVTQGRVHRAVRRFPTTTRGLLELAAWLEAARCTIVAMEATGVYWKPVWHILDGSFELVLANAAHIKGVPGRKSDVNDATWIADLLAHGLIRASFVPPQPIQELRDLTRTRKQLSREIVRHTQRLQAVLEEANVKLASVITDILGASGRRILKAMITGETDPSHLAELGSRRLGCSRDTLVEALDGRVRDHHRFLLDQHLKTIEQLEETMAAFDARIEAALAPFRDTVERLTQVPGLSTRAAEVVIAEIGLDMSRFPTAGHLLSWAGLVPALDESAGKRRSTRVTKGAPWLKPVLVQCAWAAANKKNSYFEAQFLRLKGRRGPKKAAVAVAASILTTVYHMLRDGTCYQDLGPNYFARRNPARTARKLADRIRSLGYIVEIRSAA

SEQ ID NO: 506429 - protein, 326 aa, unidentified
MQGKEASEQETKGKSSAGIDVSKSWLDVHVVPAGATLRVANTRDGIRKLKRWLMQFDLGLVVIEATGKWHRDVRRSLHAAGIAVAVVDPFRVRMFAKACGVLAKTDRVDARVLAQFAAVMAPTVRAPAPQAMEELAELVTARASAVAEETALKNQLSAAITPFLKRQLGHRIERIGKDIGALEREILRCIHADPGLARRYDILISVTGFGPVVAMTLIACLAELGTCSRKQISMLAGLAPVADESGERQGVRVVWGGRPNVRRILYLAAITAARCNPDMKAFFDRLTADGKAAKLAIIAVARKLVVLANTLISDNRTWQPHSPKYA

SEQ ID NO: 506430 - protein, 332 aa, unidentified
MGRKLAERTVATTSDGHLQAVTWAAQWPQPQVTFALEDCRHLTRRLEADLLRAGHRVVRVPTRLMATARRSGRQPGKSDPIDALAVAQAALREPDLPVAHLDGPTRQVKLLADYRADLVVERTTLCNRLRWHLHELDPELQVPSRGMRRYKVIDELPARLVGVEGTVAQIARELLARCRELTVRINQLEGDLRNLVRVLAPGLLAIPGCGVLSAATILGETAGATRFRSRHAFARFNGTAPIPVWSGNTVRVRLNRGGNRTVNWALHMIAVTQARGVGPGQAYVERLLGAGKTRTEALRLLRRRLSDVVFRVLLADEHRQAATQPADTPIAA

SEQ ID NO: 506431 - protein, 422 aa, unidentified
MKVFHIKDFAALIAIYWADRKHDICEHNRQTNTQQLSVISSKPKAINDWANNLKVRYKGQLVAVACELKKGPLIYALSKFEHIVLFPINPSTVAKYRKAFSHSGAKDDPSDAVVQLDILTLHMNKLSVITPDSSTVRMLSQLVEYRRKLVQERVDLTNRITTALKNYYPHVLDWFKEKDTRIFCDFITRWPSLKLVKKARKQTLIDFFNKHNARYSEVNEKRIQEIKQAEPLTNDVAIIAPNALLIECLLPQLKQLMHSIESFDSEIKTLYNKHADKFIFESLPGAGPQLAPRLLAAMGSNRERYQSAEEIQKYAGIAPVTERSGKQEWIHWRYSCTKFLRQTFVEWAGQSVRYSFWAKAYYCQQEGKGKPHNTIIRALAFKWIRILFRCWKTRTAYDESRYLQALKSKGSPLLKYAVESNF

SEQ ID NO: 506432 - protein, 471 aa, unidentified
MFGIKDTKLAILQLWKNKKGIYSFPQKYKTSWLVVANQEKGGYPMEAKFSIPKKANLINEKTLIVAVDLGKDSNMGYCRTPNGFEVKPFRFSNNREGFNHFWSTVQAAMARYQLERAVVGFESTGSYGEPLEHFLKDKPEVVLVQVNPMHVKRFKEVTDNSPNKRDEKDPRVIAQLMQMGSFLSCIIPEGAPAQLRELIHAREFQIKLQVQASNRLQDLVHKVFPEFSSVIKNPLCETGRYLLYHYPRPEQITSLGLRELTKIMQQKSRGKLGPWHAKRLWEAARDSVGVKQALASLCLEIRLLLQQIEDIGKTIQQIEVQLPCWLGQVPYSKRLLSIKGVGAVTVAGVIGESGGLERFSGQKALMKLPGLNLYEISSGKHQGERHISKRGRPLLRKLLYFAALNTTRRGGIMYLKYQEMLARGMEKIKAQVAISRKLLRLMYALVRDNKDYIHSCSDPSTPLRTRLRKAA

SEQ ID NO: 506433 - protein, 361 aa, unidentified
MLKKVKITEKKIEEQTIYVGLDVHHKQWNISVVGSEHVHIKGMTVVPDAKALAEYLRRRFSCKAIKLAYEAGFSGFHTQRELEKEGIDAIVTNPADIPTSHKDGRQKTDERDSMKIAISLRANMLEAIYVPSLEDDENQGLFRRRADLVKKHTRIKNQIKSLLKKYGIKPEGKYATAKGWTKTYLKWLEEVAKSHKRLRNQIESMLRELDFISKELNIVEGQLEELSQCERYKDRYDRLLKIPGIGQTVAMAIILELFDINRFESFPRLASYVGIIPTEHSSGDKQRLGSMTKRSRTRLKPLLIESAWIIIRKDEAFKEYYKKLLSRMESKEAVVRCAKKLLRRIYHILQTSKDYQCGLAA

SEQ ID NO: 506434 - protein, 375 aa, unidentified
MSTVRFIGLDVHAETIAVAVAEPGGEVRSVGTIPNRPESIRKLIKKLGATAALRVCYEAGPTGYVIYWQLTGLGVRCEVVAPTLVPVKAGDRVKTDRRDALKLARSYRAGDLTPVWVPDAAHEALRDLVRAREAAKKDQLRARHRLGKFLLRHGRRPATTMTPWTQRHLAWVRQVQFAQPAQEATRLDYLHEVEHAADRLARLERALEDAVRTAPRRMQAVIEGLQALRGIAQVSAVTIVAEVGELSRFPGARRVMGYSGLGAREDSSGSRTRRGGITKTGNAHLRRIAIEAAWAYRHRPAVGPALRQRQAPVSAEVKEIAWKAQHRLHARYRKLLGRGKCQQQVVTAVGRELLGFIWAIGVTVERAHPAGSRAA

SEQ ID NO: 506435 - protein, 415 aa, unidentified
MALKIVYKICCGIDVHKTFVVACIASTNDKGITSYESHRFSTYTSGLKTLLQWLIDRNCKDVCMESTGKYWIPVYNILEKDCSIVLAHPKYVKAIRGKKTDKKDAKWIADLFKHDLVSGSFMPPADIRQLRDLMRYRFKLTCFKSSEKNRLQNCLTVSNIQLGNVVSDTFGKSAQAILDKILENPADTSFDLEPLVFKSLKKELSELRDAIDGYITPEQAGKLKVIKAHYENLESRKAELEELILALAAPYQQELTILQTAPGISSNFTAIGIISEIGTNMEAFPSAKHLCSWAGLTPTNNESAGKKKSVRVSKAGCYIKPLLVQCANAVVKSTKHPEMRNRYLRLKKRRGHKKAIIAIARMLLTALYHMLKNGENYNPELYQKTDLPPVDREITIEQALMLIRNQGYKIKSATT

SEQ ID NO: 506436 - protein, 405 aa, unidentified
MSLDVLHERCCGLDLHKKSVTACRLLPGANGGMVKEVRTFGTMTEELLALGDWLEAGGITHVAMESTGVYWKPIWNLFEERFTLLLVNAAHGKVVPGRKRDVGDAEWLAELLRHGLLSPSFVPDRPARELRELTRYRSRLVRERTAEVNRLQKTLEGANIKLASVVSDVTGVSARAMLGELLAGHDDAAAMAELAMGQLRRKRADLERALTGRVSAHQRFMLAQHLANIDGLDEHIATVGAEIEDRLRPLAVLDAIPGIGRWSAQVVLAEIGTDMSRFPTAGHLASWAGMCPGHDESAGRRRSGKTRKGSPWLRVTLTEAAYAAGRGKDPYWSGRYHRLMARKGKKKTAIAVGRSILELCHQLLTDGRLYDPQHPRPVGIVTSPEARLVRQLEKLGHRVTLEPAA

SEQ ID NO: 506437 - protein, 413 aa, unidentified
MSQIDDLSRCLVTFDQAKSMTVVVELSEASWLVAAMVPGLVRHPLKKLDPDPDALLRLIERWRTEAVKAGQTIDRVALAYEAGRDGFWLARWLQARGIEVHVIHSTSVAVLREHRRAKTDRLDTAMLMRVFVGWLRGERGHCAMVAIPTLEEEDAKRPSRERESLVGERTRIGNRMKSTLARLGIRGFKPHLRKAPERLAALSTPEGCALPANTLEELRRDMARLAVVRGQIDEIERARLERVEHAPAEEGPNAMIRLIARIRGVGVETADMLVQEVLSRHLRDRRAVARYAGLTGSPDESGSKRREKGLAKAGNARVRRGMIQLAWRFLMFQKDSALAHRYRSRTEGPKGVRVTICSLSPALHAISKSPRRIRSLLGHHSLSTTARYLHVATSAVCAAPSTLDRLNLAIPPA

SEQ ID NO: 506438 - protein, 346 aa, unidentified
MGVFAALDVSQDKTAVCVVNDQGTILAEVKVATCPEAISDWLSRWAGRLEKVGMETGPLAVWLWNALVTKGLPIIVLDARHASAALKMMPNKTDRHDARGLAQIVRTGWYKEVRIKSHGAYVIRAMLTARDALVGIRVRLENEIRGLLKTFGVMFGKRVGGFMRRAEEIVAEELAVAPELRPIFQALVAARRAILERIRMLDAQLRVVARKSRVVRLLMTAPGIGPITALSVATAFDDASRFPRSSCVGAYLGLTPKRYESGETSQNGRISKRGDRMTRTCLYEAANALMTRNIGGSRLRDWALALAKRTGPRKAKVALARKLAVMLHAMWRTGTPFEDRITARCL

SEQ ID NO: 506439 - protein, 345 aa, unidentified
MEPMYYIGLDVHKRKISYCVKDSGGKVYSEGSLSATRLDLDVWMKTLPKPWSAAMEATMFTGWIYDHLKPHAAALKVAHPLMLRAIAAAKKKNDRIDASKICDCLRCDFLPESYMAPTAIRERRRTLRYRNLLVRQMVQMKIKISALLMEAGVSYNKQRLHKAGYFRELLATNPDIDEGLCSLLRLCRETVVRLGKTESALVRSLERDSLLVERVERLMTIPAVGPITALTWTLEVGDVQRFSSIKKAVSYCGLCGAEKSSGNTMQRTPLSKQRNKHLQTTLIEAAKMAPRYNPNLAMLYDQEKQKGNANRATLAVARKLVAYLMAVDRGQRNFQIAETRSNIAA

SEQ ID NO: 506440 - protein, 342 aa, unidentified
MLTIGLDVHQTRTSVCVLDVKGNTIREQEIKGDYGAVAETLSKVAEPFQVCYEASTGYGALHERLSPLASKIAVAHPGRLRLIYQSTKKSNRVDARKLASLMHLNQVPLVHVPRQEVRSWRGLIEHRRSLVDQIVGIKNQIRALLRCQGIKGLPGKRMWSKVGLAWLSEVKWPTEMEALRMEILVEQLSDQNKKLDRVTKVLDEIGEKHAGVKLLMTIPGVGARTAEAFVAYVDDPHRFGSGTIGAYFGLVPREDSTGDKRRLGHITREGPSTVRKLLTEAGWRGSRESAKVKEIFDRHLRGDKGRRKLAIVATGHWLCRVMLAMLRSGEAFREKEAVPAKQ

SEQ ID NO: 506441 - protein, 343 aa, unidentified
MTKITTIGLDLAKSVFQVHGADQDGRPVVRKKLRRGQVLGFFAGLPPCLVGLEACASAHYWARELQALGHAVRLIPPQYVKPFVKTNKNDASDAEAICEALIRPTMRFAPLKSAEQQSVLMLHRARELLVRQRTMLINALRGHCGEFGIVVAQGVSKVAELIAMIEDRQDERLPALAHEALGSLVGQLRMVQAQIAGLEKKLTAWHRANEASRRLATIPGVGLITATALVATIGDASQFHSGRQLAAWLGLVPRQYSSGGKERLGRISKRGDGYLRKLLVHGARTVLLWSRRKKETRTAWQEALLARRPTNVVLVAMANKTARVVWALLSRGETFRTEARATA

SEQ ID NO: 506442 - protein, 414 aa, unidentified
MLKIVYRVCCGMDVHKSFVVACIASTNEYGVTTYKSKRFSTFTKDLRRCADWLSENNCKDVCMESTGKYWIPIYNILEPTCNVVLAHPKYVKAIRGKKTDKRDAKWIADIFKHDLVAGSFIPPADIRQLRDLVRYRWKLTNFTTGEKNRAQNCLTVSNFKLDDVFSDVFGKAASAITTRILQDPTEKITDVSGFRTKGMKATNEQVLAAVDGEMCEEQAEKLRIIRSHMDSLELCKLNLESLILATAEKYLPQLNLVVTAPGIQSFAAIGIISEIGVDMSVFPTSKHLCSWAGLTPQNNESAGKKKTTRISRAGAYIKPLLVQCALNAIRAKKFPEVRNRYLALKKRRGHKKAIIAIARMLLTAIYNMLKKNEPYNPELYRKGDRPPAHREVSVEEAIFILQRQGYLVTAPPPT

SEQ ID NO: 506443 - protein, 391 aa, unidentified
MFYLGIDIGKLHHAAALIDPRGDTVALLSRFATSASGFNQLATFVQQHLPPNADLQVGMEATGPYWSALAGWISAHDFHVVVVNPLKPSSLRDYGIRGSKTDRIDAVLIAQTLRWEVSHVSRGSVPRLATELRSLTRLRTQLVKERTRATLRVGSFLSMLFPEFQSLFPKLASPTALAVLQAAPSPAGVIALGEEHLTEILHSASRGKLGLERAKQLLRLAKASVGITSSALAQALGLLLDQIQLLRKQISILEREIAELYNRANVTLDSLPGTGSILAAVCYSEIGSIDRFSRAKQVVAFSGIDPKLRQSGKSAGRVRMSKRGSPYLRHAVYLACRSAVRTDPYFKAIYERQLQHGKPKRKALGAVMNRFIHVLYAIWRDNRAYSPLTPA

SEQ ID NO: 506444 - protein, 387 aa, unidentified
MGKTMSLASPADAVDYDATLIMAVETSNKSWVVAAHVPGFGHIKAKQTIGPTAEALATSIEGYRRRAAASGRVIDRVIVVYEAGYGGFWLARWLTARGIDVHVIQPSSVPVERRKRRAKSDKIDADLLLRTLLAWLRGEPRVCSMVAIPEEAEEDARRPSREREELIRERIMLTNRIGAILATLGIDDYNSLRRDRRVRLEALRTALDHPLPEHARAKIVRIIERLELVLSQIAALESQRDAVLEDEAPEEAKRMIKALVLLRSIGAQSATVLVYEAFIRRFANGKALGCYAGLTGTPFNSGGSEREQGISKAGNRRLRAAMGELAWLWLRYQPESALAKWFRERLAGAKGRLKKVLLVALARKLLIALWRYATDGVIPEGAVLKPA

SEQ ID NO: 506445 - protein, 346 aa, unidentified
MDHFVGIDVSLESCSVCVVGPSGSVVREAKVASEPEALIAFLRGMDVSITGIGLEAGPLSQWLHRHLCAAGLDAVLMETRQVKGALKAMPIKTDRRDALGIAQLIRMGWFRPVHCKSVSAQELRALLGARRTLQKSMISIELSMRGMLRGFGLKLGQITRRRLPERARELAEGNEMLTAMVTAMLRGHAALRSELAKLENRLRRIARADRVCRLMMTVPGVGAVVALQVKAGIDDPARFRSSKMVGPHFGLTPRREQSGERDVVGAISAAGDQNVRTALFQAATVMLYQSQTKSWLKAWGMQVAKRRGMKRAVVAVARRLGVVLHRMWSDGTTFRLTHPAGASAAA

SEQ ID NO: 506446 - protein, 411 aa, unidentified
MELVHPRCAGLDVAKDEVVACVRVPDGHGGRDQEVRTFPTFTSGLEALADWLAAEAVTEVVMEATGQYWKPIWYVLEERGVALMLVNARHVKILPGRKTDVCDAAWLAELLEHGLLRGSFVPPAAIRQLRDLTRYRKRLIQTHSAECQRIQKTLEDAGIKLDSVATSVLGVSGRAMLAALVGGERDPQVLAELARGRLRTKLPQLRQALRGRFSDHHALLVGLSLAHLEHLEGAIAGLDTEVDRVIAPFARARDQLATITGVGKRAAETIIAEIGVDMTVFPTAAHLASWAGRCPGNNLTGGKRRSGKPTKGNRWLGEVLIECAWAAARSRDTYLSAQYWRLARRIGKKKAAVAVGHSILVIAWHLLADGCDYQDLGGDYFVRRDTDRQRQRAVAQLQALGYRVTLEPLAA

SEQ ID NO: 506447 - protein, 353 aa, unidentified
MRKVPNFIVKGKQIFIGLEDSKRTWKLCVRCEGMIIHETSMPAEYDNLQSYLKNRYPGCRIEVMYEAGFGGFWLHDRLESDGIACVVTPAHKVTREKVSSVKTDKIDVRRLARNLEYGDYTRCHVPDRERREDRQISRTLDQIQKDIVVTKNRIRRFLDFHGLNEGFPAGAWTEVAYELLKALQLPVSLQLSLDAYLQLLTELKRIRAALKAQLKALCRKDRYRALVASKAGCVGIGWLSAIRFTLEWGELSRFGSGKQFASFTGLTSREYLTGETIHRGHITGHGNGQVRGWLIQCAWWTLSRDPVLLEKLNAVRNNSGSKKKAIVSVARKLAVSMRALELAEQPYCVGVIE

SEQ ID NO: 506448 - protein, 347 aa, unidentified
MKRIAVDLAKSVYQVAESIHDGRVDRRRRLDPEAFRRYVQEQPEPVEWVMEACGTAHYWGRVAQALGHRVVLLHPRYVRPYRRRNKTDRNDCDAILEAARCAGIHPVPVKSHEQQQVQQLHNLREAWKKTRVQHINLLRGILRELGVAAPSGTQAFLRQACELIERPEVCALRGALQMVLAEISLCEQAMRDCEEQLARWHADDDIVHKLDEVSGIGLLTASALKTAVGKPERFASGRHLSAWLGMTPNEYSSGARRRLGCISCKGNTYVRTLLIHGARAALLAAKRCQTRTPERLTQLQRWSLQTAERIGHNKAAVALANKLVRICWAVWCHERRFSGDWQSARPA

SEQ ID NO: 506449 - protein, 358 aa, unidentified
MIVMKYYTSTTQFNCGIDLHARQMYVCVMDRDGKKLVHTNIRNNDFAYFLKLAEPYRHDLTVCAECMFGWYWLADACQDAQIHFVLAHALYLKAIHGGKNKNDRIDSEKIAHLLRTNLIPPAYVYPAEKRPLRALLRQRILYVWRRSELLARIQSHQLAHNRPTLRQTRPNRDPWEERLLAQEDHPIRQLALQNDLALIRHYDAQITLLEAQLQKLTQATAARDYTLLQTVPGIGEHLGLTLLYEIGDIQRFPTVKDFVSYCRLVKGTVASAGKIKGLRGAKLGNAYLRWAFGEAAVIAKRDHATIGPLAQRLEAKMGGNKFKANTVLAIKLARAVYFMLRNHTVFDPERLVAALTHK

SEQ ID NO: 506450 - protein, 340 aa, unidentified
MALYGGIDLHANNSVVVLLNDQDQVIYQQRLPNHLPTILVPLSLHHGEVEGVVVESTYNWYWLVDGLMEAGYRVHLANPAAIQQYNGLKYTDDHSDARWLAHLLRLGVLPEGYIYPKAERAVRDLLRKRAHLVRQHTANVLSVQNIMARNTGASFSVKRIQELTKQELQSLLAEEAQVLAVPSSLTVLDCLKRQIKTLEQTVHKRLHHTPLYEQLLTVAGIGTILAQTIALETGDIRRFPSVGNSASYCRCVDSNKMSNGKRKGTGNGKNGNAYLAWAYMEAAQFALRFQPAAQRFYQRKLAKSRNNTVLARKAVAHKLSRACYYMMRDLVPFEATKAFG

SEQ ID NO: 506451 - protein, 402 aa, unidentified
MYNAVGIDVSKGKSTVAVLQPAGVIIRKPFNVNHTSSELDELAKYIGSLEGETRVVLECTGRYHEPVVKTLSEAGLFVSAINPHLIKNFGNNSIRKVKSDPADAKKIARYTLDNWIELRQYSSMDNTRTQLKTLNSQFSFFMKQKVAAKANLIALLDNTYPGVNKLFDSPVRDDGSEKWVDYAYSFWHVDCVRKIGLKTFTERYQAFCKKHHYNFQPAKPAELFLASKDLIAVFPKEASYKLLIQQSIQQLNLASSHVEELRSKMNELASTLPEYTTVMGMYGVGKTFGPQLIAEIGDISNFSHREALTAFAGVDPGVDQSGTHNSKSNKASKCGSNRLRKTLFQIMSTLLQTAPEDDKVYQFLVKKRAEGKPYYVYMTAGANKFLRIYYGKVKECIRNLEQ

SEQ ID NO: 506452 - protein, 355 aa, unidentified
MESVKYVGLDGHQATISIAVISAQGRLVMSSVVARQASAIVQFLAGLRGRLQVTLEEGTHSAWLHDLLVRRVAQVVVCNPRRNALLKSGNKSDRIDARKLAELLRAGLLSPVYHGESSTRALQELVRSYQSLTEDTTRVMARLKAVYRSQAIACAGKKLYTARRREEWLAKLQEAGLRRRAERLFEELDLLQKLRRQARQEVMEESKKHAAVKLLRSVPFLGPLRAAVLVARVQTPHRFRSKRQLWSYCGLALETRSSADYRLQDGELVRRRKPVLVRGLNWNHNHDLKNLFKSAATTASVMPGPWRDFYQQRVDSGMAPAMARLTLARKIAAVALVLWKKGVRFDAEHLKQQAA

SEQ ID NO: 506453 - protein, 498 aa, unidentified
MSSQSIPPEERLRHLEGHYADRVTAFRQRLARLDLSRVLIVLLDIGKNVHWATAWTASGLELVRPYRLPTTRTGLTQFIQMTDTLIAEHTPLLVLLGHEPTGVYHEPWGRALMDHYAANLNGQASPLMDYIFFNPYQVKLARQQTHLRHRKSDPRDLAAMLDLMLRGLGQPAFLPSGTDLLIRQEVGFIRAQSRLLGHLERQLRQQLDRLWPGAVVNVNQFRKAHPHLPRPTPIIQTRPLQRDRLRVLLAHCPNPYDLQTMSDREILNLYRKHTGRAGPTLLHTLRSWVNNAVFLPPDVASPLADQLQRLFQQYTATETLIEDGRGRLVPLLSQTPARHIPAIPGLGEMDAAAYFAGVGSIKRFHRAAEVWAFAGYDPVTDGSGDKPDRVGHLSKRGDPAFRDALYQMGYRTAQNYAPVGITFLDAFDRGKCEVEATIHAAHRVNRICFHLMQNDEPFENRSTPQLEAEKARRWPQFKAEKKRRGNRRKRGKRRKRRR

SEQ ID NO: 506454 - protein, 402 aa, unidentified
MNAVGIDVSKGKSMVAIMRPFGEIVSTPFEIKHTTSDIHSLVELINSVEGESRIVMEHTGRYYEVLAHQLSEANLFVSTINPKLIKDFDNDSLRKVKSDKADAVKIARYALDKWQNLKQYSVMDELRNQLKTMNRQFGFYMKHKTAMKNNLIGILDQTYPGVNTYFDSPARSDGSQKWVDFASTYWHVDCVRKMSLNAFIDHYQNWCKRKKYNFSQSKAEEIYGKAKELVPVLPKDAITKLIIKQAVYQLNSASTTVESLRTLMNETASKLPEYPVVMAMKGVGTSLGPQLMAEIGDVSRFTHKSAITAFAGVDPGVNESGSYEQKSVPTSKRGSSDLRKTLFQVMDVLIKTHPQDDPVYQFLDKKRAQGKPYYVYMTAGANKFLRIYYGRVKEYLSSLPES

SEQ ID NO: 506455 - protein, 417 aa, unidentified
MAMKIVRFNCCGMDVHKNLVVATIGITDRKTNITEYFQRSFSTLNSDLYRLKDWLRSHHCSDVCMESTGKYWIPIFNILEDEINVRLTHPKYVKAIKGKKTDKKDSKWICDLFKHDLIKFSFIPPKEIRELREIARYRYKLVCMRSSERNRYQNCMTVSNIGLASVISDPFGKTASNIMKEVMKSNVIDDDKILKLVHKNCKNKDKILDSLHGYHIESDQRFKMEKSLDHMEYLDQLIDSCEVELIKRAYPLRRSFQHITQIKGISALSAILIISEIGIDMSQFESDKQLVSWAGLSPANNESAGKKKSVRISKAGQYLKPLLVQCALSAIKDKTSYFGRKYSNIKKRRGHKKAIIAIARMMLVSIYHMILTGEEFNPCDYESLMNPKANGNQSLTVEKALNFLKRSGIDISSILVN

SEQ ID NO: 506456 - protein, 376 aa, unidentified
MQEFNNIYVGLDVHKNSIAVAVAREGRGNPEYLGEIAHDSASIRKLLKRLSPNGEVLNVCYEAGPTGYGLYRELTSRGHECDVVAPSLIPRKPGERLKTDRRDAQMLARLHRAGELTPVWVPDQEQEAMRDLTRAREDMKAIELKSRQRLGAFLLRHGKVYQGKSRWTQAHWRWLEAVKFDSRVQQIVLQEYIDAVSAAQQRVEDLEKVMREALQSWTLQPVAEGLMALRGVDLVTAMTILAELGDITRFESPRQLMAYLGVVPSEHSSGETRRQGGITRTGNGHVRRVLVESAHSYRYPARKTRHIQRRAEKTPEEIQAIAWEGQKRLCGRYQKLLQAGKLKNVVVTAIARELVGFIWAIACEVAGKPHGSKVLA

SEQ ID NO: 506457 - protein, 404 aa, unidentified
MIFVGIDWATVHHDVCVMDELGEVIDRLRIANSLEGVRRVHSAVASLVEHPQDIVIGIETSLGLMPRAMVSAGYSVYAINPLVSNRYRDRHTISRAKSDRADAEMLANLVRTDRQNHRLFVPDSSLAENIKLLARAHQTLIWNRQRQANQLREALSVFYPAALVAFGNDVASRDAVAVLARASTPAAGRRLTLAQLRSTLVRAGRQRNVDKRALAIQGAFRAEYLQVPTEVALAYGAIVRANATVIAQLTEELSKIEAQLATSFYQHEDSAILESLPGLGTVLAARVLGEFGDDKGRFSDARARRNYAGTSPITRASGTKRVVVARFTRNDRLVDACDRWAFSSLNGSPGARRYYDAKRKMGRTNGQALRALANRWVGILHGCLRHRQQYSEAVAWPAALDIAA

SEQ ID NO: 506458 - protein, 364 aa, unidentified
MKRLVRPVQKVNSATVGLDVHQRLIVYTWLDRHGDEVEQGSISSAPGPLRDLLAKVGHAHVAFEAGGSTFWLYDLLVECLGAKQVHVAQPKKIHAIANSSRKNDMNDSWWLAYLTFEGRLPECHVPTGPLRELRLAVRERFEVVQLITRAKVRLRSHLRQMGRRLEHRRLDTARNRLALQHLCEEEEGVQGQAIGSLLTLLDHLQAELKRWEQRIQNMVVDLPEVRLLQQEIPGVGRTLAAVLVAELGPIERFHSPKALGCYTGLTPADRSSGGNQRHGAMTREGPNLLRWALTQAAMACLRCRSGSGLAAGDWIRAKEKRMGCKGKARVAGARKLAEAIWRLIHWGECFDAARPFGGVARAAS

SEQ ID NO: 506459 - protein, 364 aa, unidentified
MSSLSQRSLIHLGMDVHKDSISIGILRPDDSLDVERIFHDEDSVRRFIARMGEARQLTACYEAGPTGYELQRLLQHLQVPCHVVAPSLIPKAPGDRVKTDRRDCRRLARLHRAGELVAIRVPSPEEEAVRDLCRARGDVVIDLDRARRRLGAFLLRHGRVWRGGSNWSLKHEQWLLGLRFEDAALTSTFAHYRSIVEERRLRLQALESDLLPYCEQDPYVEGVHRLCCYRGVDTIGALTLVSEVCDWRRFAKASSFMGFVGLVASEYSSGDRTHRGHITKAGNVQLRTQLVESAWAYQRGPYVGERIRRAQERCPPATRERAWAAQVRLCGRFRRLAARKNVKSVVAAAVARELAGFLWGEMTA

SEQ ID NO: 506460 - protein, 352 aa, unidentified
MYYVGLDLHKKYITGCALDSQGAVVTTERRLPPVLETVLGWLAPVGQPAAVALEATLYWAWLHDRLTAAGYQVAVAHPQQVKLICHARCKTDPVDARKLADLLRTDLLPAIWIPDAETRARRTLLRGRAWVVRTRTRVKARIQAYLAAENERVPVSDLFSRGGRAWLATVALPPEVRAQVDRLLALVEQLDVQIAGEDRTVRELARATPEAERLQTIPGIGPFGALLLLAEIGTITRFGSSHELAAYAGLVPSTRSSGGKTAHGTVGPAGSAWLKWLFVEAVQTLKRQPGPVRQHYERLLRAKGKQKATVAAARKLCCYVYWMMKEGWSYDDWLRQRPQREVRPIQAVASVA

SEQ ID NO: 506461 - protein, 342 aa, unidentified
MTIVAGFDVHRRQITFDALDTETGELTRGRIDATPGAVERWVACFAARDVQVALEACTGWLFVSRALERAGAIPHLAEPVETSALRGRKRRAKTDREDARWLRTLLGEGRLPESWIPPEHVREWRSRARLRKTLIDERTQWLQRVRATLFHHGIDGVPAELRSAAGREFLQELELSADARERIAIALAMVDSLDGQLRPLEAQLRKLARRQTGCRALMAQFGMGQLTALMTLCELGDVQRLSASRKAVRMAGIDIGVHRSDRRSRVGKLGRQGSPHLRWALYEAAQSATRPRSPDHQDYLALKARGLSHTRASLTIARKLARRSFHILRELGPAALDPITTT

SEQ ID NO: 506462 - protein, 352 aa, unidentified
MTDQKPVVAGVDAHTDEHHVAALDLQGRLLGAAAFPANAAGYRQLIGWLRSQGELVRVGVESTGAYAAGLARALITEGIQVLEVNQPHPHARQRLGKSDTIDAELAARAALSGTATAIPKQTTGVVEAIRQLMVARTGALKARTAALQQLDDLIITAPEHLRSELRQGRTLKARAALCLQLRPDRGRAHEPTQAAKLALRSIARRTRELDREIVTLDRQLEQLIQAAAPRTVSLFAVGTQAASQLLITAGQNIDRLRSEAAFAKICGAAPIPASSGRTTRHRLDYGGDRQANRALYMVAVCRLRYCERTRVYAARRTADGLSRREILRCLKRYIAREIYHTLRADLEALNSA

SEQ ID NO: 506463 - protein, 433 aa, unidentified
MNTLYVGIDVSSKSNVVYLMLPNGDKHSNFSVANSHEGSTLLVKKIYSALTSHSLDTVLIGLEATSVYGDNLVYFLREDATLAPFNRKIHVLNPKQVKKFHDTYNDLPKNDYVDSFVIADCLRFGRINKEVYMGDYRYKALQNLTRARFFAVQNLVKEKQRFMNVLFKKYSTMTQEKVFSDAFSTTALAVYDEFESAEALANMDLHELTDFIIEKGKNRFPDPDAVAKAIQKAARSSYRLPKTVNDSVNQVLSISITSMKALESQIKKFDKAIKALMELLPNVLISIPGIGPVYSAGIMAEIGDINRFDNQASLAKYAGLAWKQHQSGGFEAEVTRLIPSGNRFLKYYLCEAAFSLVRCDKEYRDFVLGEGRPVVAIEAGRTDGWWKYIRGAGTVIGLDRFGESAPASELFKLFGFTVDNVVETVQHVLSQGK

SEQ ID NO: 506464 - protein, 456 aa, unidentified
MSRKRKSSKKTGAPVLHCLNPNAAGVDVGATEIYIAVPPDRDEQPVRHFSTFTEDLQAAAAWLKSCHIETVAMESTGVYWIPLFQILEEQGFTVFLVNARYVKNVPGRKSDVSDCQWLQYLHSVGLLRGSFRPEQAVCTVRSILRHRDSLVQMASSHVQHMQKALDQMNLQLHHVISDITGVTGLTIIEAVLRGERNPHTLAALRDGRIKASEGTIAKSLIGDYRREHLFTLRQSLEAFRHYQKLISACDTEIEQYLEAFESKVDPPEGSTPTSREEQKPKGGESTFNLQSHLHRIFAVDLTKVPGIHVLTTQTLLAEIGPDLSRFANGPAFTSWLGLCPDNRVSGGKVLSVKTRKVKNRAATALRMAAQSLHHSQSYLGHFYRRMRAKLGAPKAITATAHKLARIIYHMVTTGQAYDETICAQNEKHNRWRLELKLRKQARELGFEVVAAKPVAI

SEQ ID NO: 506465 - protein, 401 aa, unidentified
MDMRTIIGLDVSSKTATTSVAVDHQLKYNGKITLDAIGFNSLKAIIESYGQPEVVFEATGQYSRRLEKYLLDQKLQYHLLNPLIAKKRLDDGSRLRKDDIHDAQKLALTEFEKHPEPFQPRLSDPVYRELSDLSRYYDQETEDIKRERNRLHRIIQLVFPSVDEELQLDQPSSLRVLRRFPHPETLRDMSLDEIVQDILALDLKGIGKIRAKALATHLWRARDRSYPAVDAGSLVIKQLQARIDNIFRLSAERDEIISDMVGLARKLPEYEILCSIPAIAENTAVRLIAELGDIRRFEKRSQINSFIGIDLVQIESGNYAAQRRITKHGNPHARKLLYWTVVNMVNSTAKPNHIRDYYTKRQETASRRKPLLVSCMDRLIKTILYLIKTNQLYSYELAGSM

SEQ ID NO: 506466 - protein, 347 aa, unidentified
MKATTIGFDLAKAEFQVHGVDAAGKVVIRKQLRRAQVLPFFAKLSGCTVGMEACASAHHWARKLIELGHTPKLMAPQFVKPYVKANKTDAADAEAICEAVARPNMRFVPVKNVEQQAILAVHRVRSGLVAERTAELNRLRALLAEFGLIAPRGRRALMERLPALIAEQTLPGVARHLFERQSVRIRQLDEQIAAEEAVIMDWHRNNALSRRIDAVAGVGPITATALVASFGEAREFDNGRQLAACVGLVPRQHSSGGKTRLLGISKRGDSYLRMLLIHGARAVIRTLERRAKGGSNPTDQWLIKLLARRNPNVAAVALANKTVRVIWALLAHDRTYDRNWSARQEAA

SEQ ID NO: 506467 - protein, 347 aa, unidentified
MRFYNCQHRHYCGIDLHVKTMYVCILDAAGQVLVHRNVKSNPDAFLETIAPYRDDLVVAAECMFTWYWLADVCAAEGIAFVLGHALAMKAIHGGKAKNDKIDSRKIAGLLRGGLLPQAYVYPAAMRATRDLIRRRLHLVRKRGQLLAHIQNTRAQYNLPAFARRLAYPANREGVPEHFADPSVRKSIDVDLTLVAQYDTLITDLELTIVREAKRHDPDAFHRLRSVPGIGKVLALTILYEIHDITRFDRVQEFASYARLVKCQKQSAGKTLGTSGAKMGNVHLKWAFSEAAVLFLRHTKDGKKLLAAIEKKHGKGKALSILAHKIGRAVFYMLSRGTVFSTEKFLAA

SEQ ID NO: 506468 - protein, 290 aa, unidentified
MHYLYYVGLDVSKETFDASLVAFEDANEMAHRKFANSRKGICSCLHWVEKRHGILLDDVIFCAEDMGSYISEMAVCASDRTLTFNFSLISPLVIKYSMGIARGKTDRVDARRIAEYAITHYRKIALYLPAEKELCQLRTWLILRAHLAKQRVAKLVLLEKLDYKEKFADVSIQRSMLQEEIAYAETHMKTIEREMKELIAADSNICRNYKLLTSIKGVGPITAIVMLCSTLNFTKITDHRKFACYCGLAPFEHSSGTSVRGGCHTSSMANRDIKVQLNRSALIPSGVIRN

SEQ ID NO: 506469 - protein, 443 aa, unidentified
MSRKKRTHLRGERGQAFADKIRGIPLDRILCVSLDIHKYFHVVMIHNALGEMVTPTFEIDIFQTGFDQLCRAVDEALARTHAQVVLLGMEPSSHYFENLARHLLARPQPVTLINSFAVKKNRDQQMMQREKDDEIDTAAIGDLLRRGEGTPYQPASGVYLELQQLDRVRLGKVKIRTMLQNQILGHLDRIFPGLVLIGEAARTRYTPLFTTDFWKCQTLQHLIRVCPDPRQLVGMSAQDLIQAFHAQHYRLGRLAAAKLIAYAKQVLLPDAALITIRCELLKHDLALLEEVERHIAQLEERLCALLTQTPYQVLTKLKGLTAVQVASLAAAMGDPAHYKYGAQVFRRAGLVAGRDDSGVRQRKGRGKHVTKVGDVYLRRALLSALSTLILHQPTLRAYYTKLKKSKTAGVARVATARRAMGILWATLRDQRPATLILKRGATL

SEQ ID NO: 506470 - protein, 509 aa, unidentified
MVLPPNQDPSFSHRASKPRPTAKHGDSKRSSPKSKKSSRSPKRSLKSRRGAPQPAPSLPAELQQVNVNAAGIDVGATQHFVCVPEGRDPQPVRSFGAFTADLEAIADWLIQCGVTTVAMEATGVYWIPLFELLERRGLEVKLVEPSRLKHVPGRKSDVLDCQWIQQLHTFGLLSGSFRPDDKICVLRSYVRQRQTLIRSAARCVQHMQKALTQMNIKLQHVISDIVGATGMAILEAILAGERDPFKLAALRHPMCKNDEAAIAAALQGNWREDHLFALKQAVDTYHFFREKLREVDEQIEAHLKTFEDKSQGEPLPAGSGKRAPNEPVFNARKYLYTMTGVDLTEVDGLQASTVLTVISEIGFDMSPWPTQKHFASWLTLCPGVNKSGGRSQSKKNSRTRPSSNRAAAALRMAASSLFHCNCALGAYARRMRARLGAPKAITATAHKLAIIIYNIFKYGKRYVDQGVEHYEEQYRAAMIRNLKRRAKQLGCTIVPASDVPALQDAAPLG

SEQ ID NO: 506471 - protein, 357 aa, unidentified
MRIIGVDLHTRQQTIAMWDSETRELVEKTLKHDGDEVREFYSALPGQVLVGIEATGSMHWFLELLEKLGIDHQVGHPSEIRKAETRKQKHDRRDAALLLKLQIENRFPSIWMPSTELRDLRTLLMHRHQWVRMRTRVQNTLQAMAIGRGLRRGKALWSQTGQHAIESLPLPPHTAYRRTALQDLYQELHAQIDELDKRVGDQALQRPGARLLMSHPGVGPVTALATDVFLGDPARFADGKAVVSYVGMIPSEYSSGGQQRLGGLSKQGNPLLRFLWCEAAAHAVRRDPDLQRFYRRKLTQKGLGKARVAAARKLGIRLWIMLRDQIDYQEFCRRGQMRQKNGGACAGMPEVGHGPAI

SEQ ID NO: 506472 - protein, 423 aa, unidentified
MIARSNFTNPRDLIATYNHKNFVQSEVPVSFVNLTQVRAIRLIDGRRPLGLDLATRKFQVCYQDDQGALINQCITKGELIDLLERFKDTPLLIGIEGCSGASYWTRFAEQLGHQVKVMPGSMTQRFTKRRNKDDVIDAVAIYLALFLPVIPECQTRTEEHLALSALIGEKETLLKTLNTQINKTRSLMIETGEYELTIRDTNSALGAINTYFANHQDDQDAHHYTIIAMGKLKETIIFLAKQIDEIDIVCSQYMQNNIAARDLLTVPGIGPSTAVAIMVSAPDIARFESARQFQAYFGLTTRHSGSGGKIVQSKMALNGNPAIKRMLYQGALSLISNDYGQQSARSTWIEEVVFKNPRSFKKAPIKIAGKMIRTCFGVLKSGKPYDPMINGSLGGSKKKIHFKSNANYKKPKSRCTAAAGILR

SEQ ID NO: 506473 - protein, 345 aa, unidentified
MSELYSGRQFVGIDLHRRRSVIVRMTAEGDPLECVRISNDVEMLSTVMARAGESPEVVLEATYGWYWAVDALRDLGAQVHLAHPLGVKAFEYRRVKNDERDARDLADLLRMGRLPEAWIAPPATRELRELVRHRAKLVGIRSNCKAQIHAVLAKCGIQVSMTDLFGLAGTELLDRLELPRPYAARIASLRRIIGALDFEIDAFAGQVRGRLARDPGFLAVQAIPGVGPILGAVFVAEVGDVHRFARAEELTCWAGLTPKHHESDKHVHRGRITKQGSRLVRWAAIESVQILPKTSVVGRIRDRVGDRRGRNIGVVAAARVQLEFVFYALRDHRVRALQGTRPVAA

SEQ ID NO: 506474 - protein, 357 aa, unidentified
MSIIGGLDIHRKQLTFDWVDEQNGKWERGRITPGDREHLADWLARFDPDTAGPVAFAMEGCTGWRYIAEEMDKAGVIAHLAEPADTSALRGPKRRAKTDKADAKLLRELLAAGRLPECYIPPSQVLEWRALLELYQDLRIQHTGWAQRIQSVCFHQGTTAPGQAGIVRGDRARLQAIVDEQLSIVGRLQVNTALAIMDMLADHLDRLRRRLLSTARGVNGARALMHDIYGVGPMSSLALCAWLGGADRFSSSRKAVRFVGLDITVHSSDGKRSPGRLSRQGPEVLRWLLFEAAKTSARACAPGYGYYTQVKDRYDANRACLSQARRIVRHATHILTGLGDDAFTIVAQPAAPTTIAR

SEQ ID NO: 506475 - protein, 407 aa, unidentified
MAGQEFEWFVGIDWASTEHEVRLLDARGTDRGRRSVPHTGRALGELGDWLAEVSAGHPERVAVAIELVRGAIVEALLARGFAVFGINPKQLDRFRDRYTVAGAKDDRLDAFVLADTLRTDRARYRALQLDDPQIIRLRGVVEAHEELTQELRRLCNRLRAQLERFYPQVLRLCPAADEPWVWALLRLAPTPAHAGRLRGERVDRLLRGHRIRRLERAEVMTALREKALPVAPGTVEAASAQVALLLARLRLAHAQHAQCEQQIDAALEDLAGDDGESDAALLRSLPGVGRAVAARLLVDAPALLAARDYGALRSQSGIAPVTRRSGKRRVVTMRRACSGRLRQAMYHWAFGSMQRDPRSRAIYAAARTRGQTHGRALRGLADRLLRILIAMLKTRTPYDPDRIRRAA

SEQ ID NO: 506476 - protein, 353 aa, unidentified
MTNTQYIGMDVHKESISIAVRNDVGKIVMECVIETKANVILDFIHGLRGELQVTFEEGTWATWLYDLLKPQVTKLVVCDPRKNSRQGNKNDRIDARELSDRLYMNKLSSVYHGGAGIRTLKELARSYLTISKDLARVMTRVKAIYRSWGIPCAGKQVYAPRHRAEWLAKITEVGVFRRAEFYYQQLDALRSLRHQVRRELLAESKTHKASKLLCQIPSIGPIRAALLIALIQTPHRFRTKRPLWKYSGFAIETHSSADYRKVQGQLERTKKQVSVRGLNRDCNHDLKNLLKSAATIASVKPGPFQEFYAALVAKGMRPEMARLTLARKIATIVWIVWKKGVSFDAQYLKPQTA

SEQ ID NO: 506477 - protein, 421 aa, unidentified
MGVDWAESFHDVALGRPGEGVIAQFRIDHGPAGVARLVARCLELEPDPAEVRVVLETRHGLLVEALVDAGFTVLPVNPGLVARRRGPAKKKDDAEDARICCLLALDGYLELRRLIPHGQIGTELRAIARDDERAARDERRIGSRLRADLLAVFPAAIDIADGDLGAAVFLKLLARWPSADALAAASHDELENFARQARHGWPGKFADKVIAALAEPQLAVRPELARAKAGTITLAAGQLLLLRAQRKTWEQRMGELLLGGTRTGRDKTVKDPDPGKAFPGGEIYLSMPGLGDRLAARIAGEIGEHFEQFTTPNALQCYGGQAPVTRRSGRSEFTIARRLAYNRHLGTAISQWAFCSLQQSAWAREFYDAKIAAGNNHHTALRKLGNRWLEVLWHCLDKRVPYDEATHTANRQNARALKPAA

SEQ ID NO: 506478 - protein, 446 aa, unidentified
MQEVIPVKRKTPYCLTNVKDIAVEPLVAAHPGQAVIVGIDVAKNELVACVYWSNRSFERPWCVESPGQIPLLLQQLQRLSAQAPVTLAMESSGTYGDVLRQAATDAKLPLHRVSAKAVKDHAETFDGVPSQHDGKDAAVIAELCWLGKSVPWPWQDRCTDDQALRYWVRRLDMAQRIKQMYCGRLESLLARHWPEVSGLLKLTSPTLQGALRRWGDPRQLAADAQAPKVLARLGGYYLKPQKIAQVMAAAGSTLGVRMNPWQVRELRQTAHALLKKRRLIARCKRELRRLTKNHPVIQAQTPALGLTTACVLWMCLGDVANYPSAAAYRKAMGLNLKEHSSGKFKGKLSLSKRGQRLARKWLYFSALRWMRDARVRPWVKNKRARDGGKGSRAMVGVMRRLALAAWHIAKHGEAFDPARLFPSVKKISAQTHCGRQAPVTPGPGPA

SEQ ID NO: 506479 - protein, 342 aa, unidentified
MTLFQSFVGVDIASASLMACVGTTPWKLTVKPVKFENDEEGFVSFLGWLREHHLSPEHTVVCMEATGVYGEGLAYFLHASGYKVAVEPPLNIQRKFPVNASKTDELDCQYIAEYACRYVDKLSFWQPRAEILEQVQVLLTTRQHFSVQLTGHKNALHAVNRKKVSSELAKQVHHNMVEQIAKSIKAIDKEIRRLIESDPTFKQTLLLLLSVPGIGLQLAAHLLIAMQKTLDPKVLAAFIGICPIQHESGSSVFATPTSRHYGPSVLRKLLYLGACSVRNHKKQFQQYFFRKVAEGKHKKLVLNNIQNKILKIACAVVRSNQPYISNYVSVNPLVFQKNLTVS

SEQ ID NO: 506480 - protein, 343 aa, unidentified
MASTCNTYIGLDVHKNFIFGCVKDKEGHTLLERKFKSEPHSMDLFLANVPQDSKIALESSSCWQYSFDYLVDKGFDVAISNPSKTRLIGESKKKTDMEDARKLADLHRMNMLPLSYAAPMHVRMQRQITRHRLSIVNLRTEVKNKIHAILRRHGISTELEDAFTQKGLEFLESLDLPMCDRFELDQYIGVLRHLSKKIDETQERIEELANDEPAARLIMTHPGVSHYSSLMITAEIGDVQRFSSAKKLVSFAGLNPSVYQSGDKCYTGHISKQGSRNLRWILIQVANIAVQKDRRLKSYYMKKRLAKGHNKAIVAAARKILINLYVMLKHNIAFHALRVNKAT

SEQ ID NO: 506481 - protein, 355 aa, unidentified
MKSVKYIGLDVHQSTISVAVLDGEGKLVMQSVVATHASAMLDFIHGLRGTLHVTFEEGTHSAWLYDLLVRRVDRLVVCNPRKNALLKGGSKSDALDARKLAELLRAGMLSAVYHGETGTATVKQLGQSYAALTEDTTRVMSRLKALYRGQAIGASGKKAYGRRHRGEWLAQLQGAGLHRRAERLYEQFDALQGLRREARRELMLECRKHAAAKLLRTVPYLGPIRAALLIGRVQTPYRFRTKRQFWAYCGLGLETRTSSDYQFVEGQLQRKKKPVWIRGLNLNHNHDLKNVFKSAATTAGARPGPFGTFYQGLLAKGMAPAMARLTLARKIAAITLSVWKKGEAFDAEQLKPQAA

SEQ ID NO: 506482 - protein, 341 aa, unidentified
MKPEMSVLGIDIAQRVFHAVGMDERGRIVWRKRLSRHDLMPLLAKLPPVRIGMEACGGAHDGARRFREHGHEVKRMAPQFVKPYGKANKNDSRDAEASAEAVTRPTRRFVPIKDVDQQDIQALHRVRERLMGERTALVHAVHGLLHEDGMVMPKGGSKCRQAVVGKRESEKAKLTPLSQEMLWQVVEEVAALEAQLASSQEKLATLAQTHPACQRLMTIPGIGPCTATALVAAVRDASAFKNGRQCAAWLGLVPRQHATGGKERWLGISTRGDSSLRQLLIPGARATLRWVGRKTDRRSHWMRQLVERRGTNRTAVAVANKNARIVWARLTSHQDYQPATS

SEQ ID NO: 506483 - protein, 421 aa, unidentified
MSYNVAGIDIHKKVLMVVVASVAEEVADATGAALEFECRKFGTGASERDHLVAWLQSRQVQEVVMESTAQYWKPVWLDLEPHFPKLHLAQAQSNRAPKGRKNDFGDSKRLARRLLAGELMLSYVPEPEQRTWRLMTRGRLQLVRVRVGVQNKVEALLEEMRIKLSSVISDLLGVSGRRILQALAEGETDAVKLAALGDHRLKCTKGQLADALKGSPEPAHLVILKLHLEHVRLLDEHIDRLSQMSATALTKHRDAVVRVAMVPGFGAESAQQMIAEVGWDAGTFCSADAFSSWFGGCPGRNESAEQNQNSRCPKGNRYVRRILTEAAQAAVKKKGCYFQKVFRRFMPKLGYKGAIWAVAHRLGRLVWKILHNGVTYIEHGEETNPKARKRRAQKLAQALRRLGYSVTITDVSPVAVAESRA

SEQ ID NO: 506484 - protein, 360 aa, unidentified
MKLDAALDTSATTTAICIVNSRDGAIVLETTVPTDPDAIARVLTPYLSRLHLVGHEATSWSAWLHRELESRGVPMVLLETHHTARMLEAQRNKTDKNDARGLAQLVRSGWFKPVHAKSDESNRLKLLLAHRRTLKRKLMDIENEIRQSLKMFGLMAGKRVQRASFPSRIRALVAGDPLLEGSTECMLRCWMVLWGEYRKLHALLVKLAGSDELLRRLCGIPGVGPVTAVTFKAAIDDPRRFTKSKTVGAHFGLTPKRLQSGTSVDVDGHISRRGDGEVRTALYEAASAMMTRSKQRSALKAWGTQLAAKRGHKRAVVAVARKLAVVMHRMWIDGTTFRVSAADRDGERRIGASAAVAGAA

SEQ ID NO: 506485 - protein, 339 aa, unidentified
MKYTPVGVDIAKHLIQVHLINEHTGEVVDKQVSRQGFMTFFSNREPCLIGMEACGGSQYWARELTKLGHKVRLMQGRFVKAFVMGNKNDMMDARAIWMAVQQPGRKIAVKTEEQQSVLVLQRSRRQLVKFRTAQINALHGTLLEFGETIHKGRAAMDRELPAALERLKTKLPPYLTNVLEDQYSRLIELGTLIDGLEKQLISVARQNETCKRLMEIPGVGPLIATAAVATMGEASAFKSGREFAAYVGLVPKQTGSGGKVRLLGISKRGDTYLRTLFIHGARAASLCAKEPGPWITELKKRRPTGVAIVAIANKLARTLWAIAAHGREYDKNHVSIRPY

SEQ ID NO: 506486 - protein, 345 aa, unidentified
MDQISRIGMDTSKHIFQLHGVNAAEAPVLRKKLRRKDMMAFFAKLPPTVVAIEACGASHHCARELQSLGHSVKLIAPQLVKPYVKRGKNDAADAEALCEAMSRPTMRFVPVKTAEQQAALMLIGVRDRMIRNRTQLSNAVRGHAAEFGLTAAKGMAHLVPLLERIEADESLPALARELFAIQAKEYAQLQARIGEIDVRLTTWHRADECSQRLAKIPGVGPIGAVLLRMKTPKPELFQSGRQFAARIGLTPKDHSTAGKVRLGVITRAGDEGLRSVLVVGATAVIQHAQRSGKASPWLVELLRRKSPKLAAVALANKTARIAWKMMVTGETYIAKSAPAVRAGTV

SEQ ID NO: 506487 - protein, 347 aa, unidentified
MRILALDLGQSKSVACVVETGRPEEDFETVRTEASALRALLTRWRPDRVTMEIGPVAGWVHDLAVAYASEVEVANPNDVAWSWRRIKKKTDREDAKKLARLSLLGQVKKVYMPSASVRQRRSLIGYRKSLVERVTAMKNHLRSILVRQGITWRGGKSGWTAACRVELMKQAKEWADCGAEELWRGELYQELVCLAQAEAAVQAVEKKLRALNGPDERVRLLRTVDGVGERLAEALVAAIDDPHRFGSGRQVASYFGLTPRQYQSGNSDRQGRISGQGNKLVRSLLVEVAWLGLRHNVWMREIYERVNRGSPARKKIAIVAVARRLAVLCWAMLRDGCPWRAPVRQVA

SEQ ID NO: 506488 - protein, 312 aa, unidentified
MDAIVVGIDVSKDRLDVAVRPTGESFVSKRTAAGIADLVARLKVRSPTLVAIEATGGFEAVVAAGLAGAGLPVVVVNPAQVRAFARALGKRAKTDPIDAVVIAHFAEATKPQLRQIPDEMTRLLAELVARRRQIVEMIAAEGQRPHRVSDHRLTRSIGRLRKALEQELDELDRLIDDHMRGSAAWVETEKLLASVPGVGKTIARTLIAELPELGSLDRRQIAALVGLAPWTRQSGQWRGKSFIGGGRKSVRSSLFVGAMVAARYNPQLKRFRDRLVAAGKPKLLALVAVARKLITILNAILRDRRPWQPLPA

SEQ ID NO: 506489 - protein, 346 aa, unidentified
MKYYAGLDVSVKETSVCIVDETGAVCHEIKVASYPEELVRALKNPAWQFVRIGLEAGPLSQWLYSGLVEAGLPAICIETRHAKAFLKAQVNKTDRNDARGIAQMMRVSLFRPVHVKTLTSQQRRALLTARKLLQEKAIAIENDIRGLLRNFGLKVGVVGTIGFDSRICELVEGMPDLAEIMAPLLAARQKLREEFSRLHRKVLEIVRDDTVCNRLMTIPGVGPVTSLAFISAIDVPARFRNSRAVGPALGLTPVLNQSGESRRVGRISLCGDGTMRTLLYEAAQVMLTRTKKWSWLKAWAMNVAKRRGLRKANVALARRLAVIMHRMWSDGTEFRWTRERGIPAAA

SEQ ID NO: 506490 - protein, 407 aa, unidentified
MEVLHPRCAGLDVHKDTVVACVRVIQGRKIRRETRTFGTTTSELLRLLEWLQKERVTQVAMEATGVYWKPVWHVLESSCALVLANARQIKRVPGRKSDVTDAEWIADLAAHGLIQGSFVPPAPIQALRDLTRTRKQLTRQRTQHIQRLQKVLEDANIKLDSVVSDLLGQSGRDMLEALVSGESDPRRIARLAHPRLRASQAELEEALRGRVTDHHRFLIQLHLGQIDAADASIRTLERRLEEKLAPFRAHYERLQSIPGVSETVAAVILAEVGPDLSAFPQAHNLLAWAGLSPGLDQSGPKQKNTRTRRQKWLKTTLVQAAWAAVKTKDSYFRARYHRLKARRGSKKAIVAVAASMLTAAYHMIKNGTQYRELGAEYFQGRDNQLLARQLVRRLRRIGYEVEFRAAA

SEQ ID NO: 506491 - protein, 405 aa, unidentified
MQVVHHRCCGLDVHKKTVVACVLTAKGKQTRTFGTTTRELLELADWLAEARISHVAMESTGVYWMPLYNLLEGQGLELLVVNARHIKAVPGRKTDVKDAEWIADLLRHGLLRGSFIPDRSQRELRELVRYRRTVIDQRGDVVRRIHKLLEGANVKLSDVATDILGASGRAMLHALVAGSQDPAELAGLARGSLKRKRLQLELALEGSFGAHQRYLLQHQLGLVEYLEQEIAQLSVEVEDRMRPFEAAIGMIDGITGLGRRSAEAILAEIGQDMSRFPTDKHISSWAKICPGNNESAGKRRSGAAGQGNPWLSSALVEAAWAAVRQRESYFAALYQRIAARRGKKRAIVAVAHSLLIVIYHMLQDGTVYQDLGANHFDRLNREAVARRSVRRLTKLGYTVTIHEAA

SEQ ID NO: 506492 - protein, 347 aa, unidentified
MVYVGIDLHRSRSQIAVLDQQGGELLSRRIANDREIFLELLHGLGDDVQVALEATYGWEWLADLLEDAGVELHLAHPLRTKAIAAARVKTDAVDARTLAHLLRTDLLPEAYIAPRELRDLRDLLRHRVALTRIRSALKQRVGAILAKQGIARPYSNLFGPGGSRFLTELELRQGPRRRLDSLLALIAAFDREIDTTTKEIEQRASEDPYVDVLCQIRGVGRYIAMLVIAEVGDITRFPSARHLCAWAGLTPTVRSSNGKARLGHISGQGSPALRWALVEAAQHAPTGGGPLRAAYERIAKRRGKQVAKVAVARKILTLCYYGLRDGEIRCLAPRAKARTNRTTVVTR

SEQ ID NO: 506493 - protein, 372 aa, unidentified
MGHHTEVFVGIDTSKSRNAIAIADGGRGGEVRYLGEFSATEAAIRKLVAKLAAKCSHLTFCYEAGPTGYGLYRLLKSLGHDCLVVAPSLVPKKAGDRVKTNRRDAVSLAKLLRAGELTAVWVPDERHEAMRDLSRARQAVKKDLQGKRQQISSLMLRLGRIYPGKTTWGRAHMRWLMEQKFEHREQRIAFEELLEGIRQESERMERLEDAIREVVPEWSLAEVVAALQAMRGIDLIAAVGVLAEIGDLSRFQNPRELMGYLGLVPTEDSTGDKVKRGGITKAGNGRARRILVEAAWSYRYPPRVSRDKQPKVEAAPRRAREIAWKAQTRLCGRFRSLERKGKRRTVIVTAIARELSAFIWAINRELLPPRQA

SEQ ID NO: 506494 - protein, 376 aa, unidentified
MKHDSTLYVGLDVHKDSITVAYAIGSGEVELLGKIGTTQADVERLCKRLQSKARCVSIVYEAGPCGYGLYRQLVQKEFQCMVCAPSLIPRKPGEHIKTDRRDAIKLVRSLRAGDLSAVYVPSIDDEAFRDLARAWVIAKDDLKRARQRVKAFLLSHGVRYTGSADWGPAHRRWLSAYSFDSAWQQFAFEELRRAIEDRLAQCDRLESALREAVVNWRFYPAVLGLQAMRGVQFTTAVGMLAELGDLSRFVHPRQLMAWLGVTPSEHSSGGKRRQGSITKSGNSYARKLLVEAAWSYRHPARVSPDIQRRHEGLPKPIVDRAWDAQVRLCRRYRKLVARGKQKNIAVVAVARELSGFIWDICRLSLSLAIPRETQMP

SEQ ID NO: 506495 - protein, 386 aa, unidentified
MTQHSHIAASHQLDYERTLILAVEVSGRSWVVAAQVPGLRQKGVKQQLAPRADALMAAVEGYKRRAAAAGMAVERVIVAYESGGSGFWLARWLQQRGVEVYVMQPSSVPVDRRMRRAKSDRIDADMLLRTLLAWLRGEPRVCSMVPVPDEATEDARRPIREREELIRARVALVNRIEAVLTVLGAGECNPLRRDCRERLGQLRTALDQPLPPHARAQIERLLDRLDLIRQQVADLEAQRDRAVEGETVGQAERMIQHLARVRGIGVQTATVLVHEAFVRRFRNARALGSYAGLTGTPYGSGGTHREQGISKDGNRRLRATLVELAWMWLRYQPGCALSRWFHDRLGGSRGRLRKVMIVALARKLLIALWRYLQDGAVPQGMELKPA

SEQ ID NO: 506496 - protein, 337 aa, unidentified
MNATTIGIDLAKSVFQVHGVDAAGGVVIRKKLRRAEVLRFFEVLPACLIGMEACATAHYWARELSALGHDVRLMPPSYVKAYLRRQKNDAADAEAICEAVTRPSMRFVPIKSAERQSVLSLHRTRELLVRQRTMLINAIRGHCAEFGIIAPQGARRIAELVAQVRQSTLPDLVRTSLAMLARQLDVLASQIVVLDRHLMAWHRQDAASQRLSTIPGIGVITATALSATVVDPSIFRSGREFAAFLGLVPRQNSSGGKERLGRISKMGDRYLRKLLVVGATSVVRRARTGTVGPAPWLRSLLERKPARVVTVAMANKTARIAWAVLARNEVYRAPAMV

SEQ ID NO: 506497 - protein, 321 aa, unidentified
MAVVMIGVDPHKGSHTAVAISPAEEPLGELRVRASAGQAQRLLDWAAAWPQRTWAIEGARGLGHLLAQQLLAAGEQVLDVQPKLGARVRLLATGDTNKNDPGDARSAAIAALRSPARRPVQQDDHAAVLKVWSKRHRDLGRMRTQVVCRLHAVLCDLVPGGVSKAITAGQAARLLGSAQLRDTKKKLDVAVRAPGTTLTQVFGVGPVVAATVIGAVAEVFRFPDRHHFAACNGTAPIEVSSGPRKIYRLSRRGNRRLNHVIHMAAVTQIRYRHTDGRAYYDRKLAEGKTPKEALRALKRRVSDAIFAQLQADARRASADPR

SEQ ID NO: 506498 - protein, 417 aa, unidentified
MKPERNASEEKRYIGMDVHKHYITVGGMNAKQEIVMRPRDVEMERFKTWAEGNLRKTDEVVLEATTNTWDVYDTIVPLVGRVVVAHAAEVKQIANSRVKTDNQDVIRLVRLLIADIVPEVWVPPVEVRQLRALISYRWRLVKMSTAIQNRMHSLLHRHNIKAPQGKIDTGENREWWQKLELSELETLRLKQEIKTLRLVRENILEVERELGRMSNSERWGDQAVYLMQIPGVGIIVTMTILSAIGDIRRFESPKKLVGYAGLGAGVHDSGQTHRGKGITKFGRKELRWALVEAAWQAIRSNPSWRAEYDAMCKRKHQNQAIVAIARKLLVTLWYLLNNKDAYNRSSDEDLAYKMLTWAWHIDKTALNGMTNQQFAKYGLLRLGKGDHLTRIVRGGLPRRIASKEEVLALKPDLRTPQ

SEQ ID NO: 506499 - protein, 345 aa, unidentified
MTNHPLNTTAESVHRLFAGVDVGADELVLVIRKNGKPFDPQKFANTRSDRTRLVNKLIKLSGIKVCLEATGIYHFDLAIALHDAGIPVMVVNPKASHNFAKVLMRNSKTDAVDANTLAEYVERMDFVAWTRPSNQSLALRGYARRIDALTGQKAAAKNHLHALSATEETPKALLRDAKLAISQLEKRIDTLADEAIDLIDQHTELQRIFELLTGIKGIAQTSAIALMGELLLLPPNLSHREWVKFAGLDPKAFESGKSVHKKMRLSKAGNRHIRSALYMPALSAKQHDPHVRAYFQHLIDNGKKPLQAVCAVMRKLLHAIHGMLKHDQPFDNTRFYAIPESIIAE

SEQ ID NO: 506500 - protein, 429 aa, unidentified
MNCTQNKKIEQVKETTMIVGIDVGSEKHYFRAFNWRGIELTRKPVAFSNSMEGFNSFYNTIVELMQKSELEEALVGIEPTGHYWFDLGQFMGEKDIKFVMVNPHHVHKTKELDDNSPSKNDRKDPRVIAGLVRDGRYFYSYMPTGAYAELRNSSNRRFVLVEEQTRAKNRLQKWIAVYFPEYKGIYTHIDAKGGMLVLKKAPTPEEIVRLGVEGIIKIWKDAKLRGNGHKKAMLILAAAMRSIGLKAGLTEARMEIQDLIEDYELQTKRLERVNDLIKGLCQQVRYADKLLEIKGIGITTVAGFIAEVGDITRFDSTKELQKLAGLELVADSSGKHNGKTKISKRGRKRLRYLLFEAAISVVGKNEEFKEIHRYYTTREKNPLKKMQSLIVVACKLIRVFHAILTKGIRYDASKMLKDIRHPGEQLKAA

SEQ ID NO: 506501 - protein, 346 aa, unidentified
MENSTTIAVDLAKAFFQVSVSTAPGRVSERKRLSRAKFVSFLMQQPPAEIVMEACGSAHFWARTARDLGHRPVLLPAHYTAKYVLRNKHDRADADAILEARRREAIQAVPIKTVEQQTIAFLHRMRSGWIQTRTARINAMRGILRELGKVIPTGPHNVVPRLPELMADVPEALHPCLLAIADEVRRLESHIKDAERQIKALLADSDGARSLQSVPGIGLITCSAMIAFVGSPSRFRSCRAYSSYFGITPKEHSSGAKRRLGSINKEGDRYLRTLLIHGARAVLLAAKRSKNPDRLQTWALRVHDRRGHNRAAVAVANKIARIAWAVWSKGTLYQSFSARTRPTATN

SEQ ID NO: 506502 - protein, 368 aa, unidentified
MKNITTYVGVDAHKKDLFIAMLVGDQTTPVTWQVANEPNAVRRLVRKLERDAPGPVRMCYEAGPGGYALQRQVTTPRVSCQVIAPGLIPRKPGERVKTNRRDARKLVELLRAGLLTEVRPPTPEEEAVRDLCRARDDAREDLQRCRHRLGKLLLRRGLYYSGRNWTRAHRGWVDGLEWAQPAERIVVDDYLLAIDQLEARLTELDTRLTDVAQREPYREPVAWLRCFRGIDTLTAILILAELHDFRRFHTPRALMAYLGLVPGEDSTGEKHRRGRITRTGNALVRRLLVETAWHYQHRPSVGVALTRRRKGQPGRVIAIADKAQQRLCRRFRRLAERHKPAPKIAVAIARELAGFLWAALQPTPSPAK

SEQ ID NO: 506503 - protein, 342 aa, unidentified
MEHFAGLDVSVKETSVCVVDDTGRIVREAKVASEPDALLSVLTNPTYHFKRIGLEAGPLSQWLFSVLAEAGLPAICVETRHMQAVLKSQINKTDRNDARGIAQMMRAGLYRPVHVKTLRSQKLRMLLTHRKLLQSKAIAIENDLRATLRNFGLKVGIAGKVKFEARIIELVENLPDLTVLVEPLLIVRRVLREQIVILHRRLLAIVRDDDVCRRLMTVPGVGPVVSLTYRATVDVPARFRKSKAVGAVFGLTCSKYQSGEVDRNGRISRCGDEMMRVMLYEAAQSMLRSKKWSWLKAWAMQIARRRGMKKAIVALARRLAVIMHRIWVDGTEFRWTRETVAA

SEQ ID NO: 506504 - protein, 395 aa, unidentified
MQVMHPVCCGIDVHQKSIVCCILDGPLTSNEPKKYQTSFGTTTKELKAALDWILEHQVTHVFFESTGQYWIPLFNIFSDSDLELVLANPQHIKNVPGRKTDVKDAEWIAQLGRCGLINQSYIPSQEVLQLRYLTRYRLSVKQRLTQIKNHIHVILQRANIKITSYLSDIFSKTGQALLTLFIDGEVINEDNVESCIHGRIKASTKQLIEAMEGKLSTVDRFLIKECMEEYKLQKKISDELNKEINEYILEHFPEEYQLLLTIPGISDNCCATILAEIGPNVDDFKTDKKLASWAGMCPGSNESAGVKKSSHTTQGNKYLKQALVMSVLSVQRAKEETFSLFYQRISSRGSKMKAIIACGHKMLRIIYKILQSHQPYNSQKALGLRQQTNALSLTI

SEQ ID NO: 506505 - protein, 408 aa, unidentified
METNNDLMIIKPQLTHAAGLDIHKKKIIVFFYVAGQVQQFREYGTFTEDLEKIRNDLMEFNIQDALMESTGVYWIALSSVLLSAGIRVRVVNARAVKALPKEKTDKKDAAFLCKVLVNGTVRHSYIAPDAQRSFRDLCRQRTKYGQSTTQARNRIARLLERRNIKLRSVVSNMHTKSGNDIVAALADGETNLDKLTALCRGRLKKRKAEMRKALHGVLTADDRFLLKRLLLDIDHFQKQISEIDIQIKQHTDKVSGELIEKLKEVKGIGDQSTEIILAEIGDNVKPFPTADHLAAWTGLAPGNHQTADHIKPMPTREGNKHLRSALIAVAWAAVRSKNTYWRALFSHLHKKMHHNKAIVVVARKLLKVIYKIIKGVYTYTEYGADYFIQHLQQRFQNRNNNNEGLQPC

SEQ ID NO: 506506 - protein, 402 aa, unidentified
MNCVGIDVSKGKSMIAVMRPFGEVVVSPFEVRHTANELSELAGLLKSLDGETRVVMESTGNYHAPVAWLLHDAGLYVSVVNAMLVHDYGNNSLRRAKTDKKDAVKLANYGLDHWLTLPRYVPEEDTRLMLKTCYRQYQQYSKVQTMLKNNLISLLDTTFPDANRLFTSPPRADGSEKWVDFVDAFWHCECVCGLSEKTFITRYQKWCRKHGYNFNENKALDIYASACGHFGVMPKTDTTKLLVEQAISQLRATSAALAALKQEMQSLAASLPEYPVVMGMFGVGPSLGPQLMAEIGDVRRFHSKKALVAFAGIDAPPYQSGQMDVRSRSISKRGSASLRRTLFLVMSVILQRAPMDEPVYQFMNKKRSEGKPYRVYMIASANKFLRIYYASVKAYLDSLEHD

SEQ ID NO: 506507 - protein, 391 aa, unidentified
MVCVGIDVAKDKHDCCILDSEGTTLVDCFTIPNNMDGFKSLLQTIQDCSQKSDKIKVGLEATGHYSYNILGFLLDNDLLVYVMNPLHTNLYRKSLSLRKTKTDRVDAKTIATMLLSDVDLKSYTDTAYHNEELKSLTRYRFDKVQERAKLKQSVSRLVTILFPELEQLVSSIHGTSIYALLSEYPGAKQISEAHLTRLANILVKTSRGHYRKDKATHIRDAARTSIGSVMPAKSLELKHTIKLIQELTSEINEIEDAIRKIMDELKPPILSIPGMGFHSAAMILAEVGDFSNFNSPDKVLAYAGCSPSTYQSGKLTNCYAHMEKRGSRYLRYALYTATKYVCYWNPVFTEYLTKKQAEGKHYNVALSHATKKLVRLIYALQKSGKAYLAVT

SEQ ID NO: 506508 - protein, 437 aa, unidentified
MVVVVRTVALDVHKRFAEVAVHEDGALRRLGRIETRELGLFARSLGAGDHVVLESTAMTWAIAELLAEHAGRVTVSNPMRTRAIASAKVKTDKIDAKVLAQLGAADFLPEVWAPDEATRALRRRVAHRSSLVRQRTRLRNQVHAVLARNLIEAPVTDVFGQAGRRWLGELALPAHEREQVDSNLRLHDALDVEIELVERQLAEHALARTDVRRLMTIPGIGAITALALLAVISDVTRFPSPRQLVGYLGLDPRVRQSGETAARHGHISRAGQAHARGLLIEAAHTAIRTPGPLRAFHARIAARRGKQIALCATARKLAVLAWHLLTKHEDYRYGAPTITQRKLRKLQRQADDPGPRISLAGETKRKALERRFLEEAERNYRNYVAAKATRGAGAANGDATVQAVRAASDARQAPQSPDAHSSRSGSPAPKGILAPSP

SEQ ID NO: 506509 - protein, 312 aa, unidentified
MDATVVVGIDVSKDRLDVAVRPGGIVFAVSRDGDGIASLAEQLGRLGVKAVAVEATGGFERVVAAGLAGAGLPVAVVNPAQVRAFAQALGKRAKTDPIDAAVIAHFVEATAPAIRPLPDEETRILADLVARRRQIVAMIGAERQREMRAPVRIAKSIRRLVKALEKELAVIDGDIDDAVRGSPVWRAKEDLLASVPGIGKTIARTLLAELPELGSLDRRQVAALTGLAPWTRQSGQWRGKSFIGGGRADVRAVLFMGAMVASRHNPTLKAFRDKLVAAGKPKLVAIIATARKLVTILNAIIRDKQPWREQNA

SEQ ID NO: 506510 - protein, 347 aa, unidentified
MLADELDYVIGVDPHRDAHAFAVVDVRSGGVVFEATAVADGEGYACVLRLADQHAPGRRVFAVEGTGSFGAGLTRFLVSQEERVLEVGRLRRERQSGKSDALDAIRAARSVLGHTRPAGPRAGGEREALRALTAAREGAVTARRAGLCQLRGLLVSAPEPLRAELRSLTRARLLRRLAAVRPERCQDPELRGTLLALRALARRVKALTAEERELAREIETLARKLAPQLLDQPGVGPLAAAQVLISWSHRGRIRSEAAFARLAGCAPIPASSGQTIRYRLDRSGDRRLNRALHMILVTRRRAHAPTIAYIDRRIQEGKSRREATRCLKRYLARNLYRLLENGAPLPT

SEQ ID NO: 506511 - protein, 317 aa, unidentified
MSRSETVMGIDVSKVLLQVAVVPEETTWSANNDETGIGVLVERAKALEPRLIVLEATGGLEAPVVAALATGGLPVVVVNPRQVRDFAKASGKLAKTDTIDAFMLARFGGAVNPPVRPLKDHYAQQLSALVVRRRQLVAILTAEKNRLSSAPPAIHENIKSHIAWLENCLDGINRDLQQAIKDSPVWCEKDALLRTARGVGPVLSVSLLAGLPELGSLNRKQIAALVGVAPFNRDSGAFRGRKSVWGGRSHIRAVLYMGTLSAIRYNPAIRTFYQRLCMAGKEHKVALTACMRKLLTILNAMVKNHTTWELRVEQKTA

SEQ ID NO: 506512 - protein, 319 aa, unidentified
MAQNELVVVGIDVAKHKVDVCIRSPLLREMFENTAQGQRKLVARLRKHRVNKAVMEASGGYERGWARVLREAGIEVRIVDPKRVRNFALSAGRLAKNDVIDAEMIAWFAETFSDAPGQVHDAAHEELQTLVKARLGLIDLRVRLVSQSEHAARGLVQKAHTHVLNSLASEIAKLEAAICAKIKSMPDLAERAEIIESVPGFAETSSANLVAGMPELGQVSDEIAAALIGVAPYDDDSGKRRGERHIKGGRRWVRNAIYMPCVGAATLNNPVLKAYYQRLIAKGKEPKVAIIACMRKLIVILNTMIARRQKWDPGRYVLS

SEQ ID NO: 506513 - protein, 364 aa, unidentified
MNELHYTGFDVHKKSVSYCVKTASGEILQEGELAARREALRAWAAAQPQPWRGAMEATLFSAWIFDTLKPYAQQLDMAHPARMKAITSGKKKSDRLDARTIADLLRCNLLPTCYVLSPEMRDLRRLLRYRHLVVAQSVRMQNKMAGLLMETGAPFVKAKLHGKKYFNQLLATLQEVPESVKDLLRMSRGAMEMFETSQKQLVKRLLTEPALQARVERLASIPAVGPITALTWALEIVDPFRFPSLGDAESYCGLTSAFRSSAGKEQRGPISKQRNAWLQSVLIEAAKLAPRWNPQLAAVHAHEMQRGHCNRATLQVARKLVAYLMAVDKSGQPFQLRPSPAPETAAPTRKEEKVARPAEVLQPA

SEQ ID NO: 506514 - protein, 412 aa, unidentified
MTDEARRWFAGVDWGSERHQVCLLDAAGTVVGERAFTHDGAGLAALCDWLVSVAGHPGTVAVAIEVPHGPVVDVLLDRGFAVHAINPKQLERLRDRFSVAGAKDDRRDARVAAAGLRTDPHLFRPVQVGDPAVIELREWSRLAEELQQERLRLANRIRQQLWRYYPQLLALSDDLAAEWILELWSLAPTPAEAARLSEATLEPLLRRHRIRRLNAAGVLGVLRRPAIAVAAGVTEAAVLHLRSLLARLRLANAEFCQAERKVDELCAALSRHAAAEPAGPCDADILRSLPGIGTVILAILLTEARDPLARRDYAALRTLSGVAPVTKRSGKTRIVVMRYAAHVRLRRAVFHWARVAIVRDPNSRSRYEALRQRGHSYGRALRGVADRLLGVACVLLRRQVLFDPDHGVAEAA

SEQ ID NO: 506515 - protein, 460 aa, unidentified
MAKLIMGIDVACRASHQASLADAEGNFLWSGRKFRTLQSDLETLWASLPTDCDLTVVMEPTRNAWVPLASWFRRRGVAVVMVPPEQSADLRDYYSKHTKSDRLDSRILARVPLLHPEGLHSLEGLGPADPLRRITKLRSSLVKRRSVIAARLDAYLELLGPTWHAAFGADVIKYTALQFLAAGYANPLTVRRLGRARLTKFLWRHSRGAHGEALATLLLAAASESIELWGGDIDFDELAEDVAVEARVALALTKEIHELDERLAVSLQTLDPKGIMISVPGVALVNGAQILARLGDPNRFRSLAGARSFSGLVPSLNSSGVNGHHGGPTKSGDAPLREALFMASQWARRTDPTLAQRYHRLMVQEGKHHNSALCHVSAILLTRIIACWRSGTPYVIRDLDGTVLTPQQGRAIVRERYHVHDDVRALRRTLKKGTSYRNEESLGAPSTHSSPSKNKALIST

SEQ ID NO: 506516 - protein, 324 aa, unidentified
MASNENTPVFVGIDVSKANLDVAIRPTGESWQMSNELEGIGRLVEQLGQVSPALIILEATGGYEAACASALAVAGLPVAVINPRQARDFAKSLGRLAKTDRIDAAVLAHFGEAVRPEVRKLADEQTVQLQALIVRRRQLIEMLVAEKNRVALAHRTVRPHLLEHVNWLEKELDQIDKGLREQLQKSPIWRENDDLLRSVPGVGLVTSTTLLAELPELGKLNRKKIAALVGVAPYNCDSGQMHGKRAIWGGRATVRSALYMATLSGIRYNPVIRAHYQHLRYLGKSAKVALVACMRKLLTILNAIIFSKSTWKETLAAPKSMNTP

SEQ ID NO: 506517 - protein, 321 aa, unidentified
MLSVLGIDIAKQKIEVALLITDKVKNKSFKNSPEGFEALALWFRKCGVERVQACLEATGNYGEDLAIFLHEAGHTVSIVNPARIKGFAQSELIRTKTDKIDAAIIARFCLAMKPKPWVPPSPEIRALQALVRRADSLINMLTQEKNRLDTAHESVLPLIKEHIDYLGKEIEQVRHQIADLIDRTPELKRKKDLLASIPGIGKVTIAAILAELDDLEKFKHVRELVAFIGLAPKERLSGSSIKGKPRLCKTGHARLRKALYMPALVSIQYNPLMIAFYQRLKEKGKNGKVIVCAIMRKLVHIIFGVLKSGKKYDPNYKPALA

SEQ ID NO: 506518 - protein, 410 aa, unidentified
MSKSATEPIYVGLDWAAATHAVCILSAVGKVLAQFMIDHTAEGIATLIRKLARYGDPADVQIGIERPNGRLVDLLLEAGHPVIPVSPNAIKTWRDGEVLSGAKSDAGDALVIAEYLRLRRHRLDPVAPYSAQTKALRTVVRTRDDIVAMRVSATNQLSALLDDYWPGAKAIFADVESPISLAFLRQYPTAIRAARLGEKRLAAFLAKHGYTGRRTASELLGRLRGAPAGTTDPALCAAVADAVTALVTVLEALNTACKALDRSVIARLGEHPDAEIFTSLPRSGQINAAQVLAEWGDSRAAYDGPDAVAALAGATPVTKASGKQYAVHFRWACNKRFRRALTTFADNSRHQSPWAADIYTRARGRGHDHPHAIRILARAWIRVIYRCWRDHRPYDPNLHGGTQRLLPQTA

SEQ ID NO: 506519 - protein, 339 aa, unidentified
MPVTTYGLDIAKNVFQLYWVDHETGEISNRRFTRHRLIEFFANRPRGTIALEACGSAHWWARKLEVLGHNAILLHARFVRPFVQNNKTDAADAKAICTAAQQPQMRTVAVKTPEQQAVLALHRMRSSLVKSRTSQINQLRGLLYEFGIALRGGRQAGLQQIRGRMAEIESTLPTLLFTAIKDQLERILNLDAEIEGIERRLASWRKQEQACQAIAAIPGIGLLTGTALVATLGDANAFKSGREFAAFVGIVPRQTGTGGIVKLGRISKRGDPYLRTLLIHGARAAVFSSKNKDPWIEALLKRRPANVVVVAVANKIARTAWAILAHGRPYERGYTSVPA

SEQ ID NO: 506520 - protein, 356 aa, unidentified
MDVLHERCAGLDVHKLTVVACVVTPGPRGRPHKEVRTFGATSAALLQLADWLRDRGVPAAALEATGIYWRPVWNVLEAAGIDLLLANPQHIKAVPGRKTDVRDCEWLADLLRHGLLKGSFVPPRPQRELRDLVRYRTALLHERTAEVNRLHKTLEAANVKLGAVASDILGKSGRDMLAALVAGVTDPAALAELARGKLRAKLPELERALAGRFGPHQRFLVAQQLAHVDALEETIGRVSAEIAARLRPHAATLERLDAIPGVGRRTAEVLLAEVGPDVARFPDAAHLASWAGMCPGNHASAGKRRSGRTRKGNPWLRTALVEAGQAAGRTKHSYLGARYRRLEGLGYRVALEPRPA

SEQ ID NO: 506521 - protein, 314 aa, unidentified
MPGPCFVGIDVAKATLEVAWTTEPAGTWRTTNDDGGWAEVVTKLQPLTPSLVVLEATGGYETGVAAALALAGLRVAVVNPRQVRDFARASGILAKTDQLDAHVLAEFAARMQPPPRPIADDLQADLTAFVTRRRQLVDMLVAERNRAHQARPAVQESLQAHIRWLEARVRETERDLTTRIQQSPLWRVRDRLLQSAPGIGPRTSARLIASLPELGQLTGRQIAKLVGIAPLNCDSGTRENPRRIWGGRAAVRHGLYMATVVALRHNPVIRTFYCRLRTAGKAPKVALVAAMRKLLLILNAMIKHQTAWRDGCDA

SEQ ID NO: 506522 - protein, 342 aa, unidentified
MNYYAGIDVSLKSSSIAAVNSHGEIVRETKVLTDPILLIEWFGGCGLPMERIGLEAGPFSQWLYAAMKEAGLAVELLETRHVRNAFKTMSVKTDRKDARGIAELVRVGWYRPVHCKSMDAQETRTMLAARKLVDQKLRDVEMSLRGLLRGSGLKVGKTTPTRFADRIKELVSGNATLQIIAESLLAVHQVLLREFKSFEKRVRIMARDSAEARLLMTTTGVGPIIALTFAAGIDDPGRFKKSKAVGAYFGLAQRKYQSGETDITGRISKAGDAGVRTALYQAAHIMLTKPVKASALKSWALRLAKRVGMSKAKVALARKLAVVMHRMLVDGKPFNPAAGAAA

SEQ ID NO: 506523 - protein, 353 aa, unidentified
MSYIIGCDAHKHYSQFAVFEGDQTRCKQVRVEHERGAIREFLSEFPEGTPVALESIGNWYWIVEEIEQAGCIPLLTHPAKAKAMMGNVNKTDKLDARGLATLLRNGTLPTVWIAPSEVRDERELPRTRMALCKIRVALKNRIHATLAKYNLSLPTESDIFAPKWSGQLNQVIEQLPPETQKCLKQELELLDKVQGQIGAMEERMKVCIALAPDMQLLKTIPGVGDILAIVIGTEIGLVGRFSRAEQLASYAGTVPAVKSSGGKVRYGHTPKESNHYLKWAFVEAANAPAQYCKKPRWQHRHVTHLYERVKRRKGHSVAVGAVARHLAEATFWILNKKEPYREPTRPKVLPRQA

SEQ ID NO: 506524 - protein, 353 aa, unidentified
MANPMANLTIGVDLGDRYSELYVVDAAGACVETGRIRTTVAGLEQWFGGRPPARVVVEAGTHSPWASRVLPRLGHEVLVANPRKLRGLYENDSKDDRVDAEYLARVGRLDPALLKPITHRGEAAQADLAVLSSRDVLVRARTLLINHTRGVVKALGGRLPRCSAEAFARRVGPHVPPAVRPALAPVLEQLQQLTTTIRGFDRAVEQRCAQSYPETARLRQVTGVGPVTALAYVVVLDDPTRFRRSRAVGAYLGLRPRRSQSGEQDPQLRITKAGNPFLRRLVVQAAHYILGPHGPDCDLRRHGERIAARGGKNAKKRAVIAVARKLAVLLHVLWISGEVYEPLRPRLVLAQAS

SEQ ID NO: 506525 - protein, 358 aa, unidentified
METAYDGRQVVGIDLHRHRSVLVRMTEDGRRLGLARITNSPQELRREIARAGRSPRVVLEATFGWYWAADTLAAAGAEVHLAHPLGVKAFTYRRVKNDERDAADLADLLRMGRLPEAWIAPAEVRELRELTRYRHKLVHLRTSCKDQVHGVLAKLGVPVTCSDIFGTAGSAWLDGLGLPQPYAGKVTSLRHLTGELTAEITMLSAVIADLLAHHRGYQVIQQLPGIGPVLAAVIIAEIGDVTRFKNAAQLCSWAGLTPRHRESDTKVPRGPVTKQGSRLLRWALIEAIQRVPRDSVIGTVKDAIIARRGKQAKNIAKVAAARRLLTPVFYGLRDGQIRCLSQTPQDPPPPVTPAQRAA

SEQ ID NO: 506526 - protein, 344 aa, unidentified
MEQFVGLDISQSMTHLCVVDGKGKKMWQGKCPTTPKAIAKTIRDKSPNVTLIGMESGALAPWLWHALKQTGLPITCVDARHAHGALSMQINKTDANDAHGIAQMMRTSFYKEVRVKSLDSHRIRTLLGARAQLVGIRTDLKNQVRGVLKTFGFVVSQSVEKGFEGKVRGTMTGQPLLQKMVHPLMEVLQAVQKQVQELDKLLEEYAEGDKTCSHLMTIPGIGVVTAVAFTAAVDDPTRFKDSRSVGAYFGLTSRRYQSGEMDHNGRISKCGDRLVRTYLYEAAGSLLTRTKSWSALKSWGLRIAKRSGMYKARIAVARKLAVIMHQMWITGEAFRWSEPEAAVV

SEQ ID NO: 506527 - protein, 356 aa, unidentified
MREGLRLARGSEVFLGLDISKGSWQVTARSGGETVLSASFPPRREALNGLLQRLEGCRVHSVYETGPFGYGLHDWLRSRQVDSMVVSAAHVPGEIGNRVKTDRRDGFKLARTLEAGLLRPIFVPEARQRADRELVRQRHRVQRDRCAAMVRIKSFFLTYDIEVPEEAGAHWSKDFEAWLHGLKLADQSLDRVLEELRGLYTDLDARVDGLTKELRQMARSSDYAPMVELLSTVPGIGWLTALTLVVEIVDFRRFPDGEALSSYAGLTPSEHSSGDQVRHGHITRQGNPVVRSVLVESSWILIGKDPEMHRFYERIKVRRGGKRAIVAVARKLCHRLLAIANSGQPYRINFSHSKEN

SEQ ID NO: 506528 - protein, 415 aa, unidentified
MEIVYERVAAIDVGKREVAVTVRVPGQTAGIRSQQTRKFRTFYQVLRQMVGWLVDHGVTHVAMEATGVYWKPVFHALCEADTLEVVLVNARHVKNVPGRKTDVKDSEWLAQLLECGLLRGSFIPPREIAAIRELTRYRKKTIQARTRELQRLSKVLEDAGIKIDSVASSITTLSARDMIEALIAGERDPRALANLARGTMRTKIPDLAMACAGRFADHHALLARMHLDHIDHLTSMIDGLDERIEQVLAPYAQQLRLLRTIPGIGERAAQVLISEVGVDMSRFPTAAHLASWAGLCPGNNESAGRHMSGRTRKGNVEVRDILTECAWSAGKTGSYIGAQFHRLHRRFGKKGGGKAAVAVAHTLIVVVWHVLNDQSEYRELGHDYFTRRDNPEAAKRRLIHNLEALGYRVELTATA

SEQ ID NO: 506529 - protein, 352 aa, unidentified
MNEITTVGVDLAKEVIVVCAGDRSGRPIFSRQFTFHGFAQWAARLERATFGFEACSSAHHWARWLTERGHTARLMAAEHVAAFRMSKGAKNDRNDAQAILTAVLQPAMRFVSVKSIESQAMLAVHTVRRGWNAERTALLNRTRGILAEFGIWLGRSSARLLRALPELTETDTLPARVRILLRQVREQITALEQQIDACDRQIEEHAKHSDDAQRLQAVTGIGTITSSAIVSTVAHARDFKNGRQMAAWLGLVPSQSSSGGKERLGKITKRGDTYLRGLLTQGARSTLQAALRRAPEKRSRLQAWIVAIHDRIGYHKALVAIANKHARILWAILAHGEQYDPNAWQRYANASH

SEQ ID NO: 506530 - protein, 349 aa, unidentified
MVADVVDYVVGVDTHRDEHVLAVVAGPAGAVVARRRVSANGRGYEQALHFAERYASGARLWAVEGAGHYGAGLTRYLSQRGEAVLEAGRSPRSERRLRGKDDELDAVRAARAALRSEPLARPRSGERREALRLLLVARRGAVDVRREALVQLRSVIVTAPDRLREELRGLALGRLLERCSRLRRSASATPDELAVRLVLRTLARRIEAATVEADELEREILVHVQALAPELLEEPGVGPIVAAQLLVVWSHRGRVRSEAAFARLAGVAPVPASSGQTRRHRLSRGGDRQLNRALHTIVLHRRQHDPTTRDYIAKRIAEGKSRRDATRLLKRYLARHLYRLLQHEEALLA

SEQ ID NO: 506531 - protein, 448 aa, unidentified
MIPNRRKRLRHIAEGGSQEEVMTENQPEIQYAAFLAIDWADQKHAWSLQEADSSTRERGEVGHMPEAVETWVAQMNQRFAGRPIAVAVEQSRGALVFMLTKYAQLHIFPVPPAMTANLRKAFYSSGAKTDPADADLLLDLLQMCREKLRRLSPDTEATRRVQNLVEERRKLVDEKTAQSNRLEAHLKIYFPQIPHWFEDVDSPLVCALLERWPTLEALQKARPDTLRSFFRKQHSRKAELIESRIKAIGEAKPALKDRAVVEAKVVVVKVMVQLIQVLREGIEELNQQIQEAAEAHPDFFIFKSLPGAGPVLAPRLLAAFGSQRERYKNAAEVQTLSGIAPVTESSGKSSWVHFRFACSKFLRQSFHEFAVHSLLQSQMGAGLLPAAASPWQEASRGGAGVSLQMDSHYRLLLEGAGGVRRERVSGSVGQTEVSAAGGSELRVVRTFV

SEQ ID NO: 506532 - protein, 362 aa, unidentified
MNYVGVDIHKKYSVLCAVDERGRKLREARVEGNAPFGFAQFFSGLGGPSKAVVEACWNWGRIHDELEELEGIEEVVLAHPYKTRLIADAQIKTDRLDAYALSTLLRGNLVARGHVPRRETRMRKNLLRQRLYWARLRTMLRNRIHALLDRQRSLELPQCSDIFGVRGLSFLRRLQLPETDAALLREQLALHDLIAQQMKAQEKRIGLEFGSEAIHRQLMSVPGIGPTLAAVIACEVDSIERFSSAEKLCAYAGVVPTTHSSGGKTRHGQLLPFCNKWLRWALIEASWVAIGCSPYFGALYKQHRARGKKANSAVLIVARRMCRIIWQLLHEKRDFEKRPLRPNFNFPGCSVVRLTAGTAARP

SEQ ID NO: 506533 - protein, 344 aa, unidentified
MEDARVVYQLYVGVDIAAETFVAAWRAPGGKPGTPFTGEQTPAGFAALQRRLQGTGSPPAATLIVLEATGNYWVAFAVALHEAGYRVAVVNPRQAHHFAKAQLRRAKTDALDAADLAQLAAALRPAPWTPPPGVYHEVRQRLVARDGLLAMRTQARNQRHALLRWPVVVAAVRQHLDELIADLDRRIATLEAEIAAVLEESAWAESLACLTSAPGIGLVTASWLLIGTLNFALCTGPESLTAYAGLAPVPRESGRSLRGRRAIGHDGNSRLRTALYMATLSAARYNPAIKAFYQRLRAAGKPKKVARCAAARKLLHQAWALGSKLQRFDPGYQQQHEVLPQLAA

SEQ ID NO: 506534 - protein, 411 aa, unidentified
MRRVIGMDVHRTFAEVVAWEEGRLHALGRVDMTRSGLEGFGRTLARTDEVVVEATGNAMAVVRVLSPYVAQVIMANPLQVKAIAHARIKTDKIDAGVLAQLRAADFLPEVWLPDAETERRRRLVARRNQVVRHRTRVKNEVHAILHAHLIPPCPHADLFGRLGRAWLERQDLPEDEKAATGRHLREIDRLGEDLDVLDREVAGAVLDDPAVKRLLTITGINLTVAAGLVAAIGDVKRFSEPEKLVSYFGLNPRVRQSGLGLAQHGRISKQGRAHARAMLVEAAWAASKAPGPLRAFFLRIRAKRGHQVAAVAVARKLAVICWHLLTKETEYLWQRPALVAHKVRSMELQAGQPMRKGNKRGPSHDYHVKELRDREIEVARQAERAYEHAVKNWRPARPAAGRTSAAKEARR

SEQ ID NO: 506535 - protein, 445 aa, unidentified
MEVIFTYCAGLDVHKKTVMACRVTPDPTGQQVDGLMELQEFGTMTVDLLALSDWLAAAGITHVAMESTGEYWKPLYNILEGDFTVFLVNAAHVKQVPGRKTDKADARWLAKLMRYGLLQASFIPPIEQRDLRDLTRYRTKLVQERSREVNRVQGVLERANIKLAAVATDIMGVSARAILAALVEGRADPATMAELAKRRMRSKIPLLEQALTGLVRDHHRQLLAMQLAHIDFLDEQIEALSAEIMRRLAALRGDEPPSVPPGPTGEAGNGATPESASVPMTFARAVTLLDTIPGVNQRGGELLVAEWGIDMGRFGTAARLAAWSGVAPGNDESAGKQRSGKTRQGNQALRTGLTQLAHAAARTKGTYLSALYQRLAARRGKKRAIIAVAHSIVVSAFHMLCRHEPYRELGANYFDVRQREPLVDRLTRRLARLGYHVTLEPVAAA

SEQ ID NO: 506536 - protein, 388 aa, unidentified
MSQPIDMTRCLTPFDQQTTLLAVIELSLSSWLIAGMVPGLQRRPLKKMEPDHSGLLRLLHRWRDEAVRAGSTITRIAVAFEAGRDGFWLARWLRCQGIEVHVIHSSSVAVSREHRRAKTDRLDTNLLMRVFAGWLRGERGHCSMVYIPTIEEEDAKRPSRERESLVGERTRNINRMKGALIRLGIRGFKPELRKAPQRLDTLKTPEGTPIPSNSLDEIRRDMVRLDLVRQQIDKIERTRLEHLEKAPEAGSHPMVRFLASIVGVGIETADMLVTEVLSRNLRDRRAVGRYAGLTGAPDESGKKRREKGLAKAGNSRVRRGLIQLAWRFLRFQKESALVLWFQKRTEGPSAGRKTKLIVALARKLLIALWRMVTTGEVPAGVVLRPAAS

SEQ ID NO: 506537 - protein, 407 aa, unidentified
MELVALYKRVIGLDIHQAQITACALIEESDGGTRIEQRQFGGFKRDRRELAEWVASLRPDEVVMESTGIYWKSPYAALEMVGIRAKVVNARHVKNVPGRKTDVGDAHWLATLARAGLLRGSFVPPAKLRELRLIARQRQKLVGQLASEKNRLHKVLTDSGIRLGVVVSDLHGQSARAMVKAIIAGEPPSEVLKLASRRLKASRAELFEALQGDLTASHCFVLDELMRHIEEIEARIARFDARLLAELASERNALALLQTIPGVDLIGAAMLLIEIGSDMDAFGSADRLASWVGICPGNNESAGKRKSGHVRKGNLYVRRLLCEFAHAASQTTSVFKSKFQSLVVRRGYKRAIIAIGHKILRTIFFMLKRREHYRDSATDYEALSVQRNAPRWIKALTKFGFIASAAT

SEQ ID NO: 506538 - protein, 369 aa, unidentified
MEKDTTYVALDDSKRKIVAGMLRPGDAQPALREIANDPRQIRRLFERLKREGPVAACYEAGVSGYDLYRQISALGVACAVMAPALTPRRPGQRIKTDRRDAAKLVRLFRAGELTAIHVPAEAEEAVRDLVRCRDDIRRDVLRWRHRVLKLLARHGRAYLAGKNWSQAHWRWVREQRFDLPPLQRAFEATLFALEQALARQAELDKEIEALAATAPYREPVGGLRCFRGIDTLSAMILLAEVVDFQRFRRPRELMAYLGLVPSEYSSGETQRRGALTKAGNSHARRVLVEAAWHYRHRPTIGRALASRSQGQPDEIVSHAWRAQQRLHRRYRHLVGHGKPTPVAVAAIARELVGFIWAALTRHESRRQAA

SEQ ID NO: 506539 - protein, 357 aa, unidentified
MKVTTIGIDLAKDVFGLHGVDGEGRVVFKKRLVRNRLLEFLSKLPRCLVGLEACSSAHYWARKVEQLGHRVRLMNPRFVKPYRKSDKNDANDAEAICEAVTRPSMRFVPIKSAAQHEVQALHRVREQLLKSRTALVNQARGLLAEHGIVAPQGIARARRLLLEILADPERHGLSGLFRETLQEMAERLRFLDERVGGYDDRIERVFKQDERCRRLAKIEGVGPLVATAVVAAVGNASEFKSGRELSAWLGLVPRQHSSGNRSQLLGISKRGDRYLRAILIHGARAALRRADHKRDQRSRWAMRIKLARGYNKAAVALANKNARIIWALLTRGQNYRPPGISVAYTGAGRIILTQVQA

SEQ ID NO: 506540 - protein, 359 aa, unidentified
MQIIKQNVGIDVDSKELKVSLQMLNSDLSIKVKGSRKFKNTLKGFEALKEWSNKRRAKDLVLNVTMEATGVYYENLAYYFEEQDDYKVHVVLPNTSNAYMKSLNLKSKTDEIDAKALGQMGLERKLDTWQPISTQMRDLKKLVRERLRLSREKTMISNQLHAESASYCPSTTAFARYKKRIFFINEQIKEIEKELQQVINKDEELKERIESVCTAKGIRMITAVGIIAEFNGFILFKNRNQIVSYAGYDVIKNESGTSIRGKTKMSKKGNSYVRQILYMPAMSAAVNDEHHKAYYLRIVSKTGIKMKGNVAIQRKLLLLIYTLFTNNVEYNAKHYLIVQKRLEKKEPKIKNQIKAKQLV

SEQ ID NO: 506541 - protein, 414 aa, unidentified
MLKIVYPICCGMDVHKSFVVACIASTNEQGVTSYKSKRFSTFSGDLRRCADWLSENNCKDVCMESTGKYWIPIYNILESTCNIVLAHPKYVKAIRGKKTDKRDAKWIADIFKHDLVAGSFIPPADIRQLRDLFRYRWKLTSFTTGEKNRAQNCLTVSNFKLDDVFSDVFGKAASAITARILENPTEKITDVSGFRTKGMKATNEQVLAAVDGEMCEEQAEKLRIIRSHMDSLELCKLNLESLILSTAEKYLPQLELVMTAPGIQAFAAIGIISEIGVDMSVFPSSKHLCSWAGLTPQNNESAGKKKTTRISRAGAYIKPLLVQCALNAIRAKKFPEVRNRYLALKKRRGHKKAIIAIARMLLTAIYNMFKKNEPYNPELYRKGDRPPAHREVSVEEAIFILQRQGYLVTAPPPT

SEQ ID NO: 506542 - protein, 364 aa, unidentified
MHRNRTSVGLDVHARSVVACGLDGQTGELFERRLCPDHSEIISWIRGLPGPVGVTYEAGPTGFGLARFLTGQGIDCQVAAPSKLQRPSGDRVKTDLRDARHLARLLHLGEIVAVTVPSVEQEAARDLVRAREDVRGELMAARHRLSKLLLRQGIVYSGGTAWTGTHDRWLRAQRRASVFATAGLGTAFDIAYDTLLATTARRDRLDAAIAEMAAASEFTPIVTRLGCLRGIATLTAFGLAVEIGDWHRLTGRSIGAYLGLVPTEYSSGSSRSLGPITKTGNGHARRLLIEAAWHHRPPNRTGAELRRRQDAASPAARDRGQRANRRLHDRWVQFNLRRKRAVVANTAIARELAGWCWSLAVLDD

SEQ ID NO: 506543 - protein, 413 aa, unidentified
MPAFVAVGIDSSDTHHDIHAEAAGFTTVLRLRISNDAAGFQRLFEALREAFGDLPYRFGVENPTLLLGRFLLHAGHAVYAINPRSVAKMREALAASGKKDDPLDAESVCLLLRRRAEDLTPVGLGSTEGLLLTGLVQQRVDIVEEKNRVVNQLTAVLKGYYPRALELFGDLEQPLTRAFLQTFGSPAALAAATPEAWQALFTGQRYPRPARIGDLWELAQRPHVAVSPVDEALGARQVHRLLRTLEVLLEELRSLEEAIKERFEQHPDAEIFRSLPGAAAVLAPALFALLGDDRERWDDWRDVARISGTVPVTRSSGASRTINMRYHCDREARRTLHLFAGCSRRSCPWANEFYAAQRRRGKSHGTALRNLATKWLRILFRLWKDRVSYDEALYLKQRESRHAPRREPCVAAP

SEQ ID NO: 506544 - protein, 412 aa, unidentified
MNIVFERCAGVDVHKRNVVVCASTPDEHGQRHQERCTFSTMMPDLLRMRHWLQSLGVTHVAMESTGSFWKPIFNVLEGHVEVFVVNAQHLKAVPGRKTDLTDAEWIAELLQHGLLRPSFVPPAFQRELRELTRYRTSVVEERSRTINRLQKILEDTNIKLSAVATDLMGRSAREMLAALVAGEADPAVLAQLARGKMRAKRDLLVQALQGQFQSHHRILISAQLAHIDALDEEIGHLSAEIAQRLRAYEPQLKRLETIPGIKRRLAAVILAEIGPDMQRFPSARHLASWAGMCPGNRESAGKRLSGKTRKGSPWLRTALVEAAHAATHCKESYLSAHYHRLVLRRGGKKAALALGHTLLVMVYHVLADEKDYQELGGNYFDEQDRLAVQKRLVHRLEKLGYEVTLTPTSPAA

SEQ ID NO: 506545 - protein, 346 aa, unidentified
MMIIGCDFHSSWQQVSWLDTETGETGEQKLVQASGDAERFYRQVAAPALIGMEATGNCHWLVDLLSELGHELWVGDAAQIRASYVRQQKTDKRDAAHILKLLVEGRFPRIWMPSSEVRDLRQLLLHRYKLVIMRARVKNELQHLCLNKGVQRKHKLWSAAGQQILRELPLQPWAGRRRDDLLKLMAMLDQQIEPLDQAVKAEAQRDKMALLLQTQPGVGPITALAYVLTLGDVSRFPRGKQVASYLGLIPREHSSGGRQKLGAITKQGNRMLRMLLVEAAQIAVRYDPQFRREYLHRCHKKPKAVAKVAAARKLAVRLYWMLRTQRPYPAVVRIESSPRVPLVGAS

SEQ ID NO: 506546 - protein, 345 aa, unidentified
MHYVGMDCHITTLDFAVVDDAGRLVKSCKVYTSAKNFMEFVKSVAAPRIVYMEESALAAWALETCIRFGEKLVITDPKQNHWIGSSTQKDDPLDAFKLAQLGRGGFIKEIRHPVGDRRRFRELMDCYHDTVKSTTRIKNKIKSKFRQNGIHCTGMTVYSETYREEWRQKLPQDQTLLLIVEGLWNQLKESEQTEKNLLKAARNFAKHYPEIKLFEDIPGIGFISAATISAILETPHRFANKRKVWMYAGLGITIRSSGGKTYSEKLSKDYNRLLKYTLKQVAETAVQAKDNPFRQKYLAMTTLRGIAPHRAKLTISRDLLATMWAMWKNGEKYNPEIRRSLVLNK

SEQ ID NO: 506547 - protein, 386 aa, unidentified
MQKLNDLSRSLAPLKPDGTLIAVIEMSQSSWLVAGIVPGVERQPLKKLAVDESALLKLLHRWREEAEKAGRRIERTAVAFEAGRDGFWLARWLRTRSIEAHVIHASSVAVSREHRRAKTDRLDTELLKRAFLGWLRGERDHCKMVAVPTSKDEDAKRPNRERESLVGEQTRIINRMKATLIRLGIRGFNPKLKKAAGRLEDLRTPEDEPIPPNTMAELRRDMDRRRLVSDQIRQIEEARLDRLKQAPDDGPHAMLRLLARVIGVGIETADMLVQEVLARNMRDRRALARYAGLTGSPDESGTKRREKGLARSGNARVRRGMIQLAWRFLIFQKNSTLAQWFRARTENARGTRKLMIVALARKLLIALWRLVREGVVPDGVVLRPTQ

SEQ ID NO: 506548 - protein, 377 aa, unidentified
MATTRTAPRSQLTTKPVDLYMSFELGDKRWHISIGDDRRSVSHYIVEAGHTEEVADCIAKATARSTANKARVHSCYEAGRDGWWLHRWLSERGVDNIVVDPASIEVNRRARRAKTDRLDADKLLAMLIRHHGGERVWSVLREPSPSDEDARRVHRELQRLMHERIAHTNRISSLLVLHNLRPRIVIGGRDWPAWWNSHREQLPPALRAELEREAARLKVVKEQVRVIEAERAKELAEGKQPLVAQLARLRAIGPKGAWVLVKEVFGWRHFANRRQLAGSLGLVPTPYASGDSQIEQGISKAGNRRVRALLVELAWGWLRLQPGSALTQWFNRRFASAGKRMRRVGIVALARRLAIALWRYLQDGQIPAGARFKPAAA

SEQ ID NO: 506549 - protein, 409 aa, unidentified
MTVMIGVDPHKGSHTAVAVDHGERSLAELRVRSGPKQLERLLKWAERFPERSWAIENATGLGYLLAQQLVAAGERVLDVQPKLAARVRLLATESTNKNDPHDALSVAIAALRSPTPKEVGVEDHAAVMKLWARRHRNLSSSRTQIACRLHAVLCDLVAGGVPDEIYAEKAALLLADVEPDAAVAAARVELAHELLEDLRRVDHQLARSKKRLEQVVAASGTTVIGIFGVGPVVAAMVVGVTGDIARFPTRDRFAAFNGTAPIEVSSGGRRVWRLSRRGNRTLNHAIHMAGVTQLRFAHSPGRSYYDRKIVEGKTPKEALRALKRRISDAVWAAMVADARRAAAATTTASKARPGGQPGNDSVASAAGSHPETPALRPSHSRTRPKATTTTSRPSHTSSRSATTTARRTA

SEQ ID NO: 506550 - protein, 343 aa, unidentified
MNEVITIGVDLAKNVFQIHGIDAEGGVVIRRQLKRGQMMPFFKKQPPCLVGMEACATSHHWARQLIGLGHEVKLMAPRYVKPYVKRNKNDMADAEAICEAVTRPTMRFVEVKTPEQQSVLMLHRTRQLFVRQRTTLINALRAHLAEFGIVAGVGRNGLEKLLQVIEEDEDDRVPPTARDCLLALRDQLEMVKHQIFGADRRILDWHRGSEVSRRLDDIPGVGPLIATALVASVPDPHIFKSGRDLSAWIGLVPKQNSTGGKERLGHISKAGNRYLRTMLVVGALSVIRRAKQVGYTKRPWLTKLLERRSTKIAAIALANKNARTAWAMMAHGTYYQEPVLWAD

SEQ ID NO: 506551 - protein, 460 aa, unidentified
MTSRKKKQGKFCGDETLPQIRENAAGIDVGATEHWVSVPSDRDPEAVRRFGAFTGDLHALADWLKACRIDTVAMESTGVYWIPLFEILEERGFEVSLVNAKHLQNVAGRKADWTDCQWIRIVYSRGLVSASFRPPDQIAALRSYLRHRKMLVEYAACHVQHMQKALTQMNLHLHHVISDITGVTGTKIVEAILAGDRDPVRMAQLRDRRIKSSPEVIAKALEGNYRPEHVFALGQAFHLYKTYREQIEACDQQTQLHLQRLEAKVDLLQTPLPESRRNRNARKRRNEIRFDCRTEAYRIAGVDLTTIDGIDESTALLILSEIGPDMSPWDTEKHFASWLNLSPNHQISGGKILDRKTRKQKNRLRDGLRICGQSLLHSQSALGAYCRRICARIGHPKGIIATARKLACLIYRLLKFGSAYVDKGQQHYEQRFKERAVKNIARRAKEHGYQLVPLPDVQVP

SEQ ID NO: 506552 - protein, 362 aa, unidentified
MYNHRSLVGLDVHAKATVAASLDVETGELRFRRVSGPPRSAVEHLEELPGPVLATYESGPVGYGLAREAAGRGIEVRVCAPGSIPRKPGDRVKTDRRDAERLVRSLLAGELSFVRVPSVEEEQFRDLARCREAARVDLMRARHRLSKFLLRREIEFPGPGENWRRSHWQWLRSLRFADHPSRSVFCDYLAAAVSLQQRRDGLDAQIEIAAPQSPWAPVIARLRCLRGIETVTAFGLCCEIADFVRFEHPSSLAGYLGIVPSEHSSGEQIKRGAITKAGSSHARRLLVEAAQHYRHGPAIAARLERRQRGQDPRACEIGWRCQQRLHRQWQRLRVKRGKPANVVVLALARELSNFVWEVGQLT

SEQ ID NO: 506553 - protein, 337 aa, unidentified
MNRNVVGLDSAKQVFHLFMMLDGKAVKRKLKRSELLAFIAQLPPSLIALEACGGSHHWARSFQQLGHEVELLNARYVKAFVVGNKNDFNDAEAIFTAARQPNKRTVAIKNMEQQDLAMVHGIRQGKVEERTALINQIRGHLAERGIVLPKSANQVRKQLPSILEDAENQLSTLSRSLFAEQYQALVAMDAAIKAVDRQIEALCQQNALSKRLVAIPGIGPLTATLAAADVGDGKGYTSSRDYAASLGVVPRQHSSGDRQVLLGISKRGNRRLRTLLIHGARAVLKYCADKSAPLSRWLQALIERRGFNKAAVALANKNARIIWALATRPGEYAAQMA

SEQ ID NO: 506554 - protein, 325 aa, unidentified
MNAAEEVVLRRKLRRKEMVTFFEKLAPTVIAIEACGASHHWARLLHSFGHTVKLIPPQLVKPYVKRGKNDAADAEALCEAMSRPTMRFVPVKSPEQQAALMLVGVRDQMIRHRTQLANAIRGYAAEFGLTAAKGMAHLVPLLERIQTDESLPALARELFAIQAKEYEQLQSQIDEIDAQLMARHRADECSRRLAKIPGIGPIGAMLLTMKTPAPELFRSGRQFAAWIGLTPRDHSTAGKVRLGVITRAGDEGLRSVLVVGATAVIQHARRHGKASPWLAGLLKRKSPKLAAVALANKMARIAWKLMLTGEAYTATPAPAALAGAA

SEQ ID NO: 506555 - protein, 362 aa, unidentified
MSKIKTKNETVKRISQLTVINPTAAGVDVSDTEMMVAYPINSVQLEVRVFGCYTIDLHSIAKTLIANGITTVAMESTGVYWIPLFLLLQEYGFEVCLVNAKHVKNVTGRKDDESDAEWIQKLHSCGLLSASFQPDSQTRTLRSIVRHRKSLESTCSVYINRIQKALELMNIKVHTIISDIDGKTGLFIIESILAGERNPEKLADLRDKRIKASREEIIKSLQGHYTAEHLFELRQCYQLYHTHRQMIEECDREIEKQLIEQIASKNGGVVAEIAEVKRKASKKHKLPFNATSYLKEIFGVDITEVFGISELSALAILSEVGTDMSKWKTEHHFTSWLGLAPNTKISGGKIISSRITSDALIF

SEQ ID NO: 506556 - protein, 317 aa, unidentified
MTEIFAGIDVSKQRLDIAVRGAQSRQWSVEHNETGIHGLTLELKEVAPTLLVLEATGGLETRLVAALASAGVKLAVVNPRQVRDFARAMGELAKTDEIDARILAMFAERIRPEVRALPDEDARELDALMTRRKQLVDIRVGEKNRLYQAPSSAVRASIEEHIAWLDARISEVDQDLQRRIEASDLWREKDHLLRSAPGVGPTVSLTLLAGVPELGTLNRQKISKLVGVAPLNRDSGQMRGQRRIWGGRSDVRNVLYMSTLSAIRYNPVIRAFYQRLLARGKVKKVALVACMRKLLSILNRMLMDKTRWDPAFALNCG

SEQ ID NO: 506557 - protein, 343 aa, unidentified
MTITTLGIDIAKNTFQLHGADAYGKAVYKKRLARRDLAAHVANLPACTIVMEACGGANYWARVFQGSGHAVKLISPQFVKPFVKSNKNDANDALAIVEAASRPTMNFVPIKQVEQQDIQSTHRIRTRIVKNRTALINEIRGLCLEYGVVLIPGAARVKSSLCVAIAEGENELTPLSRETMQSLYEELVDVEARLKNLNAKIRQLCRQNVRCQRILNIPGVGELTATAIVAAVPDPGEFRNGRRMSAWLGLVPRQSSSGDKQILLGISKRGDRYLRTLLIHGARSVLSHYKELDNDYNRWVGRKKATLNHNKAAVALANKNARIIWSMLSSGEEFNYGVQTAAA

SEQ ID NO: 506558 - protein, 381 aa, unidentified
MFFYPGSTVREVEENCSVHVITFNLKKMKSSSIIQYGIGIDVSKKELYVHFLGKTACETIKIRGKRKFPNTASGIEKLVKWIETHRKDKELELRIYLEVTGVYHERVLFGLYDLGYSVSLLMGKRVKAYGKSLGEDSKNDQRDSYVLGHMALCRKERLWKPISKDILEIRSLMRLRRSLITSRVGYQNQLHAIKHSVHASELILETLTLLISQANEQVKTLEETALDLAEKDPDLVGPLHLIADSIKGLGMISLLEIICETNGFSEFRSINQVVKYAGMDIIENQSGKLAGKTRISKQGNARIRSALYMPVLSIIREKVNPFFPLYLRVLIRNPKIKKKAMVAVQRKLLILIFVLWKKKQAFDPNYKWNQKSLDKMEVALN

SEQ ID NO: 506559 - protein, 332 aa, unidentified
MEKLFIIGVVISKKKLTFCLISQDKILKKGEIANESTAIRLTISLLLQEFDLSNEQILICAEHTGQFNYPLIYTCESEKYTLWLENPTRIKFYCTGLQQRKDYRLNSKQIAVYASRNVNKTTMYRQPESELENLKQLYQELNMLEVDSDKMHSKLVEQKNYMSEEVFNDNAKRLIILLKGLHEAIKSVENEINRIFANNSFLARQLELLTSIEGVDSKIALKMMVETDAFTRYENCRQFCSHIGIAPIHKLTDNPHKALNVNSKFDKGIKTLLNLTALSIVKKNDSELKNYFVRKVKEGKDEKVVINAIRVKLVARMFAVVKNNQKYQPIKE

SEQ ID NO: 506560 - protein, 428 aa, unidentified
MQILQERIKRVTDTTIIVGVDVAKEIHWARITDYRGQDLIKAFKFHNSIDGFENLLTKVEKIRTKHNSDQVMIGMEPSGHYWRALGWYLKLHDSKPILVGVNPYHVKQTKELVDNSQTKSDPKDALVIAHLIKNGSYFDTYLPEDEYADLRQLNSERQRLIKQISRTNNQLIAHIDEYFPEYSSIWKDVTCSTSLELLKTYAFPSDILSASREKLHEDIRLASGGVEGLKLMEEMIRTAGRSIGVKEGQRIVRIRILNLIKDMAHFEKDKAIIEAELDSAMDSLELGKVLQSMPGVATIISSAFLGEVGDVSRFSNWKQVRSLAGLNLIEDSSGQHKGGTKVSKRGRPYLRHMLYMAGENGIINNREMNKFYRYLRDRKKNPLNANQAIVATGLKMMRMLFHMAKTGEYYDPSKALGDVRLHQIASLG

SEQ ID NO: 506561 - protein, 466 aa, unidentified
MTTIFITIIPFTMNKNKKTKPADPSLPVIHPFAAGIDAGDTLHSVAVPASLATTSVRSFGTMTCDLECISAWLLDCGIKTVAIESTGVYWKPLFNLLNRAGLEVYLVNAREVKNVSGRKTDESDAVWLQKLHSFGLLRSAFLPDDEQEALRSLVRYRHTLIEDCSRFKNRIQKSLELMNIKFHTLFADLFGKTSQGFIEAILAGERNPEAFLPLVKKGIKADPDKILQSLRGNWRSEHLFTLEQSYEMHKSYQQRITACDHEIEKHLLQYGASLNNGVIDNESASSSEKTAQKKKQRGAPSFDVRSYLQTIYGTDVMAIYGISDVGGLEILAETGADLSKWPTAKHFASWLNLSPNNKQSGGKIISSRLMNKKPNAASQAFRIAANTLQRSNHWLGDFFRRMKSRGGNKYAVVATANKLATIYYLMVQNKQAFTPMALEAYQQKQQQAKIDFYERKLGELKMMAAS

SEQ ID NO: 506562 - protein, 414 aa, unidentified
MEVLYPRCCGLDVHKSSIAACALLREQGRIRTERRRFTTMTQDLESLAAWLRQLQVTHVAIESTGVYWKPVWNVLEGHFTMVLANAQHVKNVPGRKTDAKDSEWIAELLQHGLLRSSYIPPEIIRDLRDLTRGRATLSQEASRLASRIQKVLEDANIKLSSVASNTLGKSGRAMLDAIVAGQVDPEQLAELALGHLRSKIPQLRLALEGKIREHHRFLLKRLLHQLRFIESEIDLLDQRLEELSQQDPALAAAVARWTTVPGVDRVAAWSLAAEIGIAMEQFSTAAHLASWAGLCPGNCESAGKRLSGKTRKGSPWLGRIACQCAWAATRTKNTYLSAQFRRLAAKRGRKRAIIAVAHSILTIAYYLQKKQCDYRDLGSDHFDRLNADGLKRYLVRRLEALGHKVTIEAAGNAA

SEQ ID NO: 506563 - protein, 342 aa, unidentified
MDHYAGIDVSLERSSVCVVDATGRIIRETKVASEPEALVRFFRELGLPLTRVGLEAGPLSQWLHAGLTGAGLEAVLLETRHVKAALSAMIVKTDRKDARGIAQLLRMGWYRPVHRKSPDAQEARALLAGRKLLQAKLRDVELSIRGILRGFGLKVGEVSKGRFAARIGELIAGHEMLEAVTGAMLRAREGLRAEFVRLHRRMLAIVRGDAVCRRLMTVPGVGALVALTFKTAVDDPERFRRAKAVGAHFGLTPKRYQSGETDVSGGISKVGDASVRTALYEAANAMLTRVSGISALERWAMGVAKRRGMKRAKVALARKLAGVLHRMWANGADFRWGEEAVA

SEQ ID NO: 506564 - protein, 405 aa, unidentified
MNAVGIDVSKGKSTVTIRRPGDVVLMSPCDIPHTQSAINALIEQIKSLDGETKACMEHTGRYYEPVADWLSDAGIFVSAVNPILIRDFGDDSLRTPKTDKADSKKIARYALDRWAKLKQYGSMDKTRNQLKTMNRQFGFYMDQKTAMKNNLISLLDQTYPGANGFFDSPARSDGSQKWVDFVYTYWHVDCVRSKSLQAFTEHYQKWCKRNSYNFSASKAEKIYQRSSDLIAVFPKDDSTKTLIRQAVTMLNTASQTVESLRLKMDQTASLLPEYPVVMAMNGVGPSLGPQLMAEIGDVTRFTHREALTAFAGVDPGKNDSGKHSQKSVRTSKKGSPSLRKTLFQIMDGLIKRSPMDDSVYAFMDKKRSEGKPYYVYMTAGANKFLRIYYGRVREYLASLEESKES

SEQ ID NO: 506565 - protein, 344 aa, unidentified
MLMKYYIGLDAHGNTCTFVVVDAQGVETHCVRVVTTEKNILNFVRSISGGKSLTTEEGQLSQWLYSLLKNEVDNLVICNPLFISKRSGPKDDAADARHLAQQLRGNFLTPVFHEVSSLMESRSLMTAYLDVVKQCTQTQNRYKALFAKHALVTTGKRIYRLRDRIAELPNESDRFVAQGLFEQIRVMRESRLSYARRFREFSDTHSEVKALTTIPGIAEIRACLIAASVTNPARFQDKHHFWSYCELVRHHFISDGVIYGKRTKRANRHLKAVFMGAAKTAMTEPGALRDYYDAMIKKGLPHKAARKNLARQIASVALAVMRTKKPYDDSKVKEKIRSSTVEKI

SEQ ID NO: 506566 - protein, 435 aa, unidentified
MQSNLLTNLPLSLTRMRTCGMKEFGAYTENLHEICHYLKKHEVTSIAMESTGNYWKALFILLQSYGFKVILVNGKFTKNVKGKKTDVLDCQWIQKLHSLGLLEGSFIPDYDTEKLQHFCRHRQSLLEDSASLIPKMQKAMRQSNIRLDNALNDITGVSGRAIIEAIIAGHRDPNYLASLVNYRVRKSKEEIVKALTGDWRDEYVFELKQSYELYLVYHQKIKECDKEIERVLQERIKGDDSDSGVKKELDMSSIKPKKYGKNDPKINLQELSFRLTGGVDLSAIEGVSHNTLLSILSEVGMDFSTFPTGKHFSSWLHLSPNNKITGGKVISSKTPKAKHRLADALRHVAVVIGCNLKSGALHQFFKRIEYKKGKSAAITAVARKLAVIIWNMMTKKTPYICIQEEEYLTRIREKQIKSLNRKIISLKIQPHELAL

SEQ ID NO: 506567 - protein, 387 aa, unidentified
MAKVDDLSRCSTALEQSETLIAVVELSRSSWLVGAIVPGLARQPLKKLEPDAPALMHLINRWCEEASRADRAVKRIALAYEAGRDGFWLARWLRARGIEVHVIHSTSVAVSREHRRAKTDRLDTAMLKRVFLGWLRGERGHCSMVAIPTLDQEDAKRPGRERENLIRERTRIVNRMKAALARLGIRGFKPELRRSSAQLANLRTPENVSIPLNTLAEIRRDLARLAVVREQIKVIEQARLEALRRAPDKAPHAMLQVLSRVVGVGIESADMLVREVLVRNLRDRRAVARYAGLTGAPDESGAKRREKGLAKAGNARVRRGLIQLAWRFLAFQKDSALARWYVGRTSGPKGARKTTMIVALARKLLIALWRLATTGVVPEGVVLRQPA

SEQ ID NO: 506568 - protein, 442 aa, unidentified
MNEVVQNVDVDDDEERLDRVAAIDVAKASGKVCVRLPGGKRRVTKLWDVPSTTTAILALADELVGMGVERTVMESTSDYWRPFFYLLEASGLAVWLVDARAVKQVPGRPKTDKLDAVWLAKLNERGMLRPCFVPPVAIRQLRDYTRLRRDLTQDRARHKQRLEKLLEDALIKLSTVATDIFGKSGRAMVEALIAGERDPHVLADMALGKLRPKHSALVEALNGRFDDHHAELARMLLDQVDELTDQIIRLGQRIDELIAQLPEAQPPSPTGPTAADDGGGLGVVERLDEITGIGRVAAQTIIAEVGLDMTQFPTAGHLVSWAKLTPRTMQSGPRTRAGRTGKGNPYLKGVLGEAAAAAGRTDTFLGERYRRLVRRRGKLRAIVAVARSILVIVWHLLADPSARFSDLGADYYTRRIDTGRRTRHLVQQLQALGHHVTLSPAA

SEQ ID NO: 506569 - protein, 344 aa, unidentified
MHITSIGIDLGKTTFHLVAMGERTQVLLRKKFSRAQLLAYTANLPACLVGLEACAGAHFLGRVLGQQGHQVRLIPGQFVKPYRKSNKNDFLDAEAIAEAVTKQNMRFVAIKTEDQLDLQAMHRVRDRLVQRRTALINEIRGFLLERGITFAAGPMHLRQHLPTVLEDAEQNLSPRLRWLLDRLGQEWKQIEIDTTAITEAIERISNEDERCRRLRQIPGFGPLVSTATVAAIGNGAAFRRGRDFAAWLGVVPRQCSSGGKQKLLGISKRGNVYLRRMLIHGARAVLLRVKYDTAGFGQWVHRLAQRAPRNKVVVAIANKLARIAWAVLSSGNDYRHQPLQPVAA

SEQ ID NO: 506570 - protein, 405 aa, unidentified
MKTIIGIDWSEKKHCIHAYNESGAQLLRLEVAATVTGFRELTRQVHKLNPEPVDCLVAIETAHNLLVDYLHDLGYTLYILAPSLVSSNRGRQGSSGAKDDDRDALLLAEILRTDLGRLIPWQPDGALVRQMRTMLTWVDQLTKSIVRQRNRLRANLLRFYPQALDAFGNLQTQFSLRFLRTFPGPAALEGLRYEQFAAFCRQQGYYEYDRYPELWASLSDSEPRLYQQENPVFCQQVVWQAERLLAMILQKKNLISQVQSLFQQHPDAFIFDSLPGAGDLLAPKLLVMFGDHRQRYPIRSWLPAIAGTAPVTVASGKSRYVKFRRACNHDYRNTTQQFANSSIRKSAWAATYFYQARDRGKSKSQAYRCLANRWLHIIWALWQRREAYDEAYHLSQVSKHRPAPS

SEQ ID NO: 506571 - protein, 351 aa, unidentified
MEYIAFDAHKRYTLASVERLSGGRLCEQRVAHERGSIRQFLSQWGSGSPVAVETVGNWYWIVDEIEEAGMVPQLVHARKAKLMLAMVNKTDKLDARGLNRLQRTGTLPTVWIPSRELRDQRELPRTRMVFSQSRTRLKNRIHATLAKYALRVEGVSDLFGKKGRELLQRLLEQLPPHTRFATESLLEQLDTVEKHIQRFEGRIREVFASTPELALVMSLPGVGFILGIVILLEIGKVERFASAEYLASYCGTTPRVHASGGKIHYGQVRQDVNRYLKWAFMEAANIVCLNHRRYPQRHVHRLYERLAHRKGHQKAIGAVARHLAEATYWILKKGEPYREPPSARKVSSTGG

SEQ ID NO: 506572 - protein, 353 aa, unidentified
MDKIVRVGVDLAKNVMQIHAVDGAEHVVVRKAIARERFANWFANLEPCLVAMEACSAAHFWARKLRALGHDVRLIPPQFVAPYRKGGVHVKNDAVDAEAICEAASRPHMRFVPVKSPAQQSVLVLHRMRTGFVEERTALINRMRGLLAEFGLFLPQGIDSLRKQFVEQVEDGSNELAGPARQALMRGWTQWQALDEQIAWLDRQITEHAAHDPQAQRCMGICGVGRLTASAAVATVVDARQFKNGRQMAAWLGVVPKQNSSGGKSRLGRITKQGDTYLRTLLFQGARSAVLTAHRRNDRLSRWIVQLQARVGFYKTLIAVANKHARILWAVLAKGDQFDPSYAPVRKRMATDS

SEQ ID NO: 506573 - protein, 263 aa, unidentified
MNSIKVIGIDLAKSVFQVCVWMSDGSIAFNRKVSRVKLLDTLRQFPAGSIIAMEACATSHYWGRTFQSMGFFIRLIPTRHVKAFTHHQKNDANDALAICETALRPGIHFVAIKAVEQQDIKALRSARQLMVEQRTVQANQARSLAAEQGIEIPVGIHILQQRLPDIIEDSEQLISPVIRQLLFSLLENIHSLNERILSAEHCLAALCQQQPKYKVLMTIPGIGPLIAAAFLSEVNAEQFTNGRQLSAWCGLVPRQRSSGGKSP

SEQ ID NO: 506574 - protein, 333 aa, unidentified
MMDCIGIDVSKQTLVVFDGTQEGRFPNLPGLELFRTWLKERFPQGTASPVLIFEPTGPYSHELVLLCARERIRAHILNPKRSHHFRAALGRRSKNDPVDARTLYAYHVLLPETEFAIPAPNPQAETLRHHLNAYQLVQNSRIRFANHLEAARQEGNAPQLLLEELTAEVQHQQQREEMLLRTTIDWVEQQPELGTAFHRLQTIPGIGPITTLCLLLLELTYPGANRQELTALVGLDPRERQSGTCLHLPRHISKNGQALVRRLLYLAALSAARNQPHFLSPFYRQLVARGKHKKQALIAVARKLLLVAHAVYCSEEPFRAAGVREGVQEVIAA

SEQ ID NO: 506575 - protein, 336 aa, unidentified
MSHYCGIDLHSNNHVVVVIDEEDKRVLEKRLSNDLSLTLKALSPYRKSLQGIAVESTFNWYWLVDGLQEQGYDLHLVNTAAVKQYDGLKYSGDHQDAFHLAHLMRIGILPTGYIYPKEQRAIRDLLRRRLSLVRAASTQLISAQSQIWRSTGIRIKSGELRKPVFVPPPVDDYTRQAVHAVLAVYQAIQCEIDGLEKSAYQAVKLTDDFAILQTITGIGKILGLTIMLETGDIHRFASAGNFASYCRCVDSKRTSNGKNKGVGNAKAGNKYLSWAFSEAAHFAVRFEPLAQRFYERKKAKTNGIIAIRAVARKLARASWMMLKHQVPYDARRMFPG

SEQ ID NO: 506576 - protein, 344 aa, unidentified
MKFIQFIGIDVSKKTLDASIFVAGEVINRFPHTQVRNDKQGFKDLLRWAKEQGVKTKDTLFGLEFTGYYSDALEQFLTKKQICYTMLPTTVVKHYQRGPHDKNDKIDSAKIADYLFRFNGTECIKLRVLPSKAMQELKALKSERKFLVQQRVACENRQKVAKSKGEEKHLQKLIDLYKTEIEQVEQQIADVIVLDEEIYTTYRLLNSIPGIGFVNAVNTIANTQNFTAFETARQYAKYVGVAPSEHSSGTSVRWRRRPSPHADLQAKADLSMAALHAIELSREMRQLYERKLGNKPKDKDMQKKALNAVKFKLIREMFSVAKQARNFELRGLDKAQAEAHSTEE

SEQ ID NO: 506577 - protein, 369 aa, unidentified
MNTVKFIGLDVHKKTITIAIADSGRQNKPRVYGAIANDLDAVDKFCRKMVSTASRLYFVYEAGPCGYGLYRHLTAKGFDCMVAAPSLIPKKSGDRVKTDRRDAAKLAQLHRAGELTAVYVPDPQDEAMRDLSRARHDAVNATQKAKQRLKAFLLRNRIVYSGRCAWSKAYFRWLADIAMAYPAQQVTLQEYIDAVHEGLQRVDRLTDQIRQLVPGWRLAPVVSALQAARGVSVVVAVTLLSELGDLSRFQRPSQLMAHLGLVPSEHSSGESTKRGGITKTGNRHARRVLVEAAWAYRMPARVSGLLLKRQQGVPEQVCRIAWNAQLRLCTRYRRLAARGKLKKKVVTAIARELSAFLWAMAKQVQPTVL

SEQ ID NO: 506578 - protein, 338 aa, unidentified
MELKRIAIDTSKHVFTIHGIDVNDRPVLRQELRRGRVETFIAKLPPTDVVLEACAGSHHWGRIFERLGHRVSLIPPQYVKPFVKRGKNDRNDAEAISEAASRPTMRFVPVKGVEDQAAMLVVKHRQMLVAQRTQAINALRGHASEFGIVVAKGGQHVATLLTLLDENAAIPVVARAMFGEIGQHIADLDDKIAALDKQLLEQHKANPVSRLLAEIPGVGPITAITMALTVNPADFGSARHFAAWLGLTPREHSTGGKRRLGRISKAGNERLRQLLVVGATAVIRYARPGSKSASGWLLQLLDRKPPKVAAVALANKMARIIWAMMAHGEAYRRQPKAV

SEQ ID NO: 506579 - protein, 347 aa, unidentified
MRFYTEKHRHYCGIDLHARTMYLCIVNGEGKILLHQNMPAAPESFLAAVKRFRQDLVVAVECMFTWYWLADCCAQNDIPFVLGHALYIKAIHGSKVKNDRIDCKKLALLLRGGLFPMAYVYPSELRATRDLLRRRMYFMRKRAELNVHVQNTNSQYNLAPLPGKIAYKKNRADVSGRFADPAARKSVDLDLALMDTYDSLLREVEGHIRDHARAHDHDALRRLQTIPGVGKILALAILYEVGGIDRFSRVQDFVSYCRLVKPQIESGGKVYGHSGKKIGNAHLKWAFSEAACLFLRQNPEAQAYYARLKRKHPPGKALAVLAHKIGRATYFILKRRTDFDMTKFING

SEQ ID NO: 506580 - protein, 308 aa, unidentified
MTQNEDFVGLDVGKFEICVFISNTGSTFTVPNTPSGHTQLQIKLGKPQVKTIALEPTGGYEWAVWEVLDTAGFDVRQVSAAHVRAFARATGALAKTDHIDARLIAEFMAFRPQAGRRLPDNKLRHLNALSAKHRQLVELRKRLKCQIQQHHDAELVGLDTELLELLSHQIKVLDDAIQTNIKADPQIKQHAKILRSIPGIGPVLCTALIAEMPELGSISDKQIAALAGVAPINNDSGQTNGKRSIKGGRYNVHCLLYQAALVASTHNKHLKAFSKRLKEKGKSHKVILIAVARKCLTSAPMGQISGIA

SEQ ID NO: 506581 - protein, 355 aa, unidentified
MSIGLDVHARSVVACAIDESSGEFLRRRFGNEPVAVVDWVRSLPQPAAVTYEAGPTGFALARMFTASGIDCVVAAPSKLQRPTGDRVKTDARDALHLARLLRLGEIVAVRVPSIEQETARDLVRAREDNRGELMAARHRLSKLLLRHGVIWDGKQAWTGAHDAWLRRQRFEYPGLTAAFEADYEAVQQIEARKKRLDGVIEQMAADSEYAPMVRRLGCLRGVSTLTGFALAVEVGDWDRFTGASIGAFLGLVPSEHSSGQSRSQGSITKTGNSHARRLLVEAAWHHRKVYRPGAVMQARWAAAPSQAVLRGQDGNQRLHEKWQQFIARKKRPNIANVAVARELAGWCWSLAVMPD

SEQ ID NO: 506582 - protein, 482 aa, unidentified
MVQRTTPPTDPAPTHRRRRAKAQAKVQARQEAETRHLEGLQVVQAHAAGIDIGSRSHWVCAGPGLTQEFPAHTAGLHALVAWLHQYHVTTVAMESTGVYWIPLYELLEAQGFEALLVDPSYTRQVKGRPKTDRLDCQWIFRLHSVGLLAPAFRPDEKTCQLRSYLRQRATLVGCAAQHIQRLQKALEQMNLKLTEVLSDLTGQTGQQIIKAILRGVRDPQKLAKLRHGRCHASEAVIAQALTGSYRDEHLFALRQAYQAWQFYQKQIDQADEQIQQQLGRMKLDRALPPLPPRPPKNGRKPNHPRFDVRSALYYVVGIDVTEIEGIGELTALTVISEIGVDVSKFATVKHFCSWLGLCPQFKKTGGRVRSSRTRPGANRAAAALRVAASCLHAQQGPLGAFLRRKKAQLGAPQAVTATAHKLARLLYLTLKHGVGYVRRSQAEYEQQFREQQLRSLKKKARQLGVEVVEPLPAETSSASPPV

SEQ ID NO: 506583 - protein, 349 aa, unidentified
MPVMIGVDPHKASHTAAALDEHGQLLDQQRIPATLDGYRQLRQWAGRWPQRCWAVEGAHGIGRALAQRLVGDGEQVLEVPAKLAARVRVLSVGHGRKSDPDDAVSVAVAARHAPSLRQISVEDQATVLHLLTKRREDLVAARTQTINRLHRLLMDLIPGGARRNLTAKRAAALLAAVRPTGAPAVTRWELASELVADVRGLEQRIAVVEARIKAAVAQVNTSLLGLFGVGPVLAATFMGEVGDIGRFPTKHHFAAHTGTAPLEASSGQVIRHRLSRAGDRKLNHALYMMAMVQVRRPSPGQAYYQRKRAEGKSAKEALRCLKRRLSDAVYRCLLADQHLQPRPVGLRPV

SEQ ID NO: 506584 - protein, 348 aa, unidentified
MVADSLDVVIGVDTHRDAHALALVATASGALLLEAVVEASRDGYRDALELARAHAPGRRAWAIEGTGCYGAGLARFLLARGERVLEVDRPRRERRAQRGKSDALDALRAARSLLGGERLARPRQAGAREALRGLISTRESAVAARRAALNQLRALIVTCPEPLRAELRPLTRARLLRRLRGTRPRRHADRQLRGTLLAMRLLAVRIEALTLEQRELEGEIVALVRELAPQLLAQPGVGPISAAHVLLAWSHKGRLRNEAAFARLAGAPPIPASSGKVVRHRLDRGGDRKLNRALHTIILTRRRTDPDTIAYIQRRVSEGKSDRDAVRSLKRYLARSLFRQLEAPPQPA

SEQ ID NO: 506585 - protein, 316 aa, unidentified
MEHAAKEASFVGIDVSKDRLDIHVRPSGRAFAVARDGEGLDQLVDDLRHLAPALIVLEATGGFELTVAAALAGAALPLAVVNPRQIRDFARATGRLAKTDALDAQVIALFAERIRPEPRPIASADRQVLAELIARRRQVVEMIGMETNRLHQARNPRVQRMLRATLKTLKAQLAELDRDIDDTIKRSPVWQAADDLLTSVPGVGDVTSHTLIADLPELGQLDRRRIAALVGVAPINRDSGQMRGRRTIAGGRIDVRNVLFMATLTAIRWNPVISRHYQALVDRGRPKKVALVACMRRLLGILNAMIRSSTPWQCAA

SEQ ID NO: 506586 - protein, 344 aa, unidentified
MITIGIDPHKSSHTAVALDEAGHVLGELRVSANKATLARLQSWAGDWPERTWAIEGAGGLGHLLAQQLVAAGEAVVDVPATLAARSRLLGRGHGRKTDGIDANSVASVAQHHPDLRRVVREDHSAVLRLLSDRRDELAAERRRVVNRLHRLLRDLHPGGAPTELSAETASRLLARTRPQGPADAERKTMARQLLADLRRLDRALADNRLRCAAAVAACGTTLTSIFGISDVLAAKILGHTADVSRFSSAGRFASYSGTAPIEVSSGEVTRHRLSRGGNRSLNNALHLAARVQIMHPGPGRDHYGRKLAERKSSSEALRSLKRQLAKVVYRHLVADHATRLANLS

SEQ ID NO: 506587 - protein, 320 aa, unidentified
MDASLGIDIAKAKFVVALLTADGKVRHKSCANTPAGCADLATWLPRQRVATVHACLEATGTYGDALATWLHDAGYVVSVVNPAIIHAYARTHLTRSKTDRIDAELIARFTATQHPPAWTPPAPEIRALQALVRRLDALHGMRTQEVNRLAAGITVTEVRASIDAVVASLDAQIAHVQQLIRDHLDRHPGLRAQRELLTTIPGIGEATAAVLIAELFDKSYTSARHAAAFAGLVPRIVQSGTLRGRSRLSKIGPGRLRKALYFPAVAALRWNPTIRAVRARLHAAGKPPMVIIGAAMRKLIHLAYGVLKSGKAYEPTCAHP

SEQ ID NO: 506588 - protein, 475 aa, unidentified
MNIKGSKKKNQVLSVNIFEQQGIIAKADAIKAGLKASTWHELETRGKFDKNDKLSFVSDDMLILGCDIGSETHYVRAIDIRGRELSKSAFGFSNTAEGFESMLDWSAKLAAANDKKQIVLGLEPTGHYWFCLTTWLVAKGISVVQVNPYAVKQTKEVEDNSQLKDDKKDPKLIANLVKDGNFGMPYLPEKLYADIRRLSMFRDQLNEDRIRNLNRLHREMKIYFPEYKDAFGKIDGAFSLELLKAAPFPDELAALGTEGMKQIWHEAKLRGRGYANASSILEYARKSVGIKDGADAGRQAVKWFVSRIIELDGQLSDIENKLNQRCMEIPHAKNILAISGIGENILSGILAEMGDISRFDDVKEIQKLSGLGLVACSSGKHTGETKISHRGRKRFRYWLFQAAKSAVAHSGEFKELHVYYTTRKQNPLKKMQSLIVIACKILRVIFTILTKGTTYDPKKLLGDIIRPNQAIPQAA

SEQ ID NO: 506589 - protein, 351 aa, unidentified
MSQKLNSTIAVIGIDIGKNSFHVVGHDKRGAIVLRQKWSRGQVEARLANMQPCLVGMEACVGAHHLSRKLQVLGHDARLMPAKYVRPYSKGQKNDFRDAEAIAEAVQRPTMKFVGTKTVDQLDLQALHRVRERLVSQRTGVINQIRAFLLERGVAVRQGFRFLRAELPSILAKRPDVLSPRMSHLLEDLAGDWRRLDERIEHLFREIEGLARQDQGCARLMSVPGIGPIIASATVAAIGMGDAFSKGRDFGAWLGLVPKQISTGDRTILGSISKRGNRYLRALFVQAAWVVLVKVGPKHWERYGLKSWIEAAKKRLHHNVLAIALANKLARIAWSVLAHGRTFEASKIQPA

SEQ ID NO: 506590 - protein, 419 aa, unidentified
MFKIFRNNCCGLDVHKTWIYACIGITDENRRTEYKQNRFSSFSKGLRELADWLAKHDCKEVCMESSGKYWIPVFNILEETCWVTLSHPKYTKPQRGNKTDRKDAKFICDLFMCDMVKPSFIPPPDIRHLRDLMRYRFKLTNILTGEKNRAQNCLTVSNLKLDDVFSDVFGKSSSSIINYILEHPGEYFDVTPFVDKRCKNPIEEIQAAVDGSVSHEQAVKLRIIMRHIDELSAHKKKIEDEILRIVEPYQMTLELIRTVPGFSANPMTAVALISEIGVDMSVFPTVKNLSSWAGCCPRNDQSGRKRKSNRISRAGTYLKPLLVQVANAVVKSDKYPEFKERYRRLKARRGHKKAIIAICRMFLTAIWNIISKVEPYSPDGFRVARPAVKSMTISTSQALHLLRLRGYIIKDDALMNDSA

SEQ ID NO: 506591 - protein, 330 aa, unidentified
MQKPQFTIGIDVSKNTLDIYCSEIKQHRRISNDTVGFRAFLNFCRTEGIDLHHAFIVLEYTGGYEYKLLQFCEAKSISYLRIPGLAIKRSLGIVRGKNDKVDAARIAQYADEKYKQLDPEKPLNKSILRLKELLGFRKRLVRENAGYKSSIQERLHMYDLNAKDYFIKTFNKKLKANLKEIEYTEKLISELIHNDEALLRNYLLLKSVKGIGKVNAWMTIAYTENFASFTNPRSYAVYVGVIPFDHSSGTSIKGRKRVCHIANKELKQELNQAAKSAIQWDKEMRAYAEKKLLNKHYSLVLNNVKFKLILRMFAVVKRGENYVDNYKKAA

SEQ ID NO: 506592 - protein, 457 aa, unidentified
MNPKRSKPKNDRTMPMIHPNAAAIDIGATMHTAAVRADRTPEPIRSFGTFTTDLHRLVDWFTECGVETVVMESTSVYWIPIFELLDARGFAVFVVNARDAKHVPGRKTDVSDAQWLQRLHSYGLLRASFRPKGQIAELRAYVRQRERLLEYAASHIQHMQKALTEMNLQLHHVVADVTGATGLRIIRAILAGERDSKVLACLRDYRCHSSAEAIEKALTGNYRAEHLFALEQALALYNVYQDKASACDARIEAVLKELSISRGRDACPLPSPRRRLHGKANGPDFDVRAALFKLLGKDLTQIDGLGSYLSLRLIAECGDDLSAWPSAKHFTSWLCLAPSNKISGGKVLSSRTRRSGSRASALLRLAAVTVGRTDTALGAFYRRLSARIGKAKAITATARKIAVLFYSAVRHGMEYVDPGSSYYETRYRTRVVENLHRRAKAFGFVLLPLESKAGAVS

SEQ ID NO: 506593 - protein, 319 aa, unidentified
MLGIDVSKDSLACTLFDPATQKPLWSKSFPNTAQGIARLLKQTPADSPWALEPTGRYSTAPATLARQAGRSVLLAQPKRARAFLHCIQNRAKTDRLDSAGIGLFALCRPLPPYPLKAAVIEHLDQLLSARKGLSQAMASLGLQARELPHAAPALDAAIQALKEQQKQLDDQIALLTAREESLEVARRLQSVPGIGKIIAATVASRLAAHHFASSDAFVAYCGLDIGVRQSGKKSGHTGLTKQGDGELRRLLYLAAQANLKTLDSPFKTHYQRERDKGLASTAALCAVARKLARLCWSLHAHNTSYQPERVYQINSKSTA

SEQ ID NO: 506594 - protein, 433 aa, unidentified
MEEVTDEPLYRDRVCGIDIGKAGMVATIRVPSDGNPARRAQETRSFGTTKKEVLALADWLRSWQVPAVVMEATGDYWKGPFYRLEAEGFECVLADARQVKNLPGRPKRDPSDSRWLAACFERGTVTACFVATPEFRVIRLHTRYRRDLTAERTREKQRAEKLLESAAVKLSSVVSDLHGVTGRDIMDHLIAGERNPKVLAQLARATARRKIPQLEEALEGAEFFTEDHAALLRAMLERIDRVNEEIARLTEVIERLLAPYEEQLQQAESMPGWARRSAQDALAETGPDMSRFATGAHLASWAGRTPLDRQSGTRKGKARSKKGNRYLGAVTGETAVAAGRTQTREGARYRRLARRRGKAKAQVATGNTQLKVYHKLLSSPGMRYEDLGADYYERQHDVRRQISHHVGKLGALGFEVTLCRIPDPDPAGQAPAT

SEQ ID NO: 506595 - protein, 387 aa, unidentified
MGEVAKPKTQNGDKHMKKLDKYVGLDVHKDTSVIAVADGGRSGEVRLYGEISADLGALEKALRKLGGAGVTLHVVYEAGPTGFVIYRRLRQLGIDCIVVAPTKTPQEKGPRQKTDRRDALLLARLHRAGELTAIHVPDAVDESVRDLTRARADAVHDLTRAKQRLKSFLLRQGYRYTGKANWSEAHQRYLRELVLPLPALKAVLEESLLAVEQATQRVVRLEELLAVQVPLWRMFPAVEALMTLRGFQLTAAAVLVAELGDVRRFAHPRHLMAFLGLIPREKSTGNSRRLGAITKAGNAHARWILVEAVQHAFLPPKVSAALALRQQGQPAAYRTLSWKVQVRLHKRGWHLLHRGVMKAKVTVALARELSGFVWDLLRQVPPPAPTG

SEQ ID NO: 506596 - protein, 346 aa, unidentified
MQNDTLAAVDIAKEIFEVGVSDRPGRVMLRKRLPRATFLAFFAQLPRATVVMEACGSAHHWARRIEELGHVVVLLPPQYVRPYVMRNKTDRTDVDALLEAFRNEQIRPVPIKTVPQQVIATLHRLRSGWLADRVRSINALRGLLRELGFFIPEGRRHVLPEAWEIIQDHRRGLPDALKPSLAALCEEIAALSTRIEDVEAQLEALARQIPLIARLRSVPGIGLLSATALYAFIGDPSRFPSGRHMASFVGLTPREYSSGLRRFLGRISKRGDAYLRMLLIHGARSVLWHAKRMKHRDRLRSWALNLERKVGHNKAAAALANKLARITWAVWKNDRNFEFAPEPQAA

SEQ ID NO: 506597 - protein, 385 aa, unidentified
MQKIIKQCVGIDIAKASFTTCVCKRMLSGETQTSPVESFENNKHGFNQFIKWHRKITDPSVEIIFLMEATGIYYESIAYYLHRLNLAVSVILPNKVKHYAKSLNIKTKTDIVDAHIIAQMGAERQLPLWQPPAPILKQLRDLTRLYTDLKKERTVYLNRLESENASEETLHFVINANRAILKKLEEQIKNCEIEIEKLIFAEEWLAEKIVKLMTIKGVELITFAIIIAETQGFALVNNRKQLASYAGYDIVKRESGTSVKGKTRISKKGNSRIRAALYFPAMVASRHNLDLKEDYQRINIGKSSKMIGMTALQRKILLLIYTLWKNNEVYKQNENQPSGNRKTKILLRQRKEVKKKVGNSLELPTQDELPYNLSTEVLLRQLQSS

SEQ ID NO: 506598 - protein, 310 aa, unidentified
MDAVFVGIDVSKDRLDVHVLPSGEAFAVARNGEGLAVLNERLSGLSAATIAVEATGGYETVVAGSLASAALPVVVVNPAQVRAFAQALGKRAKTDPIDAAVIARFVEATRPEVRALPDEQTQILADLIARRRQIVQMIVAERQRGKRATVKRIQRSIRRLITALETELSELDQELDETIKGSPAWRHNEDLLQSVPGVGPIIARTMLAEMPELGKLDRRQIAALAGLAPWTRQSGKWKGKSFIGGGRTSVRTVLFLGALAAARHNPELKAFRQRLIDAGKPKIVAAIAVARKLLTILNAIVRDQKPWRPA

SEQ ID NO: 506599 - protein, 315 aa, unidentified
MFVGIDVSKDWFDAAWEVDGQLRTQQFAYTDEGIEQLMEQVPSQAVCVMEATGTYHARLALKLFEAGRGVSVVNPLVIKRYGQMKLLRVKSDRADAQLILGYAQQERPALWQPASEQVQELQQAHGWLNDLIGQRVRLLNRQHAVSHRAKPSAFVVGQMAAQLQQLNERIDECERHLEVLVKKSFAELYERLLTIPSIGAKTALELIIVTDGFTRFEDVKQLGAYIGVSPTTLRSGSSVKGKGSIAKLGQGRMRQLLYLCTWTAKSCNPACKKLHQRLKAQGKPAKVINIALAHKLLRQAHAVATKNVSFSAEMA

SEQ ID NO: 506600 - protein, 402 aa, unidentified
MNAVGIDVSKGKSMVAIMRPFGEIVSPPFEIKHTTSDINSLVELINSVEGESRIVMEHTGRYYEVLAHQLSKANLFVSAINPKLIKDFDNDSLRKVKSDKADAVKIARYTIDKWQNLKQYNVIDELRNQLKTMNRQFGFYMKHKTAMKNNLIGILDQTYPGVNTYFDSPARSDGSQKWVDFASTYWHVDCVRKMSKNAFIDHYKNWCKRKKYNFSKSKAEEIYEKAKELVPVLPKDNITKLIIKQAVDQLNSVSTTIESLRTLMNETASKLPEYPVVMAMKGVGTSLGPQLMAEIGDVSRFTHKGAITAFAGVDPGVNESGSYEQKSVPTSKRGSSVLRKTLFQVMDVLIKTHPQDDPVYQFIDKKRAQGKPYYVYMTAGANKFLRIYYGRVKEYLSSLPES

SEQ ID NO: 506601 - protein, 341 aa, unidentified
MSIATLGIDLGKTSMHVVGLDASGKPVHRKKLTRTALIRFLSNLAPCRVAMESCAGSHDIARKADAMGHDAVLLPAQFVRPYTKGQKNDNSDAEAIAEAATRPTMPTVSIKDATQQERQFLHRTRQGWIKQRTETANRVRAMLLEFGITVPQRILNLRRALPGILEDAENDLTDGVRQLVADHWQQLQELDDRIADITQRIERIPVRDARAARLMSIPGIGPMIATAMVAAVGDGTQFTQGRGLSAWLGLVPQQFTTGGKPRLLGISKRGNRYLRTLLIHGARAVLQQAHRGDDALRRWIQQVNGRVHRNKAAVALANKLARVAWAVLTRGETFRASAAAA

SEQ ID NO: 506602 - protein, 317 aa, unidentified
MTTASEAYVGIDVGKTWLDVALWGSEDVWRVSNDDDGVAKIMTQVAQVEPQLIAVEATGGYEQLLVQSMLLNSLPVAVINPTRVRALAKATGKLAKTDAIDARLIAEYAFKIQPERLGPQEANEIRLRALVTRREQLVEMRTGEQNRLGTAQNSMQADIREHIEWLSSHIEGLEAQINELVESLPEWREQAERLDSIPGVGRITAVTVLAEMPELGQLDRQKIAALAGLAPFNRDSGHQRGKRRIFGGRKGVRRVLFMACLSAKKHNPVIRAMFERLMKKGKVFKVAITACMRKMLTMMNAMTRDQVNWRAPKAVPS

SEQ ID NO: 506603 - protein, 392 aa, unidentified
MYIVGIDIGKNHHEASIVSPEGKQIGRSLRFATTHKGADSLMSFIFKNIGNSPCVFGMEATGHYWYPIYSFLKAKGYTICVINPIQSDSLRKMYIRQTKNDSIDSFLIAEVIRFGQFGTTSMADENILAMRQLCRYRDSVISSRTEIKLRIGTIMEQIFPEYEKQFSSLWVSTSMGILEKYLTPENIENAPIDELFEIIKDKSHNRLTKAKAISIKEAAADTFGIKIAQDAFSFQLKQLIDRMNFLDKQIEALDCQILEYYEKFDCYLHTIPGIGMIAAATILAEIGDINRFKSSSALVAFAGIDPTVRQSGEFSSTHNHMSKRGSPYLRHAIFLAATTCSFHNSPLNAYYKKKRDQGKHHLTATRAVARKLTTVIYAVLRDSKPYEPKKFC

SEQ ID NO: 506604 - protein, 341 aa, unidentified
MLIIGCDYHPSVQQIATMDSETGESLERRLTHRAEAEQFYRTLRQQSASVRVGIEATGHSRWFERLLAELGFEVWIGDAARIRAKQVRKQKNDRKDAAHLLHLMLKDDFPRIWMPSPENRDVRQLVWHRHRLVQMRTRVMNQLQAIAMNEGIRRKRGLWTQKGRAQLEGLSLPSWTSRRRQELLELLDRFDPNIERLTEAIQQEAERRPEVERLQTHPGVGPITALAYVLVLGTPDRFGCGKAVGSYLGMIPCEDSSADHWRLGHISKQGNGLLRFLLGQSALSATRVDDDWRRQYAHLSMRRNHAVAKIAMARKLAVRLFWMWRREWDFEQWKKFGSHAG

SEQ ID NO: 506605 - protein, 339 aa, unidentified
MYTSGIDQHKRDSVVTTYDAAGERVRQVRLPNQQAAITRYFAAFPGPHQAVVESTGRWYWLSDLLSVLGVDLTLAHAKALKAIAYAKVKTDPIDSDTLALLLQAGLIPDAHMISPALRAQRDLLRTRLRLVAKRTSCRNSLHRLLEKFNVRTVAELEPLYQLQATCHAEQITLLDAQRKRLEQELNPTLLPMPEVQRLLWIPGIGRLTACTLVLEIDGIARFPSDKRFLSYCRLVPGAANSGGRTRHRSGSKDGNRYLKLAFSTAAVRAIQYYSEIQTWYRRLARRKNPKVARTLVAKELARIVYHVLSTQSDYNGQFKGQPLSRRKQSQWPRLASPDA

SEQ ID NO: 506606 - protein, 340 aa, unidentified
MTITTIGIDLAKNVFAVHGVDQNGKTVLVKSRVTRAALPGLIAGLPPCVIGMEACSGAHYWARLFRQYGHEPRLMAAKFVSPYRMAGKSGKNDAADAQAICEAVRRPHMRFVPVKDESQQAMQCLHRTRQGFIEEKTATYNRLRGLISEFGVIAPQSIDALRRMVSVQKSSLPLQVQQCVDDLLEHVDRIEANITEYDQILSRIAKTDHRSQRLMKLKGVGPTTACALVACIGNAHDFKNGRQLAAWLGLTPSQYSSGGKSKLGRITKAGDSYLRTLLVQGARSVLIGAEKKTDSFSRWVCSLVERRGYWRAVVAIAAKNARLCWASLHYGDDFRLYSAS

SEQ ID NO: 506607 - protein, 423 aa, unidentified
MLEPTQDQQEVIERIAALDIGKATLVCCARVPGSGPGGRRSQEVTTYSTMTRSLQVMADRLLELGVTRVVMEATSDYWKPAFYLLEAHGFQVWLCNAKDVKHLPGRPKTDVLDAVWLCKIAERQMIRPSFVPPPPIRRLRDLTRYRVALVSDRTGEKNRVEKLLEDAQIKLSVVASDTFGVSGRAMLAALIAGERDPKVLAQLARSRMRVKIGDLEEAFVGHFTDHHAFLLTQMLTRIDALGADITGLDTRIQAEIAPFAEAVARLDEIPGVGATAAHVIIAEIGLDMSRFPTAAHLTSWARFAPGVKESAGRKKGNGATGHGDRYLARVLGEAAVAASKTNTFLGERYRRIARRRGKKKAIVAVGRSILVIVWHLLSDDQARFHDLGPDFHDNRLGPERTRRNHVRQLEALGYKVTLEPVAA

SEQ ID NO: 506608 - protein, 330 aa, unidentified
MTSATLETAETDRPIFIGVDMAKESFVWNEHGLRATHSVANEPSGFDTLVAALQDRPIGLIVLEATGGLERALAAHLVGQGLPVAVVNPRAARDFARSMGHLAKNDAIDARALAHYAQTLAAKADQTGVRFTVPEAQSDALQAMVMRRAQLLNMRTAEKNRLSGAIRVLRTSIQAVIKTLDAQIAQMDRDIDDHLETYFKEQTKRLEAIKGIGPTTCATLLAFMPELGTVAGRRVAKLAGLAPLAVDSGKSRGTRHVWGGRSIVRSTLHMAMLSAVRYNPVLRAFYDRLIAAGKPKKVALVACSNKLIRIVNAMMRSGQPWNDQLHIQAT

SEQ ID NO: 506609 - protein, 404 aa, unidentified
MDLAPLYRCVAALDVHQAKLTVCILHEEADGELRVELREFGGFKRDRREMAGWVASFAPESVVMESTGIYWKSPYAALEQVGLRALVVNARHVSQVPGRKTDLADAQWLAILARSGLLRGGFVPPANFRRLRLISRQMQKLTGILAGEKNRAHKVLTDGGIRLGVVVSDLHGKSGRAMVKALVAGEAARALLGYADPRLKASEEELLDALDGDPSEEHRLVLGQLLDHIDYLERQIAALRQALVAGLALQQGLLQALQTIPGLDETGAAMLVVEIGEDMQAFGSPEKLASWAGVCPGNHESAGKRKTGKQRKGNPYVRRILCEAAHAASRTRCALAEKFKGLLVRRGRKRAIFALAHKLWKTVFVLIDRGDYYRDAGVDYQAMSVERNAPRWIKMLRKYGYIPA

SEQ ID NO: 506610 - protein, 282 aa, unidentified
MSTIKVVGIDIAKSVFQVCVWMADGSVAWNRKISRQKLLHTMRQFPPQTLIAMEACSTSHFWGRTLISMGYDVKLIPTQHVKAFARHQKNDANDALAICETACRPGIHFVSVKTTEQQDIKALRSARQLIVEQRTALANQLRALLAEYGVIIPAGLQRLQQQLPEVLEDGDNTITFTLRRLLSLLREDMQMLTERIDVLDKELAELSSQQVAYHHLLTIPGVGPLIAAAVVSEVDATQFSSGRELSAWCGLVPRQHSSGGKQRLSSMTKNGNRNLRTLIIHV

SEQ ID NO: 506611 - protein, 400 aa, unidentified
MREFSTFTDDLERLAEWLLACGITTVAMESTGIYWIPVFEILESRGLEVKLVNARHVKNVPGRKTDVLDCQWLQQLHTYGLLRGAFRPAEQVCALRAYVRQRATLVRISASHTQHMQKALAQMNLQLHNVVSDITGVTGMRIIKAILAGERNPNALATFRDKRCKNDEQTIARSLHGNYRPEHLFSLQQAVELHEFYQTKIADCDRQILEQLKHFDAAESDQNSPSGKPPASLEEALLRISGVDLACIDGIDTTTALKIIAEIGTDMSRWKSDKHFASWLGLCPGAKISGGKVLSSATKRIANRAAIAFRMAAFSLIRSKSALGGYIRRQRARLGASKAITATAHKLARLVYSMLKNRTSYADLGQDHYEERYRSRVVQNLKRKAQQLGFELVPVQGQMA

SEQ ID NO: 506612 - protein, 361 aa, unidentified
MKRVQSNKLDFSGQNIYVGIDVHLKSWSVAILSEYSALKRFSQSPEPEALHKYLVSNYPGANYFSVYEAGFCGFWIHEKLTGLGITNIVVHPADVPTMSKEKLRKTDAVDCNKLARELRSGSLEGIYVPKADVLEIRSLIRTRNMIVKDSTRTKNRIKSLLRFHGVYIPEEFTRSSIGRWSKRFLAWLHSIELSTEYGKKTLELHLEQFVRLRNMLLQETRAIREISRKAPFEKPMRLLTSVPGIGVTTAATLMVELDDIVRFKNADHLASFIGLVPMCHSSGESNGTGDITVRRHFMLRCLLVEAAWIAIRRDPAMTVAYTEYRRRMNPQKSIIKIARRLVNRIYYVLKHEKEYIPCVVE

SEQ ID NO: 506613 - protein, 370 aa, unidentified
MKENIQFIGIDVDDKAYHVSVYNQLEDNSYEFKCGPSPELLIRAFKRHKISPEAHQICYEASYIGFSLYRRLTSAGYNCQITAPSLIPSQPGMRQKTDKIDSRKLARFYAKGLLTFIYIPDETDEAVRDLLRSKRFLIGQQTKIKNHINGLCRRLGLDYKQETGKLSRWTGHHLSWLETRVNKLEQTHTKINFKILIKQYEDVSKNIELYDSEIEHLAELPRYQKKVKILSAFKGVKATTALTLISELGDIRRFDHPRRITSYAGFDLAEYSSGGKSKRYGITKCGNPHLRRAAVDAVKFAIRSPAAGPIVRKRREGIDVETAKIVSKCSQRLYKKGSRMKHAGKPPKKVQVACAREFLGFVWEALQKAS

SEQ ID NO: 506614 - protein, 343 aa, unidentified
MEIRAVGIDLGKTTFHLVALGEAGKVLVRKKFTQRQLIVFTANMPTSLIGLEACSGAHFLGRTLREQGHNVKLIPAQFVKPFVKSNKNDFVDAEAIAEAVDRENMRFVPIKTDDQLDLQAIHRVRDRLIARRTAVINQLRAFLLERGITFAKSPARLRKGMPDVLEDADSNLTPRMRNLLELLWSEWKILEQQLDGLNDDLERIASADAACQRLRQIPGIGPLISTAIVAAIGNGAAFHKGRDFAAWLGLVPKQHSTGGKARLLGISKRGNRYLRKILIHGARAAVLRLKRERAPMGAWMTALEARAPRNVLIVATANKLARIAWAVLSSGEDYRAETGLVAI

SEQ ID NO: 506615 - protein, 430 aa, unidentified
MNESVSEQPLSPKVAAFVGIDWADQKHDVVLRSAGDPAKAEHQVIKSEINAINDWIAQIQERFGTKGKVLVCLEQSRGALIYQLMAYELFELYPINPSQLANYRKTFFSSGAKDDRPDADLLSELVMCHRDRLKAWKPDDQLTRELASLNEGRRNAVNRRTELANEIKSQLKLYFPVALQILENDITTALAADLLVQWQTLAELQKVSPGKLRKFFYGHNSRQEKKILERLALIKEAKPLTTDVAIIRPNALRVKLLAQQLKSLLPFIAEYERRIAELFGSHPDRFLFDNLPGAGPALAPRLLTAFGTDRDRFEVAGDLLNLSGIGPVRIASGKKTGKSASVHCRRACPKFLRQSFHEFGECSIRYCPWAQACYQAQRGRGKGHHAAVRAVTFKWIRILFACWKQRTPYDPQRYFQALQTRGSDYAQTTA

SEQ ID NO: 506616 - protein, 342 aa, unidentified
MEIHVVGIDLGKTLFHLVGLDATGRVVVRKRCSRTQLLTFTANIRVQRIGMEACSGAHFLARALQQQGHEVRMMPAQYVKPYVKTNKSDYIDAEAIAEAVQRPTMRFVPLKTEEQLDLQAVHRVRERWVMRRTAVINQVRGLLLERGITLPKGRSHLEQGLPEILADAHTRFSECISILLGQLRVELDQLAARIEEMDALIARTSKENEACRRLTTIPGVGPVTATALVAAIGNGAAFKRGRDLAAWVGMVPREYSTGGKQRLLGISKQGNSYLRRLFVQCARSILRFRERQGAPFGAWLTQLMSRSLQNVVVVALANKLLRTAWAVLFKNEPYRSPTSASA

SEQ ID NO: 506617 - protein, 412 aa, unidentified
MDTVVERCAGLDVHKDTVAACVRFPGPSGERAQEVHTFGTTTTELLALRDWLVAHGVTLAGMESTGIYWRPVYYVLEDAFECWVLNARHLRNVPGRKTDVRDAEWICQLVEHGLVRPSFVPPREIRELRNLTRYRKAQIEERTREAQRLDKVLQDAGIKLSSVATDILGASGRDMLAALVAGTRDPEILSELARGVLRKKIPQLKQALAGRFGPHHALIVGTILSHLEFLDEAIGNLSAEIEQVIAPFGLAVEMLRSIPGVQQRTAELMIAEIGVDMGRFGSSARLASWAGMCPGNNESAGKHRSGKTRKGSKWLRSALTESARAAARSKGTYLSAQYHRLKGRRGANKATVAVGHSILVAAFHILDRGEPYADLGADYFVHRHNPERHANRLVRQLRALGYDVTIEPVAAA

SEQ ID NO: 506618 - protein, 326 aa, unidentified
MTAPKLGIDISKKTFDVALIRDPETMKVKQRQFSNTPDGFRALQTWLAKQGVGRVHAVMEATGAYGLDLAECLHGAGHPVSIVNPAQIKAFGQSELQRNKTDRADAALIARFGWLHNPAPWTPPEPEQQELQSLVRHLDDLIEQRTQVSNRLSEGRLTKLVRESWEEILQALNERIAEVKRQINQHFDDHPRLKRQRELLDSIPGIGPETAARLLAEMPQLGEFDSARAAAAHTGLTPKRHQSGTSINAPARISKIGNPRVRYALYMPAMAALRSSKEFKELAARLTERGKKKMQIIAAAMHKLVRIAYGVLKNQQAYDPNYGSAA

SEQ ID NO: 506619 - protein, 344 aa, unidentified
MEITTVGLDLAKNVFQVHAIGSTGGVVVRRSLRRAQVIPFFSKLPPCLIGMEACGTSHHWARELVGLGHEVRLMPPAYVKPYVKRGKTDAGDAEAICEAVTRPTMRFVPIKSVEQQAALALHRTRDLLVRQRTQLINMIRGLLAEFGIAIPKGITNALAFVRRAVAGEANEVPDLATKVIAALAEQAIEVQCRIRQLERDLLATFHSNDLARRIATVPGVGLLGATAIAATVTDPTQFRSGRQFAAWLGLTPLNNSSGGKERLGRISKMGDQYLRRLLVTGMTSLVRRNKHHPGSADPRINALLARKPPRLVTVAMANRAARAIWAIMVRGEIYRMPALGSAVA

SEQ ID NO: 506620 - protein, 383 aa, unidentified
MKKTKGTPRNEDNTKDKVLHLAFELGHSKWKLVSSDGGKMRSKGIVARNLDQVQEEIETAKVRFKLRGDVRIVSCYEAGRDGFWLHRYLLSCGIENLVVDSSSIEVNRRKRRAKTDRIDARKLLGMLMRYQAGERRHWSVVNVPSEEAEEARHLHREMEVLKVERNMHRNRIKSLLIQQGIAFSNPSSRKFLIELDSLRTWDGQELPKDFKTRIVREHERLRMVEEQIYLLNKERERRIQLGDKPSYRQVAQLMSLRGIGMHSSWKFVMEFFAWRNFKNRRQVGALSGLTPTPYDSGASRREQGISKAGNKRIRTLAVEMAWMWLRFQPKSKLSRWYMKRFAGGGGRMRRIGIVAMARRLLIDLWRYLQHGVIPEGAVLTHAI

SEQ ID NO: 506621 - protein, 348 aa, unidentified
MRFYTGQHQHYCGIDLHARTLYLCILDAEGNVLLHKNLPCDRTRFLEAIEPFREDLVVASECIFNWYWLADLCAEQNIPFVLGHALYMKAIHGAKAKNDRIDSLKTASLLRGGLLPEAYAYPAAMRPTRDLLRRRTHFVRKRGQLTAHIQNTFHQYNLPRPPGLLVYRSQRAPIPGAFEDPIIRTSVEADLALCETYDTLIRDLEKTVLRQAKVQDPNTLLCLNTIPGVGKVLSLTFLYEIHDIGRFESVQRFASYARLVKCQKMSAGKTSGSSGSKIGNVHLKWAFSEAAITVLSHFPESKKLHGRLKRKFGKGKALSILAHKIGRTVYFMLKRNQAFDPARFLANA

SEQ ID NO: 506622 - protein, 375 aa, unidentified
MTTALFHNAYIGLDVHKETIAIAIADPERAGEIRFWGNINNTPDSVRRTFTKLQNKYSSPLLCYEAGPCGYQLYRQLTLMGLECQVVAPSRIPRSPTDRIKNDHRDAVALARLLRSGDLTTVWVPDETHEAMRDLVRARSASKKDTKIARQRIQSLLLRAGRIYDKKSWTKRHRIWLANQTFPNASQQIAFQHYIQALEQSQVRTEQLEQEIDRLLEDWSLKDLVIQLQALRGIATIIAVTVVAEIGDFSRFDHPKQMMAYLGLIPGEYSSGNTTRSKGITKVGNKEVRRLLYEAAWSYRNNAKVGSWMLAHTPSAVTQVSKDIAWKAQQRLCFRYRSLAAKGKKSQVSITAVARELLGFMWDIVRAYRQQYSTV

SEQ ID NO: 506623 - protein, 343 aa, unidentified
MERYYYIGLDIHKRTISYCIKAIDGSLIDRGKICADRQSLSVWLAGLPGPWVGAMEATIFTGWVYDFLKPHAASLKVAHPAMLEAITVAKKKNDRADAEKIADLLRVDLLPECHMLSEEIREIRRILRYRNHIVRTAVKMQNKISGLLMEVGVTYSKKRLHGKRYFRELLERVDEIPPSVKELLQLSRSSYEMFCSFQKRLVVTLRTNQLIRDRVLRLMTIPGIGEITALTWVLEIGDPGRFSSVRKAVSYCGLCSAQKESAGKEHRGPLSKKRNKHLQTVLIEAAKLAPRWNEQLAIVYNRELKHGNKNRATLAVARKLVAYMLAVDKRQADFKVSFEIQAA

SEQ ID NO: 506624 - protein, 447 aa, unidentified
MTDTIIRYVGLDVHKRVVEACLVDAQGNVVHRERFALNRRTLELFASKVLKPSDQVALEATTNCWAVADVLRPHVARVVVSNPLTTKAIAQAKVKTDKVDAHVLAQLLRCEFLPEVWQPDEATRRLRELTGRRSALVSQRTMMRNRVHSVLAMRLVEAPAKLFNAEGLAWLKSVELDAQGRMLVDSDLRQLEFLDAEIAVLDKELVQRGYASDAVKLLMTLPGVDVATAEALLAAWGDFTRFADADHAAAYLGLAPSTKQSAEHCYHGPITKRGNSHARWMLIEAAQHLDKHPGPLGVFFLRLLRKKNRNVAVVAAARKLARIAWLMLTNNEPYRYAIPRSTESKLAKLRVKATGKRRKSGTAKGAKRQALLPGGGRTIKSLAALCASEGLSEPPPLSAGERRTIAAAGCEGYVAEVAATQVVPRRSRNGKLTGSSSLLQENAHGRD

SEQ ID NO: 506625 - protein, 347 aa, unidentified
MRFYTTQHPFYCGIDLHARSMYVCILSQDGEILLHRNMKAAPEPFLQTIAPYREGLVVAVECIFTWYWLADLCAEQGIAFVLGHALYMKAIHGGKAKNDRIDSQKIAALLRGGMLPQAYVYPAEMRATRDLLRRRTHLMRKRADLLSHVQNTNSQYNLPELGKKIAYKANREGVAERFADPAVQKTIEVDLALISYYDELLRDLELSIVKAAKHHDAHTLYLLQTVPGMGKILSLVLLYEIHQIERFPSVQDFASYCRLGKCAKESGGKRLGTSGKKIGNAHLKWAFSEAAALFLRNNKAGQKYLARLAKKHDKGKALPILAHKLARAVYYMLKRKTAFDIDRFLRT

SEQ ID NO: 506626 - protein, 344 aa, unidentified
MEHFAGLDVSVKETSVCIVDDTGRIVREAKVASEPEALLAVLNNPSYRFRRIGLEAGPLSQWLYSALGEANLPVICVETRHMRAVLKAQINKTDRNDARGIAQMMRVGLYRPVHVKTLRSQKLRMLLTHRKLLQSKAIAIENDLRGTLRNFGLKVGVVGAVKFETRIKQLVENLPDLALLVEPLLVVRRVLREQIAVLHRRLLDIVRDDEVCRRLMTIPGVGPVVALTFRATIDVPARFRNSRAVGAVLGLTPCRHQSGESDRTGAISKCGDEMMRVMLYEAAQILLVRSTRWSWLKVWAMQIARRCGLKKAIVALARRLAVIMHRIWVDGTEFRWARQAAAAA

SEQ ID NO: 506627 - protein, 364 aa, unidentified
MEIAILGIDLGKNSCSLVGLDLVGKVSVRRRMRREMVIAFCAKRPACVVAMEACCGAHYIGRTLAAQGHTVRLMSPEYVRPYVKAQKNDNRDAEAIAEAATRPTMRFVALKSEEQLDMQTLHRVRDQLVGERTSLMNQIRSLLLERGHIVPQGRAKLVSRLAELLDDQTPVLSPRIHALLLDMRDRWMALDQRIGKLDKEFAEHACSDVHARRLLTIPGIGPLNASALIAAIGDARTFARGRDLAAWLGLVPRQATTGGKPHLLGITKRGSKYLRKMLIQGARAAMPALRKSDRRLGAWLRGLLARAHDNIAVVALAAKMARTVWALLRHERTYEVATMRACNKSTAALVRRSPMSACGERKMA

SEQ ID NO: 506628 - protein, 405 aa, unidentified
MAKYHIGVDVGKSKHKACVRNLCQDSYSGAFSFSVDRQGFEKFLATLEKLSPEKDDFLIGIEASGNYGITLAHFLLSNGYPVVELNPYRANQFRKAEGRKAKTDSVDARSLARLLSLENHKPLSIPDAIMDNLRELTRFRADLVKDRTSLVNQIRNCLTSLFPEFATLFGKITSVTCLALLVSYPGPQYILAVGEKELAQVLSIVSHRRRGEAMAKELIKVAHATVGITQKQPALGMRVTILGERILALNAAIDGVEREIKALFNKLPYKVEDFPVGDITALATIVAEIEDIHRFSTVKQFLSHFGWCPRTFQSGGYTAEHPRMSHAGNRYVRRIIWMLSIAAIRVVLRYRAYFQHRVEAGKAKMDIIVAVGRKLLSVFYAILKRGIPYDPNWEVNSCHFALARI

SEQ ID NO: 506629 - protein, 348 aa, unidentified
MDTIGIDVHKKESQVCILTDDGKLLEPPRIPTTVEALRKLLGGRQPARILIESSTESEWVARVLEKMGHEVVVADPNFAPMYATRSKKVKTDRRDARTLAEACKLGAYRPAHRVSDQQWEVRSLLTLRETAIRTRSRLISVVRALLRHHGYRIPSGSPEHFWERVQSVELHASLQDQVMTLVSLFPSINEKIAEMDRQVEKITERDPQVRRLGTVPGVGPVTAAAFQAALDADPKRFRNAHQVQAYLGLVPREFSSGEKQHRGAITKAGHSRVRYLLVQCAWNIIRYPRPATEALGFWAEGITRRRGRNVAAVALARRLAGILFAMLRDQTTYQPMKIHRPKQLASAA

SEQ ID NO: 506630 - protein, 360 aa, unidentified
MTVPKSGVPTAILKLEKGEAVKVIIGVDPHKGSHTAVAVDDSEAELARVKVLTSGTQLDQLLAWAAPFEKRTWAVEAAGGWGYLVSQQLAAAGEEVLDVPATLAARVRLLGTGRSNKNDPNDARSVAIAAMRAPRLAGVERGHHAGVLRLLAKRNLDLGRSRNRTANRLHALLAELVAGGIPNEINASSAQRMLEAFTPKTPIEAARKELALEHLDDLRRLDGQMRESKLRIKATVAASATTLTELFGVGPVVAAMAIGYAGDVRRFGSRDHFASYTGTAPIEVSSGGRVVHRLSRRGNRQLNHAIHIAAITQIRHRHSEGRAYYDRKLAEGKTKKEAVRSLKRRISDAIYRQLLADAAG

SEQ ID NO: 506631 - protein, 328 aa, unidentified
MKLYVGIDIAKHDFATALELADGSLKRSIKKLENNKRGWNTLKIWVLKQQSECQADSIHLGVESTGGYETPMVEWLREHSDFEITILNPVQVKRFVQSQLIRTKTDAVDARMIARYMAVHQPNPTPAPPEGLKQLKALTRHLGHLVRKRADEKTYLESMKNPKVQLMVKKTIKSFDKQIVEVEKQITDHLDQHPDLKKNTELLTSIPGIGAITAGILLSEINESLDPKQQVAHAGLAPRERQSGMQKGKSQLCKTGNRRLRAALFMPTLAAIRYNPVIRRFYFKLLSKGKPKMVAVAACMRKLLHIAIGVLKNQTRFDPCYEQLSLDS

SEQ ID NO: 506632 - protein, 375 aa, unidentified
MKKLTRFVGMDVHAETIAVAVADGSGEVRSMGIIPNRPEAVRRLLKKLGASLALKVCYEAGPTGYALYWQLTALGVHCDVIAPSLVPMKAGDRIKTDRRDAERLARSYRSGDLTPIWVPDAKHEAIRDLVRAREAAKEDQLRAKHRLGKYLLRYGQRAPEGCRSWTAAWWQWVRALQLPHEEQNTTLVELVLEVDHQAQRVERLEAAIDRSVSDAPAHLRALVDALQALRGVGKVTAVTLATEFGTFTRFERAAQVMSYTGMVPSEHSSGPKNRRGAITKTGNAHLRRVLVEAAWHYRHRPRLCQRQKELNSSLSPKVAATAWQAQERLHRRYWALSNKSKPAGKIITALARELVGFVWAIGVETEKQLAAPRAA

SEQ ID NO: 506633 - protein, 459 aa, unidentified
MQKLTLGIDVACRAAHQGTLADDSGNFIWSARKFRTAPEDLEALWRTLPSDAEITVVMEPTRNAWVPLTSWFRRRGARVILVPPEQSSDLRDYYAKHTKSDRLDSRILARLPLLHPEGLHPVEGLGPADPMRRATKLRASLVKRRTMIVARLDAYLELMSPAWHGVFGAHISSNTPLQFLAAGYADPHTLRRLGRARLIKFLWRHSRGAWGPLEAARLLEAGAQTLELWDDEIDYGELAEDIAVEARLALQLSQEIHELDQRIAVLLNDADPAGILTSVPGVGRVNAAQILARLGDPNRFRSLAGARSFSGLVPSLNASGVHGRHGPPTKSGDAPLREALFLAANAARRVDPTLAARYYRLMVHEGKHHNSALCHVSTVLLTRIIACWRRGTPYLIRDVDGTPLMPDEARRIVLDRYHVSEDLRARRRTGGKGTGRRSKESPGAPSTGPSGVEVRAGAA

SEQ ID NO: 506634 - protein, 355 aa, unidentified
MSNEKYIGLDVHQATISVAVMDSQGKAVMESILETKASTLLEFFGGLRGSLFVTFEEGTWAAWLYDLLKPHVTEVLVCNPRKIPLLKQGNKSDKIDARKLAERLRLHDLKPVYHGETGIRMLRELARSYLTVVKDLSRVMNRLKALYRSWAIPCAGRDVYYRRHRSEWLEKIPEAGTRRRAEQLYQQLDLLQHLRQQARRELLAESRKHAITAKLRKIPSLGPIRSALAVALIQTPHRFRSKRQLWTYSGLGLETRDSGEYHFVKGQVRRRKKQATIRGLNKDYNHDLKGLFKGAATRASVKPGPFQEFYQRSLAKGIKPTMVRLTLARKIAAITLTLWKKGEDFDINKLNSQVA

SEQ ID NO: 506635 - protein, 463 aa, unidentified
MTPEGPCLEGTSMPQPILAVGVDPAKRLHRAVAVLFPDEVVLDVELPNAFDAVANLDLRLCELANQHGADLVYGLEDHRHYGRLFCQVLTERGRDVRVVNPLWTNRQRAFYGQDKDDAIDGRSIAAVVLRRHLQLPLASDFGEVAQAIREAERSLQDLSKVRTQLGNRLHLQLSDTYTAAYEEYFGKLKSPLALRFFRRFPLPQDLVGHNVEMLASLLLDLAGGKVGPHKGGNRLIAMRSKAQAILETSGAMRASPRTLALELKAELIRQLCDELLANHDRIIRLERMLREQLLPATKQTITTIIGISTILAATIIGETGSITRFRSPAAFAVYNGTAPARNSTGGRDRHKARRDCNHRLKRAFYLAARAAVLHDPIAKAYHQSCKSRGLSYVEALKRVARRMSDVVYALLKSGKAYDRSIIEHAIERRREQAAHAARSHAKQSLVHSRPRKSNSPLSQRQVM

SEQ ID NO: 506636 - protein, 410 aa, unidentified
MEAIIERVAGVDVGQATVVATVLVGAAHERARKETRTFRTVTRELLEMREWCLAKGVTHVAMEGTGVYWRPVYELLEDAFEMILGNAQHIKNVPGRKTDVKDSEWLADLARHGLIAKSFVPPKPLRQLRELLRYRRKLMESRTAERNRLLKLLETANIKLASVVTDVFGVSGRLMLDALIEGTATPATMAALAKGVLRKKTRDLEHALEGRVEAHHRFLLGLQLRRLDQADADLAVLDARIDEALTPYQPQCQLLQQIPGVNRVVAAVVVAELGTDMGVFRSAQHAAAWAGVCPGNNESAGKHKGAGARKGNVHLRTALVEAAVAASHKKGSYLRDKFYRLRARRGTKRAAMAIGHKILIAAYHMLATGLPYRDLGATYLDGVEKRRTTRNLVRRLERLGYEVTLGTKAA

SEQ ID NO: 506637 - protein, 359 aa, unidentified
MPVYVGIDVHRKRSQVAVIDEGGEVLANRNVPNGVQPVLGVIGGLPPGTPAAFEAAFGWGWLVELLEDYGFDPHLVHPLQCKAIASARLKNDKVDAAILAQLLRADLLPEAWIAPPQVRQLRALLRHRIQLVRLRTLLRNRIHAILADHGHDRPGGCWSGPGRAWLASLELPAVSREVIEDDLARIDALQVPIDRLDWEVHQHARSDPSVKVLTQLPGVGPFTALVLLAEIGDVTRFGSARKLAAWAGLTPTVRGSDRTVRHGHISKQGSVWARWALCEAAQTAKRHPDFAASYQAIARRRGKNIATTAIARKLLARAYHLLTDAQITAPAPAATAPAPAGAPTGREGVASPGRARKTA

SEQ ID NO: 506638 - protein, 323 aa, unidentified
MSVFVGVDVAKKSFDIATPQPNGKMRTKAKLFNDPGGFKQFSDWLERHAEPDAWIVMEATGTYHEALAEHCHNQGYRVCILNPAVIAKFADVELRRVKTDKADAKVIAAYGQQKAVSLRQWEPEPPAQRRLRALVRRLDDLKEMRQMEKNRLDVAQDAVQQSIQDVIGHITEELEKTRKAIDQTIDDDPDLRKRRDLITSIDGLGETTATLLLAELGDPLKYQSPSAIVAFSGLNPVVQQSGEFIGQSTISRTGASRLRAGLWMSGTVSIRHNPVVKELAERLSSRHKAYKQIVCAAMRKLLHLVYGVVKSGIPFDPKIPLAG

SEQ ID NO: 506639 - protein, 343 aa, unidentified
MQTITTIGLDIAKSVFQVHGVDAGGRVIVRRQLKRRSVLAFFQKLPPCLVGIEACASSHHWSRELQALGHTVRLMPPAYVKPYVKRQKNDATDAEAICEAVTRANMRFVPTKTPEQQSGLVLHRTRHLFIRQQTAVINAIRAHLAEFGIVAPVGRHGVEELLNVVADPSDRRVPEMARACLLAFGAQLRRIKEQILEFDRLIRAWHRSNEMSMRLDEAPGVGPVLATAVVAAVADPKSFRSGRNFSAWIGLVPKQHSSGGKNRLGNISKQGDRYLRGLFVAGALSVIRYAKIHGTKHRPWLTALLARRPTKVAAIALANKIARMVWAMMARGERYKEPVAFAR

SEQ ID NO: 506640 - protein, 367 aa, unidentified
MKKDSRGQKSPRRTGPAARAKSMVIGIDLGDKSSRYCVLEEGEAVEERSVATTKQGLTQAFGARGRCRIALEVGTHSPWVSRLLSSLGHEVIVANPRQLQLITQSSRKDDKVDAKTLARLARIDPELLRPIRHRSERAQMDLMQIRVRAALVETRTGLVNTLRGLAKSVGERVVSCDADSLGPARLEGLPERLREVLQPLAEQVESLTEQIQEWDRKLEQIARSEYPETELLKQVYGVGTLIALTFLLTVEDRQRFQKSRDVGCYVGLRPRRSQSGQSEPQLRITKEGDLYLRKMLVQGAHRILSPRSPDTDLKRWGLKLAARGGKNAKKRAIVAVARKLAILLHRLWVTSEVYEPTGYGQARVAAA

SEQ ID NO: 506641 - protein, 363 aa, unidentified
MKAEKRRYVGIDLGKREYTMAIIGRNGKMSIHLGKTNIFGRQALYQKLEPTDKIALEAGNLAFIMAREIMERIGCEVRVLNSAKLPFIWNAPTKTDKEDAMKLAHLVEERRDEKLPLVPLPSEKELERRKIIASYGREIKNHTRLINTLHAMFVHQGHTTIVKKNLATAERRKEAIQILTGVEREEAEWILKYLELHEQRIKELKGKIKEEAKTDEAMQLLQSIPGVGPIVSYAFLAHIGDGSRFTKGAQVSNYIGFVPRLDYSGIIQRNGHITKQGNAYLRGLLIQAAWSMVRCMKGSALKERFKYYTSFQGNSKKKTIVSIGRRMAELMYSVLISKNNYEHRKWEGPKDNAASLAKQALSA

SEQ ID NO: 506642 - protein, 426 aa, unidentified
MLNSQINKIQAITSDTLIVGVDIAKNIQWAQFINFRGIEVSKHICFENNYSGFNSIMEKIEEIKSKNNFLSVIVGMEPTGHYWKTFATFLHNNGIKVVQVNPYHTKKAKELDDNSQTKSDKKDALVIAKLIKDGRYSAIYFPEGEYADLRNLSNTRLEVSRLLNICKNRIHTCVDEYFPEFETVFKSFIKGKVALHILKRIPFPTDILELTLEDIISVIREAAKKSVGKKKAEELIRAAKVSIGVKVGLEGARIRLNNLLEEYELYHNQLEKIEKEMAQELEKTGYKDILTSIPGIGIISAASFIGEIGDPKRFSNPQQIIRLAGYNLVEDSSGKHKSKTMISKRGRKILRTILYKISLIVVCKNQEIKLLYKYLITRKENPLKKKQALIVISGKMVKIMYSLIKKEEVYDKEKVLGIYRKQQIVA

SEQ ID NO: 506643 - protein, 386 aa, unidentified
MPHPNDLSRSLVAFDQDSTLIAIIEMSQSSWLVAGIIPGVERHPLKKLDPNENTLLQVLYRWRAEASKTGHAIMRIAVAFEAGRDGFWLARWLQARGIETHVIHPSSVAVSREHRRAKTDRLDTGLLKRVFIGWLRGEPEHCRMAAIPTIEAEDAKRPNRERESLVGERTRIVNRMKSCLARFGIRNFKPTLRSAPERLVTLRTPEGVSLPPNTSAELRRDMARLYFVMDQIKAIEKARLQRLEQTAEEGPHAMVRLLARVLGVGIETADMLVCEVLSRNLRDRRAVARYAGLTGSPDESGSRRRERGLARTGNARVRRGMIQLAWRFLMFQKNSALAQWYRARTEDARGKRNTMIVALARKLLIALWRLVTTGEVPAGVALRTTP

SEQ ID NO: 506644 - protein, 366 aa, unidentified
MEPIYIGVDFHSRRQTICYLKTETGELVITELKHQDKERVRAFYQQFPGPVIVGLEASGYSPWFEAMLEELGREVWLGDATEIRRRARWRYKDDRRDAELIWDLMVHHEFPRLHQPAPQSREILRMLRYRQKLIKVRTMTKNSLQAIALQAGLAKGKQLFTAAGQVEFKAVAMSPVLQYQRDHWFELLKPLNQELLETMKWCKAAAKGDAAITRLRTHPGIGLLTALCLQHTLQPVSRFRNQRKVVAYAGFDPMVRRSAESVIRLGISKAGSRMLRYLTVEAVQTAIRHDEDLKRFYKRLAERRGRPKAKVAAARKLLIRAYIMMRDEIDYAEFRRRAVAARLARRGQGPANVPEVLIGQSASPGA

SEQ ID NO: 506645 - protein, 402 aa, unidentified
MRYFVGVDWAKLSHAVCVIDESGQIVMRRAVDHTAEGLTQLMTALRRFGDPAELGVAIERPSGLLVDALVEAGFVVYPIHPNVVKASRPRYSAALGKTDPGDAYLLADLLRTDGHRFRALCSLSDETRALRALVRARSDLVGARVGLANQLRALLESFWAGAVAIFGEIDSPIALAFLLEYPTPASAARLGPKQMAAFLNAEGYCGRRSPDELLQRLRAAPTIELGPTEMVAKGSLACSYATLLDTTVKQIRQLSSAIERAVMAHCDAAVFTSFPRVGKINAAQILAELGAHDRFLTEEQLAGEAGVAPVTRMSGKHRAVVFRWACNHRLRAALTWWADNSRRASPWAHAVYLSARQRGCDHPHAIRILTRAWLRVLWRCWKDATPYDLTRHHAAAALKQPA

SEQ ID NO: 506646 - protein, 421 aa, unidentified
MIPAVIERCAGIDVGRKFVVVCVMCGDAQATPTLEVRKFSMLTEGLEQLRVWLHQNECTHVVMESTGSYWKPIFNILDDGQLEVVLANSQQVKNLRGHKTDPNDARWLAHLLRHGMIRPSFIPDRDTRELRDLTRRRKKLVECAAEERNRVQRVLQEANIQLGMVLSDVFGESGLNMLDALMNPDASAEQIADLAVRTARKKIPEIRKALEGHRMTEHHRRLIRHSMEHLAFLEEQIAELDREIDDHTNSRPALKSATELVKSVPGIQQTSAAALVAETGADMGHFPSGGKLASWIGICPGNNESAGKRKSGQTRKGNPWAKRALVECAWSASRKKDSETKRYYERLKPRLQHKRALVATAHLMTLKVFEALSTGQPYQVDQQPELTAAKLRRLVRHHTHRLRRLNKWLQGHKKRHAQAPH

SEQ ID NO: 506647 - protein, 410 aa, unidentified
MELIVERPAALDVHKAQVMACVRTPDEGERTEHVEEFSTTVSGLLVLRDWLKAHKVTQVTMEATGVYWKPVWHVLEDDFELILVNARHVKQVPGRKTDVQDAQWLCRLAEAGLLRASFVPPKPIRELRQLTRYRKAQISERQREANRLHKALEDTGIKLDCVATDILGVSGRAMLDALVCGTTDPEVLAELAKGRMRAKIPALREALEGRFEAHHALLVGAILAHLDFLDEQIELLSEAIEAKLAPFGAAAVELLLTIPGIGERTAENVIAEIGTDMAQFPSAGHLASWAGQCPGNHESAGKRRSGKTRKGSKWLNQALKEAAMAAIRTNGSYLQALYRRKKAQGGHNKALGAVKHSIVCACWHMLSTGELYRDLGPDDFARRNPERQTQRLVAQLERLGHSVTLTEVAA

SEQ ID NO: 506648 - protein, 352 aa, unidentified
MEVPMARSTLQKNVQTAKYAGIDYHKKFSLVTLGDEHGEPIEQIRLWHDDVPNITRFFKQHKGLVCAIESCRGYEWFLDLMTELGLEVHVCNPVRMKIICQTAFKNDKIDSRKIMDLLARDYLPTSYQATPVERHLRERVRWRAGLVRKTTSTKNAIKAILAKENISIRDPYGEKGREQLAGMAMSVAHRELLDEMLEVLDANQSAVSSQDKWIKKQAKDDHQIKLLKSIPGIGDISAIAFMAEVGNLDRFKKPNQLSSYLGLVPRLSESADRSWRGGITKQGSSLMRTLLVQDAWRALSQSAELRRRYVAISRRRGKQVAIVAIARKLAEIAFCVLRDQTPFCESKLRRTE

SEQ ID NO: 506649 - protein, 340 aa, unidentified
MDVMIGIDPHKASHTAVAVGDAGVELARLQLRSGRHQLERLLAWAEPFPQRRWAIEGAEGLGFLLAQQLVAADQAVLDVPATLAARTRLLGSGRSNKNDPNDALSVAVTALRHGDLRIVQPAGSCELLRLLAKRHRDLSNQRTRLVSRLHALAVELSPGGIAKRLNSTDAGKFLATVTPCDPVAQLRKDLIAEIATDIASLEAQIKRSERRIRDAVRASGTTLTDVFGIGPIIAAMLIGNTGDIARFTNRDRFAAYNGTAPTEFSSGGRVAHRVSQRGNRTLNHALHLAAVSQLRHPGSAGRSYYERRLADGKTGKEAIRALKRQLSNITYRHLVNDAIR

SEQ ID NO: 506650 - protein, 342 aa, unidentified
MEQYVALDVSLKEISVCIVDSNGDVFFEGKTAAEPATLVALIRSKAPQVKRVGLETGATSPWLFHALAAAGLPVVCMDARHAHAALSMRPTKSDRSDARGLADMLRMGWYREVHAKSVTSHERRTILGARHQLVTMRSELDAQIRGILKTFGLILGTGNKDTLIQRAEKLAAGHPVLSSLVTKLAEVRRYVTSQIAAIDRDIRHLVHTEPTLKRLMSVPGVGPITALAFLSSVDEPSRFKHARDVGPYLGLTPTRYQSGETDRQGRISKCGDTFTRTCLYEAAHVLLTRVQRFSPLKAWGMRLAKRIGGRKARIAVARKIAVILHCIWTDGTEFWWTRELAA

SEQ ID NO: 506651 - protein, 387 aa, unidentified
MARKRTLSTLDTSIAYEAVGLDLAKEDVALAAFDSDHKEPYLIDRIPYDKLYELLADMAPTLVAMEPCSGAHQIAEQIQELGHEVMMISGRHVQAWVKDHCNGQKTDLNDAFAILNLAYDRWLTPIRGKTREECRLLALQASYRQLKGQRTKTMVHVKATLHAWGFPIRAGSFNQKVLHELIDTNREAFGDEVVETLHLMINRVRDLDHDIATVLKLLTEATKRDPRASLLRSIPGFGILTMSRWCAVIGDIARFDSPKQTMAFIGLVPNNRITGHHTETSSGREARGQGRMSKRGDKMLRSLCIMGAGSLCLMVRNDRLPDCPFVASIKERLASPRPWFKVLVYVAAKLVRIATALLKYGETFSFEKAGISKAVLKQWELEQAKAA

SEQ ID NO: 506652 - protein, 355 aa, unidentified
MCGLKHQKEKRSMTYFAGLDVSVKETSVCIVDDAGKIVQEARVASEPEALLQVLTNTICRFKRVGLEAGPLSQWLYSVLAEAGLPVICVETRHMRAMLKAQINKTDRNDARGIAQMMRVGLYRPVHVKTLRSQKLRMLLTHRKLLQSKAIAIENDLRATLRNFGLKVGMVGTVKFEARIKELVENLPDLAVLVEPLLIVRQVVREQLGILHRRLLAIVQDDDVCRRLMTIPGVGPVVALTYRVTVDVPARFRNSKAVGAVFGLTPSKYQSGQNERSGGISRCGDEMMRMMLYEAAQSMLLRSAKWSWLKAWAMKIARHRGIKKAIVALARRLAVIMHRMWVDGTEFRWTREVAVA

SEQ ID NO: 506653 - protein, 423 aa, unidentified
MRVVFPVCCGVDVHKSFLVATMITTHSHQAEPVYHKKRFSTFHRSLVEFKEWLLESQCFDVCMESTGKYWIPVFNVLEGIVHVTLANPKWVSAVKGNKDDVKDSKWIGDLFRLGLVPGSFIPCKEIRVLRELTRYRTKLVACKASEKNRYQNALTVCNLSLDSVASSMFGKSATAIVNHVVGGQSLDSEQCMSLLHGAMRRKVDQVLEAVEGFQMEAEQKIRLRIIQSHMAYLDGLMALLDEEIDLLTGSYTSHIKLLCSIPGVKHLTAVVVLSEIGTDMSMFGSSKRLCSWAGLVPGNNQSAGKKKSVRISRAGVYLKPALVQAAHAAVKDRHCDYYGQKYRQIAKRRGKKRAIIAIARMILAAVYAMLQTGETFRPHDMIAEEEAIILKNQKHHQALKEATKLLQAEGIEIPEAFVISLTG

SEQ ID NO: 506654 - protein, 420 aa, unidentified
MKELTIDDFAALIGIDWADDKHDICEMPVGTNDYQLSVISSKPQSLHDWALSLKDRYPDKPVAVACELKKGPLIYALSRYEHITIFPINPSTVAKYRKAFTQSGAKNDPSDAFIQTEILLLHMDRLTHIQPESADIRALAQLVEYRRKVVQDRVDLLNCITATLKNYYPQVLDWFKEKDTIIFCDFIARWPSLPDIQKVRKQTLMNFFNQHNSRYPAINEKRFTDIKAACALTNDPGVIEPNRILIEVLIPQLKLLIEAIERFDLEIKKYYKGQDDRFIFDSFPGAGVQLAPRIFVAFGSNRERYSTAADLQKYAGVAPVIEQSGKKKWTHWRYSCPTFLRQTFVEWAGLSIRYSFWAKAYYEQQISKGKPHNTVIRALAFKWIRIAFRCWKTNTPYDESTYLKALKKRGSPLLKFAAES

SEQ ID NO: 506655 - protein, 362 aa, unidentified
MNDSITWVGMDVHKDSLVVAAVNGASGHVDWRCEYPNTDKGLRRLVAQLKRSVSPRCVYEAGPCGYPIRRFLESQGIACDVVAPSSIPRRPGDRVKTDRRDAEKLARMHRMGEMTTVHVPTPSQEALRDLVRTREDALEDLLRRRHRLSRFLLRHGRRYDGRSWTKAHWAWLRSQRFGDGNLETVFVEYLLAVDQEVERMKRLDQRIEEESLAPEIAPVVSRLKALRGIQTLTAMTLISEMIDLRRFAHPRELMAFVGLVPRERSSGGRERRGGITKCGNAHVRRVLLESAWHYRHPCRGAGKAILRRRKDQPPDVVEVARKADLRLHKKYYRLVLRGKRTPVAATAVARELAGFVWAIGRA

SEQ ID NO: 506656 - protein, 373 aa, unidentified
MKKRSSSRQNPKPAVKAKRARQSVTIGMDLGDKTSRYCLLSDEGEILREGQVGTTKAGMTETFGRIGRARIAIEVGTHSPWVSRLLRSFGHELIVANPRQVKLITESSRKDDRLDAQTLARLARIDPQLLRPIQHRSEKAQTALMVIRVRAALIAVRTSLVNTARGLTKAVGERLPKCDADQMGVIQSESLPPKLRQVLEPLLKEVESITEKIKDSDREIEQIARKDYPETALLQQVGGVGPLIALTFVLTVADKDRFEKSRDIGCYLGLRPRRSDSGQSQPQLRITKEGDPYLRTLLVQGAHYILSRRGPDTDLKRWGLRLAERGGKRGKKKAVVAVARKLGILLHKLWISGEVYEPLRNQKSRQEPKKAAA

SEQ ID NO: 506657 - protein, 387 aa, unidentified
MSQASDLTRCFAPYDQATTLIAVIELSLSSWLIAGMVPGLARQPLKKMAPDEAGLLRLLERWREEAVTAGSAINRVSVAFEAGRDGFWLARWLRTRGIDAHVIHSSSVAVSREHRRAKTDRLDTALLMRVFIGWLRGERGHCSMVAVPSIEEEDAKRPNRERENLVGERTRIINRMKSALARLGIRGFKPELRKAPQRLDTLSTPEGMPIPINTLDEFRRDLVRLALVREQIDAIERTRIAQLEAAPKTGPHAMVRLLAKILGLGIETADMLVNEVLSRNLRDRRAVARYAGLTGSPDESGKKRRERGLAKAGNARVRRGLVQLAWRFLLFQKESALVLWFRARTESAAGVRKTKMIVALARKLLIALWRMVTTGEVPAGVVLRPSP

SEQ ID NO: 506658 - protein, 412 aa, unidentified
MLKIVYPICCGMDVHKSFLVACIASTNEQGVTTYKSKRFSTFTGDLRRCAAWLGENNCKDVCMESTGKYWIPIYNILETTCSIVLAHPKYVKAIRGKKTDKKDAKWIADIFKHDLISGSFIPPADIRQLRDLVRYRWKLTNFTTGEKNRAQNCLTVSNIKLDDVFSDVFGKAACAITARILEHPTEKITDVSGFRTKGMKATNEEVLAAVDGEMCEEQAEKLRIIRSHMDSLDLCKANLESLILTTAQKYLPQLNLVMTAPGIQSFSAIAIISEIGVDMSVFPSSKHCCSWAGLTPQNNESAGKKKTTRIGRAGAYIKPLLVQCALCAIRAKQFPEVRSRYLSLKKRRGHKKAIIAIARMLLTAIYNILKKNEPYDPELYRRADRPPTHREVSVDQAIFILQRQGYLITAPS

SEQ ID NO: 506659 - protein, 375 aa, unidentified
MKEKVRFLGLDVHAQTIAVAIAEPDGTVRSLGTIANRAESIRKMVKKLGPVVQLKACYEAGPTGYVLYWQLAELGVQCEVIAPTLVPMKAGDRVKTDRRDAERLARSYRSGDLTPVWVPDEGSEALRDLVRARESAKQDQLRARHRLSKFLLRSGQHPAAGVKAWTLAYMAWVRQLRFPQVAQESTRLDYLHEVEHMGERVVRLEQAIVEAVKLASPEIQEVVKGLQALRGIAQISAVTIAAELGNMTRFEGARQLMGYSGAVPSEDSSGKRMKRGSITKTGNAHLRRIAVEAAWSYRLKPGVGPALRKRQEGVPEEIKEIAWKAQHRLHKRYSRLAAAGKDQRKIITAVGRELLGFVWAIGIKAEAAVRQQKAA

SEQ ID NO: 506660 - protein, 480 aa, unidentified
MDTPVIGIDLGVTAASEVAVATASAIESTRKVPSTPEGLVAGFRRAAAGRAVAVVVESTAMAWFVAAVAAARAGIVHTMYRVSGAKAAALRNFYRAHTKTDRIDARVLARMPQVDDALRVYTLPPAPELALKRLVVLRHKLVGEATRISNRIRSTLHWAAPGLLPAAGGSVSAGLVAVLNRWPDLRNLARARAATIAATASWPLERAEAVKARAAESAAFYEGFVDFADLALELEVTLEHLACLDAQRTRLEARIATVHAQLHPADHLLSIPGVGPVIAGVIRAIVGTLDRFANLASLRAYTGLVPRENSSGDARRRGRISKAGPSVLRWALYLAADTARQWDPALAALYRRLMVERGRTHTQAMCAVASHLVGRIWAVVRQDRPYEWRDLEGNPITREQARAIALTLRVDPETRARLSARRKGGPRTSRARQPEAPQDITQPSEVNLIELALEAAKVLDRTSLDPPIGRPYSSEACKRE

SEQ ID NO: 506661 - protein, 300 aa, unidentified
MSDGSSEQPRFTAGLDLGDKYSYLCLIDQQSGQVIEEGRLRTTPEAFRRRFASEQPMRIAIEAGTHSPWANRVLEELGHEVLVANSRKLRLIYANKRKTDEVDAENLARLARVDPKLLYPLKHRGEESQAHMAIVRSRQALVSSRTQLGNHVRGAVKSFGARLPKCPAASFHKRASEHIPEALLPALGPILEQIGSLTRYIREYDRQLETISKETYPETELLRQVEGVGPLTALTFVLTVEDPYRFERSRSMGAYLGLEPASDRSGDRDPQKRISKEGDEMMRRLLVSGAHYILGPFGKD

SEQ ID NO: 506662 - protein, 343 aa, unidentified
MQVSTIGIDIAKTVFQVHGVDASGKVVLTRQLRRGQVLAFLAKLERCLIGMEACATAHHWARELSRLGHEVRLIPPSYVKAYVRRQKNDAADAAAICEAVSRPSMRFVPIKTREQQATLAVHRTRALLIGQRTQLSNALRAHLAELGLVADKGREGLAQLVALVKDESTLEVLPMAMLHVLRTLAAQLASVLEQIGELDRVIHAQHRASQVSRRLESIPGIGVIGATALTATVTDPAAFRSGRELAAWIGLVPRQNSTGGKERLGSISKQGDRYLRRLLVAGAMAVVQHARRHPDKRPWITRLLARKPAKVVAIAIANKTARIAWAIMSRGGTYRAPALAAAA

SEQ ID NO: 506663 - protein, 312 aa, unidentified
MSHKSAPPTVSTIGIDLGKNSFHLVGLDQRGAIVWQLKCSRAQLERRLANIPCCLIGMEACSGAHYIARQLAALGHDVRLIPAQYVKPFLKGHKNDYRDAEAIAEAVQRPTMHFVAIKTPEQMDLLALHRVRSRLVGQRTGVINQIRGFLIERGITVRQGVVPLRKALPDILSSNNDALSPRMVNLIAELAQDWRRLDERIAAVSDEIESLAEQDEACQRVMTVPGVGPIISSAVVAAIGNGAGFTQGRDFGAWLGLVPKQESTGDRTILGKILAAAAAFRRRGTQSRSLPLAIDAGFSRGSSTWCPSPSRP

SEQ ID NO: 506664 - protein, 460 aa, unidentified
MNDYFLGVDASKGYSDFVMLDGKKQIVIENFQLDDTFEGHSQLYELLRRFNQDYPQATIYAAVESTGGYENNWFQSLLNFQGSLPIKTAHLNPLGVSHNSKADLKRNVTDKISAQNVAEYMIAHPEKVSYQHQDSLASLRKQWGFITMLTKQCTQLLNQLESLVYNANPEILAYCKDRTPQWVLKLLTRYPTARRLSRAKVNSLARIPYVSTERAKELIATAKKSVSSANDKVTEQLIVSTVKQILHLKKLIDTQTEILANQCQIPEVELLKTFTGIGDYSAIGLMLQIQTVERFLTSKKLSSFFGIHPEYKKSGDGTYKYRMSKKGRKEGRRILFTVAMTAIQSNPLIREIYQQAVDRGMEKMAAMGLCMHKILRIIYGMLKHNKPFDPQIDLKNRQKKLPRQKKGGPDQNRRYQDFDSKAPISRRQKMKRKERKQSQNAVDVKHGISEAPVPTDQLAN

SEQ ID NO: 506665 - protein, 346 aa, unidentified
MMIIGCDYHPSWQQISWMDTLTGETEERELDHASGEAEKFYRGLPGPVLIGMESTGNCQWFVEMASTAGHEVWIGDAAKIRASEVRQQKTDRRDAALLLKLLLEGRFPRIWTPWGEDKDLRQLLIHRHKLVRIRAQVKNELQHLAMNPGVTRKNKLWSKAGEKVLRGLPLKPWASRRREDLFKVREMLNGQVDLLDRAVVEVAEKNEKARLLMTQPGVGPITSMAFVLTMGDLSRFPRGKQVASYLGLIPREYSSGGHQRLGSISKQGNGFMRMLLVEAAQVAVRCDPQMRQEYLHRCHKKAKGVAKVAAARKLAIRLYWMLRTNRGYPEVVRVESSSRVPLVSAS

SEQ ID NO: 506666 - protein, 323 aa, unidentified
MNKDIKYFGIDISYLVFDVTDSDGNYYQFKNNVTGFKKFIKLLDINSHCVMEATGYYHYQLAYHLLEFGIKVSVENPLSVKRFIQMKLSKIKTDKSDSKLICEYAQKVDLKLWKGNTKDEMECLQITRALSVYTKQSTMLKNKLHGEAVLGAPSKAVVRSLKRSLTQLKKEMKALEDKLLVLVKRAHQDLLTRLKTIPGIGPKTSIMLVVLTGGFDRFTSAAELCSYAGLTPVIRQSGSSVKGRPRISKIGNQKLRNLLFMCSFNACKYNKACRDLYERIVAKGKSNKLALIAVCNKLLKQAFAIAKSGLIYDKEYKSTLVRN

SEQ ID NO: 506667 - protein, 409 aa, unidentified
MKLFVGLDVSSQDAKVCFLNGEGDRLQAFTITNDLPGAITLKEKILDTASRSTCETIKIGLESTSIYSYHPAMFLHNDKELRTYGSQVFMINPKQIANFKKSYSEMDKTDAIDAFVIADYVRFGRHTMSIVKEEQYIALQQLTRSRYQLVHALTKEKQHFLQHLSMKCSQFSQDVNSSVFGNAMMELFLEQFSLEDLIQMPLQELALFLQEKGRNRFGNPEEVAKSIQKAVKGSYRLSKVVEDSIDLLLSTSIRIMRTYQTQIKEIEKGIENLMSTLPQTLESIPGIGPVFAAGIVAEIGQIDRFTDETKIAKYAGLFWKKYQSGRFTAENTSLSRAGNQYLRYYLVEAANSVRRNVPEYRDYYAKKSAEVPKHKHKRALVLTARKLVRLVDALLRNNQIYAFGRSADK

SEQ ID NO: 506668 - protein, 338 aa, unidentified
MESFVGIDLHKYVSQLAVLRESKSPSQLRFANDVGTVEKVLKKLPEGSKIAVEAMGSWWWLVELAQKSGHEVFLSHPKQTKAIASARLKSDKVDALMLAKLLKADLLPTVWIPPATQRHIRELLSHRGRLVRQRTAVINELRAVYAKRNIDPAARLERVRPLVSGAEDLGGYGPRIVEEDLKLLEFINRQIGGLDKELIKIALEDAQAKRLMTIVGVGAVSAVAISCWIGEIGRFSNAKKLASYFGLAPRVRQSGDTERHGHITKEGNRMVRMLLIQAALVHTRRGKGSIRKHYLGVVKRRGKQIARVAVANKLIGAIFHMMKEGIDYPDFIRRSGAQ

SEQ ID NO: 506669 - protein, 416 aa, unidentified
MNAVGIDVSSRKSTVAVLRPLGEVVCLPFDVTHDIAGLASLAEKLKAIDGETRVVMEHTGRYYEAVEKALHEAGLFVCAVNPLLIKEYGANSLRRVKTDKADAVKIARYALDNWADLRDFTPMDAIRYDLKTLNRQFQLASKQRTASANNLIALLEQSFPGIRKCFDSPVRSDGTQKWVDFAHSFWHVDCVRKQPFAAFCERYRKWCKRHAYLFKLSNAEEVYALAKRAVVLTPKSKVVKVLVQEAANQFISISRSVEVYRAEMDRLAAMLPEYPVVMAMYGVGKSYGPQLMAEIGDVRRFERKQALVAFAGIDPMPNQSGDKNVRSNKSSKRGSPYLRKTLFNVIRTYLQCAPQDEPVFQFLNRKRAEGKPFYVYMLAAANKFLRRYYAKLRDYFASLDTLQPVASIPTILKATL

SEQ ID NO: 506670 - protein, 324 aa, unidentified
MTAVVGIDIAKHTFDIATLQSNGKHRTKAKMPNDLKGFEALQQWLLKHAEPQAWIVMEATGIYHEALAEWLFKQGYRVCVLNPAQPAFYARSQLQRVKTDKVDAKLLADYGSRHLAELRSWQPEAPEIRRLRALVHRLKDIQELEQIERNRLGSTQESKVRDSIQSVLDHLKKQTDETLKAIKQLFDDNDDLRGKRDLLTSIDGIADRTAALLLAELGDIQRFDSSKAVTAFSGLNPRLQESGKHKGHVRISRMGSARLRAGLYMPAVSSLTHNRAIREMAERMKAKGKAGKQIACAAMRKLLCIAYGVLKSGRPFDPALAIAR

SEQ ID NO: 506671 - protein, 417 aa, unidentified
MSEYAALVAIDWADQQHAVSLYDQSTGLREQTIVKHTPQALQEWALGLRQRFAGQPIAVCLEQSRGPLIYALLQYDFFVLFPINPATLAKYRQAFSTAGGKDDPSDADYLLDLLQHHRDRLRVWRPDDEKTRTLSLLMEQRRRLVNDRTRLSNRLTALLKGYFPQVLDWFEDIRTTLVCDFLARWPQLSLLQRARPATINQFLRSHHSTSKATNARRLAEIKSALPLTNDAAVITSSVLNVKVLVAQMKIVIAAISEYDRHIEALCLTHEDYQLFAALPGAGLIHAARLTAALGSDRSRWQSANELLCFSGIAPIIERSGKQFRVRWRYFCPKFFRQTFHEFAAQSIQDSFWARAYYYSQRAKGKDHHAAVRALAFKWMRVIWKCWHARTPYNEIVYLETLRKKGSSLLKFAADYQQ

SEQ ID NO: 506672 - protein, 372 aa, unidentified
MNANGITWVGMDAHKLSIKVAALFPDRAEPVEWTEATTPEAIRRLARKLRREAPGEVRACYEAGPTGYGLQRLLESAGVICEMIAPSLTPVRPGSRIKTDRRDARKLAELLRAGLLTEVHPPSEADEALRDLCRCRDDVRVDLLRARHRLTKFLLRRHCIYRQTKHHWGTRHWAWLEQLRFDDAVSQATFDSYMLAVQQLDERLARLDAQLAEFGGRDPYREPVGWLRCFKGIDTVTAVCLVAELHDFRRFRSARELSSYVGLVPSEHSSGERERRGSITKAGNRHVRRLLVEAAWHHRHRPMISAPLRRRREGQPVRVLAIADRAQERLCARYRRMTGRGTIQPKTIVAMARELTGYLWAVLHPDATATRN

SEQ ID NO: 506673 - protein, 343 aa, unidentified
MQTIATIGLDIAKSVFQVHCVDAVGQVVVRRQLKRRYVVAFFEKLPPCLVGIEACASSHYWSRELQALGHSVRLMPPAYVKPYVKRQKNDATDAEAICEAVTRANMRFVPTKTPEQQSGLVLHRTRQLFIRQLTAVTNAIRAHLAEFGIVAPAGRNGVEELLLVVTDTNNKRVPEVARVCLTALGVQLQKFKEQILEFDRLITAWHRSNEMSMRLDDIPGVGPALATALVASVADPKAFRSGRNFSAWIGVVPKQHSSGGKDRLGSISKQGDRYLRSLFVIGALAVIRYAKIHGTKHRPWLTALLARRPTKVAAIALANKIARMAWAMMAKGERYKEPVALAA

SEQ ID NO: 506674 - protein, 344 aa, unidentified
MEPMYYIGLDVHKRKISYCVKDSSGKIYAQGSLPATRMDLDLWMKTLPHPWSAAMEATMFTGWIYDHLKPHAAALKVAHPLMLRAIAAAKKKNDRIDANKICDCLRCDFLPECYMAPTAIRERRRTLRYRNLLVRQMVQMKIKISALLMEAGVSYNKQRLHKAGYFRELLASNPDIDEGLGALLRLGRETVVRLQKTESAMVRSLERDSLLIDRVERLMTIPAVGPITALTWALEVGDVQRFSSIKKAISYCGLCGAERSSGNTVQRTPLSKQRNKHLQTTLIEAAKMAPRNCADLAMLYDKEKQKGNANRATLAVARKLVAYLMAVDRGQRNFQVVETNCIAA

SEQ ID NO: 506675 - protein, 404 aa, unidentified
MIFVGNDWAEGHHDVYVMDAEGARLAALRLPEGLTGIRALHELIAGHAVEPSDVVIGIETDRGLWVQALGAAGYQVFAVNPLAVARYRERHQVSGAKSDAGDAKVLADLVRTDRHNHRALAGDSLEVEAIKVLARAHQNLIWARTRHTNALRSALREYYPAALEAFDDLADRDALAVLGRAPTPADAARLSLAKIRSALKHAGRQRNIDARAQHIAAALRTEQLSAPAPVAAAFAATTRAAVGIIIELNRQISDLEAELATHFEAHPDADIYLSLPGLGVILGARVLGEFEDDPNRYTTAKSRKNYAGTSPLTVASGKKRAVLARRVRNRRLYAAIDQWALGAINTSPGARAFYDQHRAAGDLHHQALRALGNRLVGILHGCLRHHTHYSEHTAWAHRQITQAA

SEQ ID NO: 506676 - protein, 325 aa, unidentified
MGTSPHQQGWDTKMEKLSYGGIDVSKDRLDVVVLPEERFFSVSNDAAGWAELVARIRPLAVSAIGIEPSGGYERGIIRALLAAGLSVRRINPNKLRQFARARGVLAKNDRLDARLIAEYVAIMPTRVVQRDEAVEKLAEVVTMRRQLRDEHVTVENQAAHIEDAMLRRLNKRRLTRLEADTRLLDKRLAEMVATNAALAQRYELLTSMPGVGPVLAFTLIALLPELGQMSRKQIAALVGLAPYDFDSGKLRGHRSIYGGRMPVRNVLYMAALSGCRHNPALKAFHKRLAAADKKSKVVIVAVMRKMITTLNAMLRDNVEWQPKSA

SEQ ID NO: 506677 - protein, 329 aa, unidentified
MSAFVCGLDVHKDSTYATILDSRGKIVNQTRMSNERVLAYLSHFSVGKVAMESSNQVAALYRRLESLGYSVVLSHPKKTRYIAEAKIKSDRVDSRAIAELARLDALPLAYMPEKEVSVLREQVRRRAFLVRQRVKLRVKIKSILTYEGVRWPSESGLFTRKGVEWLHGLCLEPVESYLRIMRVFDDEIRLLNRQPRGLAENDEDVKLLMTIPGIGYYSALLVKSEIGDINRFPFGDRLCSYAGLVPSTHTSGNTVRHGGITKEGSRWLRWVMVEAAQTHVHKYDTAITRAYHRIAERRGRKVAVVAAAHKLLMCCWAVLKYRESYHDQA

SEQ ID NO: 506678 - protein, 375 aa, unidentified
MEIHTIGIDLGKTVFHLVGLDARGEVVVRKKCSRDQILRFTANLQVSLIGMEACGGAHFLARALREQGHDARLIPAKYVKPYVKTNKNDYIDAEAIAEAVGRARMRFVPIKTDDQLDLQSLHRVRERWVSARTAVINQIRGLLLERGITVRKGRSHIEESLPGILEDADNKLTGALRALLSQLRLEMQYLQRQIDECNKSILRISDELEDCRRILAVPGIGPMTATATIAAIGNGSAFKKGRGFAAWLGVVPGEHSTGGKQTLTGTGRRGNRYLRKLFIQGAHAVLQQRMKQSNGLSTWLAQLTSRKRIQVAAVAMANKMARMVWAVLSKGEAYRPPLLAGTAKPESESDKQVDRTYRTKKRQSTAKTTMRGPPG

SEQ ID NO: 506679 - protein, 402 aa, unidentified
MANSPTRFFGLDIHKEYFVAVGVNAQREVVFGPQRVSNYQLDDWVSRVLTPQDAVVMEVTTNSCFFYDTLLPKVYSVIAVHPPSVALVTNAQVKTDKKAALTLAQLHAAGMLTGVWIPPHEVRDLRALIARREKMVRLSTIAKNRLHSILHRNHLTLPEKPFSPEQRTWWESLPLSATEQFLVRSDLDTLAFGQKQIEQAEEYLKKVSAKDERIPLLVQLPGVAMLTAITILAAIGDITRFPTAKKLVGYAGLGARVHHSGMTHSSGRITKTGRRDLRRAMVNAANHAIQHHPHWKKEFERLESHLRRSKAVVAIARKLLVAVWHVLSEKAADRFADPRYVACSFFAFAYRVGVRNLPKGQSALAFTREQLDRLGIGKDLQEIPWGSMRHKLPPPKLLIGKE

SEQ ID NO: 506680 - protein, 324 aa, unidentified
MFYLGIDVAKAKIDCCLILENSANKKKTKTFSNTPKGFEQLQIWLNQHAATSTQTIILMEATSIYHELLAKYLFDEGYQVSITNPARARYFAQSMSKLNKTDKVDSEVLARFAMTANLHFWQPLPKHIQLLNALLDRRAVLCEDLQREKNRLEKAESTFTMEPVLQSLHKSIEQLNKHIQGIDQQIDDHIDQNPDLKKHKELLSSITAIADRTRLLKLSFLRSHTFERASQAAAFVGLVPTQKQSGSSIHGRSHLSKAGSSKIRAGLYIAAIVATRHNPHIKGMNERLLANGKTKMMAIGAAMRKLVHLCYGVLKHQQPYQADY

SEQ ID NO: 506681 - protein, 322 aa, unidentified
MRSSIGVDVSKRKFDAALLTEQGKYRCKVFDNDAKGFQAFRDWIKAHAAEQAHICMEATGVYHEALATFLFDHQITVFVINPLRVKRFVESEGLRNKTDEGDAKALARFAAKNDLDAWEAPSKGVRELQALVVRLESLQAMRQAELNRLDIAHPTVRGSIEAVVAALDREIATVRSLIKQTIDDDPDLQQRKDLLETIPGLGDATIPWLLAFIGRPERFKTVKALIAYAGLTPAVRQSGTSLDKRQGLHPAGHRDLRKALFYPAMTAGRFNPIIAAFWQRLKAQNKPGKVIVVACMHKLLAIAYGVLKSKRPFDASLVPKGA

SEQ ID NO: 506682 - protein, 344 aa, unidentified
MNVKRIGIDLAKQVFQIHGVDSHEQVVLRKRLKRDQMHRFFKDLPPCLIGMEACGGSHYWARVLMGYGHTVKLMACQFVKPYVKGGKNDANDAEAICEALSRPGMRFVAIKSEQQQAVQADHRIRSRLVKVRTALGNEMRGILAEFGIVLPAGIRHIRSAMPMLLDDEEQKLPASIKSLLAELAQELRQTDDRVAQHDKRIQATAKEDERIQRLLEIEGIGPITASALVAAVGDARQFSSGRNLAAWLGLVPSQHSSGGKERLGHIDKRGDTYLRTLFIHGARAALNASGAKEDRRSRWAQALATRRNRNIATVALANKNARIAWAVLSRQELYRGAVMHDVHG

SEQ ID NO: 506683 - protein, 365 aa, unidentified
MTTRERSTSSSTDPPSRGEVVLGVDTHGEVHVAAVISPLGKVLGTESFPATAAGYRQLLVWARKRGTVRRAGVEGTGTFGAGLSRYLLAQQVEVFEVNRPDRSARRLLGKSDPLDAQAAARAVLSGRARAQAKAGDGPVHSARIYKLAKDSAVKARTQAINQLKAVLVIADPALRERLSGLGNAELFRTCARLGPPDGGGDEDAVTQATHMTLRMLAERIEQLTAQINELNQRLTRLVERNAPQLLTPVGIGPDSAVTLLITMGDNPERLNTEASFAALCGVSPIEYSSGRRRTRRLNHGGDRQANAALHRIVFTRLRHDPRTQAYYERRTQEGKTRREIVRCLKRYAAREVFNLVRPVSRTPAL

SEQ ID NO: 506684 - protein, 391 aa, unidentified
MCRKYRSLDPLFGGLAVEHCILVGCDLHDKSMMLKYAVGTGAMKKRLFGNTRASHAELIRWLHRLSAEAGDAKVYFAYEASGLGFVLYDRLRAAGIVCYVLAPTKMERSVKSRTTKCDERDAEAVLRPLRSHVLLGERLPAVTVPDAVGRDDREATRGRQAVGDRVAGLKTEVRTLLKRYGVEKPKGVGDSWGVGHRRWLESLVVAGGEVGTYGAVCLGSLLAQMAALEREVEHFDEHLKSLSNTERHGAAVKRMTAVKGVGTLTALTFLLELGDPKRFHNRREVGAYCGLVPTQSESGETTERKGHITHQGPPRIRRVLCQAAHVWVRWDPAAQATYERLVARNSKKRKKIALVAMMRRLAIRLWHLALGEGLPEDRPAARPSPGVPRQP

SEQ ID NO: 506685 - protein, 424 aa, unidentified
MKVTYQTCCGVDVHKSFLVATIVKTSSGIEPSYQKKRFSTFNNSILEFKQWLLDNDCHDVCMESTGKYWVPVFNLLEDEINVVIANPKWVKAVKGNKDDTKDSKWIGDLFRLGLVKGSYIPCKIVRILREYTRYRYKLVSCRSSEKNRYQNALTVCNVALDSVVSDIFGKSSTSIIDYLLEQSGTSINHEEIASKLLRSLKSKEDAVIESIEGYQMTDAQKYRMRLVRAHMDYITAEINDVDKMIENMISSNSDFENAVQLLCTIPGVKRDSAITIISEIGTDMSQFSSSKRLCCWAGLTPGSNESAGKKKSVRVTRAGVYLKPALVQCAHAAVKSDKSPYYKKKYESLVKRRGKKRAIIAIARMILTAIYQMLSTGEQWNPSDLYKIDMPAALVEKQKAKAIRQAKKLLQREGILPPDEPLAS

SEQ ID NO: 506686 - protein, 438 aa, unidentified
MLRIVVRRGAGLDIHKKMVVATRMQVNEDERMVWETKTFGTMTSELLELCDWLSDWECSHAAMESTADYWKPVFNVLEGSLEVMLVNAQHVKHVPGRKTDAKDSEWLAELLIHGLLKPSFIPPKPQRELREMTRYRATLVRDRARVVNRVQKQLEGMNIKLASVATDVMGVSGRAMLNAIIADRMTPLEMAELARGRLRNKIAELEKALTGIVGPRQRKVLALQLAHVDFLDEQVEELSAEITRHVQAMDEPPVSGDSGTGSNPPEERDSGELPPPMNFEQAIILLDTVPGVNQRVAETVVAELGVDMRRFATPEHAAAWTGIAPGNNESGGKRYSGRTRKGNQALRSVLIQAAWAAVRKKDIYLKAKYDRLVVRRGKKRAIVAVAHSILKSMWYMLAYHVPYQDLGGDYFDKRRKESKVNYHLRQLQKLGYSALLQP

SEQ ID NO: 506687 - protein, 350 aa, unidentified
MNITTYALDLAKQVFQVHWVEPDTGEIRRKALLRAEVNAFFAQRPPGVVAMEACGSAHHWGRVLRGLGHEVRLVAAQFVRPFVKTNKTDAADAEAIWEASQRPGMRYVALKSEEQPAVLSLHRMRQQCIKVRTMQAHQVRGLLYEFGAVVPKGWRALLAQAVPLLADETRCAVPELVRRQLLTQLEGLRALTRRVTELERQIGSWQRGERECQRIAAVPGVGKLTATAVIATVGDARAYRSGREFAAWLGIVPRQSGTGGRIKLLGISKRGDPYLRTLLIHGARTVLNHQSRADRQLDPWLKGLISRRPKNVVIVALANKMARTIWALLAHGREFDRCWSRAWMPAPALS

SEQ ID NO: 506688 - protein, 392 aa, unidentified
MICVGIDVAKDKHDCFILSSEGEVLADVFTIANNAEGFDTLLQTIRGCARPEDKIKVGLEATGHYSYNILGFLLNKGLATYVINPLHTNLYRKSLSLRKTKTDRIDARTIATMLMSDVDLKSYTDTSYHNEELKSLTRYRFDKVHERAKLKSSIARLVCILFPELEKLVPTLHMASVYALLSEFPGARQVASAHLTRLTNLLHEASKGRYGREKAIQIRDAARKSIGSAMPAKSLELKHTIHLIGELDAEIEEIEAEIDSIMETLHSPITTIPGIGSRMGAMILAEVGDFSNFDSADKILAYAGLSPSTYQSGQLTSSYAHMEKRGSRYLRYAIFNATKFVCNWDPIFAAYLAKKRGEGKHYNVAISHAAKKLVRLIYTMERTGQPYRRAAV

SEQ ID NO: 506689 - protein, 376 aa, unidentified
MKKYSKFTGLDVHKADISIGIASADRGEAGYYGTIENTPYACLKLAKKLSKGGEEVLFCYEAGPCGYEVYRQLTKAGYDCLVIAPSLIPKKAGDRVKTDRRDAVSLARLLRAGELTPIWVPDREQEAMRDLTRSREDMKGMERHSRQRLGGFLLRHGRGYHGRSKWTKTYFLWLEGLRFETAAQQIVLQEYIDMVKHAQGRVAAMEEEMRKALDGWTLKPVVEGLMALRGVNLVTAMTIVAELGDLSRFESPGQLMSHLGLVPSEHSSGERQKRGGITKTGNGHVRRVLVEAAWCYRLPARKTAHLRRKAEKSSKAVQEIAWKAQKRLCSRYWYLINKGKLPVKSCTAVARELVGFIWAIAREVMGKGAVDATMNG

SEQ ID NO: 506690 - protein, 408 aa, unidentified
MNAVGIDVSKGKSMVAALRPMGEVALMPQEFLHTEVGLEQMDYAILALGEDTRVVMEATGRYHEPVAAALYACGIHVCVLNPLYIKQSGGGSIRKVKTDKADAMKIAKYALDNWVDLREYTPMDTIRQQLKLCSRQYNLYMKTVVSLQNNLISLTDKTFPGVNELFSSLERTDGHQKWVDFVMTFWHCDCICHVSENAFTERYQKWCNRKGYHFSEEKAKDIYAGSCGHFTTLPKNDNTKLLITTAARQLLAGKMTLAALRTEMTRLAKQLPEYETVRAMYGVGETTAAQLIAEIGDVRRFPRRSSIVGFAGVDTGVDSSGKHNAKSVPTTKRGSTHLRKTLYQIVCTYLKKSPIDEPVYKFLDKKRNEDKPYFVYMTAAQNKFLRIYYARVKECLETFDAHQKAAQD

SEQ ID NO: 506691 - protein, 312 aa, unidentified
MAKPVTKITLGIDVAKDQLVICQWGCEQLLTLVNQPAEIQAWLETLCGPVRLAIEPTSHYHLAVVEAALACGHQVYLVNPRQLVHYRYAVDVRNKTDAVDAWLLARYLEHEAAQLRPFRPQDRRAQRLWALLTRRATVVQSRQQLQQSFAEVRLSIQALLSQFQQLLQRLDQQIQQLLRELGWWPDYLRCQSIPGIGPANAAALVAAYHRGAFAGSDAFIAYLGLDIRLRESARFKGKSKLTKRGEPELRRLLYCGSNAACNHPRFAAYRQRQLDKGLSKIAARVALARKLARIAFTLMQNQQSFTDQPKIA

SEQ ID NO: 506692 - protein, 370 aa, unidentified
MKEPTTSYIGLDIHKESIAMAIADADRAAPRFIGTINPVPAELCKAMRRVCTKESTLVVYEAGPCGYGWVRYLRKQGWMCDVIAPSRITRKPAEKRIKTDRRDALLLARESRAGNLTSIVVPDERDEAIRDLVRTREDARAARHRVRLQMQAMMLRHGRHYQGKSSWTQAHDRHLSTIRFEHPAQELAFNEYRLASKEACERVERITEALRTHCIEWRMNPVVKALMCLKGFDFVAAVAFVAEMGDLTRFAHPRALMAYLGLVPSEFSSGPNRRQGGITKSGNKHARRILVEAAWNNRFKAQVTRGLEVRQEGQPKIIRDISWKAQLRLSKRWRSLSMGRKLAQNKICVAIARELSGFIWDVARHVKVSP

SEQ ID NO: 506693 - protein, 374 aa, unidentified
MENIITYVGMDTHKKQHRIALHHPGQEEIIDFTINNNVRDIKKMLNKIKKQAPGQVEFCYEAGVCGFTLKRRIEDMGCKCAVIAPSLIPHKPGERVKTDRRDAKKLLMLFKAGLLTEVHAPDEQAEAARELTRLRETANENLKRIRHQVLKFLTRHGYVYRQGSHWTVKHITWMRTIKLTEPMLTKVFEHYFDQMIYCTTRLENLGKEVELLAESEEYKEVVGVLSCFHGIRTLTAITIITEIFEFGRFESPRHLMSYLGLTPSEDSSGEKQRKGSITKAGNKRVRRLLNETAWHYRHRYVPSKVLNKRRQGQPQWAIDIADSAGRRLTKRHRHLINNGKMPCKSNIAIARELAGFIWFAVTQYQARKNTKAVA

SEQ ID NO: 506694 - protein, 341 aa, unidentified
MKKFIRIGVDLAKNYFQVHALESEDGRAVTRKLKRSKMHEFFSRIAPCVIGMEACGSAHYWGRELKAMGHEVLLMPPAYTKPYVKRGKNDAVDADAICEAMSRPGMRFVPIKSPEQQAMLMLHKTRELLTKQRTMSVNALRGHLSEFGIVAAKGIGRVDELLDLADSDATLPVAAKAGVNVLAQALEGLDTAINALENEIANADAQNEMVRLLDKVPGVGKLIASVIAASVPDPSVFKSGRDFAAWLGLTPRQNSSGGKQTLGSITKQGNRYIRKMLVLGATSLLNVVGKRKGALHDWIVGLLAKKPARLVTVALANKLARILWAMMKTGECFRTEMFAKA

SEQ ID NO: 506695 - protein, 350 aa, unidentified
MVMLKRTSMEEVSVEEVTVIGIDLAKSVFQLHGAAASGRPVFRKKLSRAQLTRFMADHPPCLVAMEACASSHYWGREFMKLGHKVRLIPPIYVKPFVKRQKNDANDAEAIAEAVVRPTMRFVPVKSAEQQARSMVFKTRDLLVRQRNALINALRGHLMEYGIIAPPGRTFVRKLDAPESTLPSGVTELCRLHLEQIGSLDIRIMRIEKRLKEEAKSDPETIRLQTAPGVGPVSAMAIQAFAPPMEGFRRGRDFAAWLGLVPVQKSTGGRQILGRTSKMGQRDIRRLLIIGAMTRVRWAVKNGPPKGSWLGQMLGRKPRMLVAIALANKTARAIWAMMTKQEDYRDPALAV

SEQ ID NO: 506696 - protein, 362 aa, unidentified
MQKHIFVGIDLGDKNSVARIGVDLEKSERFGFVNTKAGRARLILEVKRRGEQVGGAVVVMAYEASSCGFVLRDQAQAAGIDCRVLAPTKMEKSVEQKRNKNDDRDADDVLEKLRGHVLAGNRLPMVWVPDLETRDDREVLRTRLALSERQTQIKTQIQMLLKRHGLEKPPDLGSTRSKPYRQWLESLSQWESLRWGTRQSLASLLRQLSGIEGEMENLEKLVRQLGSLPRHKPIVEALMKEKGVGLLATLVYRTEIGQARRFHRGRHVGKFVGLTPTSHESGQQNDRKGHISRQGPPRLRKVLCQASWVHVRHDPHSREAYQRLVAKNPKKKKIALVAIMRRLAVRLWHRMREVELKQATAS

SEQ ID NO: 506697 - protein, 345 aa, unidentified
MQIKSIGIDLGKTTFHLVALGNRSQVVVRKKFSRQQLLLYTANLPSSLIGMEAGVGSHFLGRALREQGHEVRLMPAQFVRPYVKSNKNDYQDAEAIAEAVERENMRFVPIKTEDQLDLQALHRVRERLLSRRTSVINQIRAFLLERGISFAKGPASLRRQMPEILENADEKLTARMRRLLDFLWQEWKHLQLQIESLSEDLEKIANSDAACVRLQKIPGVGPLVATAVVSAIGNGAAFHKGRQFAAWLGLVPRQWSTGGKAKLLGISKRGNPYLRKMFIHGARAAVLRVKREGSCLGQWMSGLETRAARNVVIVATANKLARISWAVLSSGNDYRPMHTAVSCSS

SEQ ID NO: 506698 - protein, 352 aa, unidentified
MRRLKEKMVDKEDLFIGIDLHKQRWHVTIRTFDVELFSASIPGTWEALHGVLARYPGHPMQAVYEAGYFGFRLHDRLVAHGIPCLVTPPSLVPQEYGNRVKTDRRDSRKLAHLLAKGLLKRVWVPSEEELYHRQVVRRRRQLVRDRVRTQSRIKAELRFYGIHLEEPRGRWTQMYCETLRRIRFGNRWMQESFNRLLEQYEFLSVQIDKQTKLLGELSETALYQKRVEILQSIPGIGLISTMELLLELQDVSRFRRAEQLAAYVGLTPSQYSSADKVHMGRITGIGKNTLRSLLVEASWTLISKDQAMREKYDRIKIRSGGKRAIVAIARTLLLRMRRMLLDGQAYVLPRAA

SEQ ID NO: 506699 - protein, 391 aa, unidentified
MVCVGIDVAKDKHDCCILDSEGTALVDCFTIPNNMDGFKSLLQTIQDCSQKSDKIKVGLEATGHYSYNILGFLLDNDLPVYVMNPLHTNLYRKSLSLRKTKTDRVDAKTIATMLLSDVDLKSYTDTAYHNEELKSLTRYRFDKVQERAKLKQSVSRLVTILFPELEQLVSSIHGTSIYALLSEYPGAKQISEAHLTRLANILVTTSRGHYRKDRATHIRDAARTSIGSVMPAKSLELKHTIKLIQELTSEINEIEDAIRKIMDELKPPILSIPGMGFYSAAMILAEVGDFSNFNSPDKVLAYAGCSPSTYQSGKLTNCYAHMEKRGSRYLRYALYTATKYVCYWNPVFTEYLTKKQAEGKHYNVALSHATKKLVRLIYALQKSGKAYLAIT

SEQ ID NO: 506700 - protein, 395 aa, unidentified
MLYLAIDQHRKQLTVNLRNEAGDVILKRQVSTEWKRVREFMEEMQKRSVPEGGFVAIVEVCGFNDWFLKMLTEYGCRETVLVQPEKRSKNKTDRRDANALGELLWTNRERLLAGKRVQNVRQVVPPSERDAEDRQLTALRQRVGRLRTRTINKVQHLLLKHNLQQECPTKGIQTKKARKWLETLPLGTIDRLEMDQLLAQWELLDKQLEDLDPMIGERYAENKTAQIIGSIPGAGAYGSLAIAARIGSIDRFPHARSLAHYWGLTPSSNNSGDATRRLGSITKEGSAIVRFLLAQIVVHVLRRDAVMKEWYRRIKKRRGAKIARVAVMRRLATIIWCMVKRQQYYQRGGAPATGSGSECMNVPDRNAFLEEIQGRSRNSKEKGRQGLETVAAARP

SEQ ID NO: 506701 - protein, 538 aa, unidentified
MAPKRSRTRTRRFVTTVHKPHGVIQPRVQSVGPERFGILSVDCAKHRFKWMLCDFYGTVLISPTTVAHNRPELDATIAQLQQARQEHDLRDLIVAVERTGRYHHVPQHLFAGAGCEVRLVHPFTSKQYRQAIDPGVKTDDTDLAALHRAAVNGCALREAALEPHDRELQLLIRQRRDWVRKTSALCCQIREYLHSAYPGYLTCFATPWHSEVMIALVQRFESAAAMLDAGVTGLSDALRQQGVRFQRATLDTVLAWANQAPSPDCAAALQRRIALALEEDRHRKTLEIQALEREIAHRLARTPYVLLLSFPGVNVVSAADFAGEMGPIANYLTAKAITGRAGLYPSRYQSDQVDRANGSLVRCANHTLRAAIMTIAENLIACNDYFKLMTERWKAMGHDARANRVRVACRFCRIAFQMVAGRQVFHHPGIPGRHDILDKLNTFHREHGTGTAQVLADLLAATGQVPRSAHAEEARPLLDEQARRPRRRGPQLLGDVLMEVLARLGVIQSSPSGDVRPAPPEPATRAENAFEPRGANPR

SEQ ID NO: 506702 - protein, 329 aa, unidentified
MSKNSIVCAGIDTSKLKLDVAIRGVKGQLLELLVENTADGHEVLSAWLREHKVKRVGIEASGGYEQAVVLYLRKKKFVVVVFQPKQVRAYATFNLQIAKNDKLDAALIADCTAAIKEINAPPDERMTAFAMRMTFIDQITEDVARIKTRCESCRYKQILHYWREEIARLERRKKAEIKALAAAIREHGDLSKRLDLIESVDGVGLLTAVAILVRMPEIGTVTREEVAALAGLAPYDHESGNHVGERHIKGGRGRLRKSLYCAALPASMRWNHQLVSMYRRLIAAGKLHKVALVACARKLLIFVNTVVERGSPWEKSRAPGKFELGLRAA

SEQ ID NO: 506703 - protein, 267 aa, unidentified
MTFVGFDLHKRHITACALDASGVVVAEIRQLTTTLAPVLEWLAALPAPITSAMEATLYWEWLVARLEQAGHRAHVADAYQVKLIWHARAKTDTVDSRKLAELLRTNLLPTIWVPDFETRRRRQLLRGRAFLVRERTRIKNRIHGHFTGENQRFARSDLYGRAGRALEAVALSPVVAAETQRRLHLHDVLTKEIARLDDQVKRAARCDPAAQRLATIPGVGVFGALFLHAEIGPIERFRSSHQLAAYAGLVPTTRSSGGKTTQGRSQR

SEQ ID NO: 506704 - protein, 402 aa, unidentified
MNSVGIDISKGRSTVAVMRPFGEVVISPFEVRHTDSELSELARQLKSLDGETRVVMEATGNYHTPVAKLLHDAGLYVSVVNAKLVHGYGNNDLRRVKTDKKDSVKLANYGLDRWLTLPRYVPEEDTRLLKNCYRQYRQYSKVQTVLKNNLISLLDTVFPNANRLFSSPIRGDGSEKWVDFVAEFWHCRCVSEKSEKAFTNKYQRWCGKHGYNFSEAKAHTIHAETCGHIDVIPKSETTKLLVEQAVAQLRATSAALAALKHEMQSLASVLPEYPVVMDMFGVGPTLGPQLMAEIGDVRRFYSKKALVAYAGLDAPPNDSGDVTGRHKSMSKVGASSLRRTLFLVMSVYLQNAPLDEPVYQFMDKKRAEGKPYRVYMMASANKFLRIYYATVKAYLESLEHTA

SEQ ID NO: 506705 - protein, 342 aa, unidentified
MEISTIGIDLSKTSFHVIGLNAGGEVVLRRKLSRKQLLQFTSNKQKMLIGMEACGGAHFLGRALRAQGHDARLMPAQFVRPFRKSNKNDYLDAEAIAEAVQRPTMRFVPIKTDDQLDLQALHRVRDRWVARRTAVMNQIRGFLMERGITVRKGPSHLMTRLQEMLEDAELPLSGRLRLLILELKHEWDELEARIETANSELQRIAREDDACRRLREIPGFGPLVSTALVAAIGNGITFRKGRDLSAWLGLVPRQHSTGGKTRLFGISKRGNEYLRRMFLHRARSVVAQADRNRSALALWMVELSARTHRNVVVVALANKMARTAWALLSKGTSYCAPALTAA

SEQ ID NO: 506706 - protein, 408 aa, unidentified
MKRYYLGEDWADEFHQVWVSDPEGKKIAEMKVVQSTAGLGELGRWLHERKAEEIELWAAIEKPHGRIVDFLLDHGAVVYPVNPKALDRARDRFRMSQSKSDLFDAYVLAEFVRTDHVHLRALEPNSEPAQELKMLTRDHDRLTRQKTRLLNQIEITLKEYYPRPLEVFSDLETHIARDFLKEYPTPQALSKLNRRRWNHFARRDHHLSEARCDELWDKIDKPQLTSPPYVIRAKAKLLLALVVQLEALLPAVESYSEEIKRFFDSMPAAELVKSLPGGKSGTTIPKLWAELGDAKNRWQSFRHLQAEGGGVPVTKSSGKSHVVHFRFACNKYLRHAIYWVSFNSLNRCEWANKYYRDQRAKGHSHPRALRALGAKWLKIIFVMWRDHKPYDENYHLANMARQRMRQAT

SEQ ID NO: 506707 - protein, 359 aa, unidentified
MKTRLSNKQKWLKTINLTADDELYIGIDVHKKSYHIAFWLNNAPAINFVTTADNRKTIQILKRFRPSIKLIVYEAGPTGYSLARLLEQNKLPVKIAAPSMTPRQSAVQSKTDSLDCKKLAKYAAKGMLKYVTIPTIQQEAHRQLARMRQLLVEKQSRVKLQIKSFLLQHSIPQPQGLTCWSNQAVEKLSKIIISKQLRYCLDLLLEQLKFHKAQISKLEKETKEYFAKNHIGKKAKLLQTHPGVGPTIARQFVTEIFNPKRFKNSTHISKYLGLAPTVKQSGQTLRNGPISKTGRPVFRSNLIEASWIWIRKDPLALKTYHRILSNTGQKNKAITAMARKLTIHLWKMSCDNKPFIPGY

SEQ ID NO: 506708 - protein, 417 aa, unidentified
MKCFVGLDVSSTKLDVCIMLSDTTTPFTASLPNDLVGAQEIKKQILELNDTYSFERIVIGMEATSLYSFHPAMFFHEDSDLKALMVEVMVEQPNKIKKYREAFEESKNDTIDAFYIADYFRAERFSPAFLKEEKYLALQHLTRTRLQLIEQLTRTKQHFIENIYYKCNTLSTEIKNESLTTSLWSSTIISLMTEDYTLDELATFPLNDLADFIQKLGRGRFKAPEKLAKAIQSAVRGSYRLPKLQQDSINVILGLLAREIRNLEKLIKDIDKAIEDMVEVIPEYQCLTSVPGVGKVYAAGIIAEIGQIDRFKDHPQVAKYAGLNWKQNQSGNTNSQNTELVKRGNRYLRYYLVEAANSVRRHDSEYQTFYKKKYHEVPKHQHKRAIVLTARKLVRLVDALLRNRQLYAPPRRLMEDR

SEQ ID NO: 506709 - protein, 523 aa, unidentified
MTATRVLRRSPGRRLKVVQKPRGTFHPRVQKVGPEHFGIVSVDCAKARSKWMLCDFYGNVLVPPTIVAHNRHDGDAMIAQLRQALGTHGIQDVLVAIERTGRYHHLIRHAFASAGFETRIVHPFATKQFRQPSDPGNKTDDTDLAAIQRAAVNGFALIEAERDETWTTLQLVERQRRDWVFKSSALCAQIREHLEAVLPGYAACFEDLWDSDVAWHIIRHFDSPEAMRRVGLPGLSASLRQAPVRFQRRTLERIVAWANAAAAPDLAASCQRRIVLALDDDRTRKALEIHALERDLAARLARTPYVLLLSFPGINVVSAADLAGEMGPIQHYLSARAISGRAGLRPSRYQSDQVDHANGPLVRCANRKLRATLLAIADNLSVCNQHFRVLTAHWRAAGKDPRHTRVKIAGRFCRILYQMVAGRQVCRHPSIQQRAYVLQKLLAFHLAHGTAMSQTLADVQAAIEQLPQQAYPTEASPLAEELQRLQERRRRGPQPLRDILPIVLARLGLRVVQSEASGEQDLP

SEQ ID NO: 506710 - protein, 438 aa, unidentified
MSNKVFFNLNDLFISVGIDVGADFSWMSIALPNQQFVGKPYKILHNSIASLTTAVSKIKEAEELYSLESRIFLESTGIYHYPLFCYLRDKGFNCSVINPIITKNSTNINIRKVHNDRFDSKKAALVGLKPDLKVSLMPSDLALNCRNLCREYYDLMDNRSAYVNKLQGELRMVFPQYLGIFSKVTINTSLTLLETYTSPSAFLKADKQEIIDIIKSTARFGLTYAQNKYNAIIQAATDANQFGYIIDSNIKRIRLYISFIRKYDEEINNILESLHELVDANEDADFVKQIHLIETFKGAGFLSAVSIMGEIGDFSAFSKPKQLFAYFGLDPAVKQSGKFEGTKVQISKRGSAIARRVIHTLTLQSISISRNGEAKNPVLREYYLKKCDSKPKLVAMGAVSHKVCNMIFAILRDNKPFKIIAPQEHIKQYNAAKCDIAA

SEQ ID NO: 506711 - protein, 343 aa, unidentified
MGIVGITGGVDTHADNHVAAVIDHNGGLLGVESFPADRAGYEELLGWLVGFGEVEQVGVEGTGSWGVGLARFLGDQEVVVVEVDRPNRQQRRKVGKSDPTDAVSAARAALSGEASVIPKTRNGPVEQMRVLMVARRSARQQRIQSLNQLRHLVFTAPEEIRVRFKDRYKTGLVTEAANMRPRKGSDPIIYTTNLMIRNLAKRVKRLNTEMADIDRMLTGLLEQTVPGLFELHGLGTDNAASLLVAAGDNPNRLHSEGSWAHLCGVTPLPASSGKVTRHRLNRGGDRQANAALYRIVLPRMSSDPQTRRYVIRRRDEGLNTAEIMRCLKRYVARQTYKHLTQTT

SEQ ID NO: 506712 - protein, 345 aa, unidentified
MKKFNVIGIDLAKHVIQVCKIDKHGEFISNKAISPSKLKELLAKTVPSIVAMEGCGACHYWARLAQKHGHDVRVISPKKVKGFLQGHKTDANDALAIAIASIQIGMKFSQIKTEEQQSLQTLETSRKFLDKELVALNNHIRAYLYEYGITLRRGRKSLRETMAIVLDDLDTRLPTCLKNTLGLLWERYQLTVEQLAEAEKYKAALVSQLEPCQRLMDLEGIGKVCASMLYANIGDGSEFKNGRQASVYIGLTPKQHSSGGKTYFTGIDKQGGNKELRAALYQGALSVIYKLPSEPRTLKEAWLIELVKRAGVKRTCIALANKTVRTAWALLATGESYEPVLLGRS

SEQ ID NO: 506713 - protein, 348 aa, unidentified
MTARNRTVVIGVDTHAETHTAAAVDELGRVLDVTEIPSTPAGHRQLLRWAGRLGNVDRAGVEGTGAYGAGLTRFLIEHGIAVAEVNRTNRQHRRRRGKSDPADAEAAARAVLNGDAAGTPKHSTGTVEAIRVLHLARRSAVKAKTQAGNQIRDLVLTAPEPLRSQMRSLTTTQRIRLAAKWRPGAAVDPSSATRSAIKSLAQRWLALHDEIRTLERQLADLLQSTCPSLLAEQGVGIEVASKLVIAAGENPDRLRSEASFAALCGVSPVAASSGKHTRHRLNRGGNRQANNALHTVVLIRAARCPETRAYIERRRAEGRTDREIWRCLKRTLARRFHHLIVTDLAIAP

SEQ ID NO: 506714 - protein, 372 aa, unidentified
MRHHSEAFIGIDTSKSHNAVAIAEGVRGGEVRFLGEFPAIEAGMRKLIAKLAAKYNRLTFCYEAGPTGYGLYRLIKSLGHECIVVAPSLIPKKPGERVKTNRRDAISLAKLLRAGELTEVWVPDERHEAMRDLSRARLAANKDLQGKRQQISSLMLRLGRCYPGKTTWGPAHMKWLMSQKLEHREQRMALEELLHGIRQEGERVERLEQAIREAVPEWSLAEVVTALQAMRGINLIAAVAILAEIGDLSRFQNPRELMAYLGLVPSESSTGDTVRRGGITKAGNGRARRILVEAAWSYRYPARVGREKQPKVAAAPRRVREIAWKAQTRLCGRFRSLLRKGKLPTVAVTAIARELSAFIWAINREVVANRQP

SEQ ID NO: 506715 - protein, 346 aa, unidentified
MRPNLFMEIDRVVSQCVGIDVSKEKLVATMCMFSQAEQAVYSKATEFDNDKTGFNQLVKWSRKEARKELPLQYVMEATGVYHEHLANHLVRIGCTAVVMMPTKAREFAYWEGMISKNDTIDSRVLALVGCVKRNMRPWKPTNPLYRELRTMTRFSQDVKKLRTELKNHLEALEHSHEAEKSVIKHYESLVASLDKRIEKNLENMKKKVASDEELNKKVENIITAPSVGFLSAVTVIAETNGFALIQNRKQLTSYAGLDVRDSQSGTVNGVSRISKRGNSRIRAILYMPAVQCRLHNKHLKKAYDRIVAKHPDKKMIAVTAMERRLLLLIYALWKSDRPYSEDYDKE

SEQ ID NO: 506716 - protein, 391 aa, unidentified
MIFIGIDIASSKHDCVIMDQHRKVLEEPFTIKNDFQGFNKLKERIKRHQDNHEVCIGLESTGHYGNNLISFLSPNDKYVVYVINPLLTSIARRSSSLRKTKTDKTDSIAICTFIMTNFGTLKPYTLKSYHTLKLKALSRLRLSLVKQQSLFKVEFTRLVSLTFPELSGFTTTIHSRSNYTLFTEIGLPSDISNTRIDKLTNVLNVASRGWFGLEKANQLKELAKQSIGTQGDFYKLQFQTVVSSIRHFNDQIKLIDHEIELIMNEHYKFIMTIPGIKYTTGAAIISEIGDINNFKSPDSLVAFAGLDPSVYESGEFSSNHNKMSKRGSKYLRNAIWTSSTVIIHNDPVFSAFYTKKIIQGKHHNNAIGHVCKKLTRVIYSIMKSQNDFVTQ

SEQ ID NO: 506717 - protein, 335 aa, unidentified
MKVFYLGVDVSKKKLDLCLRSNGKDILYDVIPNDLSSIKSWLTRTFEKFFLSEDSLVVCAGHTGQYTYPLVCATKSIGVYLCLEDAAKIKYCHGIPRGKNDKIDACRIAMYAERYNDCLQPYTASELIIQKLKNLSTERSMLVADRAKYQSQLKDQVDYMEHSIYIAKCNRVEGIINTFTDYIAQIDLEIKELINQAPVIAHQMDLLMSVDGVGERVALKMIMETDAFTSFTDPRKFCCHAGVVPFVYVSGSSQRSKNRVSNRADKSIKHLLHMAALSVSQVKNSPLKKYYDRKVEEGKNKMSVLNAVRAKLVTIMFAVIRTDAFFSRNYQNSLA

SEQ ID NO: 506718 - protein, 371 aa, unidentified
MKSILSVGMDVHKNSFSLCAYDGYTGEIVSESTFASDVKLVIKFIETLKSRYENDVEIKCGYEAGCLGYSLYKSLTARGVDCVILAPTTMQVSAKNKMVKNDRMDALNIAKNLASGSYKSVYVPDEEDVEIKEYIRMIHDFKKELKRVKQEICAFVLRHGYQYDGKSKWTIRYMNWIRELEMSEIQRETLNEYIAEMENLNDKINRFMNRIDEMYQSERYHEKVSKLRCFKGIETFAAMTIQVETADFERFPNAKAYASYTGLTTGEHSSGDKNNRIGITKQGNTVIRKTLVECAQSLVKGNVYAKKSQGLKSRQKGMDVNIIAYADKATERLKKKYQKLIERNVPRNKAIVAVARELACFIWGMETGNIH

SEQ ID NO: 506719 - protein, 372 aa, unidentified
MDQSSKILYVGLDVHKDSIAVAYAPDDRGAEVVSLGAIGTRQSDIDKLIRKLQSKGATTLVFVYEAGPCGYWLYRYLTGKGFACHVVAPSLIPRKAGDRVKTDRRDAMTLARLMRSGDLSSIYVPGVEDEALRDLSRGRDDAMQDLKRSKRRLKSFLLRQDIRYEGRATWNPAHLRWLAEVVCPTPPQQIVFQEYLRAVSEQQERRQRVEHELHEAVKGWRLYPVVEAIQALRGLELTGAVILMTELGDITRFENPRQLMSYLGLTPSEYSSGERRRQGGITKAGNSHARRALVEGAWAYRYPAKVSRHLQLRLEKLPTEVQAISWKAQVRLCKRYRQLTARGKHVNQVVVAIAREMAAFAWAIARIVPLAA

SEQ ID NO: 506720 - protein, 462 aa, unidentified
MPRRKKKSTVDARPVDPLSQINPNAAGLDIGAEEIYVCVPADRDEQSVRAFGTFTVDLNALADWLTSCGIDTVAMESTGVYWIPVYEILESRGFEVYLVNARHLKNVPGKKTDVLDCQWIQQLHTYGLLQRSFRPPEEICALRALVRQRENLVRYRSAHIQHMQKALQQMNVQLTQVVSDITGVTGMSIIRAIVSGERDPKVLARMRNRQCARSEAEIAAALEGHYKREHLFVLKQSLDEYDFYDGQIQECDAELEAMYAALPSGTEEGDLAPPAPKPRGGKPRKNQAHFDLATALYRIVGVDLTAIDGIDALTAQKIISEIGLDMSKWPTVKHFTSWLGLAPHTKKTGGKVISTRTKKTQNRANTALRVAAQTLWRSHSALGGFYRRMRAKHGPAVAIVATAHKLARIIYRLLKYRVAYVDPGEAYYEQQYRQRTIRNLKRKAASLGFVLAAADSQPNYVS

SEQ ID NO: 506721 - protein, 437 aa, unidentified
MEILYTHVGGIDVHKKQVTVTARTPDPKRAARWQTTRTFRTFYGDLLAMASWLVFERGVRHVAMESTGPYWWPVYSALREVGGPGLTIEVCNAAHVKAVPGRKTDVKDSQWLAQLMEVGLLRGSFLPPEQVRAMRDFTRYQTKLTEERSREKQRLLKMLEAAGIKLDNVASDTFGVSGRLMLSALINGERDPVVLAGLARGALRNKTDDLRLALAGRFTAHHGRLVALHLARIDHLDQMLTQVKDSIGRVGKDPTPGLVDPFTAQAQLLMTIPGVGERAATVVISEIGVDMARFPTAAHLAAWTGLAPGNNESAGKRRKGRHRKGNTHVQSILIEAALAAAKTRTRIGARYHRLHRRFGGKPNPAAAKKAAFAVAHTLIKVIWSVLATGTPYTDLGHDFYTRRVDPETQTRRLVAQLEALSGKRIVFVDEGGDPAAA

SEQ ID NO: 506722 - protein, 457 aa, unidentified
MTRRKHSRPARDIAPVHPHAAAVDIGATLHVAAVRPGSDPEPVRTFGTFTTDLHRLADWFEQCGVETVAMESTGVYWIPLYEILDQRGFEVVIVNARDAKNVPGRKTDVSDAAWLQRLHEYGLLRASFRPKGEIATLRSYLRQRERLLDQAAAHIQHMQKALTEMNLQLHHVVADVTGVTGLRILRALVAGERDPDTLAAYSDPRCKAPAETLRAALVGNYREEHVFALAQALELYDIYQAKVAACDQRIEAVLERLKAANPPPAAALPPARPRRRQANEPGFAVREALHAILGADPTQIDGIGPSLALTLVGECGTDLSAWPSAKHFTSWLSLAPHNKISGGKVLSARTRRSGSRAAALLRLAAVAVGRTATALGAFYRRLAARVGKAKAVTATARKIGVLFYNMLRHGMDYADPGASAYEARYRQRVLSNLRRRAKSLGYVLQRADPASAAIAVS

SEQ ID NO: 506723 - protein, 373 aa, unidentified
MPRYSTAFGMDVHLRSTTVCALDAETGEAVARRFRGNPWVEVAEWMSGFPGPSLAAYESGYLGFAPQRELSALGVDCVVAAVSKVPRSAADLSSKNDRNDAARMAKAILSHDVTPVWVPSPEIEGLRDLAAAHDAATARLAAAKQRLLAFLARRGYVYGGTTPAGNPRKYWTYGFLRWLDKVRPADDGGIRALAALRNEVEAADETREALLAEYRAAVAAGPLSAEVEALQSIKGCGFVLAAAFASEVGDFSRFRSGRQVTAYFGLAPKQRSSADSVRLGGISGAGNALVRRLAVEGSWRYAQAGHQPKLMPKGSGVPLEIRMHGRKGSERLLRRREGMLERGMPQAKANAATAAELVRWLWALGMMCREAGE

SEQ ID NO: 506724 - protein, 370 aa, unidentified
MILTTFIGLDVHKATVAVATADGERRGEVRDLGVFANRADVIKKLAQRLSLGGKRLSFVYEAGPCGYGLHRQLVGLGHECQVVAPSLIPIRAGDRVKTDRRDAAMLARLHRAGELTSVWVPDPAHEAMRDLVRLRAGAMRDVTKSRQQLQGFLLRNGRIHAGKKGWTVAYRRWLTTIRFDHPAQQIVLQDYIHVVQDAEARAARILDHIEALLPTWSLAPVVQAVQAMRGVGLIVAVTLASEVGDFNRFANPRQLMAYLGLVPSEHSSGASISRGGITKAGNSIARRVLIEGAWTYRMQARVSRKLHDRIEDLPRAIRDIAWKAQVRLCARYRKLIAAGKQKVVVVTAIAREMAGFIWAIAREVRLPSAA

SEQ ID NO: 506725 - protein, 379 aa, unidentified
MKKNSKQTASIETVKKNSKETAKVETVPANRWGEKPKVTVGLDLGDRYSYYCMINADGEVFEEGRIQTNEEGLHRHFHGQDRWRIALEAGAHSPWVSRKLRAWGHQAIVANPRQIPALTETDSRNDRNDAENLARFAYCDPCLLKPIEHRSVERQRDLNLLKVRDTLVRARTMMINSLRGLVKSEGQRLPKCDADNFVSRAELFIPAGLRPASQPVLEQIQQLTQHIQDLEKQIKKLAEHYPEMELLQTAQGVGPIIAAAYVLTLDRPEAFPSSRQAGAFLGLRPRQKQSGNSDVQCRISKRGNQYLRRLLVQGAQRILGPKGEDSALRRWGLKLASTGGKRGKKRAVVAVARKLAVILHSMWKNNEPFRPFPETAAAA

SEQ ID NO: 506726 - protein, 324 aa, unidentified
MFYLGIDVAKAKIDCCLILENSANKKKTKTFSNTPKGFEQLQIWLNQHAATSTQTIILMEATSIYHELLAKYLFDEGYQVSVTNPARARYFAQSMSKLNKTDKVDSEVLARFAMTANLHFWQPLPKHIQLLNALLDRRAVLCEDLQREKNRLEKAESTFTMEPVLQSLHKSIEQLNKHIQGIDQQIDDHIDQNPDLKNDKKLLSSIPAIADRTSLLMLSFLRSHTFERASQAAAFVGLVPTQKQSGSSIHGRSHLSKAGSSKIRAGLYMAAIVATRHNPHIKGMNERLLANGKTKMMAIGAAMRKLVHLCYGVLKHQQPYQADY

SEQ ID NO: 506727 - protein, 417 aa, unidentified
MKCAPIFLPDQPANGLTAGIDWARDDHALAIVDARGKQIYRDTVEHSDAGLRALLKLLANHGVGEVAIERPDGPVIDALLDGGLTVVVISPNQVKNLRGRYGSAGNKDDRFDAFVLADTLRTDRARLRPLTPDSPATVALRRACRARKDRVAHRVALANQLREHLRRVFPGAVGLFADIDSPISLSFLSRFDCQDRADWLSPKRLAAWLASVGYCGRTDPAVLHARLTDAPRGATGDHGTAESRVTQAYLAVLASLTDQIKALSIQIDEQLALHTDAHIFTSLPRAGRIRAARLLAEIGDCRARFPTPESLACLAGVAPSTRQSGKIRSVGFRWSCDKQLRDAVTDFAGDSRRANPWAADLYDRAIARGHDHPHAVRILARAWIYVIWHCWQDNTAYNPDQHGALQRLIQSRNHAAA

SEQ ID NO: 506728 - protein, 346 aa, unidentified
MNLNAAGIDVGATEHWVAVPEDRDEEPVRRFGAFTADLYVLAEWLRQCQIETVVMESTGVYWIALFEVLEERGFDVKLVDAHDARQVPGRKTDVKDCQWLQELHTYGLLRGAFRPEDQICVLRSYLRQRSMLVAMASRAVQHMQKALEQMNLQLPEVVSDMNGKTGMEIIHAILAGERDPQRLASHRDRRCKHDQATIAKALEGHWRAEHRFALQQALEQYEFLQQQLQACETQIEGCLQTFVTHVEVAPPQPTPARQRRARPRQAPSFDVHGYLHAMTGVDLTQMDGIDALTALKVISEIGLDMTRWPTGKHGASWLGWCPGNKLSGGKRYRMRSKPTANRAASA

SEQ ID NO: 506729 - protein, 366 aa, unidentified
MQKISTRRVMGSKILKGHQLTIGLDLGDRWSFYCVLNERGEVLREEKLATTPEAIRRTFEKVPASRIALETGTHSPWISRLLTELGQEVIVAHAQKVQFITKSSRKDDRHDARTLARLARIDPQLLGPVRHRSAQAQIHLTVIRARAELVSARTALINAARGLAKSYGERLPKRGSQQVGRELAAQLSTALREVLEPLLRGVESLNERIREYDQRIEQIAQEVYPEVALLKQVKGVGTQIALTYILTIDDPYRFPKSREVGCFLGLRPGRRNSGQSEPQKGISKEGDRYLRTMMVQGAHYILGPFGEDSDLRRWGLKIAERGGKNAKKRAVVAVARKLAVLLHRLWVGGEVYEPLRNTHRAMTAAA

SEQ ID NO: 506730 - protein, 341 aa, unidentified
MSLTMIGLDTAKSVFQIHGVNEVGKVELRRKLRRSELIPFFEKQKACTVVMEACGGAHHWARILTGVGHNVKLIAPEAVRPFVKRGRKNDSADAAANCEAASRPDVKFVPIKSLEQQGILALHSARSLLVKQQTMLANAMRGLAAEFGLTVPKGISKLEELTVLVDADETIPEQARQTIKGLLNHCYALAESISTFEIQIVAHARHDGTARRLATIPGIGPITASLIAATVADIGAFKTARHFAAWLGLVPRQSSTGGKSRLGGITKWGDSYIRKLLVVSSCALIRYARDKSPSASWLANLLVRRPPKVAAVAMANKTARIIWAVLTQEREFRPIAASVAA

SEQ ID NO: 506731 - protein, 339 aa, unidentified
MKEVTTIGLDLAKNVFQVHGVDHAGAVVVRRALRRSQVLAWFAKLPPCLVGMEACATAHYWGRALRKLGHQVRLIPPAYAKAYVRRNKNDAADAAAICEAVSRPAMRFVAIKTEQQQAMAGIHRVRDLLIKQRTMLRNQLRGLLAEFGVVAAQGRRGLNELLAILSDPEEQRIPSPLREGLTAVMETWRGIERKLEAIDRQMVAAGRADATYRHLVTAPGYGPILSSAMAALVIDPGAFKRGCDFAASLGLVPRQDGTGGKVRLGPISKRGNGYLRRLLVNGATALIKCQRARQDPWVAKLLASKPRKVVAVALANKLARIGWALMTRQEDFRSRPAAA

SEQ ID NO: 506732 - protein, 359 aa, unidentified
MTATMTYVGLDVHARSTHAAAIDVASGELRRARFGGGSEEVLAWLQGLPQPLRGCYEAGPTGFALYRAAAAAGLAVEVIAPSKTPRAPGDRIKSDRKDAELLARLLLAGQLKAVTVPPPPFEAARHLARAREQVRGDLMRGRHRVSKLLLLHGRVYEASAWTKAHRRWLEAQRFDEAATELAYLDALAAVDGLVARKAALDERLSRLAREGEWWPTVARLRCFRGIDTLSAFVLCLEIGDWTRFPRPAKLAGWLGLVPSLDQSGESRRQGAITKTGSGYARRLLVEAAWHYLPRPSEGPALAERRAGQPDHVLQIALRAQRRLHRLYHRLRERGKPGNVTTVAVARELACFLWAAAVAE

SEQ ID NO: 506733 - protein, 348 aa, unidentified
MQFYTKQHKFYCGIDLHTKKMYVCILDEKGEIREHKNMKTNPESFLAAIAPFREDIVVAVECMFTWYWLADLCQKEGVPFVLGHALYMKAIHGGKAKNDKIDSKKIAVLLRGGMIPMSYVYPEKMRATRDLMRRRNHLMRKRAELLAHIQNTNSQYNLEETFGCIAKPYQRRGKDLVGAFDHPAVKKSMEVNLKVIATYDVLLEDLERTILKLARYHDPVSYALLQSVYGIGKIGALTILYEIENIKRFPRAQDFVSYARLVKCEKTSAGKSYGTGGNKIGNAHLKWAFSEAAILFLRGNEPAKKWFERLTKKHGKGKALSILAHKLGRAVYFMLKNQEPFDMQKFLR

SEQ ID NO: 506734 - protein, 376 aa, unidentified
MSNVRFIGLDVHAETIAVAVAEPNGDVRSLGVIPNRPESIRKLVTKLGAPERLRVCYEAGPTGYVVYWQLTTLGVPCEVVAPTLVPVKPGDRVKTDRRDALKLARGYRAGDLTAVWVPDAAHEALRDLVRAREAAKKDQLRARHRLGKFLLRHGRRPVAALHAWTQTHLTWVKTVHFAQAAQEVTLLDYLHEVEHVADRIARLEQAIDEAVKAAPERLRAVIEALQALRGIALVSAATIVSEVGELSRFTKPRQLMGYSGAVAREDSSGERTRRGGITKTGNAHLRRIVIEAAWAYRHRPAVGPALRKRQASASVEVKAIAWKAQQRLHARYRALTARGKCKQHVVTAVGRELLGFIWAIGVHVASDTGGPKPIAA

SEQ ID NO: 506735 - protein, 351 aa, unidentified
MIIIGVDYHPSFQQIAFMDQETGECGERELNHSDGEAERFYRELKERGVSVRAGMEATGHARWFERLLAELGFELWIGDPAEIKTKRVRKQKTDREDARLMLKLLLENRFPRIWVPSPENRDLRQLLWHRHRLVQMRTRIMNQLQAVAMNEGYRWKKKLFGQQGRALLEKLSLAPWASRRRKELLELLDQLDPKIAELTAAVEREANKRPEVVRLMTHPGVGPITGVAYVLVIGTPDRFPCGKKIGSYTGLIPCEDSSARRQRLGHISKQGNTLLRFLLVEAAQAAARCNADWRRRYTHLMMRREKRIAKVAMARKLAVRLYWMWRNNWQYSQLVEFGSNAGKLGIVHGMK

SEQ ID NO: 506736 - protein, 346 aa, unidentified
MMIIGCDFHPSWQQVSWLDTETGEAGEGKLVQASGDAERFYRQLAAPALIGMEATGNCHWLVDLLAELGHELWVGDAAQIRASCVRQQKTDRRDAEHLRILLQEGRFPRIWMPSAEVRDLRQLLLHRHKLVTIRARVKNELQHLCLNQGVQRKHKLWSQAGQKVLRELPLRPWAARRREDLLGLMAMLEQQIDPLERAVKAEAQRDKMALLLQTQPGVGAVTALAYVLTMGDVSRFARGKQVASYLGLIPREHSSGGRQKLGAISKQGNHMLRMLLVEAAQTAVRLDPGLRKEYLHRCHQKPKAVAKVAAARKLAVRLYWMLRTEKPYPEVVRIESSPRVPLVGAS

SEQ ID NO: 506737 - protein, 370 aa, unidentified
MAESTFWVGIDLHQESVTIAVLRDGAQECESLDKLSSDLTKLRRYFTKLRTRGEVRACYEASGCGYVLQRALTSLGVHCEVIAPSLIPVRSGDRRKTDRRDAVKLARYYRSGELVPIRVPDAAEERVRALVRCRETLTREILRSRHYVLKLLQARGVRYGQGQHWTRAHWRWLREVRLEDEDQTTLATYVALLDFKIEQRRLLDARIAAIAQEPAYREPVAVLRCLRGIDTLSAMTIVTEIGDVRRFASPRQLMGYLGLTVSEYSSGESERRGGITKAGNSRCRRVLVEASWHYRHPPAMSAALRERQAGQPPDVVAHAWRAQRRLHGRFVRLSVRMPQPRVVVAIARELVGFVWALLRREPRLLLARSA

SEQ ID NO: 506738 - protein, 360 aa, unidentified
MPYSTSIGLDVHARSISAAAYIFETGELVEATFGYDAEAVAKWAEGLPEPKAALYESGPTGFDLKRKLDALGLPCHVGAVSKMRKAPGDRVKTDRRDAAYLARLLMVGDYVECVPPTPRMEAARDLSRIREDAREDLMDARHQLSKMLLRHGYVWPAGRASWTKAHRDWLKGIHLAEPTAQYVLEEYMERVRECEARKARLDEAIADRAKEEDVAGIVQRLCLLRGISTLTAFGIAAEIGDFARFRTAQGFMSYVGLVPSEYSSGSSVARGPITKTGNSHVRRLLVEAAWQHSRPLSPASDSMQPSEGVPPEAAGIAAKANMRLHSRALHLRRRGKKACVANIAVARELAGFVWALALCG

SEQ ID NO: 506739 - protein, 281 aa, unidentified
MNSQLKETASDTKPLLFAGIDVGAEELVLVIRKNNKSLNPQKFSNTPSDRARLVNKLAKLSNMTVCLEATGVYHFDLSLALHDAGVSLMVLNPKASHNFAKVLMKNSKTDAVDANTLAEYAERMAFVAWTRPSNEKIALRSFARRIHSLTKQKAAAKNQLHALTATAETPKSVLKDANLAISQLEKRIDSLTTAALLLIAKHPELDRILHLLIGIKGIADTSAIALMGELLLLPPDLSHRQWVKFAGLDPQVFESGKSVHKKRALPNPATPISVLPSICPP

SEQ ID NO: 506740 - protein, 446 aa, unidentified
MSDQSSSAPAQPPWAAFVGIDWADQKHCWSLQPAEGGKVERGEVENSPEALGRWAAELERRFAGQPIAVGLEQPRGAVAYMILQYRHLVLHFVPPDMMASYRKAFSTSGAKSDPRDADLILELVVRHRDHLPVSKPDDPKTRLLHLLVEDRRGLVDEKTRLVLRLIDCLKQYFPQILRWFPDPESPLVAALLTRWGDLDHLQHSHPGTVRRFFRQHHCHGQDLLEQRLQAIYAATPATTDEVLVEAYTRKARHLVKQLALLREQIATLEKRIDELVKTHPDAPLFDALPGAGKVTVPRLIVAFGTDRDRYDSAYQLLCYSGIAPVREASGKSEVVRFRRACPKFLRQTFHEFAAQSLRFCQWAKAFYDHQRDRGKSHHAAVRALAYKWIRILFRCWKNRKPYDEQQYIDSLRRRGALLTPALTQATATNFAWKKVAGFQKLSENPS

SEQ ID NO: 506741 - protein, 333 aa, unidentified
MKNFLDFQHFVGCDVSKDTLDFAIYERGKDYRTFAHTQVANSTDGFRQLRKWLRTFGIKIKEAVIAMEHTGAYSNALAEWCSKHGITFVMLHSLEVKNSGCRGRNKTDKVDAQFIADFAYTMREKLSPSTPEPDAIKTLRQLRNERQLAVRTRTAYFNQLKTITDKATLQRMEKVTATFTQQIKDIEQAIKQLINSDPQLKTSYDLLTSIPGIGLVNAVTTIISTANFTRFQTARQYAKFACVSPLSNQSGTSIRAGDHVSRVGHTEIKSLLTEGARSAIIHDVQLRDYYARKRAQGKSHGCVMNAIKFKLICRMFAVIKRHSPYANTEGYRS

SEQ ID NO: 506742 - protein, 344 aa, unidentified
MDHFAGLDVSVKETSICIVDDTGRIMKEVKVVSEPQALLKVLGNPAYRFKRIGLEAGPLSQWLFSGLAEAGLPVICVETRHMQAVLKAQINKTDRNDARGIAQMMRAGLYRPVHVKTLRSQKLRMLLTHRKLLQSKAIAIENDLRGTLRNFGLKVGMVGKVRFEARIQELVENQPDLAVLVEPLLIVRRALREQIVILHRRLLAIVRDDEVCRRLMTTPGVGPVVALTYRATVDVPARFRKSKSVGAVFGLTCARYQSGEIDWSGRISRCGDEMMRVMLYEAAQSMLRSNKWSWLKAWAMQIARRRGMKKAIVALARRLAVIMHRIWIDGTEFRWTREQAPAAA

SEQ ID NO: 506743 - protein, 347 aa, unidentified
MKRIVKQVVGIDVAQKELVVCLGRMYDNWTPELYANKTFANTAKGFGALTGWVKKLTEESSSVRYVMEATGVYHESLAYFLEGEEFEVSIVLPNKISNYFRTLEVKTVTDKTASEAITRFGLERRLDKWKRPSEIFRKLKQKTRERDQLVAESTLLKNQLHAEQTEAYPSKESIVRMRTRINLLNKQIMQIKEEINVLVKGDKEVKKSIELISSIPGIGTLTAVTVLAETNGFELIRNKRQLTSYAGLDVKEKLSGTSVKGKPKISKKGNRHLRKAMHMPALAAIRYNGRFKVLFTRLVSRHGIKMKAAVAVQRKLLEMIYTIYKTETAFNKDYLKEEVQAQLQDLK

SEQ ID NO: 506744 - protein, 323 aa, unidentified
MSQPNPLCVGIDVSKTTLDIATANNEFAQFTAGNDTDGFELIIAELRKHSVALVLMEATGGLEAAVACSLQAEGFDIAVINPRQARNFSRAMGYLAKTDRIDAKVLSQMAEVINRHPERERFIKAIPDAERQILAAMVVRRRQLITMLVAERNRLHPAHPQNRKSINTIIKALEDELSRIDEAMNNHIKTHFKELATRLSSIKGVGAMTVATLLSEVPELGSLSRREISALIGVAPVNRDSGTMRGRRTIFGGRAGVRTALYMAALVATRFNPVIKDFYTRLITAGKVRKVALVACMRKLLTILNAMIRKNEEWSDSYHKFSL

SEQ ID NO: 506745 - protein, 354 aa, unidentified
MTETATATQVVVLGVDTHQQTHHAAIIDALGQPLADHEFPATADGYRKLLEWAQTHGHLEKAGVESSASYGAGLTRELTAAGVEVIEVNAPDVRARRAQGKSDQLDAYAAAMAVLTGRASGHAKDTTGVVESIRMLYVARRMAVDHRTQLGDQLRDLCTTAPDEFADQLKTHTTTPQRLALVESLTAPTSLTDPRAAFVFAAKSIARRYRQTHREVTTLTRELNTLLKPLVPTVLGLPQVGPITTARLLITIGHNAERMRTEATFAKLVGVAPLPASSGKTIRHRLNRGGDRAANSALHMIVVGRIKSHDPTRAYLARRSNDKTKKEIIRCLKRYVARDLYKAFTTDLGALDNL

SEQ ID NO: 506746 - protein, 339 aa, unidentified
MENFVGVDLHKKVSQLATLREPKPASQVRFPNHTVTVEKVLKKLPQGSKIALEATGSWWWFVDLAQRTGHEVVMSHPKQTKAIASARLKSDKVDALMLAKLLKADLLPTVWIPPAAQRYVRELLTHRARLVRQRTSVINELHALYAKRNIDAGMIFHRVRPPAFRAEDLSGYGPRIVEEDVALLGFLNRQVQGLDKELKAIAEKDPESKRLMTIPGVGPVNAVAGSCWIGTIERFSNSKKLSSYFGLAPRVRQSGERERHGHITKEGNRMVRSLLIQAALWHIRRGPVSSRRHYLGVCKRRGKPIARVAAANKLLGIIFQMMKEKIDYEEFLRRGGNAQ

SEQ ID NO: 506747 - protein, 367 aa, unidentified
MKEQENKRNKITIGLDLGDRRHRFCVLGEKGEVLEEGSVGNNRAALSELGGRYPEALVVMEAGCHSPWVSRHLEQAGCEVVVSNPRKTRAIYQHERKSDRRDALMLARIARMEPALLYPVRHGSEEAQQDLLRIKLRDSLVRARVALINSLRFTLKSLGYSIANPSTERFHKVIQSALPQSVAQVIAPSVQALEELTLRIKLLEREISDQARSKYPDTAWLEQIPGVGPITALYFVLKIEDPARFKRARDVGAFLGLCPRRDQSGENDPQLRISKRGDAYLRRLLVSSAQYILGPFAPPSALRQYGLALASGATARAKKRAVVAVARKLAVLLLTLWKNKSSYEAFPQRSSKEKMRTNDLERLRCIA

SEQ ID NO: 506748 - protein, 453 aa, unidentified
MLGCVLTDLMDTLMSLLLKGAIKMYHFDFISVGIDVGADFSWVSILTPDHKPVVKPFKIIHDDINSLERAVLTIKKAEESNSMKARTFLESTGIYHFPLFCYLKESGFEVFVLNPLITDSNKNLGIRKVKNDKSDATRIAKTAYTHDLKVSLMPSDLVINLRSLVREYYNLVDAKTAYVNKLHKELRMVFPSYSKVFSNLTGKTSILILKTYKTPDKILAAPKDEIVSLIALNSRKGLKYANAKYNKLIEVAELSKSFGKYLESTFDIIQMNVEFIELYNNKIDSILSSIKEFTLKHEDHEFIKQIHLLDTIKGVGFISAVTLMCEIGDFSAFKKPKQLYAYFGLDPAVKESGKFKGSKVSMSKRGSRLARKVLFTIALVSVRSSKNGQANNPVLKDYYEKKKESKPKMVAIGAVMHKVSNIIFAVLRDNKPFVLRTAKEHERAYKSNLTLVA

SEQ ID NO: 506749 - protein, 314 aa, unidentified
MSPYQNFIGIDIGKFTFVVAIHSNKLSKEYENNAKGIRTFLKDSKSHLPSSLVVLETTGGYEMELLLTLCDKNYHVHRANTRKVKSFIRSFGNAAKTDSLDAKALALYGFERHDRVELFTPVSEHQSALYTLVQRRKDLKQFLVAEKNRAQAPKALIVKKSCEFMIKTLTDQITQITKQIEALINSDPAFLARAQVLKTIPGIGEITAQDLLALMPELGTLTRKQVASLAGVAPRANDSGKFHGYRHTGRGRDSIKPTLFLSAMAARNSHSHLKTFYDNLISRGKQKMVALTALMRKIIVIANAKLKPLARQTT

SEQ ID NO: 506750 - protein, 313 aa, unidentified
MEFESVIGIDVAKKKLDVADWPVSFAEQFGNEDVGHKNLIKKLPKAGSCLIVIEATGGYEKGIVLALVSAGYLVSVVNPRQVRDFAKALGILAKTDRIDARVIARFGQHVRPRALAQTHKKQDEIGQLVSRRRQLTVSKTAEKNRMHSVTSKVVLKSVQKIVDQLSKEIRRIEAEIARLVKSDDQWKARAELIQSAPGVGEVTATTLIAEVPELGQLNRQKISALIGVAPFNRDSGQFRGRRTIFGGRRAVRSVLYMAALSARRHNPLIRAFADRLEARGKLQKVVLVACMRKLLVILNTMVKTNTHWNPKSA

SEQ ID NO: 506751 - protein, 347 aa, unidentified
MRFYPTTHKHTCGIDLHAKTIYICVLDATGEVVLHCNLPAKPEALLEALAPYRDDLVIGVECMFSWYWLADLCTREGIPFALGHALYMKAIHGTKSKNDRIDALKIAKLLRGGMFPVAYVYPRPMRATRDLLRRRLVLVRHRARLLAHIQNTHHQYNLPSPGRIAYKSNREGVGAGFADPSTRKAVDVDLALIDVLDDHIRGLELFLSRRAKEHDGTAFHRLRTVPGIGKILAMTILYEVHDIGRFARVQEFASYARLVKGTKESAGKRKGAGGAKMGNVHLKWAFSEAAVLFLAKCERGKALKARLDSKHGRGKSLSILAHKIGRAVYFMLSRGTAFDIERFLTRT

SEQ ID NO: 506752 - protein, 368 aa, unidentified
MIRRFHGIDRHKNFSTISVLDLEGKEIGFKSICLNLRSYIDGLGPEDAVIMEASTGTFYWADLVEATGALCFVLNPYRFKIIKDSWNKTDKQDARNMGKALWVYMVTEEFGIPTVYKPDAVIRELRKLFSQYVLLNKQIRMLKNNIQAILADNGIALPKVEKNHLLSPKYGLSVLEKLEVSPASRISIQVSLELLWKIEEAKGEISKEIILTGEPLRDDVNLLITIKGITPLTALAFLADVADINRFKKLRKMNAYLGLVPRSKDSGGKSRPGHINRESRKLTRTLLTQSVRHIADSSWYLRNYYSELTKRRGVGRARIALIRKICGVMRRMLLNGEEYRSINADNFERKSKKYEKELKKIKEERKSA

SEQ ID NO: 506753 - protein, 349 aa, unidentified
MLTDEVDYVVGVDTHRDRHTLAVVASPTGAVVAQRSIGTSDRGYAEALRIAQDCAAGARVWAVEGAGHYGAGLARYLSDRGETVLEAGRAPRSERRLRGKDDGLDAIRAARATLASSELASPRAGQRREAVRLLLLARRSAVDVRRQALVQLRSVIVTAPEQLRSELRALPQQRLVERCGRLRRSNSRTPDELASTLVLRTLARRVQAATAEAAELETEILGHVRALAPQLLDEPGVGPIVAAQLIVAWSHHGRVRSEAAFARLAGVAPIPASSGQTTRHRLSRGGDRQLNRALHTVILHRRHHDPVTKDYIARRVAEGKTRRDAVRLLKRYLARHLYRLLQNQEPLMA

SEQ ID NO: 506754 - protein, 343 aa, unidentified
MQISTIGLDLAKHWFQVHGVDAKGRVVVRRRLWRSGVVTYFRSLEPCLVGMEACATAHYWARELMALGHTVKLMPPAYVKAYVKRNKNDAADAEAICEAVTRPSMRFVPVKDTEQQSVLMLHRARSLLVRQRTMLVNALRAHLAEFGIVAPQGLRHVEMLTKTIAHQQGRLPELACSILQTIVDQLNGTMARIREIESRLVRPHRHSRISQLLATVPGVGIMGARAIAATVADPTLFRSGREFAAWLGMTPRQNSSGGKERLGRTSKRGDKYIRSLLTAGAVAVLRHARNRPTRDGEWVRALLARKPTKVAAVALANKTARIVWAVMMRGEGYQAKEVFGQPA

SEQ ID NO: 506755 - protein, 317 aa, unidentified
MHIAKNSQDLQIENTLSAVKKLYTKLKKIYKKEIEKLVFVYEPTGSYSEMLRKFCADKSIRCFIINPKQFSNYAKALGVEVKNDEVDAKVLAQSIVLAKPHQIKIPVYDTDVEQIKELMSFYKFTCKQTAQLKGHLESLTSKDGDKFSIKELKHSIKASKEREKRIIEQVHQLIQSNAQYKKAYENITSIIGVGQIGGIALLHLFLKYPEANQRQITSLTGLNPVYRQSGSSLQSSHKISKSGSIFYRGALFMGVMTAIRYDENFKAFYDRLKANGKHTTQAQIAVMRKMILVAHSLYKNDTRYIKKETKMEDKPMD

SEQ ID NO: 506756 - protein, 391 aa, unidentified
MLICGIDIGKFRHEACLIDESGKQLSKPLKFTNTTDGGERLLEYFDKHNQDNRVIVIGMEATGHYHLSLYCFLFDKGYQVNVINPIQSDAIRNLFLRKTKNDAKDSFLIAETIRIGRFSSTPLADEDILSMRQLCRHRMDLVDYIADQKRKIIGVMDRLFPEYQHIFSDMFGKTSTELLNKAVTPEELLAIPTSELCELLKKHSRGRFGEAKAEQLRNAAKGSFGITIATTAFSMQLRQLLEMIALLENQLIELEEEISQYLRRMDTYITTCPGIGDALGAVILSEVGDISRFSEPKKLIAFVGVDPSVKQSGEFIGTQNKMSKRGSLHLRRAFFLAAGVAAFHDPVLSAYYQKKRAEGKHHYVAVGAVSRKLICIVYAVLRDKKPYEPHY

SEQ ID NO: 506757 - protein, 338 aa, unidentified
MKLYGAIDLHSTNNVTVVINEQDQVVYQKRLPNDLSLIAQQLSSYRASLEGIVVESTYNWYWLVDGLMEKGYRLHLANTAAIQQYNGLKYTDDHSDARWLAHLLRLGVLPEGYIYPKQERMVRDLLRKRGQLVHQRTANLLSIQSLISRTTGNSISATIIKALDIQHVDGVLPNPDLVLALKANLAVMNSADAQIEILEKAVHERVKLRPQFRFLKTVPGIGPILALTIMLETGEIERFASVGNYASYCRCVGSKKISNGKRKGSGNTKNGNKYLAWAFVEAANFAIRFNSRIKGFYQKKKSKSNAIVAIKAVAHKLCRACYYIIKDQVTFDITKAFA

SEQ ID NO: 506758 - protein, 305 aa, unidentified
MINIGCDIGKSNLDVYVEGKSRRYKNDKTGIENFVKLCLKNEANRVVLEPTGGYERDLLMRLHEQGIATAVVNPYYVRNFAKSYRDLAKNDKIDAKMLSEYGEKMNPRNQERKAEYCFELEGLTNRRDALVGTLKEEKQRLEKNPEKRIVRSIETHIEFLQSEIKEIESEIRTIMETKAEKITEVLLSEKGIGEQTAAILVASLPELGKLENRQITKLVGLAPMAHESGKMKANRHIRGGRTRVRQALFMASISAIRSTPKVSEFYKKLRAKEKPAHVALVAVAHKLLIILNSKMRRFFLNKNIF

SEQ ID NO: 506759 - protein, 324 aa, unidentified
MFYLGIDVAKAKIDCCLILENSESKRRTKTFSNMPKGFEQLQTWLNHHAASSTQTIILMEATSIYHERLAKSLFDASYQVCVTNPARARYFAQSMSKLNKTDKVDSEVLARFAMTADLHFWQPLPEHIQLLNALQDRRAVLCEDLQREKNRLEKAESTFTIEPVLQSIHKSIKQLNKHIQDIDQQIDDHIDQNPDLKNDKELLSSIPAIADRTSLLMLSFLRSHTFERASQAAAFVGLVPIQRQSGSSIHGRSRLSKAGSSKIRAGLYMAAIVATRHNPHIKEMNERLLANGKTKMMAIGAAMRKLVHLCYGVLKHQRPYQANY

SEQ ID NO: 506760 - protein, 341 aa, unidentified
MTLYIGVDIHARQQTVSYLDTEDGTTGQLELHHERDDVKGFYRKFQGEVIVGIEACGYTNWFEELMEQLGHKLLVGDAAEIRRLARRRQKNDRRDADLLLDLLVHNEFPALFRYSRESREVLRQLRYRHKLVKLRTMVANTLHALAINAGLSLRAKLLTQGGRRQLRTLQLSAISQQQREELLSLADELTRRIQTVEQWLQTQASSDARVVRLQTHPGVGLLTSLCLVHTLGDLSRFSATRKVAAYVGFDPMEDSSAERKAYGGISKAGSRLLRYLLVEAGQTAAKHDEHLKQFYRRLLPRRGKARAKVAVARKLLIRCFIMGRAEIDYAEFLRRGQKEAE

SEQ ID NO: 506761 - protein, 353 aa, unidentified
MEHGAIDLHKKESQVRILTESGEVIDQRIRTTRDRLTALFWGRPHGRILIEASTESEWVAQHLETLGHEVIVADPNYGLMYGHRSRRVKTDRRDVAALAEACRHGIYRCAHRRSSRQRVVQWHLNVRRELLAARTRLISVVRAITRSQGYRIAGGATDTFLTRLAALDLPVSVSESLVPVRSVMELLNQELADADQRFAALVAEDPIVKRLTTCPSVGPITATAFVAALDDVHRFAGRRGAAQVTSYLGLVPREYSSGEQQQRGRVMRSAHPYVRVVLVQAAWRICRSSDARAAALRTWAQAIARRRGKNIAIVALARRLTRILYAMWRDDIEYQPDRIRSARRDTAAAKPAA

SEQ ID NO: 506762 - protein, 349 aa, unidentified
MRFYTKQHQFYCGIDLHARLLAICIVDEAGVVVCRTQIPADKTILLETLAPFRRDVVVAVECLFAWYWVADLCTAEKIPFVLGHALYMKAIHGGKAKNDDIDAEKIGRLLKGGNIPVAYVYPKGLRETRDLLRRRMYLVRQRAALITHVQIVNAQYNLPEFSKKLIYAKNRAELKIAERFDNLQLRKSVAIDLALIDALDVQIADAELHLERTAKVEDPQTFHLLKTIGGVGKILGLTLLYEIHDIRRFPDVGEFLSYARLVRCRHESAGKKLGSGGHKIGNAHLKWAFSEAVCLLVRHYPVVKVWQARHEKKHGKKKTLGILAARLGRAVYHMLRKREAFDVKRFLGQ

SEQ ID NO: 506763 - protein, 340 aa, unidentified
MEKSDQIQPYLWILGIDVSKESIDACLIRKHDGQLFENKFHNNLSGFRHLKAWCKQMQCECDQKTLCCMEHTGLYTRLLVHYLVSRDVNVWLESSLQIKRCQGLTRGKSDKIDAQRIARYAHLYQSKAQIMQISLLTLEKLKDLQANRRRLMKALQTLRTSAEELKTFDAATAKVIDKVNREAIRGLEKSLDKVDEQILSFIGEDETLKQKYDLMLSVKGVGKVLATMLLVYTHGFNRLADSRKLACYSGVAPFVYESGTSIRGKTGVSKFANNELKKVLHMAAISSVQHNPELHEYYKRKVEEGKNKMSVINAVRNKLLHRIVAVINRGTPYVAQPKIN

SEQ ID NO: 506764 - protein, 335 aa, unidentified
MTTYGIDVSKDSLEIFSKTKNRDVFKKKIGNKLVPIERFLSKLEKGDILCLEDSGIYCQLISQLALQFGIKVALIDPYTLKHSIGSPKGKSDEVDAERIHEYAERFHDKLIYYGGDSSLFREIKQLYSLRNLFNKQKKGLLTVNTNNSKLVSCSVFGHEKLQTSIAHLNRQILDIEKELIRLVNQSELKRKMEIITSINGIGPITALELILTTGNFKKLNTAKKAAAYAGVCPYPNQSGTKQYKSKIHPRTDRKLKSLLYLCGLNACRHNKDYRQYRDRKLSEGKHYFLVMNNVSNKLIRTVYALIEKEQTYDFSYVQVDPRWENSEDLNSSKKI

SEQ ID NO: 506765 - protein, 412 aa, unidentified
MEVVYPCCCGLDVHKKSITACVLWAEAKGKSRKEKKRFGTFTHDLLQLADWLAQCGVTHVAMESTGVYWKPVWNVLAEQFEALLVNAQHIKAVPGRKTDQKDSEWIADLLQHGLLRGSFVPPRPTSELRDLTRYRVSLAQEINRIANRIQKVLEDANIKLASVATDALGASGRAILEAMLAGERDSARLAEMAQGKLRNKIPELQLALEGRMTEHHRFLLRQLFHHLRFTESKRSEIEQEIDKRMRPFQDEVIRLCTIPGVDRVTAWGLLAEIGLDMNQFPSSGHLASWACLCPGSFESAGKRLSGKMRKGNVSLRRCLSQAAWAISMMKNNYLSALYRRIAARRGAKRAIMAVAHALLEIAYHMLKRKEDYRELGADHFDRIDVKRIRRSLVRRLERLGHKVTLEPLAQTA

SEQ ID NO: 506766 - protein, 347 aa, unidentified
MVTFGGDSHKRTHTLVAVDENGRQLGERTVAATPNGHMDALGWARQWPERRWALENCRHLSRVLERDLLSAGEAVVQVSPKLMGLARRTGRELGKSDPIDALAVARAALREPHLPVAQLEGRSREVKLLVDHREDLVGERTRIQNRLLWHLHELEPGYQVVASGLLRRVVLAEVSSRIESHTGVVAEIARDLVARLTELTQSVRRLQRRIEALMYELAPGLLSLPGCAGLSAAKLVAETADVSRFRSSAAYAMHNGTAPIPVWSGNQERHRLNRGGNRQLNVALHRIAITQMRLGGPASDYIARRLTMGNTKTEAIRALRRQISDEVYRRLRQDHSQRSTASIAVAA

SEQ ID NO: 506767 - protein, 304 aa, unidentified
MFGIGIDVSKATLDVAVHGEQFRQFSNDKRGFVRLIRWLKTWPIKQVVLEASGGYERAALDVLHAAGLPMVRINPARARRFAQGTGRAAKTDRLDATVLAQMAHLLPLTRYVPPAPWQQRLAEFAQCRRQLVQMRVSEMQRLRRLVDPDLIAMKQRHIAQLSDDLKQLDKAIAEQLEGQPGWKNIGALKGVGPILISTLACELPELGSLGSKAIASLVGLAPMNRESGTWQGQRRISGGRAVVREALYMAALTTIRYEPRLRAFYAGLKAKGKASKVALVAVMRKMLVILNARKRDAEVALGCP

SEQ ID NO: 506768 - protein, 430 aa, unidentified
MEVIYPKACGIDVHKSFIVAVICDSTSVKPQYLRKRFSTFNNSLIEFKNWLLANDCQNVCMESTGKYYVPVYNALEGHISNVVVANPKWVACIKGEKDDNKDAKWIADLFKLGIVRSSFIPNKDIRILRELTRYLYKLTNMRTSEKNRFTNALTVGNCKLDMVFSDIFGKTSSAIIDTILSQNEYDDEDILKNIDKHCKSSNEDILNSISGISWEDSQKQRMNVIQEHIDYLDKSIKTIREIIDSIIAPYESAINLLCSIPGIDRKSAITIISEIGTDMSQFSSHYRLASWAGLAPGCNESAGKKKSVKISRAGVYLKPALVEVAHCAVKDKNNDYFAKKFNLLSKRRGKKRAYIAIARKILVAIYHMLSTGELFNPSDASKIETSDKDKIKFTKNNFMQSTKQLISLGLTVDELQTFITSKISDLTPVT

SEQ ID NO: 506769 - protein, 459 aa, unidentified
MSPRFKGKKKIPSVSKTTPSLPVLQPHAAGIDIGAREIYVAVPPGRDPKPVRTFATFTEDLHALRDWLKACGVTSVAMESTSVYWIPLFQILEAAGIEVCLVNARHCKNLPGRKTDVQDCQWLQYLHAVGLLRGSFRPPETVCAVRSLLRHRDGLVRAAATCVHRLHKALTQMNIQLQHVIADLTGVTGLAILEAILAGERDPVALAKLKDGHIRASADTLAKSLRGDWRAEHLFTLRQTLATWKHYQAQITACDEAVARLFQGFAAKVDIAERPLPPRTSTHKAPQKNAPRFEAREELYRTCGVDLTQVPGLQCSTALVLVGELGPDFAERFPTAKHFGSWLGLCPDNRITGGKVMSSTTRDVKSRAATALRLAAQALNSAQNYFGDLYRRWKARLGTPKAITAMAHKLARVLWHLFKYREAFNPEVFRKEKERMQRKKLARLHNTAAALGLRLVPAQ

SEQ ID NO: 506770 - protein, 407 aa, unidentified
MEVLIERACGLDVHKKSITACIVTPEGKEIKTFRTHTVFLLELIDWIKEHRCTHVAMESTGVFWKPIVNLLEAEQIEFLVVNAQHMKAVPGRKTDVKDAEWIADLLRHGLLKASFIPDRNQRELRELVRYRRSLIQERAREHNRIQKVLEGANIKLASVVSDIMGVSSRDMLEAMVNGETDPEKLAGFARRTMKKKKEELELALRGNMTAHQRLILKSMLTHIDFLNEQISELDMEVAKRLDPFQQDLDRLDTIPGVARRTAEQILAEIGTDIASRFPSAPHLCSWIGLVPGHNESAGKRKPSKTRKGNKYLRSALIEASHSIRGSNNYLGAQYRRIAARKGGHRAAVAVAHSIMTIAYHLITRQEDYTDLGSDYFEKRKQDAIVRQTVRKLENLGYSVTLATTEVS

SEQ ID NO: 506771 - protein, 316 aa, unidentified
MTTNAVVVGVDVAKDRLDVAVRPSGEVWSEANDEAGITALVARLRPLGPVLIVCEATGGFERAAIAALAAAGFPVVVANPRQVRDFARATGQLAKTDQLDAALLALFAERVRPTPRPLPDAAAQLLDAVLTRRRQLLEMLVAEKNRLGFAPRPLHRGIQAHVRWLERQLDDVTKELAGLIEASPVWRAKDNLLQSVPGVGPIVSSTLLGELPELGTLSHKQIAALVGVAPLARDSGTLRGKRLVWGGRASVRTALFMAAMCGRRWNPTLKVFYERLKAAGKPTKVALIACARKLLTILNAMMRDQSRWTSNVQYSC

SEQ ID NO: 506772 - protein, 398 aa, unidentified
MEAAHGVVVGFDVGRYSHHMTAIDAHTGEVTASKPVGQDESEIRSALEPYAGTDAIAVVDQPGDLSSLLFAVAREMGLDVGFITPKAMAKGIDLYGGEAKTDRRDSFVIADLALRIPSLVHGVSARRGDAEELAALMSYDRELTDDARRAAARIHGLLLATCPALNGVFAGQRVKRRLPLALLARYGGANGLASAGKGRVRRWVGAQRGFGHRGPLFVEEVFSAIASQSVEIVSSAFYDELIKIEAASLRSALDARERVGRRVDELLASMPDARVLLSMPGLGRVTAATFIAEVGDISRFTSAAKLAAYAGLAPRVRQSGRSLNSVTKPRAGNKRLKRAWVLSAARSIDFCEESRAYYDRKRAEGRCHYSAVIALARRRINVAYAMLRDGQRFESRLG

SEQ ID NO: 506773 - protein, 366 aa, unidentified
MKKISTVQTFSNEIFREQKLTIGVDLGDRWSFYCVLDEAGKIILEQKVATTPEGMKQTFARIPRSLMALETGTHSPWVSRLLTELGHQVIVAHAQKVELITKSNRKDDRHDARTLARLARIDPELLGPVRHRSAQAQIHLTVIRARAELVSARTALVNAARGLVKSFGQRLPKCGTQQVSRDLAAGLNTELREVLQPLLQEIESLNQRIQEYDQRMEKIAQEVYPQVSLLKQVKGVGTQIALTFVLTIEDPYRFAKSRQVGCFLGLRPGRRNSGESEPQKKISKEGDRYLRTMMVQGAHYILGPFGADSDLRRWGLKLAERGGKNAKKRAVVAVARKLAVLLHRLWVSGEVYEPLRKSQQAMRAVA

SEQ ID NO: 506774 - protein, 435 aa, unidentified
MRRSRIYRAKSVKKVEWREVARGRGRQGVRVGTDIGKRALLAVVRWEDGGFERPWLVKNPEEIADFIRLLAEIGRGRELRVAMEPTGTYGDALRQGLFDAGIRVERVSPKVAHDYAEVFDGVPSQFDGKDAGVVAELSALGKSREWKYEEPSRVEQEMAYWVDWMDAQRRQASMWQGRLEALLARHWPEATRWLKLSSLTLMRILQHYGGPKELADDREAAARVASWGRHYLFAEKIHGLLTSAQQTVGVRQGEIDLRRMRQYAAQVLAARGEMGRGKRRLAELARGNSIIQAQARVVGVATACVLWVYLGDPRDYFCATAYRKAMGLNLTEYSSGEYQGRLRISKRGASAVRRWMYFAALRWVRQGPVRRWYLRKRARDGEEAKRAIIGVMRKLAKGLHRVGTSGEPFHPGQLFAGRLSQGRKRARRSPVGSKG

SEQ ID NO: 506775 - protein, 311 aa, unidentified
MENNSIVGIDISKDQLDIHVLPSQDSFCVPRDATGLEGLVERLLVLKPKLVVMEATGGFETIVASTLAAAGLPLAVVNPRWVRAFAQSSGRFAKTDRLDAATIAAYGKAMEIEPQSVPDEAARMLGELVARRRQIIETMGVERNRRRSLTRSKLIKGLERILAALQKELSDVENDIDEAVRGTPAWREKDELLQSVPCVGPKVSSMLIAELPELGTLTRRKIAALVGVAPMADDSGKHRGRRHIKGGRIHVRCGLYMAALVGTRFNPVIAHYYRRLIAAGKKPKEALTACMRKILVILNAILRDHRPWQSA

SEQ ID NO: 506776 - protein, 336 aa, unidentified
MRRSPWPRSLGLGKHYSQFAVVDQNGHLLAQNRVDHQPGAIRTFLETLPEGTPVALESVGNWYWIADEIEAAGCIPLLTHAAKAKIMMGNVNKTDKLDAKGLAKLLHLDSLPTVWLPPMEIRDERELHRTRMALSKLRTALKNRIHATLAKYGITNSEHSDIFVGAGRDWLESVLSQLPPETGRCVTQELEALDSLQQQIAQLEDRIRERIALTPSIQLLKTLPGVGNILAIVIEREIGSIERFDTSGQLTSYAGLVPTVHASGGKTHFGHMRKPSNQYLKWAFIEAANVVVRHRHHPAWKATYVCQIYDQGVPAQGPRHRRGRCRSCSLTAWLVI

SEQ ID NO: 506777 - protein, 424 aa, unidentified
MKSASNTPSSERPLVLPEVAPNDVTAGIDWARDDHAACVVDGRGRRIATTMVEHTTAGLRDLVAFLGRHGVWEVAIERPDGPVVDTLLAAGLTVVVISPNQVKNLRGRYGSAGNKDDRFDAYVLADTLRTDRARLRPLVPDTEATIALRRACRARKDLVKHRVAAANQLRAHLRNVFPGAIGLFAAIDSEIALAFLARFDTQDRADWLTPKRLADWLAKQGYSGRTDPAKLHQRLLDAPRGASGEQATNQAAITAGYVALLRTLLAQIKTLSAQIDRQLDAHADSHIFTSLPRSGRVRAARLLAEIGDCRARFPTPESLTCLAGAAPSTRQSGKLRVVGFRWSCDKQLRDAVTDFANGSRDSNPWAADLYNRSRARGHDHAHAIRILARAWLHVIWHCWQDGLAYDPETHRALQRVLAQHDEAA

SEQ ID NO: 506778 - protein, 390 aa, unidentified
MTQVDDLSRCLATLDENSTLVAVVEMSQSSWLTAGLVPGVDRRPLKKLAPDAPTLLHLLERWREEAKTAGRMITRIVLAYEAGRDGFWLARWLRARGIEAYVIHSTSVAVSREHKRAKTDRLDAAMLLRVFLGWLRGERDHCGMVAIPTIEQEDAKRPSRERESLVGERTRIINRMKSALARLGIRGFKPELRKAPERLEALGTPEGDSIPPNTLDELRRDLARIAVVRGQIEAIEQNRLARMEQMPAQGPHAMVRLLARVIGIGVETADMLVQEILSRNLRDRRAVARYAGLTGSPDESGSKRREKGLCKAGNARVRRGMIQLAWRFLIFQKESELAQWYREQAVATKGAGKDKRKKMIVALARKLLIALWRMATTGEIPEGVMLRPAA

SEQ ID NO: 506779 - protein, 462 aa, unidentified
MLVHSSDLSGELSRELGSGPPRLVRVGIDAAIVAQHEVCIRTTGLDGRVRSDRFHVQPTLAGLRTLTARLAETPGVVAVAEPTSMTWLGLSVAARQAGCELSLLGARHAARLRGAISGKHKSDVIDADVLARAGEVFDLHPLRPVEPTQLAMRRACTRRGTAVVDGNRHLRRLISLARWAFPDVWNGFRGSLPTAVAVLTRWPHLAQLAAARRSSLTAVVALHTRGVPDVPARVEAIRSAAAAWAQFWDGHLDLDGLAFDVAEHLADLAAANARTDRATAQAQQYWRRLYGDDELLLSVPGTGPITACVIRGFLGDADSFTSAKAAASYVGLNPSTWSSGTVSQPSRAITKEGPAVLRLAFFQAANGARRTDPQLARFYHRLMTEHGHCHTQATIAVARKLVERTWTVLTRGQPYQLRDLDGDPISHLDAKKLIKERCTVPDTVRIRARAHSAATNRAKLTR

SEQ ID NO: 506780 - protein, 394 aa, unidentified
MMSKDASISENTHAVSVAAERSEAATETAADDRSKPLSSGLAENVGEPDRRRFSGSSPNSRQSGRNTRSPSSYLQGRDTSMMTFESVIGIDVSKNKLDVADWPESFTSQATNDKTGHQQLIKKLPQPKSCLVVIEATGRYEKAVALALVDAGYLVSVVNPRQVRDFAKALGILAKTDRIDARVIARFGEQVRPRALAQMHEKQDELDQLVTRRRQLIASRTAEKNRTGTVTAKVVRKSLQKIVDQLSKEIRRIDSEIARLIKSDEEWKGRSELLQSAPGVGEVTATTLIAEVPELGQLNRQKISALVGVAPFNRDSGQFRGRRTIFGGRRAVRSALYMAALAARRCNPVIREFADRLEARGKLPKVILVACMRKLLVILNSMVKTNTHWNHESV

SEQ ID NO: 506781 - protein, 421 aa, unidentified
MKNSVARKLKQVPEGYLIIGVDPHKKKHAAVAITQDFTLRDRFKFDNTREGLEFLLRRVRMEMVKSSCRGVMFAIETGGHYWRNVAYFLDEQGIPFRFINQFTLKRRREGKDLNRRKNDYRDSEVAAQLLCTGEFVESVIPQGVYAELRTAHNAYRRLVKERTRITNLVKGLLDSLFPEFTQVFKDPCGLTSLSVLSTGSIPGVIAEMTEEEFVATIEAKHQGRLMRKKLAALHHEARSSIGIAAGAKSVSSEISFLVEKLELIRGHIRAIERTLVRLVDETGEGKYLLSIRGLNYIAVAGLLAELGCFKLYRSAKQMIKMAGSNPTESESAGKKRSRTPMSKQGRPVLRYCAWTSVIPMLRFNPDFRAWAKQRRERPVHANPLGGREIVGAALNRLLRLSFALVKNQTFYRSPQLVQVTG

SEQ ID NO: 506782 - protein, 341 aa, unidentified
MTFVMGMDQHREQITAEWIDTITGEISRTRIAPADRGTVREFLARFDGAGLEVALEATTGWRFVVEELQRVGADAHLAEPAQTSGLKGKKQRAKTDWADARHLRELLLIGRLPESWIAPAHLLDLRARVRCRHTLVHQRTEWQQRMHSVLFHHGVPRSRKLLTLANRERIAALKLPAAAREQLTIALEMIDAIEIQIGPVDLALRAYARTQPGCRALIDQIYGLGPLTSVTLLAELGDTRRFQNSRDAVRYAGLDITVYQSDQRRAAGHLSRQGPPALRWALYEAAQAARRPGSPDRTYDEQLAQRIGGNRACVAIARKLLKRSYHVLRGLGDQALEPVTT

SEQ ID NO: 506783 - protein, 365 aa, unidentified
MPMLAELLDAVVGVDTHRDTHEVEIALPTGAPLATCSISNDSGGYSELIDWIAQHTPGPRLVIAIEGTRSYGVGLARAAMAAGLMVIECAQPARGSRRGKGKSDPIDAHLAVLTALRLDADRLPFPRADGDREALRILLSTRDELTTVNTAQTNRLRALLLAGDDTDRQLARARLTAAALASLIRRRPRRDADRAQAVRQAEIRRLALALRDAGQALRSNRAQLAAIVEGLVPGLTARPGIGPVSAAQVIVSFSHPGRCRDDAAFAALGGISPLEASSGRLVRHRLNRGGDRALNKAIHVIATTRMRDCPTTRAYVARRTAQGKRPQEIRRCLKRYIARQLYRTLTEAMPTTTDRNPWKAATATP

SEQ ID NO: 506784 - protein, 410 aa, unidentified
MRRVIGMDIHRTFAEVVFWEDGKLRPAGRVSMTRAGLEGFGRSLGKEDEIVIEATGNAMAVVRVLSPFIARVIVANPLQVKAIAHAHVKTDKIDAGVLASLRAADFLPEIWLPDADTERLRRLVARRNQVVRHRTRIKNEVHSILHAHLIPPCPHADLFGRLGRTWLARQVMPDDERGATERHLRELDRLGEDLGILDRDIARGAIDDPAVKRLLTITGVNLIVAAGLVAAIGDVRRFPDPQKLVSYVGLNPRVRQSGLGLAQHGRISKRGRSHARAMLVEAAWAASKAPGPLRAFFLRIRARRGHQIAAVAVARKLAVLCWHLLIKGTDYQWARPALVANKLRAMELKAGQPARKGSKPGAAYAYNIKELRDREIELARHAEQAYERFVSQWQPRRAKRRTDAANEERH

SEQ ID NO: 506785 - protein, 337 aa, unidentified
MIVVGVDVHKQSLTAVAVDEVGRPVAEQTAGNCQLLLDWAASLGGERLWALEDCRQLTRQLERTLQLAGERLVRVPPKLMAPSRRAGRVRGKSDPIDALAVARAALREPRLDHPRPGEAALRELKLLVDHRDDLIDERRRAQQRLRWHLHELDPQLTVPAGALDRAVWLDRLARWLSRQEQTVLVRIARELVSRCRSLTRTILALDRELQARIERTAPALLALPGCGALSAAKLLGEIGPIERFQTDAQLARHAGVAPLEASSGSHRRHRLDRGGNRQLNCALHRIAITQARMHPPARAYLARKQTEGKSRREALRCLKRQLARTVYTTLKNEPPLT

SEQ ID NO: 506786 - protein, 387 aa, unidentified
MPQVDDLSRSLVAFDQDATLIVVVEMSEASWLVAGMAPGVDRQPLKKLGPDPDALLRLVERWRDEAVKAGKMIERIALAFEAGRDGFWLARWLQARGIEVHVIHSTSVAVSREHRRAKTDRLDTAMLRRVFVGWLRSERGHCGMVAIPTLEDEDARRPSRERESLVGERTRIINRMKAILAWLGVRGFNPKLRKAPQRLDDLRTPEDLPLPPNTVDELRRDMARLAMVCEQIKALEQARLANLEQAPGTGPHAMVRLIANVIGVGIETADMLVQEVLSRNLRDRRAVARFAGLTGAPNESGSRRRERGLAKSGNARVRRGLIQLAWRFLRFQKDSALAQWYRARTEGPAAARRTKMIVALARKLLIAFWRMVTVGEIPAGFALRQPA

SEQ ID NO: 506787 - protein, 336 aa, unidentified
MTIIRVGLDTSKHVFQMHGVDENEQPVLRRQIRRGAVEKFFAKLPSTRIGIEACGASHHWARLLRGLGHEVLLMPPQYIKAYVKRGKNDKIDAEAICEAMSRPTMRFVPVKTAEQQAALTMLGVRDLLVKQRTMLINAIRGHAAEFGVTTAKGPKQIAELLARLASDEDVPVLAREMIGVLASQLNGLDIKLKAIEARLMTWHRQDQTSQCLATIPGIGPIGGVSFALKVPDAKAFRSGRRFAAWLGITPREDSTAGRQKLGRISRAGDADLRRLLVIGATAVIRAAKPGRTAPWLMGLLARKPKKLAAVALANKMARIVWAMMMSGETYRRPAQA

SEQ ID NO: 506788 - protein, 343 aa, unidentified
MQTIATIGLDIAKSVFQVHGVDAAGQVVVRRQLKRRQVLAFFAKLPPCLIGIEACASSHYWARELQALGHTVRLIPPAYVKPYVKRQKNDAADAEAICEAVTRPNMRFVPIKTIEQQGCLVLHRTRHLLVRQQTATINSIRAYLAEFGIVAPVGRRGVEQLLEVIADFNDARLPEVARACVAALGVQLRQLKAQILELDRRITAWHRSSETSRRLNQIPGVGPLLATALVASITDPKVFRSARDFSAWIGLVPKQNSSGGKDKLGNISKRGDRYLRSLFTTGALAVIRYAKIHGTKHRPWLVALLARRPTKVAAIALANKLARIAWALMTKGSSYRQPAALRV

SEQ ID NO: 506789 - protein, 400 aa, unidentified
MISVGIDVSKEKSTVCILKPYGEVVSRPFEVCHVEKELSELTSMLLRLNDDIRVVMEATGIYHLPVLSYLKEKGLFVAVINPFEMKEYRCQGLRRVKTDKQDAITISNYGIDHWYRLKNYEAEDSVYAELKLLGRQYRHYMRMSVESVLELTHLLDYTMPGIKTLLKGWNETNGKDKLGDFAEEYWHYDNITKKPEEQFIESYLKWAKEKGYHQSQDKAVKIYALAKEGIPTVPSDTPSTKMLVQEAVRVLREVDNTLMTILTQMQALAKSLPEYPVVRAMGGVGNVLAPKLIAEIGDVRRFHSGKALIAHAGIDAPPYQSGQFIGTERKISKRGSSSLRKIGYEVMRCLKTHKEPEDAAVYRFILKKEKEGKSKRAAKIAGLNKFLRIYYARVMEVYQN

SEQ ID NO: 506790 - protein, 425 aa, unidentified
MTQPYGNTGEKVLVAIDIAKKRNAVLIQLRDESRKKFMVANKLSDYQEFSAYLKNLRFPCVIGLEATGNYHRPLAYYLIQQGFEMKLVSSVAAARTREAMYNSWDKNDPKDAQVILHLLKTGLTQTYHDPLLNRINDIQELSKTYYQVSLRKTRIQHSIMTHYLPLYFPEVQKYYYTSRAQWFSSLLLRFPSPSSVLKYSREEFIEAARDVAGRKVNKVAWLTDFYETAASSIGLPVEEDSESMVMFRLVLQEHQHLCRLRRSIEERAELYLKDNADYNRLRTIPGVGPVIALTILAEAGDLRRFSHYKKFLKYCGLNLSTQQSGNFRGISKLSKHGNARLRCVFWLAGTSAIRMRENTFRKKYENYIKTDPNNPDLKRKAYTAIAAKMARVAYALVKTERDYRCFFESSIPSGKIPSVGPLRHS

SEQ ID NO: 506791 - protein, 343 aa, unidentified
MQSISTIGLDIAKSVFQVHGVDAAGQVVIRRQLKRRFVLSFFEKLPPCLVGIEACASSHYWSRELRALGHTVQLMPPAYVKPYVKRQKNDSTDAEAICEAVTRPNMRFVPIKTIEQQSCLMLHRVRHLFIRQQTAVINSIRAYLAEFGIVAPVGRRGVEQLLEVVADPADRRLPEVARACLAALGSQLRALKAQILEFDRRIIAWHRSNATSKRLDAIPGVGPALATALVASVADAKAFRSGRDFSAWVGLVPKQNSSGGKDRLGSISKQGDRYLRSLFTAGALAVIRYAKIHGARHRPWLTALLARRPTKVAAIALANKLARMAWAMMARNERYREPAALTA

SEQ ID NO: 506792 - protein, 377 aa, unidentified
MKKELYLGLDVHKDCIPTATAEAGRRGEVRDSGAISNDLHAVEKWIARLRKAHGKETQLRACYEAGPCGFGLARRLRQLGVDCQVVAPSMIPTRAGDRVKTDKRDARKLARLLRAGELTPVYIPEPTDEAMRDLCRARTDAVDDRRRARHRLKGFLLRHGYRYQGKSSWSAAHERYLRELVLPHPAMKVILEEYLQAITAAGERIERCEVGMRALLEKWRLAPAVRALMAMKGFQTVAAMILVSELGEVHRFAHPRQVMAYLGLVPTENTSSDKRRQGRITKCGNAHARWLLVECAQHYVPPPKVSKELSRRQQGQPRKVCAISWRAQNRLHHRYTRLLGRRLQRNKAMVAIARELCGFIWELLRTQSCYQAQSPSV

SEQ ID NO: 506793 - protein, 322 aa, unidentified
MTECILGVDIAKKKFDVALLINGKLKHKVFTNDQEGFEMLLSWLHQKNVDRVHVCLEASSTYGDELATHMYDAGHTVSIVNPARIKGFARSELLRTKNDKVDAGLIARFCLAMHPEPWKPAPPEIQHLQALARRVDALITMRTQELHRLGTAQDTIEHSIREHIVYLDRQIKALKQQIADLIKDDQDLKAKRDLLKSIPGIGEATVAAILAELHMFERCDHVQKVVAFIGLAPRQFISGTSIKGKPRLSKVGHARLRKALYMPALASIQCNPIIQIFYHRLKENGKNGKVIVCAIMRKLVHLIFGILKSGKPFDPKYAPHYA

SEQ ID NO: 506794 - protein, 412 aa, unidentified
MRIIYKRCCGLDVHKKVIVACLLLLEPDGELRREIRKFGTMTQDLLELLDWLQQAGCTQVAMESTGVYWKPIYNILEGHLEVVVVNAQHLKGVPGRKTDVLDAEWLAECFQLGLLKASFIPPAPVRELRDLTRYRTSLIRERARTANRLQKVLEDANIKLAGVVTDIQGVSAWAMLESIVEGTTDPAALADLAKGRLRQKRAQLVAALSGRVKPHHRFLIAEQLSQIEYLEESIQRISAEVGERLRPFELAVQRLDSIPGIGRQTAEVLLAEIGWDMSRFPSDKSLASWAGMCPGNNESAGKRRNGKTRKGSRWLRHALIEAARGAARTKNKYLKTQYHRLAAHRGKKKALVAVGHSILIISYHLLTRGQEYSDLGANYFDERDRSAVQRRCVKRLEKLGYSVQLQQTTLAA

SEQ ID NO: 506795 - protein, 387 aa, unidentified
MPQSNDLSRSLAALDQDSTLIAVIEMSQSSWLVGAIVPGISRQPLKKLVVEERELLRLLHRWRDEATKAGRMINRITVAYEAGRDGFWLARWLQGQGIEAHVIHPTSVAVSREHRRAKTDRLDTELLKRAFLGWLRGERGHCSMAMIPTPQEEDAKRPNREREGLVGERTRIVNRMKSTLARVGIRGFKPTLRKAPERLTGLLTPEGVPLPPNTLAELRRDMARLRFVMGQIREIEAARLQQLEQHPEQGPHAMVRLLAQIIGVGIETADMLVHEILSRTLRDRKAVARYAGLTGAPDESGARRREKGLARAGNARVRRGMIQLAWRFLMFQKDSALAQWYRARTADARGTTRKTMIVALARKLLIALWQLVTTGEIPQGVVLRAAA

SEQ ID NO: 506796 - protein, 337 aa, unidentified
MKYCGIDLHSNNRVIVVIDEEDRVVGQKRLPNELARIVVFIVQWRDELAGVVIESTYNWYWLVDGLQAAGFQAHLANTAAIKQYDGLKHGGDEADARHLAQLLRLGILPTGTILPRDERAVRDLARKRIQLVRGRTTHILAIENIMDRQFGARMTSNQIKRLSADDIDQMPIEADVRLAMNANLAVIGALDAQIEVLERRLRERVKPRPEYAFLTSVPGIGQALSTTILLETGPIDRFASVGNYASYARCVDSAHTSNRKKKGEGNVKNGNKYLAWAFVEAANFARRYCPEAKRFYERKKAKTNNIVATKALAHKLARACYHILREGRPFDVTRCFA

SEQ ID NO: 506797 - protein, 410 aa, unidentified
MQVKYERCCGIDVHKDTVVACVIVSKSSGHVQKTIRTFTTTTSGLQALAQWLTETGCTHVSMESTGVYWKPVYNLLEGVFELLVVNAAHIKKFGDKTDVTDAEWLADLLRHGLLRGSFIPSALQRALRDLTRYRTRLIDDRSREVNRVQKVLEDANLKLASVASDVMGVSSRAILAQLIEGQSDPAVLAELAKGRLREKRAALEQALTGRFTAHHRFMLVQHLSHIDYLDEQIAQVDAEITKQIRPFQAAVDRWDQLPGINQRGGQVIVAEVGADLKPFADGAHLASWAGMCPGNQESAGKRQSGKTHQGDKWLRRALVEAAHGAARTKNSYFATLYHRLAGRRGKKRAWVAVGHSLLVTGYTLITRQVDYQDLGANYFDELNKEAVKRRTVKRLEQLGFQVELKPIVAA

SEQ ID NO: 506798 - protein, 409 aa, unidentified
MLEVKVERCAGIDVHKKFVMVCVMIGLAHQKPASEVRRFGTSVPELERLRAWLLEKACTDVVMESTGSYWKPVFNILERDCKVILANAEKVKALRGKKTDPNDSRWLASLLRHGLIQPSFIPPRDIRELRDLTRRRRTLMQQGASERNRVQKILEDANVKIGNVLTDVFGMSGQAMLEALLENKMTAEQMADLAQGRLRPKIPQITEALEGHSMRDHHRMLLRQILRHMAYIEDMVEELDKEIWRKLQPYEEEVQLACSVPGIGRDAAASILAEIGPDMSEDGPFSGCHQLASWAGICPGNNESGGKRKSGKTRKANRWLRATLAQTTWAGIAKKNSAFRDRYQRLKPRRGPQRAATAVAHGQLIAIYWVLRNRVPYQEQEQKQKLDDRRRDAMIHHHLSRLKELGYTA

SEQ ID NO: 506799 - protein, 355 aa, unidentified
MDSVKYIGMDVHKEAIAIAVVNSSGKLVMECVIETKAITILDFLKGLRGSLHVTFEEGTWAAWLYDLIKPHVTELVVCNPRRNALLKEGSKSDRIDARKLAELLRSNLLRSVYHGEQGVRKLKELARSYLAISKDLGRVMSRVKAIYRSWGIPCGGKQVYAQRYRSEWLGKIQEAGVRRRAEFYYQHLDALRPLRQQVRQELLAEAKKHSAWKLLRAIPFIGPIRAALLIALIQTPHRFRTKRQLWTYSGFGIETHSSAEQRFINGELRRAKKPASIRGLNRNHNHDLKNLFKSVATVAAAKAGPFQEYYDALVAKGIRPEMARLTLARKIAAITLIIWKKGARFEAQHLKPQTA

SEQ ID NO: 506800 - protein, 366 aa, unidentified
MASVSHRRPVHLGLDVHRDTISVGILLPDQQVPEVDRIPHDEASVRRLVGRLGEPRRLRACYEAGPTGYDLARLLQRIGVSCQVIAPSLIPTAPGDKVKTDARDCRRLARLHRAGELVAIRIPTPAEEAIRDLCRARADMVADRTRARHRLSKFLLRHGRVWRGGVAWTQAFDRWLASQHFDEPALTTTFGHYRAVLEVRDAQLDAVEADLALWQDQGPFADQVARLAAYRGVTRLGGLTLASEVGDWRRFARASAFMGFCGLVPSEYSSGQHTRRGHITRAGNTQLRTQLVESAWAYQHRPSVGTTIAARQQGLDPEVVIRAWAAQLRLCGRFRRLAARKTAKNVVATAIARELAGFLWAEMTTA

SEQ ID NO: 506801 - protein, 319 aa, unidentified
MAKIVLGIDVSKKTLDVALIFDNRTLCKQFKNSLEGFKLLAAWLASLQITSVHACLEATGTYSEAIALFLYEQGHQVSVVNPLRIKGYASANMQRNKTDRLDARLIATFCLTQKPDEWQPPSAEVKHLQSLVRRVEVLEEMLRAEENRLTNAAPQIKSSIERIITLIKEEIGELERQIKQHISQNSNLKEQSELLQTIPGIGARTANLLLSEIEFERYSSARSIAAQAGVTPRKRQSGTSLKQTSLSKLGNARLRKALYFPAIVARQHNEIVKEFAKRLKKNGKTPMQIVCAAMRKLLHIAFGVLKHKRAFDASLAFSA

SEQ ID NO: 506802 - protein, 347 aa, unidentified
MNITTIGIDLAKSVFQLHGIDSFGKVLIKKQIKRAQMAEYFVNLKPCLIGMEACGSAHHWARKLEGFGHTVKLMPPQYVKPYVKTNKNDAADAEAICEAVTRPNMHFVPIKSTEQQAILSLHRIRQGYVKARTAQANQIRGLLAEFGLEIPQGIGYIAKRVPDILEDASNELPGILRIEIQSLLEHLNELNTRADNCEKKIVAWHKQSETSKKLEAIPGIGPLTATALVASIGDAKNFKNGRQVAAWIGLVPRQHSSGGKQNLLGISKRGDIYLRTLLIHGARSVIYRSGQKENPTDRQSWLNQLTQRRNKNVAAVALANKNARIVWALLNHNREYQNNHKTLRVAA

SEQ ID NO: 506803 - protein, 367 aa, unidentified
MKKVSTVAAKASRKISSQKLTVGLDLGDRSSWYCVLDEAGSVLLEQRLSTTSKAVREVFGGMPRSRIALETGMHSPWVSRLLSELGHEVIVAHARNVRLIGESRKKDDRLDAQTLARLARIDPGLLSPVKHRSAKAQADLSLIRARAGLVRARTALVNTARGLAKSYGERLRGCNVRNLNPEKAEGLSPELQAALQPLLAALESLSEQIGEYNERIEKLAQESYPQVALLKQVKGVGTLIALTFLLTLEDPHRFRKSRDVGCYLGLQPGRRNSGQSEPQMHISKEGDPYLRTLLVQGAQHILGPFGVDCDLRRWGLKLAERGGKSGKKRAIIATARKLAVLLHHLWVSGEVYEPLHHSGAVTMPAAA

SEQ ID NO: 506804 - protein, 321 aa, unidentified
MTIIGFDVSKNELVGVRTNKSAAIQEKIIFENTREKIDSFLDHVQKQYPHLTISSEATADYHRILAQRCVERGIPFRLLNPILAKQFTRATIRKRKTDLTDAHVIAKLTLQGEGTLLTAGSFDPAKSLSRTAAKVNRILKMFSAISSRLERVFPDQERVIAEMKKHLTPLKETVKKLRGEARGRIDERVCALLCSITGIGPTLASMIITEIGDVMKFPSGKSLVAYAGLDPRVKQSGVSMKRNTKITKRGSPYLRHAAYMAATIAKRHDPELKVYFEKKVGEGKRYKEAVVATARKILYRVYAVWKRGTPYVKRSFPQATT

SEQ ID NO: 506805 - protein, 543 aa, unidentified
MTETAYAAYVGIDWGTATHQVAVLDAQRAPLGERAVAHDGAALQAFTEWLTLLTGGEPARVAVGLEVPRGAVVDTLLERGFHVFALNPKQLDRFRDRYTVAGAKDDRRDAFVLATALATDRPAFRRLEFEAPLIVELREWSRVEDELREEWGRLANRLREQLHRFSPQLLALCPAADEPWFWALIALAPTPLAAQRLRRAAVVTLLREHRIRRLSADQVLAVLRSTPLRVAPGTVEAASAHVALLIPRLELIDRQRRDCARRIEQLLDALATTGEHQGHRDVTILRSLPGVGRVVAATMLAEASRLLAARDYHGLRTQAGVAPVTRQSGKRLLVGMRYACNPRLRNALYYWGFISVRHDAHSRRRFVRQRHAGQHVDRLDAIDELAFADARTDGEDHEGAKSRSKRIARDCSSSCTARNIWRTLDHYRTMAWGINSLFRVIDMRPARPPHVLERIERQRRADALALLAESSVRSYPSWVAELKRKLIAGSLAVIRLNGITDVHLILQQAIGCSCLIRRVRCGADNENSGPGNVILPKLSHRVV

SEQ ID NO: 506806 - protein, 339 aa, unidentified
MTDIVTIGIDLAKNVFAVHGVDATGKPVLLRPSVQRAKLLELIAALPPCLIGMEACSGAHHWAREFQRFGHAVRLMAPKFVAPYRLSGRRGKNDAADAAAICEAVIRPNMRFVPIKSLEQQGQLMVHRARQGFVEQRTATLNRIRGLLSELGIVLPLKAAVVRREALASLEDLPGWANTVIGDLLSEVTRLDERIAQYDQHITTLARDSSEVKQLMQLPGVGPTTATALLNTIGHGHDFQCGRQLSAWLGLTPGQYSSGGKSRLGRITKAGDPYLRSLLVLGARSVLQTAKNRSDPISRWACALAERRGYWRAVVAIAAKNARMCWAVLNRGEAFRLPA

SEQ ID NO: 506807 - protein, 426 aa, unidentified
MNYTQNRKISQITPSTLIIGIDIAKDKHVARAQDDRGIEFGKRLIFENRIHGFQMLLDWVNRHQQENDKNHVIFGVEPTGPYWLNLAYFLTAKGYDFVLVNPMHVKKSKELDDNSPTKNDTKDARVIAQLIKDGRYSVPNLLEGIYAELREGVKIRDQLTQQLAITEGRIQNLIQRYFPEFFDVFGDWKGKAALCTLKLFPFPSQMKEMTPEEVLSKWKPFVQRAVGMKRATKLVETAKKSIGIQIGIQFAKREMEYLIDQYELYQTQLEELDQELEALVETIPGAKQMMNIPGLGVTTVALFFAEVGDLTKYSHPQQLVNLAGLSLREHRSGTFKGQTRITKRGRSRLRKAMYLAIRPLVAHNPTFKALHQYYTKRSERPLKKQQSLIALCCKLLRVLFVIGQKQCEFDGSKLLRGLPQITLQVA

SEQ ID NO: 506808 - protein, 348 aa, unidentified
MLADELDYVVGVDPHRDSHALALVHVVSGAVVFEANVAADGHGYADALKLVDQHAAGRRAFAVEGSGSFGAGLTRYLTARGERVHEVGRLRRERRSGGKTDALDAIRAARSVLAQERPATPRASGEREALRALAAAREGAVNAKRAGLCQLQDLLVTTPEPLRSELRPLRRARLLRRLAATRPERRDDPELRGTLLALRSVARRVLQLTAEERELAGEIESITRKLAPHLLEQPGVGPLAAAQLLLSWSHPGRISSEAAFARLAGCAPIPASSGHTIRYRLDRSGDRRLNRALHMILVTRRRTHAPTIAYIERRIQEGKSRREATRCLKRYLARNLFRLLEHGAPLAA

SEQ ID NO: 506809 - protein, 427 aa, unidentified
MSYRIAGVDVHKRMLAVVVADVHEDGAYRFARQMVGTSPDQLRTLAHWLVAQEVEEVVMESTAQYWRPVWEALERYWQPPRQRRDGAGPMCGMLHLAQAQSNRAPGGRKKDFADAERLVKRLVAQELTLSFVPDAEQRLWRTVTRRKYQLTLNRVQLQGRLECLLEEAHIKLSTLVSDLLGLSARRMLQALADGETSPATLATLADRRLQATPDQLCDALGAATDLHPVYRRLLTMALNELHLIEDQIQELDQELAGLLARHQAAVQRLAAVPGLGVDSAQQIIAEVGASAPTFPSPKRLASWVGACPGDDESAGVSYSHRSPKGNRQMRRVLNQAAHAAVRTKGSIFELVYRRLVPRLGHAQAIGAIAHRLCRLIWKILHQGITYEERGPAVTKHRAQRRAATMIRELRRLGYRVELFPSPSGSPA

SEQ ID NO: 506810 - protein, 432 aa, unidentified
MNRLQVGIDFSQKKADFCLLFPDGQPLEPHVSFTNSRSGYSSAKQLLIDALDTYAFDGVDISGEATGYLWLPFFLQLSADPDLTLRNMDLFLLNPRWVKWFKKCFAEDHKCDGKDAFFITERTRVHRPDVAWSPPDCLPLRFYTRLRFHIVQNLAREKCYFSAFLFLKASSYRCIKPFSDVFGVTSRLVLTQQPTLDELADLPVEDLASHLCELSGNHLPDPLNNARKLQRVAKESFQLNQSLILPVQRILDLTLDHIRFLEAQLEQVDHWIATELENHPVIAQLATIPGVGPVFSSGLGAEIGGVRRFLQGQKWDKKRKRYRSRNLRDAEDAVAKIAGLWWPRADSGDFEAQDRRLAKSGNRYLRYYIIQAANLMRLHIPEYAKFYARKHKEASKHHHKRALVLTARKSVGLVVGLLHRDEPYRSKEDRRT

SEQ ID NO: 506811 - protein, 354 aa, unidentified
MAAKPPLVIGGVDTHRDLHVAAAIDPVGHLLGHRSFPATPAGYRALLAWLRCLGRLQRVGVEGTGAYGAGLLRHLRQARVIVVEVDRPDRRTRRSKGKSDPLDAEAAARAALAGTATGTPKGRDGRVEAIRALRVARRGAMKARTAAGNQLGCLVVSAPEPLRGTLRALSGKELVVAAAGLRPGPDLTDAVAATKAALRRVAHRYQLLSQEIAELDQALELVVATTAPRLVALLGVGTDVAGQLLVTAGDNPNRLVNEAAFAHLCGVAPLPVNSGRTTGRHRLSRGGDRAANNALYTIVICRLRWDPRTRAYMQRRTKQGMSKLEVVRCLKRYVAREVHQILTAPQPPQRLDEP

SEQ ID NO: 506812 - protein, 355 aa, unidentified
MPSKADTAVVRTIGIDTGKNTLHMIGLDKKGAIVLREKVSRTRIAARFVNVPSCLIGIEAGMASHHVARELAALGHEVKQVPPAYSKPFRQGHKNDFRDAHAVAEAVERPLTRCVPIKTDGQLDLQALHRVRSRLVGNRTAVINQIRGFLLEHGIPVRQGHHFLRQQLPQLLATRTDVLSARMTRIIGDLIADWSYLDERIETVTDEIETLAQADEGCQQLITVPGIGPIISSAMVAAIGNGAAFCKGRDFAAWLGLVPKQMSTGDRTILGRITKRGNRYLRMLFIQGARAILLRPASWAKHSFGSWLMAAARRMHRNVLAVALANKLARIAWTVLAQGRHYEARVEPRVEPATA

SEQ ID NO: 506813 - protein, 424 aa, unidentified
MVMIGVDPHKGSHTAAALSAAEEQLGELRVRASAGQVQRLLAWAAAWPERTWAIEGADGTGHLPDWQLLAAGERVLDVQPKLAARVRLLAAGNTNKNDPNDARSVAVAALRPAGVREACREDHPAVLKIWSKRYKDLGRSRTQVACRLHAVLCELIPGGASKQITAGQAGRILESVTPADAVQAARWQLAAEHAAGLRGIDAQIRQTRKKIDAAVRGAGTSLTGIFGVGPVIAAAVIGDVRDVSRFPSRDHFASCNGTAPVEVSPGQRKICRLSRRGNRRLNHAIHMAAVTQIRCRHSNGRAYYDKKLAEGKTPERSPARAQAPGQRRHLHGPAGRRPEGSRTARRAREGNGGRLASQRGRLTSPGAGSSGKPLPDPPPAYDATDHPGRSRSCPFPHCCRPERAGRPSRTGRSPAAQRRPKGRP

SEQ ID NO: 506814 - protein, 348 aa, unidentified
MRFYTGQHQHYCGIDLHARTLYLCVLDAEGNVLLHKNLPCDRQIFLDTIEPFRDDLVVASECIFNWYWLADLCADHDIHFVLGHALYMRAIHGAKAKNDKIDSHKTASLLRGGLLPQAYAYPSKMRPTRDLLRRRTHFVRKRGQLTAHIQNTFHQYNLPRPPGLLVYKHQREPVPAAFADPIVRKAVEADLALCETYDDLIRDLENTVLRQARVQDPNALLCLNTIPGIGKILSLTFLYEIHDIGRFDSVQRFASYARLIKCETSSAGKRTGSSGAKIGNAHLKWAFSEAAVTVLSHFPDSKKLHTRLKRKHGNGKALSILAHKIGRTVYFMLKRNQAFDPERFLMNA

SEQ ID NO: 506815 - protein, 421 aa, unidentified
MKTNDWIRHSHFAALDWACDHHDVAIVDRTGALIAEFRFAHTAEGWAEFSARMKPYTGAPLALETSSGPAVDQLLQRGWTVYPVNPKAAARYRDRKVPSGTKSDAHDAWSLADALRTDGHGWRPLRPQDEATARLRVLCRDEIALIEQRTALVNQLIACLREYYPVALELFDDWTRPHAWALVQQFPTPQKLQEAGKRRWEKFLHTHRLWRKGTAPARLQLMAQAATLNASPAVLEAKTLLALALVKILETLQTQLDEYRRRIRETFAQHPDHEVFGSLPGAGEKLSPRLLGEIGSVREVYPDADALCCQSGVSPVRVQSGQLDMARIRWACNTALRHTVHLWADCSRKRSAWAQAYYKGKRQEGHTHASALRCLGKRWLKILWRLWQDRQRYSETYHQQRQQKHGSWVSSALTAAQPAGL

SEQ ID NO: 506816 - protein, 458 aa, unidentified
MWLDVVFAHVAGIDVHKKQVTVAVRVPDPGVPGRRREQTRTFRTFYGDLLALGAWLAGLGVTRAAMEATGTYWWPVYAALREAGGAGLTVDVVNAAHVKAVPGRKTDVKDAQWLAQLLEVGLLRGGFLPPDDIREIRDLTRYRTKLTEERSREKQRLLKVLEAAGIKLDVVASNTFGVSGRAMLDALAAGERDPHVLAGLARGVLRNKTADLRLALTGRFTAHHGLMVGFHLSRLDHLDGMLRDLAQRIGHGGRPATARREATGPAGLVAPFADQLRLLATIPGVGEHVATVIISEIGADMSRFPSAKHLAAWAGLAPGNNESAGRRRKARHRNGNTHIQSTLVEAAHAAAKTRTRIGARYHRLHRRFGGRANKSAAKKAAFAVAHTLIKVIWTILSTGQPYTDLGADYYTHGVDPDRRLRRLIAHLEAVSGKKIVLTDHDDPDREDPGDTDRNETAA

SEQ ID NO: 506817 - protein, 311 aa, unidentified
MEHSRFVGIDISKDHLDVHVRPTGDSFRVRDDDAGLVTLVAHLRPLAPVVLVLEATGGYEVTVAATLASAALPVAVVNPRQVRDFARATGQLAKTDTLDARVLALFAEAVRPAARPVPDAQAAALGELIARRRQLVDMLGAEHNRRRLLRDRRLQRHLEAHIAWLEEALRRLDHDLTTLIRSTPVWRETDDLLRSVPGIGPVTAGTLIADLPELGRLDRRRIAALAGLAPIARDSGAFRGRRMIMGGRAHIRRVLYMATLTAITHNPVIRAFHQRRVAAGRPGKVALTAAMRKLLTILNAMLRDRRPWHPA

SEQ ID NO: 506818 - protein, 355 aa, unidentified
MNDAKYIGLDVHQATISVAVLDSAGKLVMEAILETKAETILQFIHGLRGSLHVTLEEGTWAAWLHDLLQPHVTRVLVCDPRKNALLKAGNKSDRIDARKLSDLLYLNKLSAVYHGEQGIRTLKELARSYITLTRDLTRVMSRLKALYRSWAIPCAGEQVYSARYRAEWLAKISEGGVRRRAELYYQQFDSLAVLRQGVRRELLAEGRKHRNTKLLRQIPTIGPIRAVLLLALIQTPNRFRTKRQLWAYCGLALRTYTSGEYRFVGGQLQPTKKVLAIRGLNRNHNHDLKNIFKGAATRAASTAGPFQDFYQGCVSRGMKPHLARLTLARKIAAITLLVWKKGVRFDAEHLKQQAA

SEQ ID NO: 506819 - protein, 342 aa, unidentified
MKITTIGIDLAKNVFQVHGVDARGKTVLNKPLKRAQMAAFFANLPPCLVGMEACAGAHHWARKLQSFGHTVRLMAPQFVKPYVKSNKNDAADAQAICEAVARPSMRFVAIKSVEQQAVLALHRVRQGWVKSRTAQANQIRGLLGEYGLILPQGITHIAKRVPALIEDAANELPGALRALLVRLLDQLKVLEQQLAQLEAQIKAWHRDSDASRRLEQIPGIGPLTASALVASIGAARSFDNGRQVAAWLGLVPRQHSSGGKPTLLGISKRGDPYLRTLLIHGARAVILAARRKPDQGGWLRDLLRRRNPNVAAVALANKNARIAWALLAHDRGYQCDYATART

SEQ ID NO: 506820 - protein, 320 aa, unidentified
MMAQNNLVVVGIDVAKDKVDACIRPSSARQTFPNSSIGQRQLAAWLRRHKVGKAVMEASGGYERHWAKVLRQLGVEVRIVDPKRVRSFARSAGRLAKNDKIDAAMIAWFAETFDQAPSQAYDAAREELVQMVNARQGLLDLQTTLQNRDEHSEVSAVQKMHARLLKRVAGEVLRLEAAIAALIKMTKRFAELAEIIASVPGLGDITCAGLIAAMPELGQVTNKVAAALLGVAPYDDDSGKRRGERQIKGGRRRMRNLFYMACLGAATRHNPVLKAFYRRLIANGKPPKVALVACMRKLIVILNIMIARRQKWDASLYLAS

SEQ ID NO: 506821 - protein, 335 aa, unidentified
MNYKLFAGIDISKKKTDVVFFLSQAPDQAYHQCFENNKKGCLEMLNWIASLTAVSFQEMLFCAEDTGLYTLPLCTFFSQQQGKLWIENPLRLKRSLGLKRGKSDKADALQIAQYAFLHRSKAILYQLPSKTLTTLKNLISCRKQLLKHQTALKSTCTELNAFDKETASFTLKIRAALIKEHRAKIRLIDEKLLVIIREDAKLQRQYQLVKSVHGIGVQTAMLIVVTTQGFTLFTDSRKFACYCGLAPFENSSGSSLKGKSKVSHLANKKLKALLTMCALNTIKKDNEFKRYYDRRMKEGKHHSSVLNALRSKLVSRAFAAVLNDRPYIKEYHQAA

SEQ ID NO: 506822 - protein, 386 aa, unidentified
MKLVGIDIAKYKHAAFIMDASTGESLCDPFLFKNNKDGFQKFYDELNKYTQDELLIGMEDTGHYNFAIESCLLAKGYKVALINPITTKNLRKASLKTVKSDKEDAILITKALLDKDYYRIISIQDEKLKEAKELTRYRTQLTIEMNRKKNILQRHIDIVFPEFNTLFNNEYTITYLNILRKYGDAYTIAHTDIRSLRKCFKYCNIFSAEDLKELASNSVGIHDVSISFIIKSVISSIDLINSQIEELDKKIEELAITQDSSITSIPGISIITGTSILAELGDISKYSNAGKLIKFAGVNPYISESGEFSADKTAITKKGSKYLRATLYRVIIPVIRHNPAFNNYYHLKRSQGKGHLCALGHCVRKLLRIIYHLEINHITFDINSLK

SEQ ID NO: 506823 - protein, 326 aa, unidentified
MQGKEASEQETKAKSNVGIDVSKDWLDIHVLPANTRLRVRNTCEGIRQLKRWLTRFDLALVVIEATGKWHRPVQRSLAASAIPVAVVDPFRVRMFAKAQGIIAKTDRLDARVLALFAAVMTPSVRPPAPQALAELAELVTARMSAVEAQTALKNQRSAATVKFLRSQLDRRIERADKDIAAIDAAILKRIEADRGLARRYAILTSIPSFGFITAAILIACLAELGSITAKQSGMLAGLAPIADQSGKREGIRVIFGGRPRVRRALYLAALSATRFNADIRAFYKRLRAEGKRPKLALVAVARKLVVLANTLISQDRLWQPQAPKYA

SEQ ID NO: 506824 - protein, 346 aa, unidentified
MEYYAGIDVSLESSSLCVVDATGRIVREAKVASEPETLTAWFNSLGFALSRIGLEAGPMSQWLYAAMKQAGLTVELLETRHVRNAFKIMPVKTDRKDARGIAQLMRLGWFRPVHCKSLPAQEIRSLLGARKLLQGKLHDIELSLRGTLRGFGLKIGKTTPKTFAGRVRSLVTNHPTLTLIAEALLRARAVLLGEFLNLDQKVHTLARHDPRARLLTTAPGVGSMVALTYAAAIDDPARFKSSKTVGALFGLTPKRYQSGETDVTGRISKIGDAAVRTALYEAANIILERPVKGGWLKAWALGVAKRAGMRKAKVALARKLAVVLHRMLRTGEAFALDGQPVVAAAT

SEQ ID NO: 506825 - protein, 318 aa, unidentified
MDQVYIGIDVSKNTLDVACYSTREHWQFPNHDTGIRELVELIRTQSPALVVAEATGGYETAVAYALKKAGVRCAVVNPREVRDFARATKHLAKTDMIDACVLAHFAAVTKPEPRPLSDENTRELEAILARRHQVVEMLTAEKNRLHHARYPVRDDILLHIAFLEQRLVDCDSSLEGRIEESPVQREKYNLLMTAPGVGPNLARTLLVALPELGSLDRWQIAALVGVAPFNHDSGRRRGTRHIRGGRSDVRAALYMATLSATRYNPLIRQFYIRLCGKGKLKKVALVACMRKLLTILNAMLKQNSPWAVYQPEPSLSCV

SEQ ID NO: 506826 - protein, 389 aa, unidentified
MFYVGLDVASEKHDCCILNEKKKVLQSFSISNSSIGFDSLLAALAELPSDEIKIGLEATGIYSENLSVFLRRKGFDVTTINPLLLKKHQCATTLRKTKTDKADAKGIALFIAEEGFQPDLPISYHIQELKSLTRARFSVVQDRSALKNKVKRLVVLLFPELLGEFTDIFGSSATALLKQYPSAAKLAACHCDTLAALLRKASRGRFGRAKAEHLRQLAQNSVGNHSTARAMELRMLLERIDLLSEQIAEYDTEIKVIMDKIDLPILSIPGISYTLGAIIVAEIGDISRFSSPAKLLAFSGLEPSIYQSGKFVPTSGKMVKRGSPFLRWALLQAAGYVPTYSSTFALYRAKKVAEGKPAAVVRSHVAKKLVRIIYSLLTHSTAFSDQLSA

SEQ ID NO: 506827 - protein, 403 aa, unidentified
MMTAVIIGVDPHKGSHTAVALGADEVPLGQVRVRASAAQAERLLTWAKSWPERTWAVEGAGGLGHLLAQELASAGEQVLDVQPKLAARVRLLASGAVNKNDPNDARSVAIAALRSPSCLPVRPDDHAAVLKSWARRHRDLSRTRNQVACRLHAALCELVPGGVSKEICAAHAAAILEEAEPCGAVARARAELAAELVADLRHVDALLLETKKKLATAVRASGTSLTEIFGVGPVIAATVTGDVRDVSRFRGRDRSAACNGTAPIEVSSGNRIIYRLSMRGNRRLNHAIHMAAITQIRYRHSDGRACYDKKIAEGKTGKEALRALKRQISDAICKHLKAGAARAAARSTQGPGGQPGNDSAASAAGSHPERQLFGQATPGPAPTLRSRPKKTTSRARKKAARIT

SEQ ID NO: 506828 - protein, 382 aa, unidentified
MSSKSYDYFVGLDVSQRMTSICVIDTDGKKFCEGKCNTRPEDIRGWLTNRVDADKAMKIGLEAGNMSSWLYSGLVKSGFDVVCMETFQAHRFLATYRNKTDKNDARGLAQLVRMGGEDFLRVVSIRSQASQETRVLLAMRDHLVSQKVGLENHIAGVLKPFGVIVERGNVTADTFYKRTLEGLAEAERNGVHVRPYVLPSLNLYMEAVEKIAPLTEKIHAIANSIEMVKRFMDIPGIGPVTALSFYAAVDNPQRFQKSSDVAAYFGLTPRQFQSGETNFMGGISRRGDPATRRVLVIAATVLLSGSQEWNSLKAWGVRLAKRIGFSKARIAVARKLAMIMHKIWLNNDRFRPKKLSPQERVKLKQELIVVASKSGRVASAPV

SEQ ID NO: 506829 - protein, 370 aa, unidentified
MSIKRILVNTIDTDLEYEVIGIDLAKNCVSAILLTTDGEIFGIDRLDYQELEKSAQELSPTIFAMEPCTEMNYMVQKLEDWGHHCIVISGKNVKDYVESHFSNQKTDLNDAQALAFLTKDTQLRTVKAKDPEQLKYASLTTLREQYVKQYRQTMVSLKGICQVWGLSISNGISGKARLKDMIENHAAFPAELRTALVGMVAHAQAVQKDLKSVTKILEELAKKDKACQLIQTVPGLGTICSCRLRATVGDIQRFKHPKDFPAYYGLVPRSMATGHNEKKGKITHRGDKTMRSLMVQGAGIVINQATKGNLHSKQLTKWILKKQKEKMPWGKLVCAVAAKLLRIVRAILISGKPYNPKIAGVAKCSLPKAS

SEQ ID NO: 506830 - protein, 310 aa, unidentified
MEMVWVGIDVAKDRLDVHVLPAAPAFAVARNGKGLSELVERLARVTPERVAVEATGGFETVVAAALAAAGLPLVVVNPAQVRHFAQAVGKRAKTDPIDAAMIARFVEATRPELRPLADAAAQLLGDLVARRRQIIEMIVAEKNRERRTAVQRIRKSIARLIAALEKELVEIDAEIDTGVRGSPAWREKEDLLVSVPGVGPITARTLIAEMPELGRLDNKRIASLAGLAPYTRRSGQWKGKSMIGGGRKAVRSALFMAALTACRHNPTLKAFRQRLLAAGKPKMVAVIAVARKLLTFLNAILRDQKPWQTA

SEQ ID NO: 506831 - protein, 356 aa, unidentified
MSQKLNSEIATLGIDIGKNSFHIVGQDQRGALVLRQKWSRGQVEARLANLPPCLIGMEACVGAHHLSRKLQALGHDARLMPAKYVRPYSKGEKNDYRDAEAIAEAVQRPTMKFVATKTAVQLDLQALHRVRERLVSQRTGIINQIRAFLLERGIAVRQGLHFLRAELPGILAKRTDVLSPRMLRVIEDLCGDWRRLDERIEGLSDEIAALARQDKGCERLMTVPGIGPIISSAIVAAIGSGDAFSKGRDFGAWLGLVPKQMSTGDRTILGSISRRGNRYLRTLFVQAAWVVLVKITPEGWERYGLKSWIEAAKHRLHRNVLAIALANKLARIAWAVLHKGRAFECVKTNATSARAA

SEQ ID NO: 506832 - protein, 356 aa, unidentified
MLYVGVDAHSKTSWITVMDEKGKILKREQISSSRKDVRRSLGRYRQPVKAVVEASRSWGPIYDWLDEVTDNVILAHPGKVRAIAEARIKTDKIDSETLAHLLRADLIPEAYAPSRDIRAIKRVLRQRMFFVRVRTMLKNRIKALLAQHSVQTPQVSDLYGKKGLKWLKGLKLPEPDGKLLNEDLNLLLVLNEHIAATENLIAELSAGDDAVDWLFSLPGIGKFLSVLIRYEVDNIERFSSAKKFTGYTGLVPSTYASGERMVHGRLTKRGNKWLRWAFIEAVTPAIRKSSMLRGYYDKIKSRRGCKDARVATARKLAELTWTVWTEQRMFTESGKKNLRRTKHNPRTPAALISSWA

SEQ ID NO: 506833 - protein, 360 aa, unidentified
MGVDLGDKWSNFCVLGLDGEKLTEGELRTGQEDFAEFFQSLAASRVVMEVGTHSAWARDVVARSGHEVLVANPRQMEGPKRRKRKNDRIDAHKLARVGRMDPQSLFPIEHRSVEVRQDLVAVRARDALVAVRKDLINTTRGLVKSMGARLPKCSTQSFAKKAEGALPAAVREVLLPLVRLAETLSSYIQEYDERIEKLATGKYAHTELLRQVKGVGPLTSLAYVLTLEDPQRFVKSRDVGPYLGLVPKQEDWGDRQPQLRITKMGDMMLRRLLVGSAHYILGPFGPDTDLRRYGLRLCERGGKNAKKRAVVAVARKLAVLLHRLWVSGEVYEPLHQALPKVTQEQAARPAPAEATEEEAA

SEQ ID NO: 506834 - protein, 343 aa, unidentified
MEYYVGLDVSLKQTSICVVNQTGSILQEGVVDSDPEAIASFVRSKVPGMVRIGIETGPTTTWLWTELNRLGLPVICIDARHAKAVLKMQINKSDRNDAAGIARIMQTGWFKEVRVKDLDSHAVKALLASRALLVKIKRDLENQVRGLLKNLGLVIGRAKFNVFAVRAEGLIENRPELVAAVRPLLEARKAIEQQVDDLDRKVHKLARGDVQVRRFMTVPGVGPITALCFKATIDDPTRFKRSRSVGAYIGLTTRRHASGEMDWSGRISKCGDAMLRMYLFEAAGVLLTRVPKWSGLKAWGAKLTKRNGLRKAKVAVARKLAVILHRMWIDGTEFNWSTKKAAA

SEQ ID NO: 506835 - protein, 429 aa, unidentified
MDILYERVAGLDVHRDTVVACVRIMVDGKAQRECRTFAATTDPLVELRRWLEESRCTHVAVEATGVYWMPVFRILGEGAFELIVANAAHIKNVPGRKTDMNDAMWIADLLACGLIKGSFIPEEKVQELRALTRTRKQLVRDQARHVQRIDKTLAEANAEANIKLGSVISDIMGASGRRIIQAMIDGVRQPNKLAELAGKQLKASPKELYDALHGRLTDHHRFLLALHLKQRDGLDETIRKLDVEIAQRIEGMEAEAGGGKTPFRHLIGLLTTIPGISAVAAPAILSEIGADMSRFETAGHLVAWAGLCPGQNESAGKRKSSRLRKGAPWLKTMLVQCAWAAKRSKNSYYRAQFFRLQARRGPQKAICAVAASILTAIYHILKNGTEHHDLGAAYFDRRPTEVKASHLVSRLKKLGFTVQLQPIAEAASP

SEQ ID NO: 506836 - protein, 360 aa, unidentified
MRKRLSKKESWFKENNFTAEDEIYVGVDVHKVHYHVAIWHNGRIGCVYSMSSDNNKLLRDLKRIRGSLKKIVYEAGPTGYSLVRLLRSAKLLAEVVAATKTPRMVDSAGKTDRLDCQQLAEYAAKGLLTYIAIPTEQQESDRQVVRLRDQLMSKRKRVMQQIKSFLLQYGIAWPGGGWSKVALCKLRKMDIGSELRFALDQYLDEYEFFTRKIAQTKSELRQIFSSERHSAAIEIFRSHPGVGNIVAWEFRAEMFDITRFNQPKQVSKYLGLCPRISQSGNTCRHGPITKTGRRQLRAVLIQAAWVWHRRDPHARQIYNRLLRNTGNGKKAIVGLAKRIAIHLWRMLCDGCLYDANIVKV

SEQ ID NO: 506837 - protein, 322 aa, unidentified
MARLSCCGIDVSKARLDGIVLPEERCFSVPNDPAGWAELVELLRGLSIAAIGIEASGGYERGGVRALLAAGMPVRQVNPFKLRQFAKASGVLAKNDPLDARMIASFVAIMPTRPAQRRAPAIEQLAEMLAVRRQLSAEKVAAENASRLLESVMLQRLSRRRIARLTADIDMLDGHLAEIIETDAALERRYRLLTSMPGVGAVLACTLLALLPELGRLSRKQIAALIGVAPYAFESGKLKGVRCIWGGRGSVRRVLYMGAMSASQWNPVLKAFHDRLLATGKKPKVVIVAVMRKMITTLNAMARDDMLWADRVSGRHTVPTAR

SEQ ID NO: 506838 - protein, 355 aa, unidentified
MDSVKYIGMDVHKESISLAVMNGAGKIVMECVIETKASMILQFIDGLRGELQVTFEEGTSAAWLYDLLKPHVTKLLVCDPRKNASMREGNQSDKIDARRLAELLRLNHLSPVYHGEHGLRSLKELVRSYLTITKDLGRVLSRVKAIYRSWAIPCTGKQVYAPRHRAEWLGKIREPGVRRRAEFYYQQLDALRTVRQQVRRELLAEGKKHQAWKRLCQIPSIGPIRSAVLLGILQTPHRFRTKRQLWTYSGFGIETHSSADHRSVNGQLERAKKQVSVRGLNRNCNHDLKNLFKGAAIVASNKPGPFQEFYTALVTKGIRPEMARLTLARKIATIVLMVWKRGACFDAQYLKPQTA

SEQ ID NO: 506839 - protein, 341 aa, unidentified
MAEYIGLDVSMKETAVSIRCEGKRIWRGKCASDPKIIAQLVRKRAPAVERIVFETGPLSVWFWHALTAEGLPAICIDARHAAKALDMAPNKTDANDADGLAQLAEIGYFKQVRVKAFDSMLTRALVAARTRLVQITVELSNQIRGLMKTFGLVVPAGRGSVFEKNVRDLLVDEASLARIVLPLLESWRSLRQRAAELSRQLISEARHSQACQILMSIPGVGSITATSFMAAIEDPANFRKSRSVGAWLGLTTRRYQSGEIDYDGHISRRGDKHLRGLLYEAAVSILTRSQADSGLREWGLKLRERIGFKRAAVAVARKLAVIMHTMLKSGELFDPAVGAKA

SEQ ID NO: 506840 - protein, 370 aa, unidentified
MAKRSMFVGMDVHKESIDVSLAEEGREGEVRHFGIINGDVEAVAKLMRALRAPNRRLRFVYEAGPCGFGIHRYLTGQGEDCVVVNPSSMPKRSGDRIKTDRRDGNTLARLHRAGELTAIYIPTADDEALRDLVRAREDAVGLSTQAKHRLKAFLLRQGHRYPGRAGWTRPYRRWLADLSFPLTPQHVALQEYRDTIDETERRVERLTEQLRQLTPAWRWAPVVDALQALRGVSFVTAVGLVTEMGDIRRFAHPRELMAFLGLVPSEYSSGPSVRRGAITKAGNPHARRLLAEAAWAYQGVPRIGRQMLYRQETLSPTVRAIAWKAQLRLTGRFRRLVARGKAKPKVATAIARELTGFIWAIAREVAPPPA

SEQ ID NO: 506841 - protein, 349 aa, unidentified
MEAYDGPQFVGMDLHRRRSVLVRMTADGRRLGTSRITNSEAELRREVARAGRSPAVVLEATFGWYWAADALAEAGAQVHLAHPLGVKAFTCRRVKNDEKDAADLADLLRMGRLPQAWIAPAEIRELRELTRYRIKLVRMRSSCKEQVHAVLAKLGVPVTCSDIFSVWGNTWLDGLDLGQPYAGKVASLRKLTGELTSEITVLDTVIADLLEHHDGYHAIQALPGIGPVLAAVIVAEIGDIRRFSRPARLSSWAGLTPRHRESDLKVTRGHITKQGSPVLRWAVVEAIQHQPAGSPVRDVKDRIIARRGSQAKNIAKTAAARYLLTCIFYAMRDGQARSLATRTAARDAA

SEQ ID NO: 506842 - protein, 523 aa, unidentified
MATTRSRKRSRSRPQEVLQKPSGVIHPRVQKVGPEHFGIVSVDCAKARSKWMLCDFYGNVVIPPTVVEHNRAGLDGAIAQIRQVLSARGFHDCLVAVERTGRYHRPVQRAFAAAGFDVRIVHPFATKQFRQPSDSGYKTDDTDLAAIHRAAVNGFALMEAQLDDTWKTLQLLIRHRRDLVFKMSLVCCQIREHLEAAFPGFAACFDKLWDRACAWHLVQHFAGPQELIAAGLMGLCRSLDAAKVRYQTPMIQRIFDWAATAAAPDQAAAQHRAIALALNDDRLRKSQEIMGLERQIAACLVRTPYILLLSFPGINVVSDADYAGEMGPMPNYANARCINGRAGLRPCRYQSDQVDRANGPLVRNCNRKLRAAILGIADNLICCNHHFNILHHHWKAAGKDPRDIRIRVGNRFNRIAFQMVAGRQVFLHPSLQGRHYILEKLIAFHRDHNTPGADMLRDLEAAIAQLPRKEYQAEAGPLHEELKKIEAGGRRGPQLLGNILPIVLARLGVGAVQSTASGEQDPR

SEQ ID NO: 506843 - protein, 424 aa, unidentified
MKFKMQTKQNQLIERISVKHLVVGVDIAQQFHVARAVNFRGIVVGDPLTFKNSEEGFASFLKWIKNLQRLNNLDEAIVGMEPTGHYWINLSKWLSKQDIEVVTVNPHLVKRNKENRDNTQSKSDKKDALVIADMVKNGYYSEVRYTSEPFEKLRVLISNRDVVVKRLVSSINQLNRWVDIVFPELRQVFKDIKAKGAIATLRLFPSPMDLETLQPHEVIAGWKSIMKRQPGLKKALLLLQLAKKSVGTRQALDAYKFHLEQLLEEYDLAVTQLERVEQLVTEALNKIPFAKKLLTIKGISEISLAGILGEAGDLSGFSHGNSLLRHAGLHLAEASSGKWKGQIVISKRGRSRLRRFLYLATMSLVMNNPEFQALHSHNVKVKKMKKMKSIMKLIGKLARIFVGISRRNESYCPDKVKSFSPLAA

SEQ ID NO: 506844 - protein, 352 aa, unidentified
MQIVAFDSHKRYTLASVETKNGQIVREQRIRHERGNILKFLSEHQPGSPVAVETIGNWYWIVDEIEQAGMKPLLVHARKAKLMLGSVNKTDKLDVRGLNKLQRAGTLPTVWIPPGDLRDKRELPRTRMVFARERTRIKNRIHSVLDKYGLQAEFEEFSDIFGRKGREVLKRALEKLPPQTRYTTEMLLNQLDVVRETILAIERQMEQVFEHTEQMELLKTMPGVGPILAVVISQEIGDIDRFGSAEQLASYSGVTPRVHASGDKVRYGRLRTDVNHYLKWAFSEAGNSIVVSRKYYPYRYVVGLYDRIRKRRGHATAVGALARHLSESTYWVLSKKESYRERGMNEVSPTGA

SEQ ID NO: 506845 - protein, 345 aa, unidentified
MNYFAGLDVSLKRTAICIVDRDGNIVREGVTDTEPEALISWLRNSRFALQRVGLEAGQCSSWLHKGLSEGGLPVICVETRHAKSVMQAQTVKTDRNDARALAQMMRTGWFKAVHIKSEDSQKLRALMGSRRCLLDKQRDLNNHIRAALRTFGFKVGLIGQSRFEERVRELIVADGDLQALVVPLLEARRMLGEQAHVLTRLIGRLVRSDAICRRFMTVPGVGPLTALAFKTTIDNPGRFRKSRHVGVHLGLTPGKYASGEVDYNGHITRCGDAFAREHLFEAAHSLMVNTRRWCSLKAWGIRIAKRSSMKNALVAVARKISIILHRMWCDGSDFRWERSEAAAAA

SEQ ID NO: 506846 - protein, 342 aa, unidentified
MTIQTLGIDLGKNTFHAVGLDAQGAPVARRKFTRTQLLRWIANTPPSLIGMEACSGAHHLGHRFEAMGHRVRLMPAQYVKPYLKTNKSDFLDAEAIAEAVTRPTMRFVPLKTVEQQELQAEHRLRSLWVRQRTATVNQTRALLLEQGLTIPKMIGNFRRQLPRILEDAENGLSPRLRVLVDHLMHQVRELDVRIDAATQELTAHAQTEPACQRLLTVPGIGPLIATAIVAAVGNGQGFKRGRHFAAWLGLVPRQYSTGGKPKLLGISKRGNRYVRMLLVHGARSVLRTAPKRQDALGRWLQRLSTHTHPNVVTVALANKTARVAWAILTGESTWRAERAAAP

SEQ ID NO: 506847 - protein, 464 aa, unidentified
MPTSRAHPQPPGREATPPSELHRINLNAAGIDIGAASHYVAVPPGRDPEGCDVRTFGAFTADLHVLAEWLTQCAIQTVAMESTGVYWIPLFDLLSARGFEVRLVDPRQLKRVPGRKTDVLDCQWIQQLHTFGLLAAAFRPEEQISVLRSYLRQRAMLVTYAAQHIQHIQKALELMNLKLAHVVSHIAGRTGRAIIRAILDGQRDPRALATLRDPHCKADAATIARALEGSWRPEHLFELRQAGELFEFYQTQIAACDREIEAQLTRFADKPGAPPLADAGRRRKARRTALSFDARQHLQRLSGVDLTQIDGIDGPTALTIVGEIGLDMTRWPTEKHFASWLGLAPGSHLSGGKQRSGRTKPSASRAAAALRLAASSLYHSRSALGAFHRRLKARLGAPKAITATAHKLACLIYRMLRFGSDYVDRGQDYYERRYQGRVVTTLMRRAQELGYTLTRIEPLSPSAP

SEQ ID NO: 506848 - protein, 339 aa, unidentified
MELYAGLDLHSRNTYIGIMDKAFNRVFKKRVPNHLEHILQTLDPFRDQIRGFVVESTYNWYWLVDGLMDAGYSSAHLANPSAIKQYEGLKHSDDQHDAFFLAQLLILGILPQGYIYPKKDRPVRDLARKRMFLVQHKTAHILSLQSLIQRCCAMKVSASDMRHLTVKELEVWLEEEYLVLSAQANLDNINFLKQKINVLEKAIRKKVRIEKAFHYLKTVPGIGDILALTIMLEVGDINRFPKVNNFTSYCRCAPSRRLSDGKSKGSGNRKNGNRYLSWAFTEAVHLGRRYNERFRRYYSRKVAQANTSLATKALGNKLARICYYIMRDQIPFQEDLFCQ

SEQ ID NO: 506849 - protein, 360 aa, unidentified
MKLDAALDTSATTTAICIVNSRDGAVVLETTVPTDPDAIARALKPYLPRLHLVGHEATSWSAWLHRELESRGVPMVLLETHHTARMLEAQRNKTDKNDARGLAQLVRSGWFKPVHAKSDDSNRLKLLLVHRRTLKRKLMDIENEVRQSLKMSGLMAGKRVQRASFPSRIRALVAGDPLLEGSTECMLRCWTVLWDEYRKLHALLVKLAGSDELLRRLCGIPGVGPVTAVTFKAAIDDPRRFANSKTVGAHFGLTPKRLQSGTSVDVDGHISRRGDGQVRTALYEAASAMMTRSKQPSTLKAWGTQLAAKRGHKRAVVAVARKLAVVMHRMWIDGTTFRVSAADRDGERRIGTSAAVAHAA

SEQ ID NO: 506850 - protein, 365 aa, unidentified
MKKDSRKAKCMDKPAITVGLDVGDRFSRYCVLNEDGEVVEEGKIQTTEVALQRHFDKEPRQRIALECGTHSPWISRLLERLGHQVIVANARKIRAITASESKNDRNDAEKLAHFAYCDPFLLSPIRHRSPERQQDLNLIQVRSTLVRARTMVINSVRGLVKSAGGRLPKCSTADFAKQALPLISAELSLVVAPLVEQVGTLTDQIRRLDKQIENLSQRYVEIKLLRTAPGVGPVIAAAYVLTLDSPDTVANSRQAGAFLGLRPRQSQSGDSNPQHSISKTGNIYLRSLLVQSAHYILGRFGQDCELRRWGLKLAASGGQRGKKRAIVAVARKLAVILHAMWRSGHPFEPFLLPATTAVAEPATSS

SEQ ID NO: 506851 - protein, 344 aa, unidentified
MDHFAGLDVSVNETSVCIVDDTGRIIRETKVASEPDALLAVLKSPTHHFKRIGLEAGPLSQWLYTALAEVNLPVICVETRHMRAVLKAQINKTDRNDARGIAQMMRAGLYRPVHVKTLRSQKLRMLLTHRKLLQSKAIAIENDLRGTLRNFGLKVGMVGAAKFEARIRELVEKLPDIAALVEPLLIVRRVLREQVAILHRRLLAIVRDDEVCRRLMTIPGVGPMVALTYRATIDVPARFRNSRAVGAGLGLTPCKYQSGESEYTGAISKCGDEMMRVMLYEAAQILLMRATKWSWLKAWAMQIARRRGVKKAIVALARRLAVIMHRIWVDGTEFRWTRQQVAAA

SEQ ID NO: 506852 - protein, 334 aa, unidentified
MEIKRIGLDLAKNVFEVHGVDEIERVVLRKTLGRGKVLEFFAQLPACVVGMEACGGAHHWARKLIELGHDARLMAPQFVAPYRKGHKSDRNDAEAICEAAGRGSMRFVPVKDEEQQAVQMLHRMRALQIAERTALANQTRGLLAEFGIVVAQGLGRLRARLPEILEETENGLPALARELFADLRERLVALDAKIGGYDRRIEQLARASEVAQRLMRLEGIGAVTATAGDARRFANGRQFAAWMGLVPREYSSGGKIRRGRIGKRGDAYLRTLLIHGARVVYRHLGEREDKKSRWLRQLAARRGVNKAVVALAAKHARILWALLSRGSDYQPMAA

SEQ ID NO: 506853 - protein, 344 aa, unidentified
MDYFAGLDISMDETHVCVLDREGMVVRESKTESTAQAVANELAKAPSCRRIVFETGRMAPILFHGLSQLGLPVVCVESRQAYQALKSLATHKTDRNDARGLAHLARTGFFKPVHVKSLPAHAVRSLISARKKLVGQRVTLENQIRGLAVVFGVRLPRALTAAFIDNALRASEGIAGLSAAMRGLIAARTAVMTAVAAIDADMRHMTRASAACRRLMTIPGVGQLTALAFVAAIDDPSRIRRSRDVGAYLGLVPRRYQSGEVDYVGSISKCGDTLARTLMYEAAVVLMTRVKRACGLKDWAEAIAKRSGVGKARVALARKLSVILHRMWCSGEPFRWSEQQPTSA

SEQ ID NO: 506854 - protein, 342 aa, unidentified
MGEVSIIGVDLAKNVFQVHGAAADGSVLFRKKLSRPQFARFMAEQPPCRVAMEACASAHHWAREMSPHGHEVRLIAPHYVKPFIKRQKNDAADAEAIVEAALRPTMRFVEPKSADQQARAVAFRTREQLVKQRTEAVNALRSHLYEFGHVAPEGIGYVPRLAKVVEDPDTGIPDLARDICNMLLEQIAHLTKRIDALKARIAALSNEADLPRQLQTMPGVGPITALAVETFAPPMEQFRRGRDFAAWLGLVPKQHSTGGKQRLGKTSKMGQRDIRRLLVIGATAVIRWASRRGAPKGSWLARMLERKPIPVVAVALANKMARGIWAMLTRGESYRGPVLIGA

SEQ ID NO: 506855 - protein, 415 aa, unidentified
MNRLIERCAMLDIHKSQITACVRVPDGDGGRQQEIGEFASTTSGLLTLADWLRSYAVTVVGMESTGVYWRPVYYLLEDEFECQLFNARHLRHVPGRKSDVQDAEWGCQLVEHGLVRPSFVPPRPLRELRDLVRYRKAKIQERTREVQRVEKTLQDAGIKLSSVASEVLGVSARKMLEALISGTNDPELLADLAKGVLRKKIPALREALQGRFTGHHALLVSQMLAQIDFLDEAIQTLSERIEELTAPFSRELELLDTIPGIDRRAAELILAEIGPDMSIFPTDRHLASWAGMCPGQRESAGKQHSGKTRKGSKWLRGTLTESAKGVVRTKGTYLSARYHRIKSRRGHAKATIATGHKILTAAYHVLQQGVPYHELGEEFFYRRDTENTERYRRRLVKQLERLGHKVTLEPLPEAA

SEQ ID NO: 506856 - protein, 367 aa, unidentified
MKKNTTVNQSLSSTDLAACTTVAVDLAKRVFQVAGEDAQGKVLYEHRIKSREAFHTFLCNLPAHVAVLVETGPGAQAWARQLLEQGNQARILPAQLVANHRAGAKNDRNDALAILRAGRDGNIAAVPIKSAAALAMQALHRARQGYVRRRTAISNQMRGLLLEHGVALAQGDLAVSQKIPRVLEDPSVPLPEMLRELIDELLGEWRHMGERVNVLTGRLETAANADSTAKRLMTVRGVGPITATALLAKQTQPERFANARQFAAYFGLVPDQNSSGEKVRLGRMTKRGDSYLRSLVIQGAHAVLRQLRPDSDQPDDRRLLGWLSRVGRKEAAVRLANRNLRILWKLLQNDETYRRQPAKSLEAAMSH

SEQ ID NO: 506857 - protein, 350 aa, unidentified
MSMLCGLDLHRGQITYDTLIEETGEIWRGRIWSPDRARFQRWLEVDVTKRANGAPVVMAVEGCTGWRYAVEEITAVGFEAHLAEPAETQAARGRKKRAKTDRTDACLQRELLQRSELPESWIPPHGVLEWRERTRLYKTLVDERRMWVQRIHAEMFQHGVALPAGEICSEEVRTWLAGDEVQLSPAARQRIEVGYRVIDTIEGEVAILRRQLQRFASRQPACRALVQAHYGVGPLTAVVTWAELGDCRRFSRSMQVVRHCGLDVTVHESDRHRPGGHLSREGPPTLRWTLYEAGKCAARTKSPDYDYYRAVKKRRDGKLAALAVARKIARRCYWTLRTMDSDLVYAMPEV

SEQ ID NO: 506858 - protein, 363 aa, unidentified
MKIVGCDLHARQQSIAMVDTETGEFTEKTLCHEGNAVRAFYAALQGPVVVGIEATGAMQWFLELLDELGIEGRVGHPAKIRAQETRKQKHDRRDARLLLQLLSEDRFPEIWIPSTEQRDLRTLLRDRDQWVRMRTRAQHTLQAIALNHALRQGRALWSATGQTALEALPLPPYTRQRRDELLALYAQLQKRIQELDKEVEAQARQRPQARRLLTHPGVGPVTALATDVFLGDPSRFATGNQVASYIGMIPSERTSGKRQRLGKMSKQGNALLRYLWTEAAMSTVRKDPELQRFYRRKLIQKGMGKARIAAARKLGIRLWIMMRDQIDYQEFCRRGKLRQTGEPMRGCLINNSGPAQAVTGSTE

SEQ ID NO: 506859 - protein, 377 aa, unidentified
MGFHRELAVKVAVSHRDGGTRSERVGLKHQRKTAMEWFIGIDVSLEQSSVCVLDAGGKIMREAKIASEPEALVAFCRELELPVTRIGLEAGPLSQWLHAGLTSAGFETVLLETRQVKAALSAMVVKTDRKDARGIAHLLRMGWYRPVHCKSVPAQEVRALLAGRKLLLGKLRDVELSIRGLLRGFGLKVGEVSKGRLEARIRELIAGHPMLEQVIQPLLRAREVLNQQYHVLHRAMLNLVRHDAVCRRLMTVPGVGALVAITFTSAVDDPTRFSRARAVGAHFGLTPKRYQSGETDVVGTISKAGDEAARTALYQAAHTMLTCPGRYSSLKRWGMEVAKRRGLKRATVALARKLSVVLLRIWTSESEFRFDRPVAAV

SEQ ID NO: 506860 - protein, 350 aa, unidentified
MIIIGVDFHPEFQQIAWVDTDTGELQEQRLAQREEAEKFYRGLAAAGHKVRVGMEASGHARWFERLLAELQFELWIGDAAEIRTKRVRKQKTDRQDAQLILRLLLEDRFPRIWVPSWENRDLRQLLWHRHRMVQARTRIMNQLQAVALNEGLRCKKRLWRDAGREQLESLPLAPWAKRRRRDLLELLDRLTPTIAELTQAIEQEVEKCPEAQRLQTHPGVGVLTALAFVLIIGRADRFQCGKQIASYLGLVPLEESSGQRRRLGHITKQGNSLLRFLLVEAAQVTVRSDPEWRSKYFHLAMRRGRKIAKVAMARRLAVRMYWMWRKGWDYEQLKKFGSHAGQPGHRDGVR

SEQ ID NO: 506861 - protein, 374 aa, unidentified
MKIVGCDFHPAWQQVAVFDPETGEISELKLMNGDGEAERFYRELESPALVGIEACGNSQWLIELVEGLGHVVWVGDAAQIRASYVRRQKTDRRDAGHILRLLIEQRFPRLWTPTAEQRDLRQLLIHRHKLVEIRTRIKNGLQHLALNRGVQKKSCLWSVRGRAYLEKLPLEGWTARRRADLLRLLAELDRHVAELDEAAQRAAEEHPQARLLMTQPGVGPITSLAFVLTIGDVSRFRHSNQVASYLGLIPREHSSGGKQRLGAISKQGNRFMRQLLVESVQTVNRLDEGFRKQYAARCHHKAKGVAKVAAARKLAVRLYWMLRQNVGYPEIALIESSPRVPLVGTCGAVGSPLRGSPVAASQTDGLIGRSRIQQ

SEQ ID NO: 506862 - protein, 350 aa, unidentified
MNVIKQVVGIDVAKDNFEVRFGAISDQQEERFVGSATFPNEKRGFRKLLEWTKKQLIQVDAPVWFVMEATGSYYEHLAYFLSEHHEQVVVVLPNKIKHFAKTLEAKSKTDRLDARSICQFGLERPLSPWQAPTPQMKLLRELVREHNTLQQMATQVKNQLHAKDHTYQPSAETTKRLHTQLRLFQKQLKSVEQQLHSLVDDDDNLRRRITNITAAKGIGFMTVITAVAETNGFALITSEKQVTSYAGLDIVVKESGTRQGKPSLSKKGNKHLRRAVFMPALAACRFNPTLREFYLRLVRTKANKKVALLAVARKILCLIFTLWKKNVQYDPNYRHQNIRSVPNNLPLVTT

SEQ ID NO: 506863 - protein, 430 aa, unidentified
MKSNIQNAKIEAITEKTLVLGIDVGSETHYARAFDYRGIEYSKKPFKFSNTEAGFVTFKEWILDLKERHEKDKVVPGMEPTGHYWFNLGKFLQDNEMKPVLVNPHHVKKSKELDDNNPTKNDRKDPKVIAGLVREGRYMIPYLPDGVYADLRTASNIRFQLQAELTRIQNRISRWFNIYFPEYKTVYGNPDAKSGMLILKSAPLPEDILTLGIDGVNQIWRDAKLRAVGKARAKTLIEAAEHSVGSKEGAVSARMEIRMLLEDYESRNIRLQEVMTLIEGLVKQIPMAEKLLKIKGVGIKTVSGFLAEVGDISRFNTPKELQKLAGLALVESSSGKHKGETTISRRGRKRLRYLLFEVAMSLVAKNPEFRELHNYYTTRRLNPLKKMQSLMAIAAKLIRVFYAMLTKGVDYDPKKMVSDIKRPAVYLQAA

SEQ ID NO: 506864 - protein, 449 aa, unidentified
MPWSTLPRFLLIWAPHAGGAAVEEDSMEMMHERVAGLDVHKATIVACVRLATGRKVTRECRTFDTTTDGLRALLAWLVECRCSHVAMEATGVYWMPVWKILSEGDFALIVANAAHIKNVPGRKTDLNDAMWIADLLACGLIKASFVPEEDIQELRSLLRTRKQLGREQTRHVQRIQKTLAEANVKLDSVLSDIMGVSGRRMIEAMIAGVRNPRQLAALASAQIKATPKQLYDALHGRLTDHHRFLLKLHLRQWDGLDATIRDIDQEVEARIARMDKEVKAGEAPFCDLIGLLCTIPGVSTLSARTILSEIGRDMSRFPTAGHLVAWAGLCPGQNESAGKRKPARLRKGAPWLKTMLVQCAWAAKRKKDSYYKAQFFRLQSRRGPQKAICAVAASILTAIYHILKDGTEHHDLGADHFNRRSTEGQTKRLVAQLTRLGFEVQLQRIAQAA

SEQ ID NO: 506865 - protein, 415 aa, unidentified
MKAYSELKYYGGMDWAKAHHQVCILNEQGQPVERFGFEHSGPGWKAFRERIKGYPDLGLAIETSSGGVVDQLLASEVTIFPVHPKAAQSYRQRQAPSGVKDDELDAWSLADALRLDGAKWRGLSEQGPLIEELRLLCRDEEELIEQRTALVNQLQQALAEYYPAALEAFADWTQPYTWAFVKAFPTPQKLGQATVHRRKVFLHTHQLWRSDTAPQRLEIFGRADQFCGSEAMVRAKSRLALALCESLQTLARQLEEYRAAIERLFGEHPDHDLFDSLPGIGPKLGPRLLSSVGAERKEYPQAQGLQCVAGTGPVSFQSGQMRVVKIRWHCDRFLRHTVHLWADTSRKTCTWAQTYYLAKREQGKSHSCALRCLGQRWLKILWKMWQTHRPYDPEYHARNQQRHGSWVLQFQPAQA

SEQ ID NO: 506866 - protein, 428 aa, unidentified
MNSNQNERINQITSSTLIVGVDIAKFKHVARAQDNRGVEFGKAITFENTREGFELFVNWFRKISTEQGFQDVIVGMEPTGHYWLNLAHFLREKQVKYGVVNPMHVKKSKELDDNSPTKNDIKDAKVIAQLVKDGRYAVPSFPQGIYAELREAMKIRDHLTTDLCVIQARVHNWLDRYFPEFLTVFKDWECKSAIQMLSLYLLPHELVHVPDDTLLQHLREAAKRGLGLGRIQRLKAAASRSVGIQQGPELAKMELKLLLTQYEWLHNKLEELGASLDELLMQIPHVPQLLAMKGIGRDTIAGFLAEVGDISQYRHPKQISKLAGLNLKTNSSGTHTGQTKITKRGRKRLRALLFRVMMPLVAKNAAFRTLHEYYTKRAINPLKKMQSLIALCNKLIRILFGILKKGHEFSEEKMIQDIPRFAALPQAA

SEQ ID NO: 506867 - protein, 478 aa, unidentified
MATIRTSGLNRTQRKALARRLQAADPGLEVMHPHAAGIDVGNSTHYVAVRPDRDPESVRRFDCFTADLHRLADWLQQCGVTTVAMQSTGVYWIPVYEILEARGLEVYLVNARHTKNLPGRKTDVQESQWLLKLHTYGLLRNSFHPSAAIRILRTYWRQRGDHVHAVSTCIQRMQKALTQMNIQLANVISDLSGWTGQRIVRTILAGERNPDTLAALSHPGIHATRDTIAKSLEGTWQPELLFVLQQEVAMYDAYQQRIAECDKALEQHVKGFADKAADASPDGEPAPATPRTRQRSGPKRRRKAGSHAPQFDLARELRRITGVDLTRIDGIDVGVAQTVISEVGLDMSRWQDEAHFASWLGLCPDNRITGGKVLRRGTRHVINRAATALRLGATTLLRSQSYLGAQYRRFRSKLGAPKAITAMAHKLAVLVYRMLRWGHEYVDKGMQFYEERHREQQIRLLKKRAAKLGFQLVEPQTA

SEQ ID NO: 506868 - protein, 412 aa, unidentified
MQTMVERGCGLDVHQATVVACLLIVQKDGRVQKQMRTFGTTTRELLSLRECLLAEGCTHVAMESTGVYWKPVYAILEGALQIVVANAQHVKKVPGRKTDVKDAEWIADLLCHGLLRSSFVPPKPIRELRDLTRYRRKLVESQSAERNRLLKLLETANIKLASVASDVFGVSGVLMLEALVEGKATPQEMAELAKKKLRNKIPELQLALEGKVEEHHRFLLKLQLDRLKAVEEDLAKLEQRIQQKLEPYAAQLALLDEIPGVDWTLAAVIIAEMGVDMSVFQSVSQLASWAGVCPGNNESAGKRKSSRIPKGNVYLKTALVEAANSAAKSKGTYLRDKFYRLKARRGYKRAAVAIAHKILVSVYHMLSQNVSYNDLGDLYLDTRNKNHLTRNLVHRLERLGYAVTLTPQQKAA

SEQ ID NO: 506869 - protein, 344 aa, unidentified
MQVTRVGLDLAKRVFQVHGVDVHGKTKLSKKLGRGEMLQFFAQLPACVVGVEACGGAHYWARELGKFGHTVRLMAAQFVNPYRKSGKNDVNDAEAICEAVGRPNMRFVPPKSEEQQALLMVHRARSLVVANRTAQVNQIRGLLGEFGLVVPVGLRRLRTQLPQILEDAENGLPILARHVFAELLQELHALDEKIQKIQRYDRQLQELARQSEPARRVMALEGIGPITATAFVASVGDARVFKNGRQFAAWLGLTPRQYSSGGTTRLGRITKRGDRYLRMLLVHGARAHLRFVERKNDPKSLWIKGLRARRHVNVAAVALAAKHARIIWALLAKGTTYRLPAAAT

SEQ ID NO: 506870 - protein, 404 aa, unidentified
MIFVGVDWAEAHHDVCVLDEGGAVLGSRRVLDTLEGVRQLHELVADHAEEPGQVAVGIEKDRGLLVVSLVAAGYAVYAVNPLASSRFRDRHQVSGAKSDRGDARVLADMVRTDRHQLREVAGDSDLAEATKVLARAHQSAIWSRQRHLNQLRNALKDYYPGALEAFGTDLASNDAVAVLTAAPTPAAGRALGTGELEALLRKGGRQRNVAARARQLRDALCRGQLEQPGIVADAYGAVTASELRLIAAATAEVATLEEALSAAFEQHPDAKVVLSLPGLGTVLGARVLGEFGDDPNRYASAKSRRNYAGTSPVTRASGLSRVVLARVSRNRRLVATCDQWAFCALTSSPGARRYYDELRQRGKTHRVATRALGNRLVGIPHGCLEDHVPYDEATAWRHRAQLAA

SEQ ID NO: 506871 - protein, 402 aa, unidentified
MNAVGIDVSKGKSMVAIMRPFGEIVSAPFEIKHTASDINSLVELINSVEGESRIVMEHTGRYYEVLAHQLSEANLFVSAINPKLIKDFDNDSLRKVKSDKADAVKIARYALDKWQNLKQYSVMDELRNQLKTLNRQFSFYMKHKTAMKNNLIGILDQTYPGVNTYFDSPARSDGSQKWVDFASTYWHVDCVRKMSLNAFIDHYQNWCKRKKYNFSQSKAEEIYGKAKELVPVLPKDNITKLIIKQAVNQLNIASATVESLRTLMNETASQLPEYPVVMAMKGVGTSLGPQLMAEIGDVSRFTHKGAITAFAGVDPGVNESGSYEQKNVPTSKRGSSNLRKTLFQVMDALIKTHPQDDPVYQFIDKKRAQGKPYYVYMTAGANKFLRIYYGRVKEYLSSLPES

SEQ ID NO: 506872 - protein, 341 aa, unidentified
MNEDVIYQRCAGIDVHKRAITVCLRIGRKNEVREFGTFTHELHEMVAWLKDNDCQMAAMESTGSFWKPLYNIFEIEEMEVMVVNAQHMKAVPGRKTDVKDAEWIAKLLSQGLLKPSFIPDREQRELRELTRFRKSQTEERARNLNRLQKMLEGANIKLASAVSDIDGKSATDLLELVISQKDFTVEDVDKRRHENMKASAGELFLSLTGVITPVQRELIKHIMNVIRVQTFQIEQTEELIHGYMSDAYNKAARAIEAIPGIGQVSAQQIIAEIGHDMSRFPTAAHLCNWAGICPGNNESAGKRKSGKTNYANKTLKSTLAQSAQSAKKNEIASSVHNTNDL

SEQ ID NO: 506873 - protein, 378 aa, unidentified
MKQNSTRRQSPKQALKQSPKQSPRQSKKSCQGPMAIGMDLGDRASRYCVLNDCGEVVKEAAVATTKKGMAQVFAALKRSRIAIEVGTHSPWVSRLLKSLGHEVFVANPRQLKLISQSSRKDDRVDAQTLARLVRVDPELLRPIQHRSEEMQLDLMVIRVRAALVEARTQLVNSARGLAKSVGERLPKCDAKCIGSGHLCSLPKPLQDTLEALLLQVEALTVRIEKCDRQVEQIARTKYPETELLRQVQGVGPLIALTFVLTVADKERFQKSRDVGCYLGLRPKRSQSGQSEPELRITKEGDVYLRKLLVQGAQYILGRKGPDTDLKRWGARLAVGGKRMKKRAVVAVARKLAILLHTLWSGGEVYEPLRNNAARQVAA

SEQ ID NO: 506874 - protein, 342 aa, unidentified
MKKVMAGIDLHSNNVVIGIMDTDGKRVTSAKLPCELKEIAKFLAPFKKRLEQVAVESTYNWYWLVDGLQALKYPVVLANPAAMQQYSGIKHADDTNDAFFLAELLRLKILPTGQIYDAQLRPVRDLLRRRMTLVHQRTALMLSFKSLYTRTTGQEMTLSQLKELEIKEAQDHPANQIIAGMQIKHIEQLTESINKIEKVVMASARELPAYGKLTTLPGIGIILGMTITREVGSIERFAEAGHFASYCRTVQAQRTSNSKKKGENNSKCGNKYLAWAFIEAANFARRYDPQCRKWYDRKAAKTSKVIATKALACKLAKAAWFLMSEGSDYDAKRMFGQPATVK

SEQ ID NO: 506875 - protein, 347 aa, unidentified
MRFYNRQHRHYCGIDLHVKTMYVCILDATGQVLVHRNVKTTPAAFLEIVAPYRDDLVVAAECMFTWYWLADLCAAEGIAFVLGHALAMKAIHGGKAKNDKLDSHKIAVLLRGGLLPQAYVYPAAIRSTRDLLRRRLHLVRKRGQLLAHIQNTRAQCNLPEFERRLAYPANRDGVSGHFPDASVRKSIDVDLALLERYDSLITDLELTLVRTAKQHNADAFHRLRSVPGIGKVLALTILYEIHDIARFDRVQEFASYARLVKGRKQSGGKLLGTSGAKMGNVHLKWAFSEAAVLFLRHATGDRRFLAMLEKKHGKGKALSILAHKIGGAVFYMLSAGHGFSMEKFMAA

SEQ ID NO: 506876 - protein, 340 aa, unidentified
MEEISMYAVDTAKSVFQVHGEDAARTAKIQKRLRRGQFLGFFSKAAPSVVVLEACGSAHHWARELTKLGHDVRLIPPQHVKPFLKRNKNDMRDAEAIFEASLRPGIHFVPIKPVEQQCDRALHRGRDLLVRQRNQLGNAIRSMLSEVGIIAAPGVAGAAQLHARIEAGDEAIPARLLSVLGPMLDQWRSLHEAAQALEDRIVAAAKADPQVRRLMKIDNVGPMTAHATIAAIGDGKQFRSARDFAAWLGLTPTHHASADKIRLGRISKAGDRSLRRLFVLGASSGLRQARARPDRASPWLNGLLARRPVKVTVIAQAAKTARILWAVLTSGEEFRATARP

SEQ ID NO: 506877 - protein, 343 aa, unidentified
MTISMLGIDIAKNTFQLHGADDSGKAVHKKRLARRELAAHVANLPACTIVMEACGGANYWARVFQSSGHTVKLISPQFVKPFVKTNKNDANDAMAIVEAASRPSMNFVPIKQVEQQDIQSIHRIRTRIVKNRTALINEIRGLCLEYGVVLIPGAARVKSSLCAAIADGDSELTVSSRESLQGLYEELVGIEARVKNLNTRIRQLCRQNENCQRILKIPGVGELTATAIVAAVPDPGEFRNGRHMSAWLGLVPRQSSSGDKQTLLGISKRGDRYLRTLLIHGARAVLSHYKDLDNDYAKWVGRKKATLSHNKAAVALANKNARIIWSILNTGEEFNIGAQATAV

SEQ ID NO: 506878 - protein, 412 aa, unidentified
MTRWIGRAIGLDVHRDFCVVAICEDGVTSSAGRVPATPEGIRALAESLLPSDRVALEVTGSCWEVARILEPHVNRVIVVSPDDTGITSARAKTDKLDARTLASLLWRGELEAVWMPDERCRVLRRRLARREQLVRSRTRTKNEIHACLQRRLQGKPPCSDLFGVKGRQWLAGLELPLEERESVDAGIRHVEFLDSEIAAVEKLIAQQALSWPEIRRLMTVPGVNLICAASFIAAVGDPNRFLTSRKLVAYLGLDPKVKQSGEAPARSGRISKRGSPAARWALVEAAWTAVLQPGPLHAFYEPTKNRRGHGKAIVATARKLAVLFWCMLTRSEDYAHQQPSLTKKKLRRLEITAGAPKNTRRSAGIWSTNDLMRQAERELALQAEASYKRMVTDQQAGAPARKVGASVTPERA

SEQ ID NO: 506879 - protein, 448 aa, unidentified
MAQRTRVKLEIANPNAAGIDVGSASHFVAVPPDRDDQPVREFRSFTEDLERLADWLVACGVDTVAMESTGVYWIALFELLESRGLRVYLVNARHVKNVSGRKSDVLDCQWLQQLMSYGLLSGAFRPSDEICALRAVMRQRAMLLSYQARHVQHMQKALTQMNVQLTNVISDVVGETGQRILRAIVAGERDPLKLAELKHARIRASQEEIARSLQGNWREEHLFVLAQSVELFDAYSQALQRCDLQLESMLRTLSRTQAEPGPSKRRRISKVKNSPKFDVRTYLFQICGVDLTAIDGIDVSTALKVIAEVGPDLSRFKSAKHFASWLGLCPGTKISGGKLLSGATKGNANRAAQALKLAAVGLRPSQSALGAYYRRMCGRLDKAKAVTAVAHKLARLIYAMLTKGTAYVDQGQAYYEERYQQRVLFHLKKRAAAMGLELVPIQPQGQSD

SEQ ID NO: 506880 - protein, 361 aa, unidentified
MRIIGCDLHARQQTLAMLETTTGEVVNLTLMHEGNEVREFYSQLPRPVLVGIEATGSMQWFLNLMEELGIECRVGHPATIRAAEPRKQKHDRRDAELILKLLVENRFPAIWLPTKELLDLRALVLHRHQWVRIRTRIQNALQAIALANGLRRGPGLWSYDGQAKIAFLPLQPHASCRRSALQALYRKMEEEIENLSKQVAEQAEQRTRARRLMTHPGVGPVTALATDIFLGDPGRFVDGKALASYVGIIPREYSSGGNQRLGRITKQGSPLLRFLWCEAGTHAVRKDPELQRFYRRKLVHKGLGRARVAVARKLGIRLWIMLRDEIDYEEFCRRGQKHHSGAACAGMLDVANGANSHRPVD

SEQ ID NO: 506881 - protein, 317 aa, unidentified
MDYIGIDISQAYVDADLPGGVQRLEQTADGHAALLAALPAGAVCVLEATGPYGLRLLAALHQARQPVCVVNPLSVRRFAQSQLRRSKTDRTDARLLSQFGGVFAPALHQPPAVWLSQLQQRQALLDLLLGQRTALRNHGHALRQSPWPDPVSTQALEAELTRLDKQVADLEKSLEQDARAQCGADYERLQTIPGVGPRIALALLLAGPGLRAFPGWRQAVAYAGLCPRHYESGSSVRGRPRLSKLGDGRLRRLLYVGAWSAKTKNPACAALYQRLVARGLAGKQALCAVAARLLRQAWAVVANECAFDPNHHLLIAS

SEQ ID NO: 506882 - protein, 337 aa, unidentified
MTLYCAIDLHSNNNVPVVIDDNDKILFQKRLPNDLSQVLQALEPFRADLESVAVESTFNWYWLVDGLADNGYDLQLVNTTAVKQYDGIKNTDDQSDAFWLAHLMRLGILPTGYIYPPAERAVRDLLRKRLQLVRTRVSHILSAQNQLWRSTGVNVSSKGIKQADSTLLELVSDSHVRMAIKSNLMIIAALTREIDIIEQVVRKETALKPEFQSVTTIDGIGEILGMTIMLETGNISRFNKVGNFASYARCVDSKRSSNGKKKGSNNRKNGNKYLAWAFVEAAHSIIRHNKTAHRFYQRKRAEKNAALATKALAHKMARAAYYVMRDQTVFKPELMFG

SEQ ID NO: 506883 - protein, 479 aa, unidentified
MNCKEKRTENQALINSTAKNVFSMEEIEKRITVIKENLKASTWKELETQGKFDKNDKLSFISDNMLIVGCDIGSETHYVRAIDTRGRELSKEPFSFSNSKEGFESARRWMLELAAINNKDQIVMGLEPTGHYWFCIACWMISHGISVVQVNPYAVKQTKEIEDNSQRKDDRKDPKPIANLVKDGNFGIPYIPEGLYAEIRGLSSLRDQLMEGRIQAVNRLHKQLKVYFPEYKDAFGKMDGAFTLEVLMNAPFPADIIRLGTEGIKELWHKAKLRGAGYRNAERIVSYAENSVGLKDGDKAAKEAVRWFTQQITEIQKELSKIEDELHQKCHEIPNVENVLEIEGLGENILSGIIAEMGDISRFDDVKEIQKISGLGLVECSSGKHKGQTKISHRGRKKLRTWLFQGAKSVVVHSEAFKSLHEHYTTRAENPLKKMQSLIVIACKLLRVVYTLLLTGRKYDSMRMLSDIHYPETSRTKAA

SEQ ID NO: 506884 - protein, 376 aa, unidentified
MNEKLRFLGLDVHAETIAVAVAEPNGEVRSLGMIANREDSIRKFIRKLGSPEHLRACYEAGPTGFVLYWQLTQLGVKCDVVAPSLVPKKPGDRVKTDRRDALKLARSHRSEDLTAVWVPDEGSEALRDLVRAREAAKQDQLRAKHRLTKFLLRTGQRPPLGVKAWTEKYVEWVQQVRYTHPAQEATLLDCLNEVQHMEERVKRLEQSIVEVIQLAPAPMQEVVRGLQAWRGIAHISAVTIAVELGNITSRFESARDLMGYSGAFPSEDSTGKRIRRGGITKSGNAHLRRIVVESAWSYRHRPAIGARLRRRQEGLPAEITEIAWKAQNRLHKRYMTLMARGKEQRKTMTAIARELLGFIWAIGIKAEAACKQPMTA

SEQ ID NO: 506885 - protein, 316 aa, unidentified
MNSQVFIGLDVSKQHLDVAVRPQNRHFVTPNDDRGIKQLVKRLATLKPQLIVLEASGGYEFLVTAALAEAQLPVALVNPQAVRKFAGAAGKLAKTDKIDAQVLAHFAEALRPEPRSLPDQVHQVLKAALQRRQQVVKMIGQEENRREKTFMPTVRRDIEAHLTWLRQRLKELDRDLDDQIRQSPLWQDRDRLYQSVPGIGPVVSLAVIAQLPELGTLPGKKAAALVGVAPYNRDSGRFRGKRMIRGGRSYLRRMLYMAAVVASRFNPVIRAFYQRLVAAGKPKKLALTACRHKLVLILKAMVKNNQPWNQFINQVP

SEQ ID NO: 506886 - protein, 346 aa, unidentified
MKITTIGIDLAKEVFQIHGVNEHGKIVLRKQLRRSAMTKFFANLTPCLIGMEACGSSHHWARKLSGFGHTVKLMSPQFVKPYVKTNKHDMADAEAICEAVSRPNMRFVPIKNVEQQAILSVHRARQGLVKAKTAQANQIRGLLAEFGIVIPQGIHSIAKWIPDILEDAENSLPEIMRHLLRRLNDHLAELNHQAEELELQVKLWHKNNEASQKLEAIPGIGPITASAIVATIGDAREFKNGRQLAAWFGLVPKQCSSGGKQLLLGISKRGDTYLRTLLIHGARSVIRFAENKTEPESWLRKLMARRNKNVAAVALANKNARIIWALLAKDRTFRHDHASAACAAAS

SEQ ID NO: 506887 - protein, 416 aa, unidentified
MDVIVARCAGLDVHKNTVMACVRTPGPDGARVSTVRRFRTFTAALRQLRDWLVAEGVTQVAMEATGVYWKPVWHVLEGAPGLAVLLANAHAVKNMPGRKTDVADAQWLAQLCECGLVRPSFVPPPEQAQLRDLTRYRKKLIEERTRETQRIQKLLEDAGIKLDSVVSDILGVSARRMLEALIEGVQDVEALAGLAHTSMRAKIPQLRRALEGRFGAHHALMLGMHLQHVDQLSDAILRLDEEVDRVIRPFQTALRHLITIPGVGRRTAEVIIAEAGVEMHRFPTAGHLASWAGMCPGNHESGGKRRSGRARKGNRALRAALCEAAWSASRAKSGYLGAQYRHLLRTFGKDGQTRAVFAVGHSILVITWHLLANDCDYQDLGAEHFTRREDPQARQRWLIRQLEALGNTVTVEPNAA

SEQ ID NO: 506888 - protein, 309 aa, unidentified
MDIAPDYVGVDVCKQHLDLAVAGRRVFRVPNDPGGVARLVERLAGLSRPHLVCEATGSYTRLLARELGRRDIAFSRVNPRRVRDLARADGQLAKTDAIDAGLILRFARIMQPQPDPAPDPAALELADLVRRRRQLVDMLASEQQRREHPEPGSVHASIDAHVTFLRAQVADLDAAIAGQPALSHRAELLRSIPGIGQVTAAVLVAEMPELGTIGNKQAAALAGVAPFTRESGQMRGQAHIAGGRLSVRCALYMATISAIRTNPPIKAFYKHLRGQGKPAKLAIVAAMRKLIIIANAIIANNTPWAQTAP

SEQ ID NO: 506889 - protein, 340 aa, unidentified
MINNFLGIDISKDRFDVSLSFISNKGKRETRKRSFKNNDHGFQGLLSFLQKHNVEQVKACMEATGCYSEALAEFLHNTGHFVSVVNPACIRFYAKSKLIRQKNDQTDAEIIADYCQRQEPIRWAPPSPELKKLKHLYRCSAALKDELTLVNNHLEKKERLPKEVANAWEDLAMNIKQKIERIKISLRELLNKHKELLENFQLLLTIPGIGEESAVAILAEVPNIKAFKDARQLAAYAGAIPRNITSGTSVHAKPRLSKSGSRTLCKAMYFPAIVAKNHNPTIMTFCKRLKEKGKHNMAIVGAAMRKLLHIVFGVLRSKKAFDPDHIKNYRARSLAESLVL

SEQ ID NO: 506890 - protein, 344 aa, unidentified
MQITTIGIDLAKTVFQLHAVDADGAPVIRKRLRRAEVLSFVSGLEPCLIGMEACATSHYWARELAKSGHTVKLMPPAYVKPYVKRGKNDATDAEAICEAVTRPNMRFVPVKSADQQAVLMLHRARALLIRQQTMLANAFRSHLAEFGIVVPQGIRHVRALIERVFGGGEDPIDLPALARTALRPLVAQLMELRLQIKTIEKELLAWHRTSQESRRLETIPGVGFITATAIAATVADPSHFRSSREFSAWLGLTPRQNSSGGKDRLGRVSKMGNGYLRSLIVVGATAMIRYAREKGAVSARWINALLEKKPARLVSVAVANKTARIAWALLVRKEAYRVPVPVAA

SEQ ID NO: 506891 - protein, 414 aa, unidentified
MQVLYPRCAGLDVHKDTIVACIRIAAEGKVSTEVRTFAATTAGLCALAEWLVENGVTHVAMEATGIYWKPVWHILSDYPLEVILANAAHVKNVPGRKTDVNDATWLAELLAHGLIRASFVPPREVAELRTLLRTRKQLVREHASHVQRVQKTLEDANIKLTSAISDIMGKSGRAMIEAMIAGESDPHKLAALADRRVQAPRAKLVEALTGRVGAQHRFLLRLHLRQIDAIDDAISEIDAEVEAHLGPFREAVKLLDTIDGVDVLAAEVILSEIGLDMTRFPTDGHLLSWGCICPRNDESAGKRRSTRIRKGARWLKATLIQCARAAVRMQGRYLSALYRRIRARRGDKKAILAVAAAILTAAYHMLKTGTPYRDLGPRHFEPAKRNALARNLLKRLQGLGFTVDIKETAAAQPG

SEQ ID NO: 506892 - protein, 341 aa, unidentified
MARYIGIDLHRNRFTVCTLAENGRAYPRTVAIRHLALFAKTLRRDDEVAVEMTTNTRLFKSTVEPHVAKVVVVDPWKFKVISESAKKTDKHDAEQLAFFLSKGMLPELRMKDRDREKLHSLCQTRDKLVKQRTQLKNKINNVLASYAILLKREELASDKALGRVLAMDIDPVVNLELKVLVDQIRSLNRSIRELEDAIKKEGAKHEEHKILKSIKGIGDKGASILLSIIGDVNDFDSAKKLASYFGIVPRVSNSNETSHSGRITKRGTKLGRTTLVQCGLIAKRYNPYLLAYHERVKRRRGGGKANIALARKLLEIVYHALKNRWVFTDFPSFCYVELKAT

SEQ ID NO: 506893 - protein, 369 aa, unidentified
MKPQLTATPNLYIGMDIHKKNWAVHLRTDISDHKTLTIPSNCQVLYDYVEKHFHGHEVTLTYEAGCCGFGVSRYFLNLGWNVLVVNPADVPRMDKQNYQKTDKIDCRNLAKQLQAGHLTGIFIPTESQDLLKSLVRQRAETSKQLRSIKANIKSLLLYHGIQIPKEYDNPNWSIAFLNWIKEIKWTHVTGKICIESKLRMREVIHKEYLQLANELRSYCRKHHKTDYYLLKSIPGVGGYLASAILAEIGDLRRFGSETQFASYVGIVPTMKNSGGTEKIQGVTPRCRGLLRSYIIESSWVALRMDPEMQAYYRKHIGRNPKSIIVKIARKLLNRMLAVIKTGQPYKTNYSLAKGPGKNVNDKINEKLNT

SEQ ID NO: 506894 - protein, 320 aa, unidentified
MTRIGKGKVMQDTIGIDVSKATLDAYWLSGKQHLVFSNDLAGLKQLVRWICKAKADLTVFEATGVYDRLLQAQLASHGLPFSRVNPKQARRFAEGIGQLAKTDKVDAVLLARMGSLLDLKAETPRAQSTNDLKDLATARQALIRDRTAAKARTQTASVLLLKAQLSRRLKQIERDLVLVDAAILSVIAKDETLSESAKILTSIPGIATVTACAMLAQMPELGTLSGKQAASLAGLAPMSRQSGKWQGREHIRGGRAEMRRSLYLPAVVATRFNPDMKTKYDQLVASGKCKKLAITAIMRKLLVMANSLLRDRRNWTKAHP

SEQ ID NO: 506895 - protein, 427 aa, unidentified
MNYTQNEKIMSITERTLVIGIDIAKSVQYARAFDYRGIELGKVRSFENTAEGFRIFEDWVKSLANQKQKNNIVVGMEPTGHYWFNLGHFLKDLGVKLVLVNPFHVKRSKELDDNSQTKNDIKDPKTIAKLVIDGRYFEPYIPEGIYSELRVAMDMREGLGKNLNKIKNKVTQWLDKYFPEFNDVFADWEGKAALITLNEFPTPKKVLSTGVQQIVVAWRKEVKRAVGNQRAVRLVEAAKISIGIKDGLRMAEKELIVNLQQYNLFISQLEQLDLEIEELTLQIPGAKEVITIKGVGIITAAGFIAEVGDIKRFTHPNQIQKLAGLNLIENSSGKHKGKTSISKRGRSRLRALLFKVMMPLVAKNPEFKMLHEHYKNRKDNPLQKKQSLILLCCKLIRILYTIMIKQVEYNPQKLIKDISYLQLKEAV

SEQ ID NO: 506896 - protein, 337 aa, unidentified
MKVTLIGVDLAKSIFQVCGVNQVGKRVFNRQLRRAKLMEFLLQHPDATIAMEACSGSNYWGRTLQQHGFKVMLIPPQHVKPFVKGNKNDRNDAFAITEAARRPNLKCVEPRTLAQTDMIQVHRVLDRMTRQRTALINQIRGFLNEYGIVVAQGKERLLTAMPDLLEDAENGLTPSSRALFQRMLEQWRQANEAIKQIEKGLKGQAKTDDDAQRLMKMRGVAVKISTATIAHAGNGHGYKSGRHFSANLGLVPREHSSGGQQRLGGITKRGNQYLRRLLIQGAWSVIRNVDKNDDRLSRWARQLVERRGKHKAVVAVANKMARIMWSMLYHQTEYRAN

SEQ ID NO: 506897 - protein, 413 aa, unidentified
MNQDKLYVGIDVSSKNNVCYLMYSDGSKHSSFSVPNNRNGAKIIVDRVTSVLLLQDIPQVVIGMEATSVYGDNLMRFLRESGSLGQFERSLHMLNPKQVKKFRDAYSDLPKNDHVDSYVIADHLRFGRINKEVYMDDYKYQALKMYTRARHQLVQELTREKQRFLNTVFISFSGLTQEKIFSNKFGATSMALIEEFSSLDELAYMSTDELVDYIRKKGKNHFENPEEIAEAVQRAAKNSYRPPQVIADAAKQMLAISMNTIRLLQKQIKEYDKAIEKMLEAFPQTLTSVKGIGNIYAAGIIAEIGDINRFPSQASLAKYAGLVVWTQHQSSDFEAEDKRMIQGGNHHLKYYLCEAANALRICDPEFKRFYALKYKEANKHNHKRALALTARKLVRLVYTLLKTNRLYIPPEEY

SEQ ID NO: 506898 - protein, 411 aa, unidentified
MEVVNARCAGLDVHKATVVAGVRVPGPQPSARRGETKTFATTTRGLSDLTNWLLTHGVTAVAMESTGVYWRPVYEALEGSVQLVVVNARHVKMVPGRKTDVKDSEWLAQLLECGLLRGSFVPPRAVRDLRDLTRLRKALIRERGHHVNRIAKTLELAHLKLSCVVTDLMGKTGRAILHALSAGIDDPERLAACAQGSLRKKQAALREALVGRLTPHYAFLLQQHLSLIDGLDAHMATLDTRIEAAMAPFAEAAALVQTMPGVAARAAQAILAETGVAMDLFPTPAHFASWARLCPGNHESAGKRQSTTTGKGATWLRATLQETAWAAVRSKKSYYRALYHRLKGRRGAKKAIVAVQHAMIVALWHMLKHGVAHQDLGADYFERHHTARIRRHHVRRLEQLGYDVLLVEKAA

SEQ ID NO: 506899 - protein, 331 aa, unidentified
MSQTLSDAVAVIGIDIGKNSFHIVGLDGRGAIVLRQKWSRGQVEARLANLPPCLIGMEACVGAHHLSRKLKAFGHDARLMPAKYVRPYSKGQKNDFRDAEAIAEAVQRPTMRFVATKTTDQLDLQALHRVRERLVSQRTGIINQIRAFLLERGVAVRQGLRFLRVELPRILAAPPDVLSTRMISVIEDLAQDWRRLDERIDHLSGEITALARQDVGCERLMSVPGVGPIISSAMVAAIGTGDVFSRGRDFAAWLGLVPKQISTGDRTILGKISKRGNRYLRVLFVQAAWVVLIKPQSWERHGLKSWIEAAKKRLHRNVLAIALANKLARIA

SEQ ID NO: 506900 - protein, 353 aa, unidentified
METAYDGRQIVGMDLHRRRSVLVRMTEDGRRLGTARIDNSPRELRAQIARAGKSPKVVLEATYGWYWAADVLEAAGAEVHLAHPLGVKAFTYRRVKDDQRDAADLADLLRMGRLPEAWIAPLPVRELRELTRYRAKLVGLRTSCKDQVHAVLAKLGVPVTCTDIFGTAGSAWLDQLRLPQPYAGKVTSLRHLAGELSTEITMLSQVTASLLAGDPGYQVIQQLPGIGPVHAAVIIAEIGDVTRFKSAAQLCSWAGLTPRHRESDAKVVRGHITKQGSPVLRWALIEAVQRIPRDSVIGAAKQAIIDRRGKQARSIAKVAAARRLLTLVFYGLRDGQIRCLSSSPGQPPAQPDD

SEQ ID NO: 506901 - protein, 394 aa, unidentified
MLNSGMERIPDIGTLLSRIPDKREERMVLRFHGIDRHKKFSTVSVLDRNGQEVRFLRSCAMQDYLVELGAEDAVILEASCGCFFWADRIEATGATCYVLDPRRFRIITDSWNKTDRQDARNMAKALWVFLVTGEFGIPTVYKPSATIRTLRRLFATYNLLNRQIRMLKNAIQAMLTDDGVVLTSTQLSGLFTGRELVADALSESSILPTIVSAIEVQAALLQQVNESKAALAREIVVHSEPLAEQIELLVTIPGITPLTAAAFLADIGDVRRFKSLRQMNAYLGLVPRCHDSGGKSRPGHITRESRKLTRTILTQSIYQAVKSTPSWQRDYDELKARRGAGRARIAMIRRLCGVMRRMLLNGEKYHWLKEDLYQRKLQQYRQTLENAKKEQNAA

SEQ ID NO: 506902 - protein, 325 aa, unidentified
MPDSTRSVSANPTGSCWGIDVSADKLDLACHGAGEVRTFANSWEGIEPLLALVRQTPVALIVLEATGRYHRALALALQEAGLPVAVVNPRQVRSFADALGQTAKTDALDARVLARYAHDLRPECRVLPGENLQLFAELVARRRQLLQLHTAETNRRKQTAYAAVRTSIDTVLLVLKKQLSELDEQLSQLINDEEEWRRRDELLQSVPGVGPGTSRALIAELPELGKLDHKQLAKLVGVAPRNRDSGKFQGRRSIGGGRGTVRAALYMAAFVGSKHNALLKAFFDRLVAAGKPRKLALIACMNKLLGILNAMVRNGTTWKNPCQNT

SEQ ID NO: 506903 - protein, 411 aa, unidentified
MEIIYKRCCGLDVHKKKVVACVIIRDEEEVRKEIRTFGTMTSDLIVLHDWLLANRVTHVAMESTGVYWKPIYNLLEGNFEVLLVNAAHLKAVPGKKTDVRDCEWIADLLAHGLLKGSFIPPEPIRDLRDLTRYRKSLTDERNREVNRLQKLLESANLKLSSVATDVMGVSGRAMLEAILSGTTDPEVLADLARGKLRKKLSLLREALQGRFRPHHRFMLEQILSHLDFLDEAIELVSKEVENRIVPFQKEIELLKTIPGVDQKIAEVIISEIGVDMSRFPSHRHLASWAGLCPGNNESAGKHKSGRVRKGGRWLKRGLVESSWAVSRAKETYLSALFHRMIRRKGKKKANVAVGHAILVMAYHILKKGIPYYELGADHFDRLNLKYITNHLVNRLNVLGYKVTLEPLNLVA

SEQ ID NO: 506904 - protein, 383 aa, unidentified
MQASTLDTPTAGHYGTIFVAIELSQKTWLVTLHSPDRDRISRHKLEGGDHAGLLALLENIGARAAAKLGSAPQVVSCYEAGYDGFWLHRLLTAAGITSFVFDPASIAVEQRPRRAKTDRIDGELLLRTLMAYLRGEPRVVRIVRVPSMEQEDARRASREHERLVTEQTGHTNRIKALLRLVGMAVGYPRRSDWLSWLERQRDRQGAPMPPRLLAEVAREHARLMLVRGQLAALEQAPLAAEATAATAPMAKRRDLLLRLKGLGPVFAATLTNELFYKDFRNRREVAGYCGLTPSPWRSGSIDREQGISKAGNPRARLKAVELAWLWLRHQPDSTLSNWFRTRTANASKRTRRIAIIALARKLIVALWRYLTTGLVPEQAVMKA

SEQ ID NO: 506905 - protein, 326 aa, unidentified
MQSILGIDVSKDKHDLVLICEGRKFHKVISNDLKGFEQLGKWLKKYQVTQLHACLEATGQYGEPVAEWLYNQGHQVSVVNPARLKHYGESKLHRNKTDKADADLIAEFCLKEKPSLWKPLSTEIKHLRALIRRLQALKDNLQQEKNRLQSGEKDVWVTKDLETHIKFLQERIDATLKEIEDFIDQSPGLKSQQKLLTSIPGIGDLTANTLLGEIGDFSAFEDAPQLAAYAGLNPKGHRSGSSVHKKTRISKQGRVELRRCLYMPAVSSLSSNPVIQSLAYRMSMTNHEKMEIVVAAMGKLLHLAYGVLKNQLPFDPDYGAQFNYSS

SEQ ID NO: 506906 - protein, 403 aa, unidentified
MIFIGDDWAEEHHDVYLMDEAGKRLASRRLPEGLAGVRQLHELISTHAEEPDQVVVGVETDRGLWVGALAAAGYQVFAINPLAVARYRDRHHVSGAKSDASDAKLLADLVRTDRHNHRLIAGDSTDAEAIKVLARAHQNLIWSRTRHTNALRNELREYYPAALVAFDDLAHGDALGVLGRAPTPEQGARLDRPAIQSALKRGGRQRNIAERARQVQAALRSEQLAAPAAVSAAFGATTRAAVGIIAELNRQIADLETSLAAHFEQHPDADIYRSLPGLGVVLGARVLGEFGDDPNRYTDAKSRKNYAGTSPLTIASGKKRAVLARHVRNRRLYDAIDQWAFSALSTSPGARALYDQHRVAGDLHHQALRALGNRLVGILHGCLRHKQPYSEHTAWAHRTPVAA

SEQ ID NO: 506907 - protein, 312 aa, unidentified
METKFVGIDVSKLTLDFDCLPVSAAQQFTNDAVGIAALVALLQNSGVERIVIEATGGWETPGVSALAVAKLPVVVVNPKQVRDFAKAMGHFAKTDKLDAKVLALFGERMKPALRALPDEAQRTLADLLGRRNQLVAMRAQEKTRLATVPAVARKDVEQHIAWLGKRIAKLEGDLGNRLKQSPVWCHKAALLESTPGVGEVTTFSLLADLPELGTLNRQKISALVGVAPFPDDSGKRQGKRYIRGGRAEVRCVLYMATLSAIKHNPPIKAMYERLTAAGKPFKLAMTACMRKLLTILNALIKKDQAWRLQPSA

SEQ ID NO: 506908 - protein, 377 aa, unidentified
MDQQTGEIISQPVSFSNDKEGFDFLIQKINSYPKDSVLIGMEDTGHYHFALLKYLLNLQYTVALINPKTTDFNRKMQGGITKNDKLDTINICDVLDTPERKKQYRITKVNSFDLYEQKQLTRHHHNLKEEENVYKNRLQKCIDIVFPEFNKLFNSKYGTVYMNILKTFGSAENIANTDIRTIRKCFEIEGRGNRISLTPERLKECARSSIGISSSAEVIQIKHLTAQIELIEEQLTEIDKKIEEFSIQNNSPILSIPGISHFSGTSILAELGDISNYSKPSQIIKFAGVAPLHYESSQFNAQHTAITKKGSKYLRKTLYQIILPVIRHNPVFNKYYQLKISQGKGHRCAQGHCVRKLLRIIYHLLKTNQQFDPQLLR

SEQ ID NO: 506909 - protein, 377 aa, unidentified
MTPAGKKAFDKRLPNTEPKLRELFAKLQAKHGTVLVVVDQPASIGALPLAVARDMGCPVAYLPGLTMRRIADLYPGEAKTDARDAFIIADAARAMPHTLRAIDGEDETIAELEMIVGFDDDLAGEATRIANRLHGLLTQIHPSLERVLGPRLQHPAVLALLERFGSPAQIRKAGRRRLVTLLRPKAPRMAERLVEEIFAALDEQTVTVPGTEADALIVPSLAGSLAAVLDQRKLLAGRIEELLEDHPLSKVLTSMPGVGVRTGARILIEVGDGSTFPTAGHLAAYAGLAPATRSSGSSIRGEQPSRRGNKQLKRAFFLSAFAALGDRASRAYYDKKIAQGKHHTQALLCLARRRADVLFAMLRDGTFYEPQPSAAVT

SEQ ID NO: 506910 - protein, 389 aa, unidentified
MGWIGHVRPMDLVQEISQTCNRSVTVRPLRTLYGRVVIAAERVCSTARGEKTMKRYLGVDLHRTQFTVCTRLESGRTYLRQWPMRELKLFAAQLRKDDEVAVEATGNTRLFYDAIVAKVARVAVVNPSQFKVISQSVKKTDKNDAELLALYLSKELLPEVRMKKRGQREVGHLAQTRDLLVKQRSALKAKINNMLSAEGINLKREALSSNKALDRVLALPLSPLMLAEARVLAGQIRSLSQSIAELEKLLEEEGSKLPGHDNLMSIKGVGPVSAAVLLSTIGDIRDFEEPGKLAAYLGLVPRVQNSNETERSGRITKIGNKLARTALVQCALIAKRYSPFLQQFYQRIQRKRGGGKANIALARKFLGVLYHTLKNNWVFEDFPNFVLAS

SEQ ID NO: 506911 - protein, 394 aa, unidentified
MPAAGVAGWLANEEPPVRVLTAVWLERGTCTDDLKQECPRGPNSCETTEVLMTVIIGVDPHKASHTAVAIGHDESELGRTRVRATRKQVLQLLAWAQPLGARRWAIESAGGLGYLLAQQLVDAGEIVLDVPATLASRIRVLGTGRSDKNDPNDALSVAIAALRTPTLRKVRPADHAEVLRLLAKRNIDIGNHRTRVVCRLHNAVMELAPGGIAKELYASDAVALLDRIEPATPVEQARHDLAVELLADVQRLDAQLKESHRRIRVAVKASGTTLTDLFGVGPIIACYLIGFTGDVGRFTSRDQFAAYNGTAPVERSSGGRVVHRLSQRGNRRLNHALHLAAVCQIRQPHSDGRAYFDRKVTEGKTKKEALRSLKRQISNVVYRQLLSDANRTTP

SEQ ID NO: 506912 - protein, 388 aa, unidentified
MEARLVDTTSTARNDALARCLIAIELSKASWVVGVQTPLSNKTSQYRLTAGDWKSLLKLIERIRQQVGRELGRAVEVMSCYEAGYDGFWLHRLLEAHGVRNHVLDPASLLVNRRARRAKTDRIDVERMLRALGRYLRGEPDACSVVRVPSVEQEDARRLHRERHRLIQERVQHVNRIKGLCATQGIYDYEPLRSDRKAQFEGLRTGDGRTLPARLKAEIIRELQRLELVLKMIAGIEAERDAIITEAAPRHLNAGKIKALANLRSIGPEFSTTLVGEVFYRSFTNQRQIGSYVGLAPSPFSSGSTDRDQGISKAGNPKARSTMIELAWMWLRYQPDSTLSIAFRQRVGDRKGRVRRIAIVALARKLLVALWRYLETGLVPAGAVFKTR

SEQ ID NO: 506913 - protein, 348 aa, unidentified
MRNRPLGAVVYGIDLGKTRFDVVGCDAAGKPIQRVKFSRDTISTFFAVAPKALIGMEACPGAQWMARKLSELGHTVRIIPAQFVKPFVKSNKNDARDAEAIAEAVIRPTMRFVEIKSCEQIDLQALHRVRDRIVGNRTQLICQMRAFCLEYGIPIRPGTGAFKLDITHIISDETNDFTSAIRVLLKELWDELKIVDIRLASVSRQVELLAAKHDAARRLMTIPGIGPIGATALIAAVGDGRQFRKARDLAAWLGLVPRQYSTGGKTTLLGISKRGNPYIRRLLIHGARSCMIHLDRSRDRMGVWLKGLDERMHRNKAIVALANKIARIAWVLVRRPHTLYERIAPARP

SEQ ID NO: 506914 - protein, 423 aa, unidentified
MRITYQTCCGVDVHKSFLVATIIKTTGGIEPSYQKKRFSTFNNSILAFKQWLLDNNCHDVCMESTGKYWVPVFNLLEDEINVTIANPKWGKAVKGNKDDEKDSKWIGDLFRLGLVKGSYIPSKAIRILREYTRYRYKLVSCRSSEKNRYQNALTVCNVALDSVVSDIFGKSSTSIIDYLLQQSCTSINHEEIASKLLRSLKSKEDAVIESIEGYQMTDAQKYRMRLVRAHMDYITAEINDVDSMIEKLISSDADYENAVRLLCTIPGVKHDSAVTIISEIGIDMSQFCTSKRLCCWAGLTPGSNESAGKKKSVRITRAGVYLKPALVQCAHAAVKSDKSPYYKKKYEALVKRRGKKRAIIAIARMILTAIYQMLSTGEIWNPSDLYKIDMPQALAEKQKVKAIKQAKKLLLREGIISESQLVS

SEQ ID NO: 506915 - protein, 415 aa, unidentified
MSRFERRRRAQTARAVVGVDAGKYKHVLVVRPHDGPDSKPFTFDVSREGFDAAVQFIRAAAPDASPQTTIVSIEFAGTYGFTFAHDLARQGFEVVTVLPAHSKRWKEVVHNQRLKTDAKDAMVITDLVAQGNFVAFAFLDPAYADLRSLVSARERLSVERRALIARIKSVLEGVWPEFERRFKNFGKRTPIALLEAYPSPKAFLDAPKRSVLRLLRNESRGHLGEKTYEELRGVAERSVALPFSEGAAKSEIPLLIERLRLCEEQIRTVERWMVETLGRIEASRSVLSVPGVAPVTAAVFLGSIGDPKAYETKEQVLKVAGLSLIESSSGTRAGEVHISKRGRPLLRRHAYMLALRLVQEGGIFRKEYEAYLERHGPKKKISALVAISRRALALIYSVARDGRLWTPEPPSRRKT

SEQ ID NO: 506916 - protein, 316 aa, unidentified
MHYVNNTELSSLEGTRRQFKGGRCAIKLGVDVHQDFCVVVLQEDGASPKPPQRFQKEAFLHWAARLKRKSGAEVHAVYEACGFGFALQRQLSALSIQCYVVCPQKLDEHNRRVKTDGLDAKALCPKLDRLVQGNRAALARVRVPSEAEEQLRAIHRQREQLLKARKQLEAQGRSLMVNHGLEPVQNWWKPRTFAALQVSDWMKQLLQNSQPILIGLQEKIAALTGQLQRAASPDQLRGLGKMTSVIIDREIGHWHRFRNRRQIASYTGLCPGEYSSGNTRLQSCVTKHGNPRLRAALVGLAWRLVRFYPDLHPGRN

SEQ ID NO: 506917 - protein, 343 aa, unidentified
MTKISTIGLDLAKNVFQLHGVDASGAVVLRRQLRRNAVEKFFAKLPPCLVGVEACGSAHHWARVIGRYGHEVRLMPPAYVKPYVKRNKNDGRDAEAICEAVTRPTMRFVAVKSVEQQAMLSVHTTRALLVKQRTMVANALRAQLSELGLVAAQGHEGLHELMARLEVPSEEIPEMMRSALLMLVEQWQALDAKERVLEKQIVKAVRCDQEARRLMAVPGVGPIIASAVLAKVPDARLFRSGRDFAAWVGLTGRDHGTGGKHRPGRISKQGDRALRTLLINGASAHLRQQKRRGISDPWLRELLARRPYKVAMVAFAAKTARIIWAMLAKGEAYRDRTSAPAAA

SEQ ID NO: 506918 - protein, 322 aa, unidentified
MNKYKETFGVDISKDVFDVHGSRKGHEQYKNDETGFKKYLKELPKGSLVVMEATGYYHYRLAQFLYKNDVIVSVVNPLSIKRFIQMRLAKVKTDKSDAKAICEYALVNEVSIYNALTDVQSECLQLFRLLDNYLKQRTATKNKIHGEVVLGIPSKFVYRSLIRNRKQLNKEVAAIESKILSLVKEDQQEQLTLLMSIPGIGQKTALFLIVVTDGFNKFETASQLCSYVGITPTIRESGSSVRGRARISKVGNRKLRNLLFLCSFNACKHNKACREVYERIVNKGKSKKLALIAVANKLLKQSFAIAKSGKPYDETYVSVLLR

SEQ ID NO: 506919 - protein, 295 aa, unidentified
MEIRTIGIDLGKTVFHFVAVNARGQVVVRRKGSRAQLLRFTANLPQCLIGMEACGGAHFLGRALREQGHDVRLMPAQYVKPYVKTNKNDYIDAEACSEAVTRPRMRFVPIKTDDQLDLQSLHRVRERWVVRRTAVINQMRGMLLERGITIRKGRHYIEESLPAILEDADNKLSGALRVLLTQLRMEMQYLHGQIEETDKLIARICGELEQCRRLVAIPGIGPITATATVAAIGNGAAFKKGRGFSAWLGVVPGEHSTGGKQKLTGTSRRATSIYENSSCRERTPCCCRKPGNLPA

SEQ ID NO: 506920 - protein, 428 aa, unidentified
MDQVNHNRLEEFRQLRQEVRHSGEYLIVGIDIAKDRHYAFFGTATGKTLLRRLVFSNDHEGFRKLLDQAEALRVQHGLKKVVYGMEPTANYHKPLGEYLIGLGRTVVLVSGVTVKRNRETLDGRWDKHDVKDSANVADLISQGKCLYYEHPSAELRGLRGLLSLKRRLKKQEHGYKVRIRNHLIAQYFPEMDRDYAQLGAEGLSIVRWCFPASQIVQLDVDPFIERVTSRRIRVEKRRRLEVIWEKAGESIGCDGVPGVEHEAKVMVEGLRQIREMIKETEDKILGLCKQFPAYPYILTIPGFGPDVSAKVLGAIGEPDRFQNGKQVLKMGGLDLSADRSGKDSDKATPVISKRGKADLRYALYQAAFIASTKNRDFMLYYTNKLRGREKEKGIHTKMIVKLSAKMLLIAWTLMKKKEAFDPAYLITE

SEQ ID NO: 506921 - protein, 341 aa, unidentified
MGKRSFPSCAVLYCGIDVSAETLAVAVQPEGSAGFEQREFANSAAGHRQLIVWLRKRGASVRVSLEATGIYSLDVTMALEGADGIEVAVLNPRTVHQFAESLRRSKTDAADAVALAEYSRRMPFVAWVRPSKAALELRAISRHIQTLSEQQARLKNRLHAARGSASTPRCVRDDLRKSIGGTEKRLLRLRREARAAIAADAGLQRKFEHLTGIPGIGEVSAIQLLGELAGLDPRMTVRQWVAQSGLDPVHQVSGTSVHKASRISRRGNRHLRRALYMPAVSASRSDPHMKAFYTLLLTRQKTKMQALTAVTRKLLHAIFGIFKAGSAYDGAKLFPKLIPTS

SEQ ID NO: 506922 - protein, 434 aa, unidentified
MKLPKHLRNINQHAAGIDIGSRSHFVAVPEGADEQPVREFSTFTGDLERLAEWLGSCGVTTVAMESTGVYWIPVFEMLESHGFEVRLVNARHVKNVPGRKSDVLDCQWLQQLHTYGLLRGAFRPVEQVCTLRAYVRQRGTLVRTSSSYIQRMQKALAQMNLQLHNVVADITGLTGMRIIKAILAGERNPDVLAAMRDKRCKNSESTIARSLKGHYRPEHLFSLRQAVEIYEFHQEKIADCDRQILKQLQCFDSQVVPNDAPPANVGEALQRMSGVDLTGIDGIDTNTALKILAEIGTDMSRWKTAKHFASWLGLSPGTKVSGGKVLSSATKPVANKAAAALRMAAFTLFNSRSALGAYLRRQRARLGAPKAITATAHKLARLVYTMLTHGTSYVDAGQEYYEERYRSRVVQNLKRKAHEMGFELVSMQEVPASA

SEQ ID NO: 506923 - protein, 318 aa, unidentified
MAAWHVGIDVSKETLDVQVLNGSSQQFPNTSQGHQTLVAWLKPESIARVVLEATGGYERLAVAALVAAELPVVVANPRQVRDFAKGIGLLAKTDRIDAYALARFAQAAEPPQRLLPDEQTQKMRELLARRAQLLDMRVMESNRLQQAHARRVLNGLRSSIEFINKQLDRLEKEIDEELRKSPAWQEKIELLKDVPGVGPQTLRTLIIELPELGDCTRQQCAALVGLAPINRDSGKSRRRRMIQGGRAKVRQALYMATFSARRHNHLIRAYYDKLCAAGKPFKVVMVACMRKLLTILNAMLRERQPWRAPTQPALAEIT

SEQ ID NO: 506924 - protein, 422 aa, unidentified
MICAAVERCAGIDVGKTFLAVCVMTGPLTDEAIVQRRRFGTTVVELQALREWLKQERVTHAVMESTGSYWKPVFNILEESVQIYLANSQEVKNRKGHKTDDKDGWWLAHLLRHAMIRPSFIPLRPIRELRDLSRRRKRLLGNATAEKNRIQKVLEDANVKLGSVLSDVFGVSGQLMLDALLNGQHSPSEIARLAQRRAKSKVAEIEQALEQHQLRDHHRRLIRYSLSHMAFLEQQIMDLDRDILAKIQEAGLEPAWELLQSVPGIQQRGAASILAETGADMKQFPSSKHFSSWAGVCPGNNRSAGKNHGSRTTGGNPWLRSTLTECAWAAAAIKNSYFKEKFWRIVGRSAGKKAPALVAVAHNLLVEIYEVLRTGQPYQDRHASRLPELQKQRMIRHHLRRLGKLGVTVRCNPSAVARAKET

SEQ ID NO: 506925 - protein, 343 aa, unidentified
MQTITTIGLDIAKSVFQVHGVDAGGQAIVRRQLKRRYVLTFFQKLSPCLVGIEACASAHHWSRELQALGHTVRLMPPAYVKPYVKRQKKDAADAEAICEAVTRANMRFVPTKTPEQQSGLVLHRMRHLFIRQQTSVINAIRAHLADFGIVAPIGRRGVEELLNVVADPNDRRVPEIARACLSALGAQLRRMKEQILEFDRLIRAWHRSNEMSMRLDEAPGVGLVLATALVATVADPKSFRSGRNFSAWIGMVPKQHSSGGKNRLGNISKQGDRYLRGLFVAGALSVIRYAKIHGTKHRPWLTALLARRPTKVAAIALANKIARMVWAMMARGERYKEPVALAR

SEQ ID NO: 506926 - protein, 372 aa, unidentified
MNYNTVYVGMDVHKESFTLCSMTIEDEKASHYQKTEADYKKVLKYLEFLRTIYGDNAKFICGYEAGCLGFTLYHQLISQHVECIILAPTTMLEQRSKKRIKTDKRDAEIIAKCLAQHNYSPVHIPTATDEQIKEFLRMRDDHKLDLKKIKQQILAFCLRHNYRYDGNSHWTAAHLCWLKSLQPEALYKETLNEYLLTYTTLNDKIERFDKRIEELASKDEYKESVQKLRCFIDVRTHTALSVLVEVGDFNRFASAKNFASYLGLVPGENTSSDDRNLLGITKAGNRHVRLLLTEAAQSYARGQIGYKSKDLKSRQSGNSAQVIGYADKANERLRRRYYKMVLGQSKKHNVAKVAVARELACFMWGMMTEHIS

SEQ ID NO: 506927 - protein, 399 aa, unidentified
MVSVGIDISKEKSTVCMMKPYGEVIAGPMEISHLAPELMTLVKMIKSLNDEVKVVMEATGIYHLPVLKYLKENDLFVSVINPYQMKQYRVQGLRKVKTDKADSMKIAQYGIDYWYSLKEDVSSEEKYRELSILSRQYSHYMRLHVESLLSLTHILDYTMPGIKKHLTSWNPKTGRDKLADFVDQYWHYDNITKKSEKSFIESYVKWAKKKGYQQDPNKAAKIYSIASNGIPTLPADQTTKMLVNQAVEVLKRVDETLNTILARMQEIANTLPEYSVVRSMGGVGDVLAPRLIADIGDVRRFHSSKALIAYAGIDAPPYQSGRFTGTNRNISKRGSSAIRKTGYEVMRCLKTHKMPEDGEVYKYILKKEAEGKPKKVAKIAGLNKFLRIYYARVMEVYNS

SEQ ID NO: 506928 - protein, 442 aa, unidentified
MAMRKREDSSEVFPNAAGIDIGGSSHWVAVPKGAAEEPVREFGTMTDDLHEMADWLLACGVDTVALESTGVFWIPVYEVLEQRGLTVWLVDARQMKYVPGRKSDVMDCQWLQKLMSLGLLRAAWRPGDEVCVVRAVARQREVLLTEQAGWVQRMQKALVQMNLQLTEVLTDVMGVTGQAIVRAIVAGERNPKVLASHRHGRVRASAAEIERALTGNWRDEHVFVLGQALAMFDSLGERILECDAKIEALLKPLGVHEVELSGPGKRGGKNTPHFDARTALARWAGVDLTRINGLSVTTVMTILSEIGPDLSRFASVKHFCSWLGLCPGTKISGGKVLSARTRRSTNRVRQALKLAAMSLSRNDSALGAFYRRLCARMDKPRANTAVAHKLARMVYFMLTRGEAFVDEGQQRYEEQQRQRNIAALRRRASALGFEITPAGQVA

SEQ ID NO: 506929 - protein, 412 aa, unidentified
MEVLYPHCAGLDVHKDTVVACVRHMATGSVEREVRTFKTTTKDLLALSDWLAEHGCTHVAMEATGVYWKPVWHILSDGDFVLVLANAAHVKNVPGRKTDVNDATWLADLLAHGLIRGSFVPDEQTQEMRNLLRTRKQLVRECSRHIQRLQKTLEDANIKLDSVISDIMGLSGRAMIEALIAGESDPERLAQLAHRRIKAPPEALCEALRGRVTRHHRFLLRLHLKQIDAVNLAIDDIDQEVDAQIEPFRTAIQLLITIPGVSELSACVILAEIGHDMNRFPTAAYLISWAGLCPKNDESAGKRRSTRMRKGAPWLKTTLVQCARAAARKKASYFQAQYHRLRARRGDKKAIGAVAASILTTAYHMLKYGTLYEDLGPDYFDKRGKGKHVHRLINRLQNLGFAVQITPVEAAA

SEQ ID NO: 506930 - protein, 354 aa, unidentified
MSQQLSTTIAVIGVDIGKNSFHVVGLDQRGAIVLRQKWSRGQVESRFANMPPCLIGMEACVGAHHLSRKLKGLGHDARLMPAKYVRPYSKGQKNDFRDAEAIAEAVQRPTMKFVATKTADQLDLQALHRVRERLVSQRTGIINQIRAFLLERGIAVRQGQRFLRAELPRILAAPPDVLSPRMVHVIEDLAGDWRRLDERIEGLSGEIEAIARRDAGCERLMSVPGIGPIISSAMVAAIGNGDAFAKGRDFAAWLGLVPKQISTGDRTILGKISKRGNRYLRVLFVQAAWVVLIKPKSWERHGLKPWLEAAKKRLDHNVLAIALANKLARIAWSVLARGRSFEARMTNEANAQPA

SEQ ID NO: 506931 - protein, 335 aa, unidentified
MQVTTIGLDLGKRLFQVHGVDAAGTVMLRRQLKRRQVEPFFAKLPRCLIVEACGTAYHWARRLGELGHEVRLIPPAYAKAYVRRNKTDPADAAAICEAVSRPSMRFVPIKSEAEQAIAAVHRVRDRLIGQRTMLLNALRGHLAEFGVVVSRGPAHVKELIEMLAEPGSVPEILRSVLLGLASVLARLERQIVLVDKQLMRWHRDNARSRRLATIPGLGPIISTAMAARVLQPQRFRRGRDFSAWLGLVPKQSSSGGQIRLGAISKQGDGYLRRLLINGAQAVLGSKRAKTDPWLKRLLDTKPRLVAAVALANKMARIIWAVMVRQTGFREAVATV

SEQ ID NO: 506932 - protein, 382 aa, unidentified
MTGTEPHAWGAGLMDDITFVGLDVHKATVCIAVAEGGRGGEVRQLGVFENRSEILSKVASRLSKGGRRLSFCYEAGPCGYGLHRLLTGYGHECVVVAPSLIPMKAGDRVKTDRRDALMLAKLHRAGELTAIWIPDAAHEAMRDLVRARATSVRVLAKARQHLQGFLLRHERIYCGARAWTLAYRRWLTTVRFEHPAQQIVLQDYIHAIQEAETRRDRLTQQIEELLPNWSMAPVVAALQSMRGVALVVAVTVVAEVGDFRRFANPRQLMAYLGLVPSEHSSGSSVRRGGITKAGNALARRVLIEGAWTYRMSARVSRKLHDRLEGLPAAVRDIAWKAQLRLCARYRRLAATGSPKVVVTTAIAREMVGFIWAIARLAQPAPV

SEQ ID NO: 506933 - protein, 337 aa, unidentified
MEHFAGLDISMKETHICVMDRDGKVVLEAKAVTSTAAIAAELAKAPAVQRIVFETGRMATTLYHGLNALSLPVVCIESRHAHQALKSLATHKTDRNDARGLAHLARTGFYKPVHVKSLPAHAVRALIIARKKLVGQRVTLENQIRGLALVFGIRLPRGLSPAFARQVNTTSGELAALSGALRGLLAARNALLAAIATINRDIKRLAHSLEACQRLMTIPGVGHLTALAFVAAIDGPDRFRRSRDVGPYLGLVPRRWKSGEIDYTGSISKVGDRRVRTLLYEAANVMLTRYRGNLALKDWALRVGRRSTMRKARVALARRLAIIMHAMLRDGTEFQVA

SEQ ID NO: 506934 - protein, 410 aa, unidentified
MDVMTERCAGLDVHKKTVVACVRTPGREVAGRHKAVRTFATTLAGLEALREWLRGNGVTHVAMESTGVYWRPVYVVLEDDFELLLVNARHIKHVPGRKTDVRDCEWVARLLECGLLRGSFVPPPEIRDLRDLTRLRKSLIGERSRQINRVAKTLEMANIKLGSVVTDIMGKTGRGILDALAAGVEAPEALARLAQGSLKKKRKELAEATAGRMTEHYRFMLGRHLRLIDELSQHIDELDARIEERTRPFSRAVDIIESMPGIAQRAAQTILAEIGPDMTCFPTAGHLASWARVCPGNHESAGKRKSVSTGKGNAWLRATLGQVAWSAARTRGSYYSALYHRHKARGGPRKAISVVQHAILVALWHMLSTGASHEDLGDDFFLRRDKERRRRYHMRQLHKLGYTVEAAAAA

SEQ ID NO: 506935 - protein, 341 aa, unidentified
MSKLPNCEQWTVFCGIDVSAATLDVALIEGDQPLQQRQFSNRASGHKALLGWLGKRHARVRVSLEATGIYSLDLALALDAAPGIEAAVLNPKMVHRFAQTLRRSKTDAADARVLAEYSQRMPFVAWTPPSLEGLRLRALGRHIAALTAQHAREQNRLHAAQSSHAVPGCVVQDLKRSLISVERRLVKMRREAMALVRSDGQVERRFRLLTGIPGIAELSALALLGELALLAPHLTARQWVAHSGLDPVHQQSGTSVHKRSRISRTGNRYLRRALYMPALSAVRWDPHMKGFYEALQQRHKTKLQAIVAVARKMLHAIYGIFKNGTEYDGAKLFPALGIAID

SEQ ID NO: 506936 - protein, 267 aa, unidentified
METYAGIDLHSSNNFIGVIDEQDKILYGKRHSNQLDDVLRALDPFQDSLKGVVVESTFNWYWLVDGLQEHGYRVHLANPSAIQQYEGLKHTDDKWDSYWLAHMYRLGILPEGYIYPKEHRAVRDLLRRRLLFVQQRTSHILSLQSMISRNLGFKMSNNEIKKLRPEDSAGLFGCPNLAFMAHNSLAAINFLKKIILDIEKNVKSQVKMRKEFLMLQTIPGIGNILGLTIMLEVGNIARVPKVGNYSSFCRCVESKRISNGKIKGENN

SEQ ID NO: 506937 - protein, 416 aa, unidentified
MKPWNEITHYAGLDWARDHHDIIIVDQQGQIVADWRIPHSLEGWRDFGAKIKSYPAVAVALETSQGAVVDQLLQLACTVYPVNPHSAKSYRERKAPSGNKTDRLDAWALADALRLEGQQWRVLQPLDPLTQQIQLLCRDEISLIEQRTALVNQLQQALTEYFPAALEAFEDWTKPFCWEFIIRFPTPDQLAQGGRRRWENFLHTQKLWRPDTAAKRLEIFGRARQFCGSPAVTAAKSLLAVSLARTLRTVQEQLDQYRQQIQALFDRHPDRDLFGSLPGAAQTLAPRLLGEIGGDPKRFEDTSHLQCVAGTAPVSFQSGQIHRVRVRYQCNKVLRHTIHLWAQCAQRRCPWAEVYYRQKRAEGKSHACALRCLGQRLLKIIWRMVQTRRPYDADLHAKNQQAHGSWILKLMPKTST

SEQ ID NO: 506938 - protein, 343 aa, unidentified
MKIYALGIDLGKTVFHLVGLDSSGQVVVRKRCSRTQLLAFTANLQVQLIGMEACSGAHFLGKALRAQGHDVRLMPAQYVKPYVKTNKSDYIDAEAIAEAVQRPRMRFVPIKTEEQLDLQALHRVRERWVMRRTAVVNQIRSLLLERGLTLPKGRSHLGQMLPRILEDAELKLSGAFRVLLAQLKLELEQLAARIEQMDMVIQQEARENESCQRLTTIPGVGPVTATALIAAVGNGSAFGKGRDLSAWMGIVPGEYSTGGKQKLLGISKRGNKYLRRLLVQGARSVLQHRDKQAPGLSCWLAQLLERTHQNVVVVALANKLVRIAWAVLSKNENYRAPVLAGTT

SEQ ID NO: 506939 - protein, 347 aa, unidentified
MDVHKETISIAVMNGEGKLVMESIIETKAITILQFIQGLRGDLHVTLEEGTWAAWLYDLLKPQVTKLVVCDPRKNALMKEGNKSDKIDARKLADLLRGGYLRSVYHGENGLRTVKELARSYLTISKDLSRVMNRVKALYRSWGILCGGQQVYAPRHRSEWLNKIGEAGVRRRAEFFYQQLDALRALRQAVRRDLLAESRKHGATKLLRQIPYIGPIRAALLIALIQTPYRFRTKRQLWTYSGLAIETRDSAQHRYVAGQLRRSKKPQQVRGLNQNHNHDMKAIFKSAATMASSREGPFNDFYQGLLTKGMKPAMARLTLARKIAAITLIVWKKGAHFDAEQLKPQAA

SEQ ID NO: 506940 - protein, 345 aa, unidentified
MLADQLDYIIGVDPHRDSHSVAVVHVHSGAVVFESTVIANSDGYAQALKLVDRHAPGRRAFAVEGTGSFGAGLTRFLTGRGERVLEVGRLRRERRSGGKTDALDAVRAARSALSQQQPSTPRAGGERQALQALVAAREGAVNAKRAGLCQLRDLLITTPEPLRSELRPLTRARLLQRLAATRPHGRQDRELRGSLLALRSIARRVLQLTAEERELAREIETLTRKLAPQLLDQPGVGPHAAAQLVLSWSHRGRITSEAAFARLAGAAPIPASSGQTIRYRLDRSGDRKLNRALHMILLTRKRSHPATIAYIQRRIQEGKTRREANRCLKRYLARSLYRLLEHGRH

SEQ ID NO: 506941 - protein, 320 aa, unidentified
MQVIPMCIGVDVSKAELVVAVAGTRPVIMRNEAAEIDAWLPTVPSDALIAMEATGRYHGLLARQAVKAGLKVYVLNARDVFFYAKGLGARAKTDGCDAAIISRYLAEHHAHLHAWRIGQPKQEMLQELLSRRAKAAEHCSALKQTFEGVAVDGLALNSLNAAFRALLQSIDKQVQQLIESDERMSKGYRSLLTITGIGPQTGALLAALLSRLQFANADALVAYSGLDPRPNDSGTKHGRRRLSKKGPALLRRQIYMVGFAASHSNALKPRYQALRARGFASTEAILILGRKLLRVAWAIWNSGQDFDPALLGHPVACGKT

SEQ ID NO: 506942 - protein, 320 aa, unidentified
MQNVTLIGIDLGKHSFRVHCQDRAGKALLHKKLSRTKLMVFLAGAPSATVVMEACAGAHFMARRIAAFGHDTKLISPQFVRPFVKSNKNDFVDAEAICEAASRPSMRFVQPRTEAQQAMRALHRIRESLVRDRVKTTNQMHAFLLEFGISMPVGIAVVRRLSKVLAENKLPAYLARLLMRLHTHYLYLTEQIAELETELEQELSHDETGQRLQTIPGVGPITASVLSSQLGDGKQYGSSRDFAASTGLVPRQYSTGGRNTFLGISKRGDKNLRRLLVQCARVFIQRIEHQSGSLAEWVKLSLSESTRMLWPVPWLTKWPE

SEQ ID NO: 506943 - protein, 370 aa, unidentified
MLDTTTFIGLDVHARSIKAVSLDVMTGEVRAATFGYDAGAVAEWVRSVDPRARCVYESGVTGFDLQKRLSGLGVDCAVGAVSKMIKPSADRRRKNDRNDAEFLARMLSVGNVVEVWVPDDECEAARDLTRALEDARDDLSRSKQRLSKFLLRHGLVFDERTPTGRRKGNWTRAHWSWIESIRFAEGADNDVLAYYVDAVRRAAEEKARLEGLVEAEARKPRWRKRVDSLRCLKGVDTATAADLVFEAGEFSRFRNARSFAAWVGLTPSEHSSGESDRRGAITKAGNKHLRKTLVEAAWHYLTCSGRPKGLAKGQAPDRVARRHAAKGVRRLVERREALLARGVHGNKANVATARELACWVWAVGLMAEEA

SEQ ID NO: 506944 - protein, 419 aa, unidentified
MSFKILKNNCCGLDVHKTWIYACIGITDSNGRTEYKQARFSSFTKGLQELCDWLVKYNCNDVCMESTGKYWIPVFNILEKNNLWVTLSHPKYTKPQKGNKTDRKDAKWICDLYMCGMVKPSFIPPADIRQLRDLVRYRFKLTCMITGEKNRAQNCLTVSNFKLDDVFSDVFGKSSRFITEQILQHPGETFDVAPFVDGRCKTPIEEIQAAVDGAISMEQAVKLRQCLNHIDELEKHQAEIEREIFRLSDKYESILNLIRTVPGFDKNPLTAIQVLSEIGGDMSVFPTAKNLISWAGCCPRNDQSNHKIKSTRISRAGSYFKPVLVQVANALIKSKKHPEFTTRYRRIKARRGHKKAIIAICRMILTAIWHILTDLKPYTPEGFLESRPVNASKVLTTSQALNLLKQRGYVIKDDTVSVT

SEQ ID NO: 506945 - protein, 345 aa, unidentified
MHCVGVDYHKKSSYVTVMDERGKVVKEAQIANTQEALAAFLDGRAKGASAVLEAGRNWPVMYDWLEELVDEVTLAHPAKVRVIAEAKVKTDRIDSRMLAHLLRADLIPAAYVPGAVTREQRRRLRQRMFLVRLSTMVKNRVHTLVDRHPELSRQAGGWSDLFGKAGRAWLEQVDLPEGEAELLRTDLELLGAIQEHIKRSNRWVSQLARKDARAKLLATLPGIGDFFGVLLAVEIDDVRRFSRPQKLAAYAGLVPSTYASGGYVHHGRITKRGNKWIRWACIEAAYPAIKQDPELAALYQRLKVAKGANVAKVAVAKRLLIIAYRVLKESRAYRPADEQAALRRR

SEQ ID NO: 506946 - protein, 378 aa, unidentified
MTSLETALQDKDTTSQSDLHVSFELGDRSWKLSCSDGIRSPSRYSVNAGDQAAVLDCMDKARARCGLDPRAKAHSCYEAGRDGWWLHRWLREQGIDNIVVDSSSIEVNRRAKRAKTDRLDADKLLALLLRYHRGERRVWSVVHEPTAQEEDARRTHREIARLVHERIAHTNRIGSLLVMHNLRPGRIGGRTWQGWWDAHCMQVPPLLRAEIEREYARLVLAKQQLNALETERRHEVAEGAHPVVAQLAKLRAIGPRGAWILDKELFGWRRFANRRELAGCLGLAPTPYASGTCEGEQGISKAGNKRARTLLVELAWRWLKFQPDSALSQWFRQRFGITGKRSRCIGIVALARRLAIALWRYVEHGEIPAGATLKTVDA

SEQ ID NO: 506947 - protein, 333 aa, unidentified
MLYVGVDAHKATSQITVVNETGSILKRAKVASTSSAFQQALSEYDEPLSAVLEASYCWGPIYDWLDELTEEVVLAHPSKVRAIAEARIKTDKIDSAILAHLLRADLIPKAYAPSKETRALKRVLRQRLFLVQLSTMVKNRIRALLSQHEVQTPQVSDLFGKVGMTWLETVKLTQPDGTLLHEDRELLLFLKARVNATEKLIQELAKNDVAVPWLKSLPGIGTFLSVLIRWEVDDISRFPTAKQFASYTGLVPSTYASSKRVVHGGLTKQGNKWLRWAFIEAVTPAVRSSPTLACFYQKLKQRRGVKDARAATARKLAELTWTIWNEQRCYIER

SEQ ID NO: 506948 - protein, 326 aa, unidentified
MQGKEASEQETELKSSVGIDVSKHWLDIHVLPSNERLRVCNNCHGIRQLKRWVKRFDPTLVAVEATGKWHRDVQRSLAASGIPVALVDPFRVRMFAKADGILAKTDRLDAKVLASFAAVMTPPVRPPAPQVLAELAELMAARMSAVKIQTMLKNERSAATFKVVQRHLDRRIERGDKEIAALDAAMLERIQADEGLARRYAILTSIPSFGFVTAAVLIACLAELGSICAKTSAMLAGLAPIADQSGTRDGVRVIFGGRARVRRALYLAALSAVRFNADMRAFYRRLRASGKPPKVALIAVARKLVVLANALIGENRLWRPKTQIYA

SEQ ID NO: 506949 - protein, 346 aa, unidentified
MAIAVLGIDLGKNSCSVAGLDGTGRVVLRRRLTRESVVRLAGTLPACVMAMEACCGAHHLGRVLREQGHDVRLMSPEYVQPYVKAQKNDERDAEAIAEAATRPTMRFVELKSEAQLDAQILHRARSRLVGQRTALINQLRAVLLERGIVVAKGRRRLEEYLIGLLDEEGDRPATLSPRTCLLIEDMRLEWSELDRRIAALTAEFVARAREDQAARRLATIPGFGALNATALVAAIGTGETFRRARDLAAWLGLVPRQATTGGKPRLLGITKRGNTYLRTLLIHGARAALPSLSASQSPIGEWLRGLIGRAHKNKVIVALAGKLARIAWAVLRSGESYVKEGQPVAA

SEQ ID NO: 506950 - protein, 325 aa, unidentified
MLEICTRYVGVLPFFLIETSCTYALASTIQMKKIFIGIDFSKEKFDATLIKAEGLKECAPSVHEVFDNKTSGYRRLVKWVKAHTEGFAADAWLFCGENTGGYSIGLSNYLYASGYDMWLECAYKIKHSAGIQRVKSDKADSRAIAEYAMRNYDKMTLHKPQSASLTCLREVFLYRHSLVRQKVALTVRRDEKRLTQEKSDARAFMSFTSKHLITEVNKAIAKCDEKIKESIASDDELREVFDIITSMPGIGIQNATCLMVYTDNFQKFDLDSRKIACYYGIAPFGRQSGTSVNSRPQVSPFANRMIKSLLSQDALAAIPLDMTST

SEQ ID NO: 506951 - protein, 339 aa, unidentified
MSSVQLFVGLDYHQDSVQVCVLDQQGAVRLNRPVANDWRKIRDAVDAAATPLNGRVCRVGVEACCGSADLAQELVENAGWDVSLGHPAYVAKLRGSPDKSDFSDGRLVADLVRVSYLPAVWLPPRQVRQLRQLVNYRRRLVDQRRTAKLQVGAVLREQRVKFPKELAKSRWSKGWVTFARRSDQLDEQARWVVEQTLEEVAHLDKRVAAADARLREATKDDAVVAKLMDQEGIGEVTAWVLRAYVGTFGRFKSGKQLARYCGLSPRNASSAARVADAGLVDGCNKLLRATVVQAAHRLIRTSQRWSKLAESLRARGKNGCVAVAAVGNRWLRNLHHAMK

SEQ ID NO: 506952 - protein, 319 aa, unidentified
MFNLGIDVAKAKLDCALRLPNGKHRNKVVENNHKGFAVLKEWLLKHDAGNPRVCMEATGTYWEAVAEYLVGLGMVVSVINPAQIKAFGASRLVRTKTDKVDAQLIADFSHERQPEPWIAPSPAAQALRAMVLRLEALQAMRLQETNRLDVAREAVRQGIEDHIAWLDKQIKELILAIKRHIDDDPDLHDKRELLDSIPGLGERTIPVLLSYYADTERFDNAKQAVAFAGLDPRQHESGSSVRGKPRMSKIGHSFLRKALYMPAMVAVHRTEWGKRFGQRLTAAGKAPKLIIGAMMRKLVHVAFGVLRSGKIFDPTLHNA

SEQ ID NO: 506953 - protein, 374 aa, unidentified
MEEYDVYVGLDVHKDTITVAAAFPGRSKAEPRGMMANDKKSLRRLVKRMRTYGDRLLFCYEAGPCGYGIYRWIKEWDHDCQVVAPSLIPRKPGQRVKTDRRDAGILAELLRNGDLTAVWVPDEEQEAIRDLTRAREEMKKIERQLKQKLSAFLLRHDKKYREGKSKWTQRYYRWLSEVKLVSRVEQIVFEEYVDAVKQAELRVASLEEEMRNALTSWSLSPVVESLMSLRGVNLLTAMSVMAELGDISRFDSPRELMSFVGLVPSEHSSGQRRHLGAITKTGNSRVRRLLVESAWSYRFPARRSLHLQKKAEKATEEAKAIAWKAQKRLCRRYRVLLDAGKIQKVATTAIARELIGFIWAIVCEVKGKAMDIAA

SEQ ID NO: 506954 - protein, 310 aa, unidentified
MEITVGIDVSKARLDVHVHPLGESFAVANDEAGVEALAGQLGQLEGLVSIGLEASGRYERLALANLAAAGLPVIVLNPAQVRNYAAALGQKAKTDPIDARVIALFLAAVQPELRPLPDAQTAELEALMTRRRQLVGMLVAERARRAAARPGRVRTSLARVVTTLEQELRDLDGDIDTTVRGTPVWRDKEDLLASVPGIGKTIARTLLAELPELGRLNPKQIAALAGLAPFTRQSGKWRGKSFISGGRAAVRAALFMGALVASRFNPTLKAFRDRLVAAGKPKLVAIIATARKLLTILNAIIRDRKPWKPA

SEQ ID NO: 506955 - protein, 339 aa, unidentified
MELYSGLDLHSTNTYIGILNADLKHVFKKRVSNNLDLIVETLQPFKDQLKGLVVESTYNWYWLVDGLMDAGYGCVHLANPSAIRQYEGLKHSDDKHDAFFLARLLILGILPQGYIYPKEGRPVRDLARKRMFLVKHKTAHILSLQSLITRCSGKRVSSNQIRKFTSADLEQLLKEKHLVLSAQANLDSISFLKQQIHRLEKVIKDKIKLSQAFNGLLTVPGIGNILAMTIMLEVGDIGRFAKVGNFTSYCRCAPTQRLSDGKSKGSGNRKNGNRYLSWAFSEAAQMARRYNQRFRRYYDRKAAQTNTIVATRALSNKLARVCYYIMRDQVGFNEELILH

SEQ ID NO: 506956 - protein, 394 aa, unidentified
MLAGIDTHKDTLAVAVIDDTGRPAVVTELPNTEAGFDTLEKLLLEQGVTRAGIEGSGNYGRGAALRLVLTGDLQVVEVPPSLTSRERSARPGQGKTDPVDAVAIARITAREPGLPPVRLPVGQAADLRALCDYRAQLIFERTAQANRTHAELHGLLPGYHAQIPRLTAPTFIAAAAQLLAGQDSVRAQLTRRRLNRLAELTAEIKEVTGLITTAVEQADTTLTGLYGVGPVNAATILGEVVDIRRYRSRHAFAAANGTAPIPASSGRTSRHRLNRSGNRTLNRVLYTMAITQIRADTEGRAYYQRKRAEGKSNREALRCLKRRLSDLVYKTMQHDLAGQGGECGSGKRDTSLRPQPAARQACSPEPALRSGQSTAPTASRNATPRAAALARVDT

SEQ ID NO: 506957 - protein, 442 aa, unidentified
MQFSNLQMKRHFIAGKIIVGIDPSKEKSDAAVIDQYGLLQGKTFTFQNNHEGFQKQLFNCLNERIVNLSKENTIFAIEAACNLWQKLADYLISQGYTVVIINPLSTYKARSLINHSFSKTDAKDALVVANAAREGYFDFYRIHSDTTKAMHDLAVTYDKLKRSLTQTKLRLRALVELTFPELPKIVKLSTNTALFLLEHYITPQEFLDANVFEAVRGMEKVSRKKKGPKEFKKLQEAAKTSIGLDLDEEQVKAAHIARDAWIAMIKLLLRQINKVQKQIISKTKQRPYFDILTSIKGISDISAALFIAEVRDLYNFQHYKQIEAFAGIGLKNCDSGKYKGYRHISRIGNNRLRSIVYRMTTETKNHIPEIRIRFLNRKMIHDRYRKNIIACSSNLLKLIMALVQENRPYEFREEKVKELQELEIKIEQMKEKKIKRSYKKAS

SEQ ID NO: 506958 - protein, 348 aa, unidentified
MSITMIGLDTAKSVFQIHAVDAAGKPQLKRKLRREEVIPFFEQQERCTVVLEACGAGHHWARILTELGHEAKLLAPEAARPFVKKGKKNDAADAAALCPAASRPEATFVPVKSPEQQGVLALHSVRTLLVKQQTMLANAMRGLATEFGLVVAKGIHKLDELEAQVQAEASMPATAKQAFAELHGQSQAAATRIAGLEVQIVAHARQDATARRLATIPGIGPITASLITATVGDSIGSFKSARHFAAWLGLVPRQHSTGGKTRLGRITKAGNSEIRRLLVLGATSMVFRAGQWNSAAGAWLRGVLERRPVRLATVALANKMARIAWAVMTRGETYQAKGRAPAAAAAVA

SEQ ID NO: 506959 - protein, 402 aa, unidentified
MNSVGIDISKGRSTVAVMRPFGEVVISPFEVRHTDSELSELARRLKSLNGETRVVMEATGNYHAPVAKLLHDAGLYVSVVNAKLVHGYGNNDLRRVKTDKKDAVKLANYGLDRWLTLPRYVPEEDTRLLLKNCYRQYRQYSKVQTVLKNNLISLLDTVFPNVNRLFSSPIRGDGSEKWVDFVAEFWHCRCISGKSERAFTNKYQQWCRKHGYNFSEAKAHTIHAEASGHIGVMSKSETTKLLVEQAVAQLRATSAALTALKREMLTLAVQLPEYPVVMGMFGVGPTLGPQLIAEIGDVRRFYSKKALVAYTGLDALPNDSGDVTGKHKSMSKIGASSLRRTLFLVMSVYWQNAPLDEPVYQFMDRKRAEGKPYRVYMMASANKFLRIYYATVKAYLESLEQV

SEQ ID NO: 506960 - protein, 374 aa, unidentified
MGRWLMEWTAPYGISCARMRLLQSQTWEPSVKQIIRIGMDTSKHIFQLHGVDAAEQVVLRKRLGRKQMVEFFAKLPPTVIGMEACGASHYWARVLEQFGHEVRLIAPQHVKPYVLRNKNDGRDAEGVCEAMSRPRMRFVPVKRAEQQAALMLAGVREQMVARRTQLSNTIRGYAAEFGITAAKGLDKIGPLLAQIAQDESVPTIARDLFALQGRAYAQLQVELKAIEARLRAWHRSNADSRRLAKIPGVGPIGATALVMKTPDPHAFPSGRHFAAWLGLTPKDHSTAGKTRLGKITRAGDERLRSVLVAGATAVIQQAKHGRGHPSPWVVALLKRKPPKLAAVALANKIARIAWKLMATGESYDGARMLGALTA

SEQ ID NO: 506961 - protein, 346 aa, unidentified
MGMDISVLGVDLGKNVCSVVGLDASGAVVMRRKVRRETLIALAEKLPACVVGMEACCGAHHLGRVFAAHGHDVRLMSPEYVRPYVKAQKNDDRDAEGIAEAATRPTMRFVELKSDDQLDMQTLHRSRDRLVAERTALINQLRAILLERGMVAPQGKRKLEQFLSVLMDEQGGAGLSQRMIVLVADARAQWAELDRRIAAFDAEFVRWVKDNEEACRLTTIPGIGAIVASALIAAVGQAESFDRGRDLAAWLGLVPRQFTTGGRPKLLGISKRGNKYLRRQLIHGARAALPYVVKRDTPLGRWAKDLSSRAHRNVAVVAFANKLARIAWAVLRRQERFAATGMPMAA

SEQ ID NO: 506962 - protein, 343 aa, unidentified
MELHAIGIDLGKTVFHLVGLDSSGKVIVRKRCSRTQLLAYTANVCVQVIGMEACSGSHFLGRALRAQGHDVRLMPAQYVKPYVKTNKSDYIDAEAIAEAVQRPTMRFVPIKTEEHLDLQAVHRVRERWVMRRTAVVNQIRGLLLERGLTLPKGRSHVDHALPEILTDPTLRLSGSFRVLLGQLQLELEQLTARIEQMDAVIQQTARENEACQRLTAIPGVGPVTATALVAAIGTGAGFRRGKDLAAWVGMVPREYSTGGKQKLLGISKRGNSYLRRLFVQGARVVMQYRTKQAQGLSVWLSQLMARTHQNVAVVALANKLIRMAWAVLCKNERYRVPLLATAP

SEQ ID NO: 506963 - protein, 360 aa, unidentified
MLAELIDAVVGVDTHRDTHEVELALPTGTAIGIRKISNDNSGFAELLAWILDHSPGPRVVVSIEGTRSFGVGLARAVAAAGLTVIECEQPNRKARRGKGKSDPIDAHLAVLAALRLDADRLPVPRADGDREALRILLGTRHELTVVTTAQTNRLRALLLGGKDSERDLARATLTDPVLLAMVRRREPPQASREQAVRHGEIRRLAHAIRAGRHALAANRAQLQAIVDQIAPELTERRGIGAVTAAQAIVSFSHPGRCRSDAAFAALSGTSPLQASSGKTVRHRLNRGGDRALNSAIHTIAVTRMRCCPTTKNYVARRTAEGKSSREIQRCLKRYIARQLYRALNASTTLTAQISAAPTTA

SEQ ID NO: 506964 - protein, 351 aa, unidentified
MDHIGIDVHKRESQICILAEGGELIERRIRTEPERFGAVLGGRPPARILIEASTDSEWVARCLEALGHEVIVADPNFAPMYATRTRKVKTDRRDARALAEACVLGAYRRAHRLSDIQRHVRGRLLVRDAVVRTRTRYISLIRALLRQQGYRVPSGGAEAFVTRVRALALPGPLLSLIAPLLAVMRHLNRQLVYSDETIERVATHDERVQRLRSVPSIGPVTAAAFVATIDDVQRFSHAHQLEAYLGLVPREYSSGDTQRRGPITKAGSSRTRWLLIQAAVSILRRRPPEAEALRAWALGIAARRGKHVAVVALARRLAGILYALLRDGTVFTPRRTSPPVATATRPVSANV

SEQ ID NO: 506965 - protein, 427 aa, unidentified
MPISGLGPYMGKRKNRVCGADVHKDIIVATIQDSDDTEFQEKFGTTSIELGRFRDWLIAHNCEQVAFEATGVYWFPVYDALSPSIDTIVANPWMIKGIPRNKSDTLDSKWIAGNCLDGKIKRSRVLPKDGRDLRTLTRARSAYTKTRTQLRNRIHKYLALCGITLSSYISDIFGKSGRHILDGLIESKDIDTIMDGIPSGKVKNKREPIKASLGNGLDDVSRMLIKDTLELLDHLDEKVSDTSLEILGRLQERARDLAIVMSVPGIGFVSASIILAEIGDYHDFQKSEQLVKWCGLAPGLNESAGKKSPCGITKQGSKHLRTILVEIAQVVAKMSKNNLSSFFHRLRARKNYNVAITALARKLISIIFHLLINQELYQEDNCDTVKTKPIKKDLLCLSKEEQFKDGVAAIVDAFYYFKKKSSLEGGG

SEQ ID NO: 506966 - protein, 474 aa, unidentified
MPTTGSQGLTRKQRRDLARRVEVRDPGLTIVHPNAAGIDVGNDTHYVAVRPDRDPDPVRRFECFTADLYRLADWMQQCGVTTVAMQSTGVYWIPLYEILDARGFEVYLVNARHTKNLPGRKTDVQESQWLLKLHTYGLLRNSFHPSADIRIVRTYWRQRGGHVQAASTCIQRMQKALTQMNVQLANVISDLSGWTGLRIIRAILAGERDPHALAALSHPGIHADRQTIAKSLEGTWQPDLLFVLQQEVTMYDAYLQRIAECDQVLEGHLQGFAPKMPTTTPSDASSTAPPVTRVKRRRKAGSHTPQFNLGHELHRISGVDLTRIDGIDVGVAQTVISEVGFDMSRWTTEHHFASWLGLCPDNRITGGKVIRKGTRHVVNRAATALRLAATTLLRSQSYLGAQYRRLRAKLGAPKAITAMAHKLARLVYRMLKWGHEYVDKGLQYYEERSRFQQIQSLKTRAAKLGLELVEPRTA

SEQ ID NO: 506967 - protein, 400 aa, unidentified
MDDIDDVGVFLGLDVGKSAHHGHGLTPAGKKVFDKQLPNSEPKLRAVFDKLTAKFGTVLVIVDQPASIGALPLTVARAAGCKVAYLPGLSMRRIADLYPGEAKTDAKDAAVIADAARTMPHTLRSLELTDEITAELTVLVGFDQDLAAEATRTSNRIRGLLTQFHPSLERVLGPRLDHSAVTWLLERYGSPASLRKAGRRRLVEVIRPKAPRMAARLIDEIFDALDEQTVVVPGTGTLDVVIPSLARSLAAVHEQRRALETQIGQLLEAHPLSAVLTSIPGVAVRTAATLLVTVGDGTSFPTAAHLASYAGLAPTTKSSGTSIHGEHAPRGGNRQLKRAMFLSAFAALHDPASRTYYDRCRARGKTHTQALLRLARQRINVLFAMLRDGTFYEPRTPRLA

SEQ ID NO: 506968 - protein, 421 aa, unidentified
MKVTYQTCCGVDVHKTFLVATIIKTTSGVEPSYEKKRFSTFNSDIRHFKQWLLDNNCLDVCMESTGKYWIPVFNLLEDRINVTIANPKWVTAVKGNKDDVKDSKWIGDLFRLGLVCGSFIPCKEIRIIREYTRYRFKLVSCKTSEKNRFQNAFTVCNVALDSVVSDMFGVSASAITDYLITTDEFDEEICKSFLKGTLKAKADTVVESIEGYQMTQDQKERMLLIRSHLEFVQMELNAIDAKLDDLVAPYEEAIALLCTIPGVDRASAVTIISEIGTDMSQFDSSKRLCSWAGLTPGSNASAGKKKSVRITRAGVYLKPALVQCAHAAVKSIDSPYYKSKYERLLKRRGKKRAIIAIARMILTAVYHMLSTGETWNPCDLFKIDMPQEMQDKQKAKAIKQALKFLMLEGVISQSDTLISSG

SEQ ID NO: 506969 - protein, 349 aa, unidentified
MFYSGIDLHKDMSFITTINEKGRIIAQQKLPNHTVHLLDYFNTIGHEHKAVVESTANWYWLSDLLNDHGIDLTLAHAKYLKAISYAKVKTDKVDSQTLANLLRMDLIPEAHQISQDLRPVRDLMRARLTLVKKHTSCLNSSHRLLGKYNLIMPTHSKPEVINSLKQKLGPEPQLQLTILEEQLKLIKTQIHDLEKRLHPMIPNRDIQRLLWIPGIGITLAFTIYLEVDGIDRFPSIKRFYSYCRLVPGASNSNRVNKHRSSKDGNKYLKMAFMEASVRATQHYKEIRSFYQSKARKKHKNIARALVAQEIAKIVYHVLKNRSDFDHTFKERDLSRHKTMKWPRLSSPDA

SEQ ID NO: 506970 - protein, 348 aa, unidentified
MVTIGIDPHKQTHTAVAVNALGVQIAQRQVAARRDGFGQLIEWARKLDSERVWVIEDVRHVSGSLERFLIDRGETIVRLPPRLMADSRQGVRERGKSDPIDALAIARAALREGVETLPTARLAGVELEIRQLALHRERLVGARTRLINELRWQLHDLWPDWEIPKRVLIQPGWQTKVTGRLSRAVKTVQVQIARDMITRVRELTRTITDLYEQLAGLVGQAAPQLLAERGVGVLIAAKLIGEIAGIQRFTSDAQLARLSGCAPIPVSSGRTDRHRLDPGGNRQLNHAFHMLAMTKWMTDPQTALYIAKQRHNGKTNKEAVRSLKRHLVRRVYHLLRDPNSVPVTVCLT

SEQ ID NO: 506971 - protein, 392 aa, unidentified
MHKPKQRKPLNDLSRSLTTLDANHTLIAVIEMGQKSWLVAGIVPGVERQPLKKLDTDEDALLKLLDRWRMEAEKAGHKIKRITVAFEAGRDGFWLARWLRARGIEAHVIHASSVAVSREHRRAKTDRLDTELLKRAFLGWLRGERDHCKTVAIPTIKDEDAKRPNRERDSLVGEQSRIVNRMKAALARLGIRDFNPKLKKAAERLSGLRTPEDQPIPPNTLAELYRDMERRRLVTNQIRQIEDARLERLKQAPKDGPNVMVRLLARVIGVGIETADMLVQEVLSRNLRDRRAVARYAGLTGSPDESGSKRREKGLARSGNARVRRGMIQLAWRFLNFQKDSALAKWFQARTANARGSRKKMIVALARKLLIALWHFVRDGVMPEGVILRPAQ

SEQ ID NO: 506972 - protein, 409 aa, unidentified
MNVSCGIDWAERHHDVAFVDDTGTQLAKARISDDAAGYHKLLDLLAEHGDSPENPIPIAVETSHGLLVAVLRTGSREVFAINPLAASRYRDRHGVSRKKSDPGDALVLANILRTDRHAHRPLPADSELAQAIAVLARAQQDAVWSRQQVANQVRSLLREYYPAALHAFQGKEGGLTRADARVILTLAPIPAKAARLSLAQIRAALKRSGRTRSFDTESERLRSVFRAEYAHHLPAVEDAFGQQLLALLKQLDATCQAADDLATATEAAFHQHADSEILLSFPGLGPQLAARVLAEIGDDRTRFADARALKSYAGSAPITRASGKKRFVGRRFVKNNRLMHAGFLWAFSALHASPGANAHYRRRREHGDWHNAAQRHLLNRFLGQLHHCLQTRQPFDEQRAFTPLLQASA

SEQ ID NO: 506973 - protein, 414 aa, unidentified
MYFIGIDIAKVFNVCCVVDDNEKIVIKPFPFNSTAIGFKKLINNIESLNCNKEEITIAMEATGLLFENLYRYLKNLNYNVVLLNPYQTAQYRNMLTMKYVKNDNIDSLIIALLIKSGRYSKGYVNEEQLSSLKVLFRHKENIKEKLKSIKRETSSLLVVVFPELEKVIRDPYNVTGLILLEKYPTAKHYEYATASRIVKLFRKVKGNNFTLDKAELLLSYSRDSIYSGVAKDARAFFIRSNIKLIKALQEQISQLEEEMVKLFNKTIDSSTITIEDEDYISSVLTNLRTIPGVSDKTLLAVLAECGNLDRFKDVKSLIGYLGLYPTMEQSGNTLKYGRLAKRGAKYAKKALYLASVAAVRHNSELKQIFRNALAKGRAKKEALIIIARKLAKIIWAIYNHNQPYTPSRVFVAHP

SEQ ID NO: 506974 - protein, 404 aa, unidentified
MIFVGIDWSEHHHDVCVVDEQGTQLVKVRVGEGVEGVARLHETIADHAAEPEEVIVGIEIDRGLLVGALVAAGYRVFAINPMSVDRYRDRRATSGAKSDPGDAKVLADLVRTDRHNHRPVAGDSELAESIKLIARTHQSFVWERQRHVNRLRSALREFYPHALQAFGTELASADAIAVLGVAPTPELGRRLSRSKIAAALARAGRQRNLEAKAEQIQRALRSEQLRASEGLERTYGVIVSSLVGLIDGLNGQIADLQEELEGSFEQHPSAEVLRSLPGLGIVLGARVLGEFGDDPTRYADARARRNYAGTSPITRASGTRRVVLARFARNERLFDACYLWAFSSLTKSPGARRYYDLQRARGKTHSQALRAVANRLVGILHGCLRHGTNYREDVAWSGREQLVA

SEQ ID NO: 506975 - protein, 339 aa, unidentified
MKTYAGIDLHSSNNYVGIIDEHDKRLYKKRLPNRMDDVLAALLPFKETLAGVVVESTYNWYWLVDGLKEEGYTVHLANTSAIKQYEGLKHTDDQTDAFFLPHLKRLGILKEGYIYPKQEREVRDLLRRRLLYVGHRTAHILSLQSMVSRNLGYKISNNEIKKLKVEDVKKLFESPNLVAMAENSVSTIVFLKEVIRRTEKAVKAQVKMRKEFEMLLTIPGIGIILGLTIMLEVGDIGRFHTAGNYSSYSRCVGSIKTSNGKKKGENNRKNGNKYLAWAYVEAANFARRYCPSAQRFYQRKMAEKNSIVATKALANKICRASYYMMRDHVPFDESNLFRS

SEQ ID NO: 506976 - protein, 330 aa, unidentified
MHPQGRESNQGQRPNAGIDVSKEHLDAYWNDQGLRLSNEALGWSELAAKFKASDVDLVVIEATGGYERGLVCALQQAGIEVARVNPRQARDFAKSMGMLAKTDQVDARCLRDFANVLARHQDRQKYVTAPLEAHREQLTSLMTRRRQLLEMRVAEGNRLEKASPQAARSIRAVIRTLDKQIGQIDKDVDWHIEKHFKDQRALLEAVKGVGAVTTMTLLAALPELGKLGRKAISKLVGVAPLANDSGKRQGPRRIWGGRGEVRAVLYMATLSAKRYNPAIASFYQRLLAAGKAKKVAIVACMRKLLTILNAMARDGAMWDPTKHTLPSVKP

SEQ ID NO: 506977 - protein, 341 aa, unidentified
MYPIKAVGIDLAKLVFSIHGVDEHSKCKLRKTVKRNNLLAEIAKLPPCIIAMEACSGAHYWAREFTKLGHDVRIMASKFVIPYRQNEKNDANDAEAICEAATRPKTRFVSIKSEEQQVVLCLHRIRQGLIKDRTARINRLRGLLAEFGLIMPKGRYPAQNTIGGILEDAENGLPMLARELLHDVWQSIRTLNEEILKYDRKLYALANQMKNAKRLMSIPGIGEITATAVVATVNDAKHFNTSRSFAAWIGLVPRQYTTGGVARLGRISKRGEKHIRTSLIHGARAVIANCKNKTDRTSLWVKELVERRGFKRATVALAAKNARLIWALLHSEKEYQVDYVK

SEQ ID NO: 506978 - protein, 378 aa, unidentified
MPSENTLHVAIELSASSWLVAVRPPGAEKSRLHRIEGGETTALLALIAELRSRASTKLGRGVDVACCFEAGRDGFWLHRLLTAHGIAAYVLEPTSILVNRRARRAKTDRLDAEGILRVLAAWLAGDRQVCSMVRVPTPEEEDAKRPHREREHLVQEKLRIENRIEALLFTQGIRRRPSLRSWERDVAELRTGDGRALPPLLEAELDRLWRRLVLILELIREVEAERAAALAAAADDRIVQKITALQRIRGIGTNFSTVLVREVLYRSFANRRQLASYVGIAPMPYQSGGMDRDRSISRAGNPRARTTLIQLAWLWLRYQPGSALATWFRERVGRVQGRTRRIAIVAMARRLLIALWRYVETGVLPEGVEIRAAADATA

SEQ ID NO: 506979 - protein, 352 aa, unidentified
MDMIAMDSHKRYSVAEVQTPEGRCLGEGPIEHRRGNIREFLRRYGPGSPVAVETVENWYWIVDEIEQAGMVPRLVHARKAKLMLGSINKTDKLDARGLNRLQQAGTLPTVWIPPAAVRDQRELPRTRMVFAAWRTSLKNRIHSVLDKYGLQDQFTGVSDIFGKRARPRLLDAVAQLPAHTACTTGLLLEQLQQVEQTLARIETRMAEIFEPTPTMQLLDSLPGVALVLSVVIGLEIGDIGRFRAAAALASYAGTVPRVHASGGKIRYGRTRSDVNHYLKWAYAEAGNSVAVNHKRCPYRHVSQLYRRVRTRRGHATAVGAVARHLAEATYWILRKNESYRERGLKSVSSQGV

SEQ ID NO: 506980 - protein, 394 aa, unidentified
MKLIGIDIGKNKHFFCVMDQQTGEIISQPVSFSNDKEGFDFLVQKIKSYPKDSILIGMEDTGHYHFALLKYLLDLQYTVALINPKTTDFNRKMQGGITKNDKLDTINICDVLDTPERKKQYRITKVNSFDLYEQKQLTRHHHSLKEEENVYKNRLQKCIDIVFPEFNKLFNSKYGTVYMNILKTFGSAENIANTDIRTIRKCFEIEGRGNRISLTPERLKGCAGSSIGISSSAEVIQIKHLTAQIELIEEQLTEIDKKIEEFSIQNNSPILSIPGISHFSGTSILAELGDISNYSKPSQIIKFAGVAPLHYESSQFNAQHTAITKKGSKYLRKTLYQIILPVIRHNPVFNKYYQLKISQGKGHRCAQGHCVRKLLRIIYHLLKTNQQFDPQLLR

SEQ ID NO: 506981 - protein, 279 aa, unidentified
MGGVDTHKDLHVAAVVDQNNKVLGTQYFSTTRQGYRQMLAWMTSFGTLKRIGVECTGTYGSGLLRYFQNAGLEVLEVTAPDRMERRKRGKSDTIDAECAAHAAFSGIRTVTPKTRDGMIESLRVLKTCRKTAISARRVALQIIHSNIISAPDELREQLRNMTRMQLIRPLGSWRPDASEYRNVTNVYRISLKSLARRYLELHDEIADLDVMIAAIVDELAPELIKRNAIGYESASQLLITAGDNPQRLRSESGFAALCGVSPVPVSSGKTNRYQLNRGA

SEQ ID NO: 506982 - protein, 339 aa, unidentified
MNEVTLIGIDLGKHSFHLHAQDATGRMVFRKKLSRQQLLRTLANVPSCRVVMEACAGPHWLARQLAGMGHEPRLISPQFVRPFVAGNKNDFGDAQAICEAACRPSMRFVSPRNEAQQTVSAMHRLRERLVRERTATVNQIHGFLLEFGISLPRGAALMSRLPTVLDHETLPPRLVALVVRLRAHVHYLEEQIRQVEQDLKASLREDDKSRRLLEIPGIGPITASALAVELGDARQFANARQFSASIGLVPRQYSTGGKPTLLGISKRGDRNLRRLLVQCARAVMQHTDSRTDAMSLWVKTLSTRRHSNVVACALANKLARIAWAVLARGTHYEARSLTT

SEQ ID NO: 506983 - protein, 349 aa, unidentified
MLYVGLDLSRKRLDWQALVAGGGRVGEGACPPDRDGLAHLVRGFDREYGRGPVLAAIESMTGARFVHDQLELAGWDVRIADAQRAKGLAPLACKTDRIDAWVLAELARRDLVPEIWLPDPEVRGERERARFRLQLVHKRTSLKNRVHAILFQHGLRAPVVDLFGVGGRRFLERCQLPEPWRASVAASLYLIDVLEEQIDAIERELRRLGAEHGYLQLLMSAPGIGWVLGYTIAAEIGKIERFSRPAKLVGYTGLCPRVRQSGEVDRRGALSKHGPPYLRWALIEAAHNAIRVHPPYRALAERQRARLGRQRGGSVAAITIARKLAEASWWMLTRNRPFAPAGARIPLTA

SEQ ID NO: 506984 - protein, 337 aa, unidentified
MKYCGIDLHSNNSVVSVVDEEDHVVAEKRLPNDLEKIIGLMKPWHAELAGVVVESTFNWYWLVDGLKDAGFTVHLAHTTAIKKYAGLKHSGDETDARFLAHLLRLGILPTGAILPPEHRAVRDLARKRMQLVHSRTTHILAVENITARQYGARMTSNQVKELTVEMVDEMPFPKDIGLAVKTNVAVITTLSAQIELLERRLLSDMKVRPDYALLTTAPGIGKVLATTILLETGPIERFAGAGNFASYARCVDSVHTSNGKKKGEGNTKNGNKYLAWAFVEAAVYAMRFNAEAKRFYERKKAKTNNVVAIKALAHKLARACFHMLKEGKPFDAARCFA

SEQ ID NO: 506985 - protein, 356 aa, unidentified
MSKGSTEERFIGVDFHKETSVVTRLRADGSRVGKTEYYASTREGLTRLRESCGAQDHVAVEATYHWALFADVFEDFEGELVLAHPYKNRLIAESRNKNDKVDSKVLADLLRTDFLARAWIAPKEVREARELLRYRASLVRIQTALKNRVRVLLAKAGVSVQATDLFSPKGLRELRALELGALRGLIVDNALGVAERLREQLAETEAEIRRRVAMSWEAQLVDTIKGIGPLGALTIVSEIGEIGRFSRAGKLVSYGGLAPITRASAGIVRHGGISKQGSPWLRWILVEAVEHAVQAYPALAALERRVAANQGNRKCAGRIAVARQLLVSIYHMLKHNQPFRPERIGKAVPHGPTKAE

SEQ ID NO: 506986 - protein, 360 aa, unidentified
MDRLPSPLETTVKHYAGIDASLGSCSLSVVGESGKIFREGKVASEPVVVIAWFLSLGVAVERIGLEAGPLSQWLYAALREAGLPVELIETRHVRAALATMYVKTDRKDARGIAELMRVGWFRPVHCKSLAAQEVRAILTSRKLVQKKLHDVAMHLRGILRNFGLKVGRATQSSFAGRIRELVAGHATLEEIAAALLSVHEALLREFAKLEKRVRAMARADKLVRRFMTTPGVGPIVGLTYAAAIDDPLRFASSKKVGAHFGMTPRKYQSGETDINGRISKVGDVSVRTALYEAAHIILTHPVKGSALKSWAMRLARRAGMKKAKVALARKLAVILHRMWIDGTDFDFARGAASAQPAKAA

SEQ ID NO: 506987 - protein, 326 aa, unidentified
MKKNYFGVDVGSKELVLAYFPSGSSGKVRTYKNTVTGIKKLLKLVGKFENAHIILEATGTYSKRLVYGCLQADVPLSMLTPSQGKSIGLVLGKSNKTDAEDARSLARYGEMANPSVYVHPSENEEHNRQIIKYISYLNKEKTRISNKLHALSFEQYPNAYVVKELEEELIKREQQIKEAMEELENLQGDELQEAIEKAETVVGIGRKTALCLILLTGGLRDFETPKQLANFLGICPALYESGSSVRKRANISKKGNKMIRSLLYMCARSATQHNPSCKALYDRLRKKGKAHKLAMVAVGHKLVRQIFAVVKNNVDFDKQYKNEKFA

SEQ ID NO: 506988 - protein, 422 aa, unidentified
MLEETQDNDQIIQRVAALDIGKAELTCCVRVPGQAGSGKRAQEVRTYKTMTRSLLVMVDRLAELGVTRVVMEATSDYWRGAFYLLEAHGFEVWLVNARDVKHLPGRPKTDTLDAVWLCKVAERQMLRPSFVPPGPIRQLRHVTRYRADLVAARTAEKQRVEKLLEDAQIKLSVVASDIFGVSGRAMLTALVAGERDPKRLAQLARARLRAKLSLLEEAFSGFFTDQHAFLLAKMLARVDALDADLAELDAKLAELIAPLAGAVERLDEIPGVGQTAAHLLIAELGADMTRFPTAGHLVSWAKFAPGVKESAGKPKGRGSTGHGNPYLARVLGEAAVAASKTDTFLGERYRRIARRRGAKKAIVAVGRSILVIVWHLLSDPEARFHDLGAGFYDTRIGPERAKRNHIRQLEALGYKVTLQPAA

SEQ ID NO: 506989 - protein, 354 aa, unidentified
MKYFVGMDVSLEETAICVVDETAQMIKEARTTSEPDALHALLASFNLPFERVGLEACSLTAWLHGELTSAGWPAICIESRHAKAAMGAMPNKTDRNDARAIAQIMRTGWFKAVHVKTPTCRSWRSLLVARRAVLNQMRTIENVVRAILRETGLKLGTPARKDFIVRAREFVAGEKGLAMMIDPLLEILATMLREFTRLTKQVLVIVRDEPVCRRLMSTPGVGPMTALAFRATIDQPERFKKSRDVGAHLGLTPRRYQSGETDIQGRISRCGDELARTALYEAAHSLLIRSKKWSALRAWGMKIAKRRGMARARVAVARKLATILHRMWVDNTEFRFGREQAANPTIKAITVVAA

SEQ ID NO: 506990 - protein, 344 aa, unidentified
MEYYAGLDVSLRSCALCIVDSKGKVWLERELPCEVADIAACLEAFDHPVERVGFEAGALSQHLYFGLQSLGFDIVCMEARQVNAALSAMRNKTDKTDAKGIAQILRTGWFSPVHMKSREAHGLRALLSTRKALLKKTIDLANEVRGLLKIFGVRLPRTVKHGSFDALVRPMIEMDEVLAHAVLPLLDARTVLFQNYLELDRRVKRAASQDAVCMRMMTVPGVGPIAALTFKAAIDDPNRFKKSRTVAAHFGLTPRRYQSGEHDNPGRISKAGDRDVRATLYAAANAMLMRTMAGSQIKSWGMRLMRTKGRRRAVVAVARKLAVLLHRMWADGTEFRQEQAGGTA

SEQ ID NO: 506991 - protein, 353 aa, unidentified
MITIGVDAHKRMHVALAVNDAGQELGQWRGANSAAGWRSVVQWADEMGCPRQWAIEGAWHYGRGLAQQLVAAGETVYEVSPRWTALGRRSARKPGKTDRLDARVVALLARQEASTLPLVVPEDESSVLALLTSEREAALGEAARLGNQIHALLMQLDPEYDGYLPNLRSKAGLDALESYASPNGCLLQEQRAAAVRRLAKRFRLALTQAKDLAGQIAAYAEARFSPLTRLCGVNLLTAGMLAGILGPGRRFSTDAELAAYAGVAPLETSSAGLTRHRLNRGGNRRLNAILYRIALTQAHYSPEAKAYLERRVSEGKTRREAIRALKRFIARAVWRLWQECETSSTRLPVEKVA

SEQ ID NO: 506992 - protein, 375 aa, unidentified
MGNHSEAFVAFDTSKLRNAVAIAEAGRAGEVRFFGEIENTGAATAKLVKKLAAQYQRLTFCYEAGPTGYEVYRQIKNLGHECVVVAPSLIPKRPGDRVKTNRRDALSLAKLLRAGELTAVWVPDRHHEAMRDLTRARETTMMDLRSKRQQVSAFLLRQGLHYSEGKKTWTKTHMNWLASQKLEYAEQRLVFEEMMLAMRQMRERLERLEQAIRIAVPDWSLAEVVTALMAMRGLDLISAATFLAEIGDLSRFQHPGELMGYLGLVPSENSTGDKIKRGSITKAGNRRARRMLVECSWSYQHPPRVGQEKQEKVAAAPRAVREIAWKAQCRLHGRYRALVRRGKLKTVAITAVARELAGFIWAVSREITTVRAASK

SEQ ID NO: 506993 - protein, 343 aa, unidentified
MQTITTVGLDIAKSVFQVHGVDAAGQVVVRRQLKRRYVLAFFQKLPPCLVGIEACASAHHWARELQVLGHTAKLMPPAYVKPYVKRHKNDAIDAEAICEAVTRANMRFVATKTPEQQSCLTLHRTRHLLMRQQTSVINAIRSHLAEFGIVAPVGRNGVEQLLGVVADPNDKRLPELARACVAALGAQLRVLKLQILEFDRMITAWHRSSEASKRLDQVPGVGPLLATALVASVAEPKAFRSGRDFSAWIGLVPKQNSSGGKERLGNISKRGDRYLRSLFTTGALAVIRYAKIHGTKHRPWLTALLARRPTKVAAIALANKLARMAWAMMARGERYKEPAALAA

SEQ ID NO: 506994 - protein, 429 aa, unidentified
MNDREIIRLEQFRQLKKEIRGSEEHLIVGIDVAKQKHNAFVGTATGKTLLKRLVFENNKEGFEKLLMHVESISASNSHKRVTFGIEPTANYHKPLAEFLINKEHDLVLVSGVAVKRNRELLDGRWDKNDMKDSANVADLISQGKCLFYEYPTHVLRDLRSFLSLKKKFKKIEHGFRVRIRNHLLAQYFPELDRYYGHNEPENLAIVRWCLSPSKIAEMKYEDFFRLVTTRDRGLTQHQRLKAIWDSAHYSIGCSTGMAAEFEAEVLVEALKRIRETIGSINEKVIEICVLFPEYQYLLSIPGFGPVISAIVIAAIGDPFRFESGNQVLKTAGWDLNANRSGKRSDSVIPVISKRGKSDLRYALYQAALIASTRNKYFTSWFIEKLKGREKEKGIKTKMRVKLAAKLLIIAWTLMKKKEPFNPELLKIKK

SEQ ID NO: 506995 - protein, 347 aa, unidentified
MLADQLDYIVGVDPHRDSHALAIVEVVSGVVVFESTVAANSDGYRRALEVAERHAPGRRAFAIEGTGSFGAGLTRFLTCRGERVLEVGRLRRERRSGGKTDALDAVRAARSVLTQQRPAIPRAGGERQALQALVAAREGAVNAKRAGLCQLRDLLITTPEPLRSELRPLTRARLLQRLAATRPHGRHDPELRGSMLALRSIARRVLQLTAEERELARQIETLTRGLAPQLLEQPGVGPHAAAQLVLSWSHHGRISSEAAFARLAGAAPIPASSGQTIRYRLDRSGDRKLNRALHMILVTRKRTHPATIAYIERRLQEGKTRREANRCLKRYLARNLYRLLEHPPITT

SEQ ID NO: 506996 - protein, 484 aa, unidentified
MKKKNIYVNQSQELLRLFEEAGNGSKVMCVPMDYAKKDHVVMLCDGNGHILRKPFPVKNSPEGIEYLIEQVTRSCQHRQIDPKHVFFGGEDVGSFAENFIHTLRSGGWIVAGVNAQDAKKQRANLQASTDRLDLMGIASMLLNRRANCSPAQSGIYRNLRTIVRHRRKLAAMSTEVKNRVHTFVDRLFPGFLDDTKSGIPPFSKSSLYLMENRFSPRQIRRRKRPKLIETLHRYGTEKPENAAAKLQEYAARVLLTPDEYIITLQISLAHHVKLFRCLQDSIHQLEHELAVWLAQTQGAFLTTMRGIGIVLAAGVCAEIGNPDAQKPVNNLVSYSGIIPKVKQTGGPEGKTHTGKVAKRCNRILKDYVVQSANQLGLHGPEDLMTDYKRREAAGQHADFGIGRRYLRTAMHLMRTSQVYLPQRLRNNADATPEERAGYYYLMTWPSLREKWNKADALEAAFEKDRPLERWRNMVQELYGIKLKL

SEQ ID NO: 506997 - protein, 358 aa, unidentified
MKYVGIDVHKKMCQVAVLDEEGKLLDEIRFANDPEEIEEFADKLTTFHDDVKAVVESTGNLWIQIHDRLEEHGFDVALSNPAKTRLIAEAKVKTDKVDARTLAALLRADMIPTCYVPGEELRSRRELLRHRMNLVKNRTMVKNRIHGLLDKHGLRMPGAYPFSGGNVDWLRGLSLGFMDDAILRSDLALLEALDDQVELIETKIAVIAVEERQVRLLMTMTGVGYFTAMLILSEVGDIGRFRSEKAFASWMGLAPVVRQSGERTWVGGVPRQSNGRLRAALVECAQAAVRFDPRFRGLHERVSRRRGSGCATVAVAHEMARIMYFMLSRGETYRDSDVGLVERKLKKMGRKALVGLRS

SEQ ID NO: 506998 - protein, 355 aa, unidentified
MTSVKYIGMDVHTESTSIAVRNSLGKIVMEGVIETKANTILQFLDGLRGDLRVVFEEGTWATWLYDLLKSHVTEVLVCNTRKNAVRKGSKSDRIDARKLAEQLYMNNVKSVYHGEHGLRMMKELARSYLTITKDLVRVMNRLKALYRSWGIPCAGTEVYAPRYRAEWLAKISEAGVRRRAEHYYQQLDALWPLRQEARRDLLVESRKHKIWKLLRRIPAIGPIRAAILIAVMQTPHRFRTKRHLWTYSGLGLETYDSAEYRAVRGQLERSRKQATVRGLNKDYNHDLKDIFKGAAMRASTAAGPLRDFYDNLLAKGRKPTMARLTLARKIAAITLIVWKKEVSFDANYLKPQQAA

SEQ ID NO: 506999 - protein, 371 aa, unidentified
MEPITFVGLDVHKRMTSVAIAEAGRGGEVRFLGEIPSTPEALHRLVLRLKGHHRRLSFCYEAGPCGYGVHRLLSGLGQDCSVIAPSLIPSRPGDRVKTNRRDATTLAKLHRAGELTPVWVPDAAHEAMRDLVRARATARRVLGKARQHLQGFLLRHGRVYRDVRGWTKAYRRWLTTVRFDHPAQQIVLQDYIHAVEDAEARLERLERQIEELLPAWSMAPVVEAVQAMRGVGLIVATTVVAEVGDFSRFANPRQLMAYLGLVPSERSSGASVRRGGITKAGNAHARRVLIEGAWTYRMQARVSRKLLDRLERLPQAVREVAWKAQLRLCNRYRRLAAAGKPKVVVTTAIAREMVGFIWAIARMVQPRPAIG

SEQ ID NO: 507000 - protein, 487 aa, unidentified
MHPRTTNKFLETFDVYRFSFESAGALALDNEYSGFAVLPAHYIAFADRKRARPWTSIYHCGRYDVKPLATQQFTAYVGIDWADTKHDVCLQVPGNELREFDCIRHQLADIDQWAQSLHQRFGGPIAVALELAKGPIVYALQKYDFFVLFPINPLTLAKYREAFMPSRAKDDPTDAELALDLLMRHPERFTPLRPQSVQMRTLLSLTEHRRELVGDKTRFTNRLTNTLKQYYPHALDWFEQHDTLLFCDFLTRWPTFPQVKRARRASLEAFFYAHNGRRPNVISARLGAIKAAIPLTEDMGVIAPCRLQVLVLIEQLRTTLQAIDRFDREIAQLAPRLPDYCLFQDLPGAGPHLAPRLLAAFGEDRQRYQHADELQKYAGIAPVTERSGKKSWVHWRLRCPTFLRQTFVEWAGQTINKSFWAGAYYRQQRAKGSSYQATVRSLAFKWIRILHRCWQTRTPYDESAYLNALRKRGSPLLKHLELDAQSA

SEQ ID NO: 507001 - protein, 487 aa, unidentified
MLVVLTRQSAVGEVTVVDEKGFEVPLRLGIDIVCRAAHQVSLADDQGRFLWSGRRFRTTPGDLTELWAMLPDGTDPAQVLVVMEPTRNARVPLAAWFRRKGARVVLVPPERSADLRNYYAKYVKTDRLDSQLLARLPMLHPEGLHLEEGFGPADALKRGAKLHSTLVHRRTQSLARLDALLEILGPAWHSALGADLANRTPLRFLAAGYADPHAVKRLGRARLARFIYRHSRGAWGDKHADALLAAAAETLQLWSGAELDYPDLADDIAVEARLALHLTEELKDLDERTAFLLQQADPRGIVTSAPGVAQITATAILGRLGDPSRFQSLAGARAFTGLVPILDASGLTGRHGGPTKRGDAVPRQALFMAAGQARRIDPTLAAKYHRLMVEAGKHHNSALCHIATTLLTRIIACWRSGQPYQLRDVDGTPVTIEQARAIIAERYSIPKDLRARRNTLIKTGTDRRNKESRSAPSTGPSTNDATTAGAA

SEQ ID NO: 507002 - protein, 371 aa, unidentified
MADYREAFVGIDVAKLKNAIAVAESGRNGEVRYWGEVEASDAGIRRAIKQITAKFEHVYFCYEAGPTGYGLYRLIRALGHECIVVAPSLIARKPGDRVKTNRRDAISLARLLRAGELTAVWVPDEGHEAMRDLVRARTSAVETLRTHRQQVNAFMLKHGRIYPGKRSWTMRYLRWLQEQHFDHPAHQIALQEMVEAVRIAQERVRRLETVIAEFVPRWSLAPVVGALRALRGVDLIAAVTFATEVGDAGRFESPRQLMGYLGLVPGERSTGETTKRIGITKAGNSRVRTLLVECAWTYRYPPRIGKRKLYRLEEVSSSVREIAWKAQTRLTARYRMLSARGKKSTVVCTAVARELAGFMWAIAREARQTTP

SEQ ID NO: 507003 - protein, 439 aa, unidentified
MSKVIKFEEIHANGAGIDIGSREIYVSLDGLQVVKFKTFTSDYHLCCQYLKDNGISSVAMEATGVYWMSLYSILEDNGLKVCLVHPREVQQVKGRKTDVKDSQWIQKLYCAGLLRESIVAKGKLKELRVLVRERMDLIDMGSTYVNKMQKYLELMNIKLHNVISQIHGASGLRIIKAILSGERDAHKLVLLCDSRILNKKREEVKKSLEGNYSESYLLCLAENLSLWEKHQQIINSMEQAIGSLLDEINQDNTHIVVTSKSQPSRHHNPQIEDLHKTMVQLYGGVNLTTISGINDSTMLRLLAEVGNDMSRFPTKKHFVSWVGLSPKSKQSGKMKKRIKSKSNNAGLIFRQSAQSLLTSKNNAIGAFIRRIKGKKGSKVAIKAGARKIAEAFYNALTKGADYVETGANKYIEQVNANEIRLMGKLAKKHNFMIVKTDII

SEQ ID NO: 507004 - protein, 378 aa, unidentified
MFLIHPIFCTIHKNIANLNMGYHMTQPTYLVKDFETFIGLDVDKSSFSLTVNNDSQRAKSKKMPSNPEHLYNYIQNHFDHKKVICAYEAGPTGFHLHDYLTEKDVLCLITSPASIPKASNQRVKNNRIDSIKIVDHLMSGKLKPIRVPQGPYRELRDLVKIRNQYATDRKTAKQRIKAYLLYSNLHTALKDPDSNWSSKYINDLKQIECSFAERQRLSMLIEDLEYARNKLLLVQRTLRSFCRENDEITQYIHYLRSIPGIGFIIAVTLLGNIGSPIYLQNPRELASFAGLTPKENSTGDSVNRGSITQLGDKTLRFLLVEASWVAIRKDTQLSQFYHRIRRKNNPRIASKIAITAVARKLTQIIYRVLKDKREYIQH

SEQ ID NO: 507005 - protein, 345 aa, unidentified
MDHVAIDLGGRESQICVRSADGAILEETRVATTGLRKYLEKRPSSVVVVETCAEAFRVADDARELGHEVKVVPASLARSLGVGSRGVKNDVRDSRNLSEASCRMSRLPSVHIPRAESRTRKSICGMREGLVGARTQLVNTVRGWMRGQGVGTMRRGGVETFTKRMRDHIQARKKEALPDYVERQLKAIESLNQLISDADDQVEAVAKSDPICQLLMSMPGVGPVTAVRFASAIDDPHRFTSAHMLESYLGVTPGEDSSSERKRLTAITKAGPKAVRWSLVQAAWVARRYRKSDPMVMWALEVEARRGRPIAIVALARKMAGILWAMWKTGTKYDPAKGAASRPSQ

SEQ ID NO: 507006 - protein, 329 aa, unidentified
MVYVGIDVHRKRSQVAVLDEAGTQLSNRNYENSSGDLRAVLDELEPGTGVAFEAAYGWGWLADLLEECELDAHLAHPSACKAIAHARLKNDKVDARILAQLLRTDFLPEAWIAPKEIRDLRSLLRHRGSLVRVRTSLKNRIHAVVADEGLKVEVGTLWSAEGETWLARVAMRPMHREIVDDCCGLLDALATPIRRLDAEIRDQAEPDPRVEALRSLYGVGLITSMTLVAEIGEISRFPTARKLCAWAGLTPSVHNSDVKVRHGHITKAGPAAVRAVLTEATYQARHVAPFAKYFEEVAKRRGKRIATVALSRKILARCFHILKSLEEPA

SEQ ID NO: 507007 - protein, 353 aa, unidentified
MRKMQEYIVKGNRIFVGLEDSKKTWKVCVRYDRMIVHETSMPAEYEILQAYLMNHYPECMITVMYEAGFQGFWLHDLLEEDGIDCIVTPANKVTCAKDDRVKTDKRDARRLAQNLENGDYVSCHVPDRERREDRQISRTLSQVQKDITVEKNRIRRFLEYHGLDRGLPAGAWTDRDYLALKDRDIALSLRVSLNAYLRILTELLAVKKDLLKELRALCDKERYKVGVRMKKSCPGIGWLTAIRLTLEWGEMQRFPTGKQIASFAGLTSREYSSCDTVRRGRITGQSSEYVRSWLIECTWRAIRKDPVLLAKFNTVWRNSGSKKKAIVAVARKMSVRLWALETTGKPYCTGVVE

SEQ ID NO: 507008 - protein, 346 aa, unidentified
MYYCGLDVSRKSTHVHIEDGQGKRVEHRVVPTTPEGLESALENYFARGLRVAVEAGGSTGWIHDLLRELGARVHVVHPTKVKWIAASKKKTDRVDARLLAHLLRINGLPEAVHMPTRQSREVRRLLRARRQLVQIRTRLINVVRSVLEQQQVNLRAGALGSRKGWKALYDLPLLPGIRDIVSAYDATVAATTAAITTLETQLAIRAQADKRVAQLQTIPGVGPLTAQTVVAAIDRVHRFANARKLVGYIGLAPSVRSSGERVEYGRITKQGRSEVRAVLVQAAHALLAIKRDTAKPLQYWCARVARRRGKKTAIVALARKLLTIAFYLLRDGTRFDPNRVRMTAAA

SEQ ID NO: 507009 - protein, 422 aa, unidentified
MNSQPQSHSSDEPSFGAFVAIDWADQKHVWSLQAADSDQREQGEIQPTPEAIEAWVGGLFSRFGAQPIALAVEQSRGALVFMLSKYEHLYIYPIHPRAAAQFRAALYPSGAKDDPVDANLLLDLLVHHRGHLRRLSPDTGQTRLVQQLVEARRKLVNEKTRQSNRLTAKLKLYFPQILTWFDEVDSALVGALLKRWPTLEALQKARQATLRSFFTQHNCRRAELIEQRWEQIRRAIPAIRDAAVIQSAVAMVSVLVSLIATLRQGIATLDRQIEQAAAAHPDFAIFASFPGAGPVLAPRLLAAFGSQRDRYQSAAEIQQFSGIAPVLVRSGKTAWVHHRWACPKFLRQTFQEWAGHSIGFCDWARAYYEQQRKRGASHHAAVRALAFKWIRIAFRCWKEGVPYDNARYLQSLRQRGSPLAVR

SEQ ID NO: 507010 - protein, 317 aa, unidentified
MCKVIGIDISKANFDVGFQKKDEKFNSFKFENRDRGFEKFRNLIDTGDHCVMEATGPYYLSLAQYLFEQGIKVSVVNPLQIKHFVRMRMVRAKTDKKDAMMIALYGQSEQPGLWQPNEKHVMQLQQNHTAIEGLLKQATMVKNQMEAFSNLPDNDKEITKVLKALLKTIKMKVAKLEARMLEIVMEHYGTTFCSLKTIPGIGTKTAIILIAITNNFKKFNDIKKLSAYVGLAPRIYESGTSVKGNGYITKMGNKYLRKLLYLCSWSAKKHNGQCISMYKRLLAKGKPERVIKIAIANKLLRQAFAIGSNLGEYDKKY

SEQ ID NO: 507011 - protein, 312 aa, unidentified
MSNPLRYLGVDVAKNILEIAFERHRWQFPNSKEGHLKFIAQIQKLPTPMHVVCESTGSYHIALCLALQEAGIAVTIANPARIRYFGKSEGTLAKNDPIDAKLIERFANSKRPPADPPLCHKHLALGEMAAHRGHLVEMVKVLRTHRAQAREPALVKEIDKSIAVLEKRLGLVEDRLRQTVEAHPVWKRKFDELTTVKGVGFVTALVMLAKMPELGTLNRGQCAALSGLAPYDDDSGKHQGKRSIRGGRYEVRTALYMAAISVIKFNPILKAFYQRLIAQKKPFKVAITAVMRKLLIYLNGLLKTLSAQISPA

SEQ ID NO: 507012 - protein, 415 aa, unidentified
MTDQLNIVCGADIHQRFLIATILCRDGRMWTNRFLMNINGLLTFKDWLMSYGCQKVAVESTGRFWVLIHMVLEGTVDVIVANAYKIKHTTKKKTDLKDSEWLAELCLNDMIEPSRIFPKEDRELRNLTRAREAYVRDLSKEKSRVHHILESCSIKLASVISDIFGKSGMYILNGLLSGTSIEVVLKGIPDKRVRDKKAEELREALMGKLEVSDIFLIRQSLQIITQLKIRIEELDVEIRSRIASRPMDLKIAMSIPGIGIVSAYTILAEIGNYMDFKKPEQLAMWAGIVPSVYQSADKLITGGITKQGSKHLRWILVQVAHAITHKKGGKLKKFFLKIRAKKGYLVAIVALARKVLCILHHLLVNQELYEEEGGAVQKDTLILKNDQKVPPIEDMIRYIVQAGYEVKKIKSEVGG

SEQ ID NO: 507013 - protein, 353 aa, unidentified
MSIVILGVDLGKNACSVVGVDAVGAVIVRRSMRRQTLIDFVAKLPACIVAMEACCGAHHLGRVFAAHGHEIRLMSPEYVRPYVKAQKNDDRDAEGIAEAASRPTMRFVELKTQEQLDIQTLHRVRSRLVAERRNLINQLRAIMLERGTIFPVGRRKLELGVDALLTEEGATLSPRVRRLVGELRAEWRDLDTKIEALNAEFIELARNDAAARRLTSIPGVGVLNATALIAAVGNASSFAKARDLGAWLGLVPRQQRQGANRGCLASPNAATPTCAPCSSMAPAQPCHRSPGVTRPSGDGSKPCWSAESTGMRSWSHLPTSWRGSLGPPCARTLTLSAAIQSRHNQIGRVLARA

SEQ ID NO: 507014 - protein, 354 aa, unidentified
MKQFIGCDSHKKYSVFVAMNEFGQVGEAIHVGHDREQFREFLQELPAGSPIAVEASGHYYWIVDEMEAAGHRPQLTNPLRAKQMMGDRKKTDKVDARALALLLRNGTLPTVWIPPAELRDQRALLRSRMFMVNERTRLKNRIHGAFGRYNVTILAQDLFSVEGRLEAQEQLPRLPTYTRYSVEREMATVDFLEQQVKQIEKQLQGLMSTNVESDLLKTLPCVGPILGMLMALEIGKVERFAGPGHLASYCGLVPRVISSGGRTRMGHICQDVNHYLRWAFVEAGNLVVMHQKRLTGSHVVRLYRKVQRKHCYQKAVVAVGRHLAEAAYWVLKKQQVYREPQRKAVEHDLSSTHG

SEQ ID NO: 507015 - protein, 341 aa, unidentified
MDIAVLGIDLGKNSCSMVGLDGSGKVILRRRMQRKTIVAVAAKLSPCIIAMEACCGAHHLGRVLAAQGHTIRLMSPEYVRPYVKAQKNDDRDAEAIAEAATRPTMRFVALKSEEQLDMQILHRVRDRAVGERTSLMNQLRAVLLERGVIVPQGRAKLRLRVTELLQQGAGELSSRIQLLIEDMLTRWLTLDERIAAFDAEFAAEAKRDEAARRLTSIPGIGALNATALVAAVGDAETFARGRNLAAWLGLVPRQATTGGKPRLLGITKRGSKYLRKMLIQGARAALPTLSRSNTRLGQRLRGLLARAHSNTVVVALAAKMARIVWALLRYGTTFEPRAIAI

SEQ ID NO: 507016 - protein, 413 aa, unidentified
MKLFVGIDVSSKDLQVVALDSEDQNKRLINDSFVNDLYGASELKKQILDLAQNKHYDQIIIGMEATSIYSFHPAYFFQNDEDLQKLNVETDVINPKETSRFHKVFEESKTDPLDAYYIALYLSFGHYRVSIARQDNYLALERLTRTRYELVQELTRTKQHFIEALYYRVNKLITVDKDKINTPLFGATMMSIVTDSKTLDEIADMPTEDLISYLQVKSRGRFSDPDTLAKAIKKAVRGSYRLGKVMTDSIDAVLSVHYNMIQSFNESIKDLEKAIDRIVDALPESKILESIPGIGKTYTAGIIAEIGSIDRFDKEEQLAKYAGLTWNQYQSGDHSNEHTPMARTGNRYLRYYLIEAANLARLHDPVFKKYYQKKYDEAVYSPHKRACTLTARKLVRVIFKLLKDDKLYRTPRS

SEQ ID NO: 507017 - protein, 401 aa, unidentified
MNAVGIDVSKGKSMVCVMRPFGEVVLEPFEVLHTAQNLHDLAEKLKALDGETRVVLEATGNYHKPVAFVLHDAGLFVSVVNPVLIHDYDNNSLRRVKTDKKDAVKIANYTLDKWTRLRQYLPEDDTRLALKNCYRQYQQAVAIRTMLKNNLISSLDLTFPDANKLISSPVKNNGCEKWVDFIGDFWHSECVSSLSANAFAKKYLKWCQKHGYVFTRSKSDEIYACAVNSASLPKSPTSKLLIQQQVAQLKAVSQSVAAFRQEMLRLSQQLPEFDTVMEMYGVGPSLGPQLMAEIGDVRRFSSKKSLIAFAGIEPQPNDSGKVVGNDKGISKVGSAVLRRTLFLIMTVILQTQPQDEPVFQFMNKKRSEGKPYKVYMMASANKFLRIYYAKVKAVMDSERSQ

SEQ ID NO: 507018 - protein, 351 aa, unidentified
MKKVAYLAIDVHAGHCVLGHIDIDGTFLGNRRFPTSEQHIIEALKGVKAKEKYLALEESNLAYWAAQVARPYVTEVICSDPKENALIYRSSNKRDKVDTHKLCRLLRLGELKRVYHAENDERAIFKAAVQHYIDLRDQQVVLKNKIKAMYRHWGVIDVAGEAVYGIKRRHDYLQRVKHLHIRNQLHRLYCLMDETESMQKRALKAMKQLGRKYPEIKQFKKMPGIGEIHSHTFDAFIQTPHRFANKRKLWRYCRLGITDRSSDGKPLGFKRLDRSGVSEFKSLSYQAWLCAMRSDNEVSRFYSESFRRTSNRVHARLNTQRKILAVMYGMWKTGEAYRSELFLDSPQMSVV

SEQ ID NO: 507019 - protein, 346 aa, unidentified
MKNISIGIDFSKETFDATIMLRHEDTYKELCYNKFTNDMSGFKALEKWVKSSLKGVADKKTELLFCGEHTGTCSIGLCDYLAKKQYFMWLESALVIHRKCGIVREKNDKVDSKRIADYALRHYSSDVRPYMLDSKEMKKLKSLFTAHGMLTKDKVAKTNQLKSGVLDDAPLAKKEVERQLKYMEESLYKIDKEIEALLKECDEFSHNYKILNTFKGVGMLTIACLIIKTHNFRYITDPRELGCYAGVVPHNCKSGSSIDRGARTSRYRDKDTNALITSCAMSAIRTNNPIIRPYYDRLVGRGVHRMKALNNCKFKVINVLMAMLRNDTCFSMDIHGKSKEQWKTSA

SEQ ID NO: 507020 - protein, 351 aa, unidentified
MKKVLREVLGIDVAQKELVVCLGRMYENLESELYARKTFANGSKGFEALLQWVKKLADPNSPVRYVMEATGVYHESLAYFLVNQGLEVSIVLPNKISNYARSLTIKTVTDKTASEAIAQFGLERNLDKWDKPSPVFKKIKQLTRERDQIVQGRTMAKNQLHAEQQEAEPNKASITRTKKRIEFLNKQEKEITAEIAALVKADEKTNHTAQLLCSLPGVGILTAATILGETNGFELIRNKRQLASYAGLDVKEKQSGTSVKGKPRISKKGNRFLRKALHLPALCAIRHDERFKAVFARLVSKHGIKMKAAVAVQRKLLEMMYTLYKTNKNYDKEYFTNKEVEIIEKQNINAA

SEQ ID NO: 507021 - protein, 421 aa, unidentified
MTEHVQWFVGIDWASDFHAVCLLDATGAIREERTVAHTIEAVNEWLTTLLEQTGADPSAIAVAIETPRGILVDTFLERGLAVFAINPKQLDRFRDRHTVAGAKDDRRDAHVLADSLRTDPGAFRRVQLDAPIVLELRELSRAEDEWQRDLGRLTNRIREQVARIAPALLSLCPAADEAWFWSLLEIAATPAARQRLTRTDIRALLKRHRIRRLTSDEVWTRLRAADFVPAPGVIAGVQVRLDGLVEQVRVTYAQRQRCLKEIDRVLAALTEREPTAEEPCEHRDVEILLSLPGVGRLITATMLAEAARPLADRDYDTLRTHAGAAPVTKRTGKRFCVVQMRRACNERLRDAAYHWARCSLRQDARSRAYYAQLRRCGHTHGRALRSVVDRWFRILIAMLTHRTLYDPTRFSSCAGTVPVTA

SEQ ID NO: 507022 - protein, 401 aa, unidentified
MISVGIDVSKETSMVCMLRPYGEVVATPYEIQHTGSELKKLCERILSLGEEVQVVMEPTGTYHLPVLSYLHQAGIFVSIVNPLVMKRYAGAVLRKGKTDKIDSVRIANFGIDNWFKLQKYCPLEETYEELKFLGRQYAHYISIKIESALTLASILDRTMPGIKHLLQAKRSEKPTKDKLCDFVEEYWHYDNITAMSEDDFINDYCRWVKEKGYHRNQAKAEAIYQMACEGIPTLPSNTSSTKMLTLEAIRVLREVNKTLQTILSQMQVLATALPEYSVIRSMPGVGDVLAPRLIAEVGDVRRFHSGSALVAYAGIDAPPFQSGRFTGTKRNISKRGSSLLRKTGYEIMKCLKTSKPTHDTAVYDFILKKEAEGKPKKVAKIAALNKFLRIYYARVKEVYQA

SEQ ID NO: 507023 - protein, 344 aa, unidentified
MFPHKEPPTNFVGVDLHKKTAVVCAVNQARQVLETRRLACSDPDGIRKWFATLESFQVVVEATASYEWFVQLVEPMADRVVLAHPGKLRVIAESTRKSDKLDAKVLAAFLALDMIPEAYRPMPRQREHRQWVRHRQYLRVRVASIRNRLRRAFSNYNADRLDLFTAPGRKASAAIKLSAVDRFAVNQLWGELEFFEEQLDEVHKALRQFAAQAPPTEAAARTLLRSIPGVGEITTEVYLAEVADVRRFRSQKRVVAYAGLAPTVRESAGRRHELGITHTGSRLLRWVLCQAAWQLVRRDARWQRIFESLAERRGRKRAITAVARRLLCVMTSMVINGQKYRLAA

SEQ ID NO: 507024 - protein, 338 aa, unidentified
MSLYCGIDLHSTNSYLALLDEQLRPVLGRRVANSLETIQATLAPHQEQIAAVAVESTFNWYWLVDGLMEAGYHVELVNTSAVRQYEGLKYVDDRHDARWLARLLQLGILPTGYIYPKEQRALRDLLRRRTFLVRQRTANLLSIKNLYSRQTGAQVPTKDLKRLTAEQVADQFTDPLIAQAITCGVNVADALKTEIASLEKTILAQARQRPEYALLESIPGIGQTLAMTILYETGSLSRFPDAGHFCSYCRCVPSQHLSNGKVKGKGNTRNGNPHLSWAFIETAHFAIRFEPLAKKYYERKKARTNPLVALRAVAHKMARACFYVMRDQVPFQAAQAFG

SEQ ID NO: 507025 - protein, 539 aa, unidentified
MRLERGSVGVVRPPGSHIRQPFSCWRGAGGRRCIGLDVHREFAQVAVWEDGVVRQVGRIALCDEALRIFADSLGPEDEVAIEATCNTQAIVRLLEPHVARVVVSNPQKTRAIAEAKVKTDKVDAEVLAQLLAADYLPSVWVADPATQALRRQVARRAHVVRRRTRLKNQVQAILHRNLIPRCPAADLFGIKGRCWLANQPLPPDEALTVEALLRQLDFHGQELRIIDAELGRVALGSPEVKRLMTIPGVDATVALSIVAAVGDFRRFRRPEQLVSYLGLNPRVKQSGGQPASHGRITKQGRAHARGMLVEAAWVATKTPGPLRAFHDRVRSRRGMQIAVVATARKLAVLCWTMIERSEDYAFARPSLTDKKLRALELRAGMPSRRGQKGKAAAYSLKEVRRRERELAEQAERAYRQLVADWQTKRLTQPKPKAGRGRRQWDATEKALSGASCAAGISPRTCTSLGGRPRPDRSLTPDPASCQQRPLRGEDLAHPHPGGHPIRTVFRRRPCRRATPSQPPTSATSTGKTARTPTKSSRGP

SEQ ID NO: 507026 - protein, 373 aa, unidentified
MVWTPPSLDRHLSAIVEVSKATKKKGDVMKEISVIGLDLAKNVFQVYGVNRNGERSASRRLRRKQVHHYFSQVPPCLIGMEACSSSHYWARELIALGHRVKLMNPRFVKPYLKGNKNDQNDAEAICEAVQRPNMRFVELKTTEQQSVLHLHKSRQLLIKERVGLSNHIRALLSEFGIVLAVGVKVFEAQVPVLLTEDDNALPALSRRTLNLMWTAYRDLRSLIHELDRELACWHKDNEVSCRLAEVPGIGVQTATALVAKLGAGRSFHNGREVAAFVGLVPKQASSGDREKLLGISKRGDGYLRRLLVQGAKSVIRHVRRRQMAGLAGGNPWVESLLERKHPNKVAIALANKMARVAWVVIAREEHYIKASTC

SEQ ID NO: 507027 - protein, 412 aa, unidentified
MQTLIERGCGLDVHQATVVACLLMVRRDGKVQKQMRTFGTTTRELVGLREWLLSEGCTHVAMESTGVYWKPIYAILEGALEIVVANAQHIKKVPGRKTDVKDAEWIADLLCHGLLRSSFVPPKSIRELRDLMRYRRKLVESQAAERNRLLQVLETANIKLANVATDVFGMSGRLMLRALIAGKATPQEMAELAKGLLRKKIPELELALEGKLEQHHRFLLELQLQRLEAAEKDLAVLEQRIRQMLEPYAAQLALLDEIPGVDWTLAAVIIAELGVDMTVFGNVSQLASWAGVCPGNNESAGKRKSSRIPSGNVYLKSGLVEAANAAARAKGTYLRDKFFRLKARRGYKRAVVAIAHKILVAIYHMLSQQVSYNDLGDLYLDKLNQNHLTRNLVHRLERLGYAVTLTLQQKAA

SEQ ID NO: 507028 - protein, 339 aa, unidentified
MFMIGIDPHKGSHTATAVDASEAVVGEIRVEADRHQRARLLAWAAAFVPRTWAIEGATGMGAMLAQQLVGAGERVLDVPPKLSSRVRLLDNGRIDKTDPNDARSAAIVALRNATLNVVTGEDTDRVILRMLADRYHQLTSQRTRSICRLHAVLCLLIEGGTRRSLTVAKARKLLENVAVSDPITLERIACCSDFIAEIEVLDAALADTRRRTIAAVLASKTTVDELYGIGPIGAAIIVGRSGDIRRFPTAGHYARHNGTAPLEASSGPKARHRLNPRGDRQLNHAIHTAALTQIAHDHPGRDYYLRKQADGKTNKEAMRALKRRISDAVYRQLITDTRD

SEQ ID NO: 507029 - protein, 344 aa, unidentified
MIYYAGLDVSLRTVNICVIDDQGELVAETKLASDVQDIVAYLDDLEFDVDSVALEAGTLTQYLTYGLQASGFDIICMEARQVKGALSAMRNKTDKHDARGIAQILRSGWYSRVHVKSMESHHIRMLLSSRKAVLSKCVDLENEVRGLFKIFGIKLPPKLGHGAFDVAVRDIIETDERLSQALLPLLDARLFLYQTFRVLDNRTRKMAHADPICVRLMSVPGVGFITALTFKAGVDDPTRFKRSRTVGAYFGLTARRFQSGEMDIDGHISKCGDADVRGTLYTAANALLTRSSRWSPLKAWGMKLAKTRGHRRAVIAVARKLAVILHRVWIDDTQFRWGTEGARS

SEQ ID NO: 507030 - protein, 444 aa, unidentified
MARKSKKQPLRIVHPRCAGIDIGSREHWVAVDPDSDEKPVRRFSTFSDDLYAMADWLTSLDIEVVAMEATGVYWIPLYEVLDARGFQVNLVNSRATRQVSGRKSDVLDCQWIWQLMTYGLLKGAFRPANEICSLRSVVRQRAAKVQEQSRCVQHMQKALTQMNIQLDNVVSNLTGKTGLSILRQIVAGERDPQKLATLRDRRLRASEQAVARSLHGNWREEHLFALTQALAHYDFLAQQIAECDETIGEALQRLPTLTDQTSAPVKAMRNPHRTSAQQAQLHQALNEVLGVDLTRVPTLGIDTVLVLASEIGPDLSRFPSARHFCSWLGLAPPTHISGGKNLGGPKPKVFNRAGQALRQAALNARRSQTFIGAAHRARLARMDTAKAVKATAHQLARLIYAMLTQGQEYVERGMEEFEVRSRDRQLRSIQRKAKHLGLTLSDAA

SEQ ID NO: 507031 - protein, 341 aa, unidentified
MKNKSFIGIDISKNVIDVSIFCEETPIKDFSHDVFNNSRKGFGEMCIWLKKNHVVLSNCLFGMEFTGSYSMELEKFLNARNYQFCMLSTHVVKHYPMGPKDKSDKIDSAKIADFLYRYNGTECVKPYNMPDKTMQRLKALMNERKFLVEQRTCFMNRRQLCTTKEDTQLYDGYIKKLSHDIENIELEEQKLLATDDSLLSTYKNLLTIPGIGFVNAINVIVITRNFTAFETARQYASYVGVAPHFRTSGTSVKWRPRPSARCDGQAKADLSMAATVVVQYDAELQSFYNRKLGGKQDSDTKRKALNAVKFKLVLRMFAIGKQNRKWEPLDSKSSNEKLAIS

SEQ ID NO: 507032 - protein, 340 aa, unidentified
MIADTKFFIGIDVSKPCFDVSLMSVISYVKQPLESARFDNTASGIKQFEKWLKAHKVTFGEDSLVVIENTGIYHRLIWAFCSKKHLPLHIGNAAHIKWSFGIARGKNDKIDSIRLCKYGFKESDGLKATAALDPQLLHLKDFISTRTKLLKHKSSLGVSIRELGNVNEKSHQKVVEKALKDAIQGVTRSIKNIEDQIKKIISENQDFKRNHGFLLSIPGLGHVTAVYLIGCTANFAGRPSGKELACYAGVAPFQHSSGISIKGKTKVHKMANKELKRLLHMCALSLIQHNQEFKIYYNRKKDEGKHSMSILNAVRNKIALRIAAVIKNQTPYHDKYNMVA

SEQ ID NO: 507033 - protein, 354 aa, unidentified
MKRTTKYVAFDVHQATTVASVREESGRVIARSVLPTDSGALTEFVRGMRGARHVTFEEGTQAQWLYDLLAPLVDRVVVCNRRGAPHQGNKGDQIDADQLSELLRRGALRAVYHGSADRATLKELTRTYRNLVEDATRVMLRLKALFRARGIPTAGTAVYHPRHRARWLAQLLEDGARFRAAALYAELDVLRQLRPKAKAVMVTEARRDPAWRVLRTIPFLGPVRVALLLATMQTPWRFRTKRHLWAYAGLAVVTRSSADYTLVAGAPMRRRRAPMTRGLNRNHNRVLKDVFKGAATAATARPGPLQDFYHRVIARGTREELARLTLTRKLAALTLRLWKKGERYDPTKLTTPAR

SEQ ID NO: 507034 - protein, 358 aa, unidentified
MTDKVTEAAVVGGVDTHKDLHVAAVVDQNNKVLGTRYFSTTRQGYRQMLAWMTSFGALKRIGVECTGTYGSGLLRYLQNAGLEVLEVTAPDRMERRKRGKSDTIDAECAAHAAFSGIRTVTPKTRDGMIESLRVLKTCRKTAISARRVALQIIHSNIISAPDELREQLRNMTRMQLIRTLGSWRPDASEYRNVTNVYRISLKSLARRYLELHDEIADLDFMIAAIVDELAPELIKRNAIGYESASQLLITAGDNPQRLRSESGFAALCGVSPVPFSSGKTNRYRLNRGGDRAANSALHIIAIGRLRTDDKTKEYVARRVAEGHTKMEAIRCLKRYISREVYTLLRNQNRRVNSIPIMA

SEQ ID NO: 507035 - protein, 345 aa, unidentified
MPSMTYIGLDIHKKTISYCVKDVSGTVLSEGKLQATRQGLEEWRKTLPTPWTVAMEATMFTGWIYDFLRPHAAAIKVAHPLVLRAIAAAKKKKNDRMDAAKIADCLRCDFLPECYMAPMEIRQRRRTLRYRKLLVRQNVQLKNKIAQMLMESGVSYNKEKLHQQGYFHQVLPANLEIEPSLWPLLKLSREMIERTQKTERALLRSLEADPLLTARVERLMTIPAIGHVTALTWVLEVGEVERFRSIRQVISYCGLCSGEKSSAGNSRRMPISKQRNRHLQTVLLEAAHLAPRLNPELAALYEREAARSNRNQAALAVARKLAAYLLAIDRGDRTFVKHEVTSVAA

SEQ ID NO: 507036 - protein, 355 aa, unidentified
MSGEKYIGLDVHQATISVAVVDSQGQVVMESILETKASTLLEFLAGLRGSLFVTFEEGTWAAWLYDLLKPQVTEVLVCNPGQIPLLKHGNKSDKIDAGKLAERLRRKDLKPVYHGETGVGRLRELARSYRTVVQDLSRVMNRLKARYRSWGIPCAGRDVYYTRHRREWLEKIPEAGTRRRAEPLYQQWDMLQPLRLQARRELLAESRKHAIPAKLRKIPSLGPIRSALAVALIQTPHRFRSQRQLWTYSGLGRETRDRGEYHYVRGQVRRRKKQATIRGWNKDYNHDRKSLFKGAATRARVKPGPLQEFYPRSLAKGIKPTMVRLTRARKIAALTLTLWKKGEDFDIHQLNSQAA

SEQ ID NO: 507037 - protein, 351 aa, unidentified
MPVCLNTEQLLVGACRKAVTSYLQGWPEMNASELIFVGIDVAKETLEVAVDDKSKTRCIANAGREIEALVKELIPLSERIGVVLLEATGGFERQAAAALCAAGLAVMVVNPRQARDFAKSMGYLSKTDAIDARVRSHFARTLHQSAQRERLLMKLPDANQEALEALLIRHHQLVGMRVAEGNRLAQSHPSQHKSIKAVLKMLDRQIVSVDNDMSGMLKAHFADKLALLKDFKGIGPCTQASLMGALPELGQLSHAQIGKLVGVAPLNADSGRHKGKRITWGGRTAVRSALYMAALSAVRYNPVIKAFHQRLIAKGKPKKVALVACMHKILTILNAIVKSGSPWNPEHHKCA

SEQ ID NO: 507038 - protein, 347 aa, unidentified
MDISGEHNCDTYNNSKLIIMKQEFSFFTGIDVSKSWLDIAVFSADKGIVHQARINNNIKDIKSFFKELKSLLNTELTNHLFCMEHTGRYGRAFLNASVLEKINVWVELPLQIKRSQGLVRGKTDQWDAVRIAQYAHRFADKATFWKPMDKKIEELKELQVKRARMVKAYTQLSLDGKNDPLFKKPLQALKQSIEAIELKMEQVVEQSENAKHQYKLLQTVPGIGKQTAIALLVVTNGFTRLTESRKLSCYAGLAPFPYQSGSSVKGKTKISKMGDMKLKVLVNLSAWNAIRSITSFKDYFNRKVGEGKHKMSVINAIRNKLLALALAVIKRNTPFVKEYSYDLLLLP

SEQ ID NO: 507039 - protein, 355 aa, unidentified
MNVYTGVHSYYCGIDLHARTMYVCVLDKDGKTVYHKNIPCRPDRFLQAIEPYRGDIVVGVECIFCWYWLADLCEEEGIDFVLGHALYMKAIHGVKTKNDRIDSLKIARLIRGGNFPVAYVYPPEMRATRDLMRRRNHFVRKRAELLSHIQNTTMQYNLAPLGTLSRPHHRRDKDIVGHFPDPVVQLIVETDLQLIDHYDPIIKHLDKQILALAKGHDPTSLDLLRSIHGVGDVLSLTMLYEIHDITRFPSRGEFCSYARLVKGQKSSAGKNYGTTGGRIGNAHLRWAFSEAAVLFLRNNTQAERYYNRLINRHGKSKALSIVAKRLGIAVYYMLRRGNPFNINMFLQSHMANEKA

SEQ ID NO: 507040 - protein, 403 aa, unidentified
MFDTEDVGVFLGLDVGKTAHHGHGLTSAGKKVFVKPLPNSEPKLRAVFDKLAAKFGTVLVIVDQPASIGALPLTVARDAGCKVAYLPGLAMRRIADLYPGEAKTDAKDAAVIADAARTMPHTLRSLDLTDEITAGLTVLTGFDQDLAAEATRTSNRIRGLLTQFHPSLERVLGPRLDHQAAAWLLERYGSPAALRKAGRRRLVELIRPKAPRMATRLIDDVFDALDEQSVVVPGTDTLDVVIPSLARSLAAVHTQRRALGAQINTLLEAHPLSPVLTSMPGVGVRTAAVLLVTVGDGTSFPSAAHLASYAGLAPTTKSSGTSIHGEHAPRGGNRQLKRAMFLSAFACMNADAASRTYYDKQRARGKTHTQALLRLARQRISVLFAMLRDGIFYEPRLPQATAA

SEQ ID NO: 507041 - protein, 401 aa, unidentified
MIFVGIDIAKRSHVASAVDEDGGTVVESFKFNNTASGFAKLLKRLRKADATPENSLVGMEATGRYWVALFDFLSSHGYEAAVINPVQTDAFRDVWTVRKVKTDALDAAMIADLVRYKRYSPSATEELRNLARYRMSLVERSTALKNRATAILDRTFPELAGLFSNAYCPTRRELLQHCATPDQVLGTDVGTLERILREASRGRCGRAKAERLKALAEASVGVGFGSKTLAFEVRLLMEELDFVQGQIKEVEGELESLLERTRGKWLVTIPGIDVPLASVIAGEIGDPDGFDDPHRLMGYAGMDPTRSESGETVKSDGRMSKRGPGALRWALMQAADCARKNDPYFGDYYDRKKGEDKKHHYVALSGVARKLMGVALAVMKEERPYEPTPPKNHRPGHLRGA

SEQ ID NO: 507042 - protein, 431 aa, unidentified
MKIHKYLGLDVHKDDTEIAVAEGDRSGEVRAYGKVSSDLVTTEKALRKIKGENGVLHVVYEAGPTGFVLYRRLQQLSIECIVVAPSKTPQPKGGRQKTNRRDALQLARLHRAGELTGIHVPDAVDESLRDLTRTRSDASRDLKRAKQRLKSFLLRQGFHYEGKANWSEAHQRYLRELTLPLPALKSVLEEYLLAITQATERLTRLEELIAAQVPQWRMYPAVRALMCFRGFDLVAAAMLVAELNDVRRFAHPRGLMAFLGLVPKEDSTGDTRRLGAITKSGNAQARWILVEAVQHAAKSPKVSASLALRQEGQPHAYRVLGWKTQVRLHKRYWHLTCRGVMAAKVKVALARELAGFVWDLLRQAPSLTPSRLNSPAPKAKAAVNPSAPPSRSLSAPANRSTGPSSPQRRSSPLRLGPQSPGRATLPTKNRS

SEQ ID NO: 507043 - protein, 344 aa, unidentified
MSNLDTCGIEVSAKELVVSLRRQEDLEPLRNFTNTPEGHLIILRYLRQAGRVVRVCMESTGLYGLDLALALSGQEGIEVMVANPRAVRHFAQAMMKRSKNDQIDAGVLEQFALHMPFKPWQRPSVAVLALHALARRLRELVEMQTAEKNRQHAAGLSKAIPAVVRRDLARSLRAQERAIQRLTRQARKLIAQDPQLTERFELLDSTPGIGETSAVQLLGELGVLAPDLEARQWVAYAGLDPRQYTSGTSVHKKPRISNAGNKHLRHALFMPALVAVQHDPHLRAFYQHLLARGKFKMQALVAVMRKLLHALHAMFKTHQPYDGSKLFRLKSAPAQEVTHVLVAC

SEQ ID NO: 507044 - protein, 307 aa, unidentified
MFVGIDVSKDRLDVHLRPSGEAFAVPRDGEGVEALATRLTALAPELVVLEATGGFETVVAAGLAAAGLPLAVVNPRQIRDFARAVGRLAKTDPLDAAIIARFAEAVRPEPRPLPDAMQRALGELVARRRQIIEMMVAERNRRRQMVQKKAIRSVEKVLATLQAQLSDIESEIDGAIRGTPAWRAKEDLLVSVPGIGKTIARTLIAELPELGRLDRRKLAALAGLAPYNRDSGNWHGRRAIAGGRAPVRTALYMAVLVAIRRRMPLAETYHRLVLAGKPPKVAIVACMRKLLGILNAILRDQTPWQTA

SEQ ID NO: 507045 - protein, 313 aa, unidentified
MATKQQVEFEQVIERGCGIDVHKSIIVATIKGTGIREETRSFDGFTHSIEQLRDWLLANNVSHVAMESTGVYWKPIYNILEEGFEILLVNARHIKNVPGRKTDKKDSKWIAKLLLSGLLRGSFIPPKPVRELRDLTRYKRKVIEQISSEKNRIQKLLEDANIKLSSVVSNMSGATATKIIDAMIDGQEDVEELLKFRHGKMQSSIEDLASSLKGKLTDHHRFMLSIIKESIAEKKRTIEKLDQKTETQLKENELALDAELLETIPGVGKEGASYIIAEVGNNMDQFPNEQHLASWAGVSPGCNESAGKKKVVE

SEQ ID NO: 507046 - protein, 441 aa, unidentified
MKTETGQSKKRQAGYLENINRNAAGIDIGSRSHFVAVPPDVCENAVREFSTFTDSLNQLADWLVECRITTVAMESTGIYWIPVFEILESRGLDVRLVNARHVRNVPGRKSDVLDCQWLQQLHTYGLLEGSFRPAAQVCTLRAYVRQRMNLVRYSGSHIQHMQKALAQMNIQLANVVADITGTTGMRIIKAILAGERDPAVLAGMRDHRCKNSVETISRSLCGNYRQEHLFSLKQAVDLYEFYQGQIAECDTEIMAQLESFDQVESSTDDDDKHGGRSSIDKAMIKMSGVDLTRIDGINTNTALKIIAETGTDMSRWKTSKHFASWLGLCPGTKITGGKTISTRSKKVVNRAAAAMRMAASTLLRSKSALGAYYRRQRARLGAPKAITATAHKIAKLVYSMLKYGTAYFDAGQNIYEERYRSRVIQNLKKKALEFGLSIVEA

SEQ ID NO: 507047 - protein, 400 aa, unidentified
MRAVFGIDVSKASSEVAILVNGEKVHGYTISNDALGFARLLGDLKTVHKPEIIFEATGVYSRRLQAFLEDNGYAYTRLNPLEAKKQLDSLRVRKTDQIDAEKLAQSQFVLNRKPTYVQEEVYQNLRDLSRFYQNLTEDIVRAKNRLHKALQVTFPELETILSTPTGEQYGNLVVAFPCKDFVLDLSKDELSESIRQSTSKRISDKRVAYLAEKLIALANQSYCAVKKTSPMLEEVRYYTKELLRLSEQRQTVLDQMVELAQPLPEYDILLSIPGIAETTATSIIGELGDIRRFQSANQINAFIGIDLKHYESGNFLAKEHITKHGNPYARKILFKCIHNIASASHTNPCHIADFYEKRKKQSQTTSTKPHTIASIHRLIRTMYYLIMHNKLYDYASTQNR

SEQ ID NO: 507048 - protein, 332 aa, unidentified
MYLGIDVHKRYAQVAVMDEAGRIVEEVRVENANLDELAQRYAGAQAVLEATSNYYHIHDMLSEHLDVTVAHPKKINQIADTDKKTDRVDAKELARMLRLNSVPESYVPTEEVREARALVRGRQTLVENRTKYANKVHGLLSDHGITEDVKPLTVEGRESLRGLSIPTPFDTLLESYLDLIESLTEEIQKLDKTIEECAGSLKETQLLMTIPGVSYYTALTICAELGGIDRFDGDKEVVSYVGLNPVIRESGDSRIEGSISKRGSGRVRWLLVQAANTAVHTSNDEYLSRFYDRLASRKNSQKAIVAAARKMLVSIYHMLDRGEAYDPPGVTV

SEQ ID NO: 507049 - protein, 360 aa, unidentified
MYYVGLDVHQKRSSLCILDGDGKLVKRLEVKGPWPKLIEAVDLHVPRPFAVCYEASCGYGPLHDRLRAAGRAERVAVAHPGQVRLIFRSKRKHDRVDAERLAKLLYLGEVPQVHVPGVDVRAWRGLINYRRKLVGRRAAAKTQVRALLRGLGVVEGVPRGLWTAKGLAWLKDLALASAADRVRRDVMLDDLDELGERVAKVEAELDRIAKGHPGVALLRTIPGVGPRTAEAFVAHVDDVGRFARVKQVGCYFGLVPCQDASADRNRLGHITKDGPAGARWLLAEAAWQGRRRSPTVRAFFERVMRDDGDRKKVALVATAHYLARVMAAMLRSGEAWREDPKASEQQQQQQQQPTTTTTNR

SEQ ID NO: 507050 - protein, 348 aa, unidentified
MNYIGTDIHISTLDFKVVGNLGKVKMARKVTTSASNFIDFVKSVPAPRQVIIEEGPLAAWLLEICDKNGEHLIVSDPKRNHWIGASGEKKDPLDAEKLAQLARGGYIKEIHHPLGRRRRFRELITAYHDTNKSIVRIKNKIKAKFLQNGIQCPGKTVYSDKQRAEWRQKLPQEPALLVIIDSLWQQLDQIQDNLESILAEAKLEAKHYPEIALIDEIPGIGFIIAATIVAILENPHRFANKRKVWAYAGFGIDKKSSANKTYAEKLGKEYNRTLKCVVEEAAQAAINTETDNAFRRTYAKMTIQKGIDPHHAILTVSRDIIATVWAMWKKGEHYNSEIDRKVKTEVEV

SEQ ID NO: 507051 - protein, 411 aa, unidentified
MENVFPCCAGLDVHKESVEACVRRIEPNGRVHQETHHWGTMTRDLLAMADWMTLQGVTHVAMESTGVFWKPIYNILESRFTMLLVNARHLKQVPGRKSDVRDCQWIAQLLQYGLLKGSFIPPRSQRELRDLTRHRTQLVEEKARTANRIHKVLQDTNIKLSSVASDILGASGRAMLEALITGEEDPVKLADLAQRKLRGKIPDLEKALEGHLTEHHRFMLKLLWKQLAQQEELIAELDGKIGEQTRPFAAEIDRLDAVPGVDRRVAEVMLAEVGPDMEPFPTHANLASWAGMCPGNEESAGKRVRRRITPGNRWLKRTLAQATWAASHTKNTYLASQYRRLAGRRGRKRALIAVGHSILVIFYHMLKAGTSYTDLGGDFFDRLEPQRMIRYYVRRLESLGHKVTLESCTAA

SEQ ID NO: 507052 - protein, 334 aa, unidentified
MQFDYFIGVDVSKATLDFAVVKLNQVLFHQQVSNDKKGIAEFLKVLRQQTKAGIGQCLFCMEHTGIYNNPLLKALHQHLAHIWVERAAHIQESIGLTRGKTDQVDAKRIALFAYKNRDEARLWTPPRAVITQLDRLTAQRARLVKVIKILQTPLTDSEGFIHKADHKANQQACTASLKSLKADLKSADKSIAELVKQDPELSRLFERVTSVVGISQTTAAEIIVTTNEFKAISDPKKFACYAGVVPFERSSGQRKGRPQVSHRANKKVKSLLHMGAMSAVQHCIQMKAYYERKVSEGKNKMLVLNNVRNKIVLRIFACVREDRNYDEKYMHALV

SEQ ID NO: 507053 - protein, 399 aa, unidentified
MLAVGIDISKSKSVAAILNQDGSMHTSPFEFHHTQPELDAFIKYILNSKQSATILMENTGHYHYPVLKAFQEAGLPVCMVNAYQIKKFGDMDLRKAKTDKKDAVRIARYALEKSYSLVPYTSMEQKYEDLRFLARQYNQRMLTLKTNKVFLLNLLDETMPGITNILPLTTRTPETSLSVLFINRFKSYDRIKKMGKSRFLDAFEKIARKSRNRQTKTYGLAIYEAALRNITTRGENEYTLAAQDQCLELVCESQKAADSIILKMQTLAETLPEYAVLRSMAGVVDRLGPLILAEIGDIRRFHSGKALNAYAGNDAPPYQSGTFESHNRHISKRGNAALRKYCFEVMQALKLTRPQDDPVYLFLLKKEQEGKPYNVAKMAGVNKFLRIYYARAMETLKQQ

SEQ ID NO: 507054 - protein, 410 aa, unidentified
MKVLHPCCCGLDVHKETVVACVRLVIDGKPVKEVRTFSTTTADLIALSEWLAETKCTHVAMEATGVYWKPVWHILSDDGFELVLANAAHIKNVPGRKSDVKDADWISDLLAHGLIRASFVPDGPTQEMRTFLRTRKQFVREKGSHILRIQKTLEDANIKLDSVITDIIGVSGRKMIEALIAGESDPAKLARLADPRVKASQQTLRQALRGRVTGHHRFPLRLHLDQIDALDVAIAKIDQEVEAGIAPFRTAVEQVSSTPGVKTLAAMQILSEIGTDMSRFGSDANLVSWACICPRSDESAGKRRSTRIRKGSPWLKTTLVQCAWAAVRKKDTYLHAQFHRIKARRGPKKAIVAVAASILTAIYHMLKDGTMYQDLGPNHFDARNKERQKNRLVKRLADLGYAVELAPLPN

SEQ ID NO: 507055 - protein, 389 aa, unidentified
MNTITTTAPTSVSILAIDLGKYKCVACLHDPARGEVRFTTFETTRAELHKLAAKQRPAVVIIEACLLAGWVHDLCGELGIRCLVANTASEAWKFKHLKRKTDKDDAQRLAQLYRLDQLPTVTLPPTRVRQWRSLIACRQTLVGRRIAVQNRIRALFVAQGLPAPRGARAWAATGLAGMASWAKPLADCAADELWRGLLELSLTEYRQLGDLIDQAQTKLDALGKQHADVVLLETAPGLGPRTAETVAAYLHDARRFDSAKQVSAYSGLVPRQHQSGEMDRRGRITKRGPALLRKMLVECAWCMLRYNAWARGIYQRLTGGGQRRKKQAIVAVARKILVRCWAMLRDRQPWRDPQAGPKPTLSPSKQRRQAEAQQRRRTKQQEAPTSVAT

SEQ ID NO: 507056 - protein, 466 aa, unidentified
MSRLSNRQESSEIIVRPFDGLARIHPNAAGMDIGAHEIMVCVPGPEGTQAIRAFGTYTVDLYAIADWLQQSGVRTVAMESTGVYWIPLFETLEVRGFQCCLISATAIKRFPGRKSDVLDCQWIQTLHSYGLLADSFRTEADLVALRTLLRHRGQLIAHRSPHVLHMQKSLLQMNIQLSQVLSDVTGVTGQAIIRAIVAGERDPQKLAALRNYRCQKDEEEIAKALTGTWRAEHLFVLQQSLGFYDFYTQQIEVCDAEIERTYAAIRPDWGNPDDPAPLPPEKAKLHSRNAPKGVQVRFHLRRIAGVDIIAVHGISASLAQTIIAEIGTDMSKFPTEKNFCSWLGLAPHNEITGGKVIRSYTLRTHNRAGQAFRQAAACVMRADCAFGAFYRRLKSRLGPAQATVATAHKIARTVYHMLKFQLEYQTISATEYEQHFREREIKYLQRKAAQLGFALSPSTVSANAVS

SEQ ID NO: 507057 - protein, 350 aa, unidentified
MSPRNAPRLAAVYGVDIGKNIFHVVGLDSDGEPVQRVRFRRDTLMKFFERAAPAIVGMESCAGSQWIARRLQALGHKVRLIPAQFVKPYVKSNKSDIIDAEAIAEAATRPTMRFAAIKSEEQADLQAVHRVRDQMIGTRTRLINQMRAFCLEYGIALRQGAGLFKLDLPLVLDDLSNDLSPAMRKLLMDLFADLRRLEQRIDDVTREIAAIADREDVARRLMTIPGIGALGATALLAAVGNGRQFQKARDLAAWLGLVPRGYSTGGKQKLLGISKRGNRYVRKLLVHGARSCFRHLDRTRDRLGSWLDGLQSRMHPNKAVVALAAKMARIVWVVLTKPGALYERRNPAFA

SEQ ID NO: 507058 - protein, 347 aa, unidentified
MEQIIRIGMDTSKHVFQLHGVNAAEQPVLRKKLRRSEMIAFFEKLPATVIAIEACGSSHHWARLLGALGHDVKLIAPQLAKPYVKRGKNDAADAEALCEAMSRPTMRFVPVKSAEQQASLMLMGMRDRLVRNRTQLANAIRGYAAEFGLTAAKGMGKIEPLLDRIAIDPAIPPLARELFASHAMEYRQLAEQLGDIDAKLLKWHRANECSRRLAQIPGVGPVGAALLMMKTPAPELFASGRQFAAWMGLTPKDHSTAGKSRPGIITRAGDETLRCTLVVGATSLLQHVRAGRGKNGTPWLLELLKRKPPKLVAVALANKIARIAWKMMMTGEAYQGNTALPPQARAA

SEQ ID NO: 507059 - protein, 334 aa, unidentified
MQNVTLIGIDLGKHSFHVHCQDRQDNALLRKKFSRTQLINFLGSCKAATVVMESCGGAHFMARRIADLGHEAKLISPQFVRPFVKSNKNDFVDAEAICEAASRPSMRFVPPRTEDQQAMAALHRVRDSLIRQRVKTTNQMHAFLLEFGVSLPRGIAVIRRLAAVLEENDFPPYLARVLSRLHSHYVYLSGEIEEVDKELKTHLAEDETAQRLLTIPGVGPVTASLLAMRLGDGKNYASSRDFAASTGLVPRQYSTGGKTTLMGISKRGDKNLRRLLVQCARVFMQRLEHNPGRLAEWVNRQLARHHSNVVACALANKLARIAWAVTAHQTVFIK

SEQ ID NO: 507060 - protein, 351 aa, unidentified
MKYYTSTSEYNCGIDLHSQQMYVCIMDREGEVRVHRNIRGNDFEYFLKIAKPYLHDLTVVCECTFNWYWLADACFAAGIGFVLAHALYLRHISGGKNKNDRIDSEKLAHLLRANLIPPAYVYPAARRPIRSLLRQRMSYVWQRAELLTHLSMNQMAQGLVPAPKFGRNREVWEERILEQVEHPLHRMGVACDMQIVRAYDRQIQLLGQEVTRQARKHEGRDHQLLLTVPGIGKILSLTILFEMDTVERFPTVKDFISYCRLVKGSVASAGKIKGLCGGKMGNPYLRWAFGETAVLAKRSNPLLKTYAERLVSKHGKYKGNSILAAKLARAVYHMLQKGTGFDAECVLATSA

SEQ ID NO: 507061 - protein, 346 aa, unidentified
MSSLPTFVGLDYHQDLVQVCVLDSEGRTLANRSVRNEADLIARFALQHGTPQRVAIEACCGAADLAEELVTHRNLPVQLAHPGYVARMKRSPDKTDLADAQLLADLARVNYLPSVWLAPEATRQLRRLVRHRAQLVRRRRDVKLRIRGLLRENRVPSPGGTPWTKKWLTWLQETDDLAPSDRWLVEDHLEELTSLGRRIRAVEAKIRHTVEDDPVVAKLLTMPGVGLVTAVTLRAEIGRFDRFTRGKQLARFCGVTPRNASSGQRQADAGLIKAGNPDLRTVLIELGHRLIRQTSGPWTKLATGMLSRGKPKNVVVAAVANRWVRWLHHELRRETPQADRVLEQAV

SEQ ID NO: 507062 - protein, 428 aa, unidentified
METPTSNSQIAAWIGLDWADQRHEVRLRAAGSAEVESFSVEQKPEALHGWVAQLQARFPQGKIAVALEQSRGAVIYALMNYDFLLLYPVPPKGLARYREAFFPSGAKSDPGDADLLLEIVWKHPDRLRVWQPDDALTRQLRLLVEHRRQTVDDRTRLTNRLTALLKTYFPQALDWAGELSKPAAYEFLGQWPSLEALQAAGRSTWRRFYRAHRRLSAEELDQLLNAIAQAQPLTRDRASLEASVLMTATLVDQLRSVLAALQRLDRKLQELFNQHPDHEIFDHLPGAGDALAPRLLTAFGTNRQRYQDVQELQQFSGIAPVTEASGKMHWVHWRLACPKFLRQTFHEFADASRKKSCWAEAYYQQRRQQGVSHHAAVRALAYKWLRILFRCWKTSTPYEESLYLKALQRRHSPLWLPAVALLNQKAHA

SEQ ID NO: 507063 - protein, 459 aa, unidentified
MSKEELDKKIEVVEKELRSYTWRELEANGKFAKNDKLSFITDDMLIAGCDIGSETHYIRAIDVRGRELSSRAFEFSNTSEGFANAKAWMLALAAKNDKKQIALGLEPTGHYWFALAAWMISNGISVVQVNPYAVKQSKEIEDNSQLKDDRKDPKLIANLVKDGNYGMPYLPEKVYADMRRLSMFRDQLTEDRIRNINRLHRELKIYFPEYMDAFGKIDGAFTLEVLKVSAIPSDITALGAEGIKNIWHNEKLRGRGYSRANEIVSYAEKSVGLTDGTDAGREAVKWYAEQILKLDEQLAVIESTLHEKCREIPYAENILEIRGVGENILAGILAEMGDISRFDDVKEIQKLSGMGLVACSSGKHKGQTKISHRGRKRLRYWLFQAAKSAVSHADEFKQLHEYYTTRTNNPLKKMQSLVVIACKILRVSYTILKTGTTYDPQKLLKDIKRPTASQAPMAA

SEQ ID NO: 507064 - protein, 342 aa, unidentified
MQIATIGLDIAKNVFQVHGIDATERVVVRKQLRRRQVLEFFKALAPCLVGMEACATAHYWARELMKLGHLVRLMPAKDVKAYVKRNKNDAADAEAICEAVRRPTMRFVQIKSAEQQGRLMLHRARDLLMRQRTQVINALRAHLAEFGIVAPQGRQGVKELLLIIAGGEDERLPVDAHASLVVLSAEFTAMQTMIGSIEKRILALHRSNEASRRLETIPGIGIAGATAIAATVPDPTVFRSGRDFAAWIGLVPREDSTGGKQRLGPISKRGDRYLRRILVVGAVAVLRYARQNPEKYPWLAQLLARKPFKVAAVALANRMARTAWALLAKGGTYRAPALVAAA

SEQ ID NO: 507065 - protein, 335 aa, unidentified
MNHIAIDLGGRKSQICVRNGPGEIVQEGKWDTSAIHTYLPKGPGRVVLETCAEAFAVADRVASRGLEVVVVPSVLAPQLGVGHRGVKTDVRDARALSEMSCRMETLPRVHVPSPVSRDRKSMLTARDSLVKARTGIINSVRGWMRTCLLKLAGGTPETFPKRVRDLCLATAEGLPDYIESQLQVLESLTEQIKKTSKEVARIAKSDPVVARLQAPPGVGSITALSFASTIDDVTRFENAANVSSYLGLTPGERSSGARIRRLGISKAGAARTRAALVQASWVLWRTKPHDPNVKWAKEIALRRGKQKAIIALARKLARIMFAIWRDETIYSPPSK

SEQ ID NO: 507066 - protein, 339 aa, unidentified
MKQIYAALDISDKSTHVCVVDGAGAIVWRGICATDPDALASVLKKRCPAVVRVVLETGPLSAFLYHGLVERGLPAICVCARHAKGVLSTRVNKSDPHDAEGLAQLARTGWFKAVRIKQEATHIDRAHLKIREQLVTSRQAMANQLRGLLKLFGLRLGKVSTPGKRRERLEALFAQKPELRTVMQPLIDSIEALEAQIKRSTKLLAASAEGDPVASRLMSVPGVGPFIALTYKSSIEDPERFARGDDVGAYAGLVPRRNQSGERDYKGRISKAGDAMLRSALYEAANNLLARVKRPCAIQTWGKKLAETKGPKRARIAVARKLAVLLHRLWLSETEFRWT

SEQ ID NO: 507067 - protein, 356 aa, unidentified
MQIIGVDLHTRQQRIAMLDTETGELVEKTLQHEGEAVREFYSALTGSVQVGLQASGSMHWFLELLEELGIDYRVGHPSQIRKAETRKQKHDRRDAALLLKLQVEKRFPSIWMPASELRDLRTLLRQCHPWVRIRTRVPNTLQAMALSHGLRRGKTVWSQAGQHGMASLPLHTAYRRSELQHWYDQLQGPIDERDKRVSAQAWQRAGARLLLTHPGVGPVTALASDVFLGDAGRFADGKAVASYVRMIPREYSSGGRQRLGGLSKQGNPLLRFLWCEAALHVVRRDPELQRFYRRKLAAKGWGKARVAAARKLAIRLGILLRDQIDYPEFCRRGQLRQKSGATGAGMPDVGHSPAIL

SEQ ID NO: 507068 - protein, 427 aa, unidentified
MPYRIAGIDVHKRMLAVVVTDVEVDGDFHFDRQKVGATPVDLRGLAEWLVAQDVEEVVMESTAQYWRPVWEALEQHWRPRRRARDGAPCLAGTLHLAQAQSNRGPGGRKKDFPDAERLVKRLVAQELTLSFVPDTEQRLWRTVMRRKYQITRNRVQLQNRLEALLEEAHIKVSSIVSDLLGISARRMLQALADGETDPAALAALAAARLRATPEQLCDAFQACPTLHPVYRRLLKLTLEELRVIEDHLGQLDQQMADLLAAHHDAVQRLAEVPGLGVDSAQQIIAEVGAAAATFPSPKHLASWMGACPGNEESAGVNYSHRCPKGNRQMRRVLNQAANAAVKAKGTIFAVVYRRIVPRLGHAQAIGAITHRLCRLIWKILHERVRYEERGPAVSAEAKKVRARKMIRELRSLGYSVELAPAPSSSPA

SEQ ID NO: 507069 - protein, 387 aa, unidentified
MQASTVGTPTAGHCGTIFVAIELSQKSWLVTLHSPDKDKISRQKLEGGDHAELLALIGRVRDRAARALGAVPAVVSCYEAGYDGFWLHRLLMAAGITNYVFDPASIAVDQRARRVKTDRIDGEKMLRTLMAYLRGEPRVVRIVRVPAPEQEDARRASRERGRLVKEQTAHTTRIKALLRLLGMAVGNPRRRDWLSWLATQRDWQGQAVPQQMLAEIKYEHARLMLVREQLEGLAQASAEADPAPAAAQMAERSGLLLRLKCLGPVFATTLASEVFYKDFRNRREVASYFGLTPSPWQSGGIDRDQGISKAGNPRARCAAIELSWLWLRHQPESALTRWFRSRTCNNTSKRNKRIAVVALARKLMVALWRYLTTGLVPEGAVLKAVKA

SEQ ID NO: 507070 - protein, 387 aa, unidentified
MSQVSDLSRSLAPFDQNTTLTVVVELSEASWLVAGMIPGIERQPVKKQEPDPVALLRLLERWRLEAIKAGKTIGQIALAFEAGRDGFWLARWLQARNIAAHVIHSTSVAVSREHRRAKTDRLDTAMLMRVFVGWLRGERGHCRMVAIPTLEQEDAKRPSRERESLVGERTRIINRMKAALARLGIRGFNPALRKAPQRLAALRTPEGVPIPPNTLDEFRRDMDRLAVVREQIDGIERARLARLENAPAAGPYAMVRLLARVVGVGVETADMLVQEVLSRNLRDRRAVARYVGLTGSPDESGKRRREKGLAKAGNPRARRGLIQLAWRFLRFQSGSALAQWYRARTDGPKGARKTTMIVALARKLLIALWRMVTIGDIPVGVALRPTT

SEQ ID NO: 507071 - protein, 428 aa, unidentified
MHMAAVSPETAKNPIRSFGTFTSDLHTLAEWFRACNVTSVAMESTGVYWIPVYEILEQHGFEVILVNARYARNVPGRKTDVSDAAWLQQLHSYGLLRGSFRPQADIAALRAYLRQRERLVEYTAAHIQHMQKALMEMNLQLHHVVSDITGVTGMQIIRAIVGGERDPDTLAASRDIRCRSSVEVISAALMGNYRDEHVFALTQALELYDIYQERIVACDRRMEGLLLRLSHKSAKPAADLPKPRIRTKQVSAPSFDVRSILYRLLGVDLTQIHGIGVSLALKLVAECGTDLRAWPSAKHFTSWLCLAPGNKISGGRLLSSRTRRSSSRAAALLRLAATTLGRSDTALGAFYRRLSARVGKAKAVTATARKIAVLFYNTLRHGMAYADPGADHYDEIHRKRVVSNLHRRAQSLGFILQPISGDPQPAVS

SEQ ID NO: 507072 - protein, 313 aa, unidentified
MNKISKTYVGVDVSKKHLDVYLHPEKNFFRIDNSEQGIKELERKLNRYTVGQVVCESTGGYETNMIMELTKANYKVWRVDPTRVKAFRVSEGQLAKTDALDAKIIALFASQKQCKHPCASLSQERIMFQGLVKRKLGLTRMISNEKKRLKNPEEYCEKLIKKHIEFMEEQIASIDKKLAQLAKKNSKWSSAIKKMVSVPGVGIHTANVLLATMPELGRLNKKQAAALAGVAPYANQSGAFVGRSMIYGGRPAPRTALYMAALTASRYNVVLAKFYQRLRDAGKTAKVAFVAVMRKLIGILNAILRDNTTWVTV

SEQ ID NO: 507073 - protein, 311 aa, unidentified
MGGVNAAIEVGKHKLDVALGSDGELFSEPNQPRAITRLAKRFAQVGCERVLIEGGSYQNVLVGALRAAELPVVIINPRRVREFAKSIGQLAKTDHIDARVLARYGERIQPPVRELPDEQSQALRGLWVRREQLIEMLVMEENRLEHAPKALHRSLRAHIDYLRKQIKQSDSDLDREVRDSALWDKYELLSSVPGVGRVLSVALLSDLPELGRLNRSEIAALAGVAPFNCDSGTLRGQRKIQGGRKRLRRVLYSATVASVRCNPVLRPFYQRLRAAGKPAKVALVAAMHKLLLILNAMLKTNNVWRPPCPVA

SEQ ID NO: 507074 - protein, 440 aa, unidentified
MQSRLERRCIGLDVHRDFAQVAIWQGGVVKQAGRFATTPEGVRAFAQGLGPADEVALEVTGNTWAIATVLASRAGRVVVSNPAKTRAIAEAKVKTDKVDAEILAQLLAADYLPAVWLPDAATSALRRQVLRRTQLVRQRTRCKNQVHAILHRNLIPRCPAADLFGHKGRAWLAEQDLPPDEQAAAVALLRQLDFHAEELRLLDTDLGQAGLDRPEVLHLMTVPGIDATVALSIVAAVGDFTRFRTPEKLVAYLGLNPKVRQSGGQPAKHGHITKAGAAHARGMLVEAAWSASKAAGPLRAFYQRVQARRGMQIAAVATARKLAVLCWHLIIKGEDYAFAQPSLVAHKRRKLELRAGRASARGRKGTASGYSLTAVRTAERQLAAQAETAYRTMVSAWQPRRPTTPTTASKTRAAGSAVSVAATNGARQFSPSPGNAARQG

SEQ ID NO: 507075 - protein, 342 aa, unidentified
MKITTVGVDLAKNVFQVHGIDELGEVVVCKALRRGQMKSFFTRLEPCLIGMEACATSHYWGRELCALGHRVKLMPPAYVKPYVKRGKTDAGDAAAICEAVTRPTMRFVAIKSPAQQSILALHRTRGLLVRQRTQLVNMIRAQLAEFGIVLAKGIQHAHRLAGRLVEGAELDIPPLAVKVIVTLAEQLRALQVRIEGLEKDLKICCRDHDAVKRLKTIPGIGAITASALDASITDPHQYKSGRQFAASLGLTPRANSSGGKERMGRISKMGDQYLRRLLVSGMTSQLQSARRNPNDHPWVIGLLRRKPPKLVAVAMANKAARIAWVVMTRGESYRTHHTETEA

SEQ ID NO: 507076 - protein, 408 aa, unidentified
MLEPVVKRCVGLDVHKMVVVATALVEQQDGSIKEETKQFGTFRKHRRQMVRWLKGLDVELAVMESTGIYWKSIFASLEAAGITAYVVNARDVKKVPGRKTDVSDSKWLADLVRVGLLSPSFIPPRDLRELRLITRYRMKVKGMLSAHSNRLHKCLDDAGIRLGGVVSDIRGVSARYIIRGLLEGKKPQELVAHVHGRLREKIPDLLASIDEPLSERHKWLLRSIDRQITALEQEIMDIDDYLAEQMIAYNKQIELLQTIPGVDFIAAVMLLVEIGPEMECFGNAHRLASWAGMCPGNNESAGKKKSGRTRKGNATVRKVLCEIANAAVKTNSQFKGQYKGLVIRRGHKRATVAVGHKVLRVVYALLKSLKPYMDPAIDYSQLVVKRNAPRWLSALKKYGYLPELAKAA

SEQ ID NO: 507077 - protein, 341 aa, unidentified
MNVTRIGLDIAKQVFQVHGVDEHDKVVLRKTLKRAQVLTFFANLPPCRIGLEAGGGSHYWARELTCLGHEVKLIAPQFVAPYRKSGKTGKNDRNDAEAICEAVGRPNLRFVPIKSEEQQAVLTIHRARELAVSERTALVNQIRGLLGEFGIVVAPGRDRFERELPIVLADWENGLPVLARETLTNLAARLRAVNEHVTGYDRRLQQLARDSEPARRVMAVEGIGPVTATAVVATVGDGHEFHSGRELAAWLGLTPRQSSSGGKSRLGGITKRGNEYLRRLFIHGARSVLRLTGSRTDRKSRWAEGVKGRRGENIAAIALAAKHARILWALLTRGEAYQVAA

SEQ ID NO: 507078 - protein, 336 aa, unidentified
MFQLGIDVSKKTLDLCLLREGVKGRVKTRKLQNDINAVSAVIAWLSKQHCKPEDVHIIMEATGVYHESLAYGLHKAGSRISLANPHRAREFARGMGMLTKNDRVDAYMLACYGALKAPEPWLPPPEEVRHLSTLLRRRDALVADSTREKNRLEKYLATDTPSVIAESVEAMIGQLNAEIKRLDSLIRSHLNQHPELKKDFDLLTSIKSVGYQLGLNMLVILRSHDFTTAEQVAAFLGVVPVEKYSGTSVRGCPKLSKIGPPGIRAKLYLASLCGLRFNPLMKAMYERLCLRGKTKMCAIGALMRKLVYWCYGVLKPQKPFDVGYLSSYARSACKAA

SEQ ID NO: 507079 - protein, 318 aa, unidentified
MAARVDAAGVVRVRQTVSRSRLVARIAQLSPCVIGLEACSGAHEWARRFAAFGHTVKLMAPKFVAPYRRGGKNDGNDAEAICEAVSRPSMRFVPVKSVEQQSVLSVHRVRQGFIEERTATINRVRGLLAEFGVVLPQRAVEVRRGAARSLEHLPARAARAVSDLLEHIQLLETRIRSYEQELEAHARTDERAKRIQGLSGVGPLSSSAIVASVAEAREFKNGRQFAAWIGLTPNQYSTGGKARLGHISKRGDAYLRNLLVQGARSVLNSAGMHQDRMSRWILELQPRRGYYRTLVAIANKNARIAWALLAKNETLHRA

SEQ ID NO: 507080 - protein, 344 aa, unidentified
MIFVGMDVHYKSTTVCFFDPNAKGGQQHRWQQCATTAKDLTAVLSPLGGDCRVAYEVSTQAQWVAAIVRPLAAEVQVANPSRIPWLFRDGRKNDRMDAKKLATLLYLNQLPTVHLPSADVSAWRALINHRRTLVCRRTMVKNQIRSLLRTFGMKCPYRSCWTVKGIVWLRSVTFDDARNLMRNLLLKEMGQLNDQLREVERQLDAIARSQPNVALLRTIPGIGPRSGEAIVAFADRIDRFRNRKQFACYFGMTPTQDASAGRDHRGHISKQGPSVVRWVLVEAVHQVIRRSPVFREFCWRLRAGKKGRHKRAIVATGRKLLTIAFAMLRDQTVYDEKRVSKIAA

SEQ ID NO: 507081 - protein, 344 aa, unidentified
MKITRVGLDIAKRVFQVHGVDEHGKSRVSKKLARAKVLEFFVQLPPCLIGIEACGGAHYWGRELTKLGHTVKLIAAQFVVPYRKRGKNDANDAEAICEAVGRPNMHFVAIKTEEQQSVLMVHRARTLVVANRTAQVNQIRGLLGEFGLVVPKGVAKLRRQLPQILEDAENGLPALAREVLAGLREQFHEFDARVAAYDRQIRVLAEASEPAQRLMKVEAIGPQTATALVASMGDPRVFKSGRSYAASLGITPRQHSSGGKARLGQITRQGDRYLRTLLVHGARAYLRVVDKKTDAKSAWARRLKERRHVNVAAVALAAKHARIAWAMLAHGTEYRPSGPEVIAA

SEQ ID NO: 507082 - protein, 402 aa, unidentified
MKEFNAKAAGNELASAVEPIRQFHVACQYPAYIGLDVHKETIAVSIARAGRDASESREEIANQPKEIAKLVERLNREFEGEVLLFCYEAGPCGYGLYRQLLALGHDCQVVAPSLIPRKPGERIKTDRRDARKLAQALRSGDLTAVWVPDEEQEAMRDLTRARDDLKAQERKARQQLNAYVLRHGHAWPSNKTRWTQSHYHWLESLRFAHDWQQVVLQEYIDAAKAGSNRVADITAQMERVLPQWSLAPVVDSLVALRGIDKLAAMVLLAELGDISRFDSPKQLMAYLGLVPSEHTSGGRRRQGAITKTGNSHARRMLVESAWSYRFPARQTAHLKRKAANASDEAKVIAWRAQKRLCGRYRTLLQAGKNTKQTTVAIARELTGFIWDIGCHEMPKVQPQVAR

SEQ ID NO: 507083 - protein, 394 aa, unidentified
MTKEYLKVIAGIDTHADTHHVGVITDTGQHLADREFPASGTGYQGIIDFITGFGPVLAAGVEGTGSYGAELSRVLTRRGIPVVEVMRPNRQARRLQGKSDPLDAYQAAESVLSGRSGVIPKSRDGAVESLRVLRAERATAMRARVAVMAQVKTLLITAPETIRAKYRAMTSPALMAALEKTRPTGAPTEPLTSTATVLKRLAVRYRHLHQELALIDAELDTILTLHAPMLRDLAGVGTDVASQLLVTVGDNPERVTTEAKFAALVGVAPVPASSGKMTRHRLSRAGDRQANKAIHRVVLVRMRYDSRTRSYVARRRQEGKSTKEIMRCLKRYVAREIYDQLLHPQPAPDRGSLRTRRTAKRLTLQQAADALHVWPTTLSRLERGLAHDNDVHHR

SEQ ID NO: 507084 - protein, 349 aa, unidentified
MLHVGLDLSRKRVDVCLISSEGELVEHFRAPSDRDGLYGLSRRVAVYDEPVRGVVESMNGARFVHDELVRYGWEVLVADAQRVKGLAPLACKTDKVDARVLAELSFRDLVPAIWLPTPELRAERERARWRLHLVKHRATLKNRIHSSLIAFGHQVPMADLFGVAGRRLLAELDFPEPWLGHVQASLELIDDLERRIDAIERWLRRSGADHRYIPLLMTAPGIGWVTGFTIAAEIGDINRFSSPVKLTGYTGLCPRVKQSGDMDQRGSLSKRGPRYLRWGLMEAAIAASSHPLYKERYQRTKRRLGRQRGAKVAQIELARKLTESIWYMLTRNQPFKPFAPAGAIFALTA

SEQ ID NO: 507085 - protein, 343 aa, unidentified
MDYYAGIDVSLEQCSVCVLDATGGIVREAKVVSEPEALIGWLADLGLPLARIGLEAGPLSQWLHAALVRAGHQVVLLETRHVKAALSAMVVKTDRKDARGIAQLLRMGWFRPVHCKAPPAQEVRALLVARKQLQAKMRDVELSLRGLLRGFGLKVGEISKGQFAARVQTLVAGHMMLERIAEAMLQAREALRTEFGKLHRAMLAIVRGDEVCRRLMTVPGVGALIAVTFTSAVDDPQRFARSRVVGAHFGLTPRKYQSGETDITGAVSRVGDAMVRTALYEGAHILLTRAVRFSALKRWALEVAKRRGMKRAKVALARKLAVILHRMWIDGTTFRWSRQTAAA

SEQ ID NO: 507086 - protein, 360 aa, unidentified
MLAELIDAVVGVDTHRDTHEVELALPTGTAIGTRKISNDNSGFAELLAWIGDHAPGPRVVVSIEGTRSFGVGLARAVAAAGLTVIECEQPNHKARRGKGKSDPIDAHLAVLAALRLDADRLPVPRADGDREALRILLGTRHELTVVTTAQTNRLRALLLGGQDTERDLARATLTDPVLLAMVRRREPPQASREQAVRHGEIRRLAHAIRAGRHALAANRAQLQTIVDQMAPGLTERLGIGAVTAAQAIVSFSHPGRCRSDAAFAALSGTSPLQASSGKTVRHRLNRGGDRALNSAIHTIAITRIRCCPTTKNYVARRTAEGKSSREIQRCLKRYIARQLYRALNTSTTLTAQISAAPAAA

SEQ ID NO: 507087 - protein, 429 aa, unidentified
MKIIYPRVCGIDVHKKFIVAVICISESVEPVYLKKRFSTFHNDLIRFRDWLIQNDCQNVCMESTGKYYIPVYNILESHISNIVVANPKWVRAVKGEKDDDKDAKWIADLFKLGIVKSSFIPQKDFRILRELTRYKYKLVNMRSSEKNRYQNALTSGNCKLDMVFTDVFGKSASNIIDLILSDNPYTDEDILSKVHKNCKASPDMILNSINGTDLTPVQKSRIELVNDHIKQLSSNIQRLDKLIDLMIEPYEDYISFLCQVPGVSRNSAITILSEIGVDMNQFTSTRRLTSWAGLTPSSNQSAGKKKSVRISRAGVYLKPCLVEVAHAAVKDTNHPYYANKFNKISKRRGKKRAYIAIARKILVAAYHMLLTGEIWNPADLAEVETPVEQRIKYVKNNLKSDIKQLLDIGLTVEELTLMIQQNANNIATQ

SEQ ID NO: 507088 - protein, 341 aa, unidentified
MEEVTIIGLDIAKQVFQAHGADGSGAMVFSRRITRQKLVAFFASQPRCVVALEACAGAHHWGRELQRMGHEVRLIPPAYVKPFVKRQKNDAADAEAICEAAQRPTMRFVPVKSEAQQASAAVFRARDLLVRQRTQLLNALRGLLAEHGWVAPKGLFHASAMMAKIEDPSCELPASARDVFLVMIASARALDERIHLLDREITKRAREDETARRLMTIPGIGPITATALLALAPPPESFRKGRDFAAWVGLTPLQRSTGGKTKLGAISRMGDRTLRRLLIIGASAVVLHVARRGAPQGSWLAQMMARKPRMLVTVALANKTARIVWAVLAKGEDYKAPVAAA

SEQ ID NO: 507089 - protein, 436 aa, unidentified
MKKHLPVLDPKAAFVDIGSEHMHVSIGGDVPAVFGTVTSQLHALRDWLRAQGVSSVAMEATGVYWLPLYSVLEAAGLDVRMVSGRQTRHAPGRKTDMQDAQWGATLHMHGLLRAGFVPTADIRRLQDYLRLRADHVGQAASCVQLMQKALERMNIKLHDVISALAGASGMAVMRAIVAGERDAAALLALCDIQIRRAKAEQVKEALRGTCSDEHVFALQQALHSWDHYQQLIAQCDGRIESVLPPHDPTQTALPGPAKRGGANAPEIAMLREILAQMCGGRDLTKLPALTHYGVLQLVGETGTDLTKWPTEKHFTAWTGLAPGSHDSGKRRGTVKRRRNRAGQLFCMMASALARSKTIALGAFYRRMAARRGGLVANKALARKLAAWYWRVMVKGDDYVENGIAHYEEQVRKGKERALHRLAKELGQQLVPVPQPA

SEQ ID NO: 507090 - protein, 409 aa, unidentified
MERALERCAGLDVHKATIAACVRVPGPRGGRAQHVETFGTTAAALLALRDWLEAHGVTHVAMESTGVYWKPVYYVLEERFACLVVNAAHLKHVPGRKTDVQDCVWIAQVLEHGLLRGSFVPPAPIRELRDLTRYRKSLIQDRTRAANRLHKVLEDAGIKLATVASDILGVSGRAMLAALVEGTTDAAVLADLARGRLRAKLPALREALAGRFRRHHAFLVSQLLAYLDYLDEAVGGLNEQIEEIVAPFGQERAQLDTIPGIDQRTAEVLIAELGVDMRVFPTAAHAASWAGLCPGNNESAGKHRSGKTRKGSRWLRAALIEAALAAIRTRNCAFGARYRRIMRHSGHKKAVIAVAHAMLVTAYHLLARGTVYQEAGAAYYDRRDADRIRRRAVQTLERQGYRVTLEPAA

SEQ ID NO: 507091 - protein, 424 aa, unidentified
MNLTQNDRLKQVTADTLIVGVDVGSQTHFCRAFDWRGFELSRRVFKFSNDRMGFLTFLRWTEELLNKTEMKKVIVGCEPTGCYWLTFQKFLQDHDVKLVTVNPFTVNRSKELDDNSPEKSDLKDPKTIAMLVKEGRYSTSYLPEGVYAEIREASVCRDQIMKQHVRLSNQIQGWLQKFFPEYLDCYSDWDSTSGLMLLKSAPLPQDILKIGAGGINQIWRDAKVRAAGLKRAQTLVEAAQESVGLEAGEAARLEIWVLVNDYILKAEQLKRLDEYLEEKIKEVPNVEKLLAIKGVGMSTVIGFIAEVGDIGRFTDPKQIQKLAGLEIVKKSSGKKKGQPRISKRGRRKLRRTMYESARALMNWNPAFQDVFLYYRNRTRNPLGGMQAKIAVACKAIRVFYVVLQTGCDFDEEKFRKDIIRPEAA

SEQ ID NO: 507092 - protein, 341 aa, unidentified
MQKNSYFIGLDIACDDFVASIYESPEKPVVTKEAIENNPDGFSMLVLWLKEQSINSSNSVICMEATGVYSEACAHYLSANGFKVSVEPPLKVKRAFDPVGHKTDPIDSRQIAEYAYRYSDELRFWQPKQEIVEKIKQLLTAREQFTKQSTAIQNSIKAYERHVIKVPLIINAHQETLKELKKHIKAIDKELDRLIRQNPTISQITGQLKSIPGVGLLLASDLIAITGAFNDISSHKTLAAFLGICPYQHQSGKSVYRQPHMRNFGPNYARKLLMLAARSCATHNIEFRKYYMRKLAEGKAKQLVLNNISNKIIKIACALIKNNAQYNETYRSVNPLCFNLA

SEQ ID NO: 507093 - protein, 316 aa, unidentified
MAVYIGCDISKRWIDVHAHPIGKSWRVSNDKQGIRTLKRTLARMEVVMIVLEATGRWHHQLWRSLTASGLPVSVIDPYRARRFAQATGRLEKTDRIDARMLALFAEAMRPETKAPPSEALEELRELVNAWHAAKAEATALSNRREAAMGAFLRRDIAHALRAVKNHAARLEAEILRRIKENPQLAERYAILVSIPGIGPAVASTLLVMLDELGRVSAKHAAKLAGVAPMARESGAWKGQRHIRGGRAQVRKLLYMAAVSAGVMGANASLKAFYDRLRARQKPAKVAITAVMRKLIVLANTLLAQGRTWQPEQPNHA

SEQ ID NO: 507094 - protein, 361 aa, unidentified
MGQSITYVGMDVHQALITVATLSPGASKAEMQIIENHPKVLTKTFKKLKRKKSLRCCYEAGPCGFAVHRHLRDMGIHCDVIAPSLIPKKPGERIKTDRRDASKLARLYRAGELTPIDVPTAEREAVRDLVRAHEDVRCDLVAARHRLSKFLLRRGIHYSEGHNWTQKWWRWCKTLSFEHTEAQATFEHYQMQIHNLLERRAELEAQIYIVAEQKQYKHSVERLSCLRGISTLSAMILIAEIGDFRRFNHPRHLMGFVGLVPSEHSSGAKQRRGAITKTGNGHVRRILVQAAWSYRNPASVGPLTLRLLLGQPPEVKVQVYRAQSRLHGRYRKLMGRGKSSKIAIVAVARELCGFIWSLMVI

SEQ ID NO: 507095 - protein, 323 aa, unidentified
MSQVSTIGLDIAKHVFHVHGADERGVALFSRRLVRGKVLEFFARQPRCVVALEACGGAHHWARQLLALGHEVRLIAPAYVKPFVKRNKSDALDAEAICEAAQRPTMRFVAVKSEQQQAAGLVFRTRDLLVRQRTQTINAIRSHMAEYGRVAPKGPSHVAALAGQLEELPEAARAMIRVMLDMLGEFDRQVADLDREIARRAREDEVSRRLMTIPGVGPLTATALAALGPPPEQFAKGRDFAAWLGLVPVQNSTGGKQRLGRVSKAGERTLRRLLILGSSAVVLHASRRGAPRGSWLEGMLARKPRMLVVVALPTRWRGSSGRC

SEQ ID NO: 507096 - protein, 500 aa, unidentified
MKTKRNKGKIRADRKSISVPCSEPAQELRILRPDAAGIDCGAQEHYVAVPPDRVSAGQPTVRRFSAFTEGLDAVVDWLKDCRVTTVAMESTGVYWIPLHQKLETAGIEIYLVNARHVRHVPGRKTDVQDSQWLRQLHRFGLLNASFRPEDIICRLRSLHRHRDNLVSSSASEIQHMQKALQQMNLHLHHVVSDITGLTGLRIIDAILAGQRDPEQLVRLRDRRVYKSTPQEMQAALVGDYRGEHLFVLSQSLQAYRFYQARIEECDRETEPLLEKLAQQIEAASANLKLDALEQSGSKGESNRPEQLPEPKPTSGPKSKRKRKPRANEPKIQLAGLLERICGIDLTQVVGLNVLNVLLIVSEIGVDMSKWRSAKAFCSWLGLCPGNKISGGKLLDSRTRQVVNRVADALRLAAQSAGRTQTCLGIFYRRKQAHLGAPKATTATARKLACLIYHLLKNKQPYQEPDSASYQLRLQKSALSKLQRQAIALGYTLLPTAPVPA

SEQ ID NO: 507097 - protein, 389 aa, unidentified
MTSAVAADTADQNVFGGVDSHADTIHVAVISDNGGHLADAEFATTTAGYAAAMAFLTAHGPVTAIGVERTASYGAGFTRAARACGHRVVEVNRPDRAERRRTGKSDPIDAYAAARAALSGRASSAPKDDTVAGIRAMHNAARSAVKARTAALNQISNILVTAPETIRAKYGPLKGTDRTRALARLRPAGDTLHVAVLTALKSLARRVTELTAEHEALTRALDVEVTAQNPGLRAAYGVGPDTAAQLLITAGGNPERMRTEASFAALCGAAPVPASSGRTNRHRIALTRMAGDPRTREYVTRQTTAGRTKKEIIRLLKRAIAREIFRCLTTTVTVPGIDDLLPLRRAKNITLTAAAQHFGTWPTAISRLERGLSRNDDLSNAYRDWLQAA

SEQ ID NO: 507098 - protein, 354 aa, unidentified
MKKSITIGMDLSDKKIAICVVDSKGRNLEEAEIMNTEAGIKKFIRGYPGYALRVAMETGTHSPWVSRLLEREGCEVLVGNARKLQMIWKSARKSDRKDAEMLARIGRCDRKLLSPIQHRNEQAQADLALIKSRDILVRMRCTLVNHIRSIVKTFGGRIPCCSTDAFSRKAAEHIPDSLIEALVPLVGEIQKLGEQIKQYDKKIVSLGEEQYPETKLLTQVAGVGTLTALAYVLTLEEAERFKKSRTVGAFLGMTPRRDQSGDTDKQLRITKAGNGYLRRLLVGCAHYILGPFGPDSDLRRHGLKLMARGGKNAKRRAVVAVARKLSILLHRLWKTKGLYDPLYNANNKNVKKAA

SEQ ID NO: 507099 - protein, 429 aa, unidentified
MKPNKPNNPPEFTALIGLDWGDKSHAVALEPADGSTETSTLEHSAESLHQWLDQLEQRFGARQVAIAIETDQGAVVYALLERPWITIYPIHPATSTRHRTMFRPSGAADDLPDALVLLSLLQHHRQRLRPLQLDDETTRTLARLVAARRKAVDRRTLLLNQLVSTLKIYFPQALELVGEDLCTDMALDFLSKWPRLIDVQAAKPATLKSFYHRHNVRRPQLIQKRLDRVRSARLLTRDPAVIEVSVRVVRLLVAELRVLVEHITAFESAIAQDFARHPEKAFFSELPGAGPTLAPRLLAAFGTIREQYPEAASMQRYFGVAPVTEKSGSRAWIHWRWNAPTFTRQTLVEWAGQTIVFCPWAKAYYERQRAKRSAHHAILRALAFKWLRILWRCWQERQPYNQEKYLQQLEKRRSPIAARARQLALEMAA

SEQ ID NO: 507100 - protein, 335 aa, unidentified
MKFKTFIGVDVSKMTLDICSISEEGMIEDHQIPNDPKSLKSFFGLLEKKFDLSTVLVCAEHTGHYSNPLRSYCLDSGIDIWLESGAEIKLRSGVQRNKSDKIDAGRIASYALRYFDKAKTERAKNDALEEAKLLLSERELYVKERAKYKAQIRDLKKFIASPYYKDRKKRMDKHLTLLSRSIVQIDKRVKEIFKETEELSKQKDILKSIDGVGEQVAVHTIVATVGFEKFSNGRQFACHAGVAPFSYSSGTSQRSRNKVSNRANKKLKTLFHMAALSAIKMKGEFRDYFERKLAEGKNKMTIINAVRAKIINRIFALIREDRKYEKNYIFTLQHP

SEQ ID NO: 507101 - protein, 392 aa, unidentified
MIYVGIDVAKDKHDCFITNSDGEVLFKSFPISNNREGFETLFQRIQSVSDDLSKVKVGLEATGHYSYNLLGFLLEKGLTTFVINPLHTNLYRKSLSLRKTKTDKVDSRTIATMMMSDMNLKSYSDTSYHNEQLKSLTRYRFDKVKERAKLKSSVSRLICILFPELEKLVPTLHMASVYALLSEFPSADAVANAHLTRLSNLLSESSKGRYGKDTAVMFRDAARSSIGSHMPAKSLELKHTIKLIQELTAEIDEIEAVIKQIMDEEIQSPILTIPGISYRMGAMIIAEIGDFCRFDSADKILAYAGMSPSTYQSGQLDNCYSHMEKRGSRYLRYALYNATKYVCHWDESFRVYLKKKRSEGKHYNVALSHATKKLVRLIFAMEKSGRAYLPIA

SEQ ID NO: 507102 - protein, 425 aa, unidentified
MIMSFTKPIEHANLITKEGNLMNPLYVGIDVSIVHFMLPNGDKHSNFSVANSHDGSTQLVKRICSALTSESLDTVSIGLEATSVYGDNLVYFLREDASLASFNRKIHVLNPKQVKKFHDAYNDLPKNDYVDSFVIADCLRFGRINKEVYMGDYRYKALQNLTRARFFAVQNLVKEKQRFMNVLFKKYSTMTQEKVFSDTFSTTALAVYDEFESAEALANMDLHELTDFIMEKGKNRFPDPDAVAKAIQKAARSSYRLPKTMNDSVNQVLSISITSMKALESQIKEFDKAIKAQMELLPNVLISIPGIGPVYSAGIMAEIGEIDRFNSQAALAKYAGLAWKQHQSGGFEAEVTRLIPSGNRFLKYYLCEAAFSLVRCDKEYSDFYHLKYKEVNRCQHKRALALTARKFVRLVFRLLKDNRLYCPAK

SEQ ID NO: 507103 - protein, 344 aa, unidentified
MKNRNVLGIDLAKNVIQICKISSDGELIYNKAVSPNKLKQILAKEKESIVAMEGCGSCHYWSRLSEQYGHDTRVIAPKKVKAFLQGHKTDANDALAIAVAATQFGMVFSQIKNEEQQSLQTLEVSRKLLSKELTGLGNHIRAFMYEYGITSNKGQKGLRESVANALDIEDKRLPSCLKGTLNLLWERYRLTAEQLKQSEKEKAALVKQLEPCKRLMDLEGVGPVCASLLYASIGNGQNFRNGRDASVYVGVTPKQYSSGGKTYMIGIDKKGGDKGLRAALYQGAFSVIHKLPDEPKTTKQAWLISLVARVGVKRACIALANKTVRTAWALLATGQAYKVVNMAL

SEQ ID NO: 507104 - protein, 324 aa, unidentified
MYKIKHFVGVDISKDKFDVWDNKTGHHSYANQPKGFREFARQLSANSFCVMESTGSYYQQLAMYLYEHHFELSVVNPVTIKRFIQMKLQQNKTDKSDARMIALYGQEQPGLLPWVPAPEYITQCRQLQRVIVIYLKQNTSLKNHIQSLESRGVKSGVLIRSLKRQLKQVRQEIALLEAEMQSLIYQYDGGLFVNLSTIPGIGKKTAAFLIVLTNGFRDFENYRQVSSFCGLSPTEYSSGSSIRGRSRISKRGNPYIRNQLFMCSFTASQCNAQCRLLYQRLVNKGKSKKLALIAVCNKLIKQAFSIAQSGIPYDASYRSSIISQ

SEQ ID NO: 507105 - protein, 416 aa, unidentified
MNIIPQIEPIQRFIALDIHKHYVMVGGQNRPREWTLRPRRVPMHRFRAWAQQNLEPGDAVVLEATGSVWEIYDIVAPLVGKAVVANAQQVRQIAEARVKTDKADIQRLLTLLMADIVPEVWVPPQAVRELRSLISFRWRLTKQITMSKNRLQSVVQRCNLQPPKGGLLTDKNRAWWEQQEFSELTAFQVNCDREIVAQLAGQKAALDQKLAELSNREPWVSPMVYVMQMPGFGLILGMTVLAAIGDISRFSHAKKLVGYAGLGAGVHASGEKYQEKSITKAGRKELRWALVEAAWVAVRSDPYWKAQFQRLQKRLHPNQAIVAIARRLLVSVWHVLSKREPYRHFDEERIAYKMLIWSWSLDDQARQGLTRQQFAKYGLLRLGIGQDLERIERGGYPRRLAPAEEVLALKPELGPP

SEQ ID NO: 507106 - protein, 389 aa, unidentified
MPTIADRHDAPTAIQTNLAAIFISLELSRSIWLITSLSPGFAGKMSKHSVQAGDVAALLARVSELKRKASERTGKSFPIVVIQEAGLDGFWLHRVLQSEGIESHVVDPASIATSRRRRRAKTDRIDGEALLRALLAFKRGEPRVCAMVKAPTPEEEDRRRLSRERKVLVAERVKHVNRVKGLLFSQGVSGYEPLRRDRRQRLEDLTTGDGRSLPMHLKTQIGRELDRLELLLDQIKQAETERDALLASQQAAAPASAGRMLLEFKGIGAEFAASLWLEALFRSFDNRRQLASYAGLAPTPWQSGSVDHEQGVSKAGNPRLRTTLIQLAWLWLRHQPQSALALWFKERVSRNGGRLKKTTIVALARKLLVALWKYVTAGVVIEGAVMKDA

SEQ ID NO: 507107 - protein, 343 aa, unidentified
MDYFAGLDVSVKETSVCIVDDTGKIVRELKVASEPEALLAVLTNPAYRFKRIGLEAGPLSQWLYSALAEADLPVVCVETRHMQAILKAQINKTDRNDARGIAQMMRVGVYRPVHVKTLRSQKLRMLLTHRKLLQSKAIAIENDLRGTLRNFGLKVGIAGTAKFEVRIKELVENLPDLAILVEPLLIVRRVLREQIVVLHRRLLTIVRDDGVCRRLMTTPGVGPVVALTYRATVDVPARFRKSKSVGAVFGLTCSKYQSGEIDRSGRISRCGDEMMRVMLYEAAQSMLRSKKWSWLKAWAMQIARRRGMKKAIVALARRLAVIMHRIWVDGTEFRWTREVVTAV

SEQ ID NO: 507108 - protein, 341 aa, unidentified
MQIHSVGIDLGKTTFHLVALGAAGKVLVKKKFTQLQLLTFTANMQTSLMGLEACSGAHFLGRALRAQGHDVKLIPAQFVKPFVKSDKNDFIDAEAIAEAVERKNMRFVPIKTDDQLDLQTIHRVRDRLISRRTAVINQLRAFLLERGMVFAKTPAKLRSAMADVLENADADLTPQMRNLIGMLWDEWKLVEQQITALTDDLEKIADADAGCARIRQIPGIGPVVATAIVAAIGNGAAFRKGREFAAWLGIVPRQYSTGGKAKLFGISKRGNVYLRKILIHGARAAVLRIKRDRAPIGAWLDALDSRAPKNVVVVAMANKLARIAWAVLSSGNDYRPAAVPA

SEQ ID NO: 507109 - protein, 341 aa, unidentified
MQVTTIGLDIAKNVFQVHGIDAAEKVVVRKQLRRSQVLEFFKALPPCLIGMEACATAHYWARELTKLGHQVRLMPAKDVKAYVKRNENDAADAEAICEAVGRPTMRFVRVKSAEQQGRLMQHRTRDLLMRQRTQVINALRAHLAELGIVAAQGREGIKELLAIITDEGDERLPLDARTSLIVLAAQLQALQTMIGSIEKRISAQHRANEASKRLETIPGIGILGATGIAATLTDPQAFRSGRDFAAWIGLVPRQDSTGGKQKLGPISKQGDRYLRRILVVGAHSVLRRAKQSPQKYPWLTQLLARRPFKVVAVALANKMARIAWALLAKGGSYRAPALAAA

SEQ ID NO: 507110 - protein, 333 aa, unidentified
MNKFSNFLGIDVSKDYFDAVIILNRDKSNTVHNQFTNDNKGLREMVKWLKSIHSTHQNTLVCLEHTGMYGKVIIQYLLSKDFNLWVEMSLKIIRSLGVQRGKNDKIDAERIAYYAFKNQEEAQIYQAPRKVVEQIRKLISLREHLVTTKAKLVRNTNELKGFEPELSKLHKKYSKTTIKGIETDLKNIEKELDTIIKMDENLSNLFEKTTSVTGVGKITALTLICYTNEFKMYETPRQLACYCGVVPFEHTSGKSVRTKPRVHYMANKKLKKQLHMCAISSIRAEGDLKEYYNRKVADGKNKMLVINNIRNKLVHRICACVRNNKLYEKRSIA

SEQ ID NO: 507111 - protein, 433 aa, unidentified
MLKLNYMSTLFVGIDVSSKTNAVYAMDFEENKYISSSFGNNQPGADQLVNMIAECMQKHKNLDTILIVLESTSVYSVHISNFLSASEVLMPYRPYVFCVNPKAASNYRKSYIGMEKTDPTDAYLIADFGRVGRTKKLEPWRGGQFISLKRLTRHRMHLSECITREKTYMVSNLYLKFSELQLLEGDDKPFGSLYGATSSAVLTEFLSPQEIIDMPEEELLTFLAGKSRNRISDLSKTSELLRKAARDSYRLDKCMYEPLSISLASSFNCIHAYQKEIKLIEQAIEKCINGMNPNALLILQSIPGIGPIWASGILSEIGDITVFHSSDALAKYAGLYWPKGDSGDFTSEDNKMSKAGNPYLRCYLGEAANSVRKHIPEYADFYARKYAEVTKHQHKRALALTSRKLVRLVFGLLVKNQLYTGEKLDAEYNIESN

SEQ ID NO: 507112 - protein, 369 aa, unidentified
MADRITYVGLDVHKESIVVAVASGGLRGEVREYGRIANTATALDRLLRKLGGEGMTLRFCYEAGPCGYGIQRRLSTQGHECVVVAPSLIPKRAGDRVKTDRRDAASLAKLHRAGELTAVWVPDARHEAMRDLVRARLDAVHSLRRARQQLSGFLLRQGCHYGRPAWTKLHRRWLAGLTFDQAVHHLVLEDYITAVEAAMARRDRLTVQIEAMLPDWTLAPVVAALQTMRGMALVNAATLIAELGDLSRFTNPRQLMAYLGLVPSEHSSGASVKRGGITKAGNGAARRLLIEAAWSYRFPARLSRELLLRQENQPRSIRDIAWKGQVRLCARYRRLTRAAKPANVVTTAIARELSGFVWAIARQVTVTAG

SEQ ID NO: 507113 - protein, 345 aa, unidentified
MKNLFIGIDFSKEKIDATIIIASGLEELSARVSETFCSTTAGYNKLLSWVKKNSNGIEQDSWLFCGEHTGDYSMPLSNYLYGKGYDIWLENAKSIKDASGLRRLKTDRADSMMIAEYAMRNYDRAELYVSLSESLYQLRELFLFRQMLVRQKHGFQVRRAEKNLTLEKCPAKTKMSQIEKHMVNECDKQIAKIEKAIKDIIISDEELKHTYELITTVPGIGLQNAICLLVFTNNFKRFDFNPRKIACYYGIAPFGRESGTSVHSAPHVHYMANKLLKAILTQAALASIQFCPTFGAYYNRLLEKGKKKQVALNNVKNKLIHTITAMVRNDQKFDLNHININKSIA

SEQ ID NO: 507114 - protein, 366 aa, unidentified
MKKISTVATNRNEIFKDHKLTIGLDLGDRSSHYCILNEAGEVILEHSFSTTAKGIHQVFDGIPRSRIALETGTHSPWVSRQLIQMGHEAIVAHARNVRLIGESSRKDDQLDARTLARLARIDPGLLGPVRHRSAKAQIHLTVIRARAVLVSARTALVNAARGLTKSYGERLRKCGTGQMNREIAKGLSQELRDVLGPLFGEIESLNERIAEYDRRIEQIAKEVYPQVALLKQVKGVGTLIALTYVLTLDDPHRFRRSRDAGCFVGLRPGRRNSGMSEPQMHISKEGDRYLRTLMVQGAHYILGPFGQDSDLRRWGLRLAERGGKNAKKRAVIAVARKLAVLLHKLWVSGEVYEPLRNNHKVESAVA

SEQ ID NO: 507115 - protein, 377 aa, unidentified
MKRIKFVGLDVHAETIAVAVAEQDGEIRSLGMIPNREESVRKLVKKLGPVEQLRFCYEAGPTGYVLYWQLTKMGAACTVVAPTLVPVKAGDRVKTDRRDALKLARNYRAGELTAVWVPDAEHEALRDLVRAREAAKKDQLRARHRLSKFLLRHGRRPPVGVALWTVKYLEWVKRDVHFAVKAQEATLLDYLHEVEHMAARIVRLDSAIEEAVKVAPAKMRAVIEGLQALRGIAKISAVTIVAELGEVTRFSKARELMGYAGIVASENSSGERQRRGSITKTGNAHLRRVVVEAAWAYRHRPAIGFTLRKRQGNLSEEVKEIAWKAQHRLHARYGKLLAKGKNKGVVVTAVGRELLGFIWAIGVQVQAEQKESLRQAA

SEQ ID NO: 507116 - protein, 369 aa, unidentified
MDSPSPSGIKLCQSVVAKKHLKEGEAQMNITTLGIDLAKNTFSIVGMNQHGKVVCRKTISRNKLLPFIAQCPPCLIGMEACSGAHYWAREFEQLGHRVGIIAAKFVEPYRKGGKNDNNDAEAICEAVMRPNIWFVPVKSPDQQAVLCIHRARQGLIKDRTALLNQLRGLLAEFGIVIPKGRYPAQATIPDVLSNTNNGLPMLARNIITDLWERIQQSNKQILSYDRDLAKLVREDTVAKRLMTIPGVGEQVASGVVASVPDPRLFKNSRQFCAWLGLVPRQYSTGGKTRLGRITKHGDKYLRMCLVHGARAVVAALKDKQDHVSCWIRALVERRGYLRAVVALAARNARLIWTLMVKEENYKAIPIMEA

SEQ ID NO: 507117 - protein, 339 aa, unidentified
MQVKTIGLDLAKDVFQVHGVSVTGDKVFNKKIKRAKLLEFFEGLPPCVVGMEACGSAHHWGRELSKLGHDVRLMPATYVKPYVKRGKTDAVDAEAICEAVGRPTMRFVEIKTEDQQALLTAHRTRELIVRQRTQVSNMIRGMLREFGYVLPTGVEAVVRFSKSHLEGDQPKIPELANGVLGTLCYQLLGLSARIEGFSKLIESHARRDANARQLMQVPGIGPITASAIVATVGDAKQFKTGRDLAAWLGLTPLNKSSGGKERLGRITKKGDHYLRKLLIIGMTSRALMAKLHPEKVDIWTARMLAGKPVRLATVAMANKTARVIWAMLTRQENYRQPIT

SEQ ID NO: 507118 - protein, 342 aa, unidentified
MLIIGCDYHPSIQQIAWVDTETGECGERRLTHSGGEAEQFYRELKKKGISVRVGMEATGHSRWFERLLAELNYELWMGDPAQIRAKRVRKQKNDRRDAEHLLKLMLENNFPRIWVPTPENRDVRQLVLHRHRLVGMRTRVMNQLQAIAMNEGVRRKRGLWTGKGRAQLEALRLPPWTTRRRQELLELLDRFDPSIDQLSQAIEEEAARVPEVQRLQTHPGVGPITALAFVLVLGTPARFGCGKQVASYLGLIPCEDSSADSWRLGHISKQGNALLRFLLGQAAQSVARSEEQWRHQYAHLALRRNHAIAKVAMARKLAVRLFWMWRQGWDYQQLKKFGSHAG

SEQ ID NO: 507119 - protein, 346 aa, unidentified
MEHYVGIDVSLELSSVCVVDGRGKIVKEAKVASEPEALVYFFKELGFPVNRIGFEAGPLSQWLHAGLTQAGFETVLLETRHVKAALSAMTVKTDRKDACGLAHLLRMGWFRQVHAKSIGSQEIRALLVARKQLLGRLLDVELSIRGILRGFGLKVGQVTRKTFEARIRELVTGHTTLERIAEAMLLARATLKAQYEKLHKAVLAIVREDAVCRRLMTVPGVGPVVAVTFKSAVDDPSRIAKSKAVGALFGLTPKKYQSGEKDVTGGITRTGDEMVRTALYEAANVLLSRITRFSKLKRWGMDVAKRRGSKRAKVALARKIGVILHRMWRDGTTYRWAETKPIAAQG

SEQ ID NO: 507120 - protein, 401 aa, unidentified
MQEFNAAEHRIETAAALAAVGAGGLAGGHAAYIGLDVHKETIAIAVAEPGRGEPSYRGEIANTPKKVEKLIAKLSEAYDGGLLLFCYEAGPCGYVLYRQILASGHDCQVVAPSKIPKTPGERIKTDRRDALKLARLLRSGDLTAVWVPDQEQEMMRDLSRARDDMKSQERKARQQLNAFLLRHGHHWPRGKSRWTPAHENWLTGLKMDHPWQQVVLQEYIDAERAAGERVAQLSDHLMRALPEWSLAPVVDALIALRGVDKLAAIVLLAELGDISRFESPRQLMGFLGLVPSEHSSGGRRRQGAITLTGNGHARRMLVESAWSYRFPARQTKHLKGKARNASPEAKKIAWKAQTRLCGRYRTLTRAGKNTKLVCVAIARELAGFIWDIVRQEMPRLALQEG

SEQ ID NO: 507121 - protein, 409 aa, unidentified
MAKEEQWARFVDYRGVELGKAMLFKNNRQGFESLTTKIREISKLKILRNPIENVLIGMEPTGHYWKPMANYLMKADYKVVCVNPYHTKKAKELDDNSPTKSDKKDALTIARLVKDGRYFDPYLPREEYGELRGLTNARVSTMKRSNAVKNTITAILDEYFPELWTVFKKPLKGKASRQILRSCPFPALILAMGEDDVLAEIKEAVKKTVGIKKVRQLIRTAEASVGVDYGQKAAKLRLDGLLDELELAEKQLGRIEQAMRNELDGTGYAGQLLGIKGIGVVTASSFLREVGDPLRFQDARQIANYAGYNLVEDSSGKSKSGTCISKRGRSRLRSLLYQMAFTMVRNNGEMKALYRHLTTRQNNPLRKKQALVVISKKIITVIYSLLKKREAYNPELVLGAARKELMRAA

SEQ ID NO: 507122 - protein, 337 aa, unidentified
MQIAVLGIDLGKNSCSVAGLDATGRIVLRRRMHRDSVIKLASRLPACVMAMEACCGAHHLGRVLQAHGHEVRLMSPEYVQPYVKAQKNDERDAEAIAEAATRPTMRFVELKSEMQLDVQSLHRARSRLVGERTALINQLRAVLFERGVTVAQGRRRLERYLALVLDRDEAPTLQLSPRMRLLIDDMRAQWCELDRRIAAFDAEFVAAARSDETTRRLSTIPGIGAINATALVAAVGDARSFARARDLAAWLGLVPRQATTGGRPRLLGITNAREQIPPHAADTWGPGGAAIAHRDRGFAGQLVTRLERAGASKHRDRRIGQQAGADRLGSAALDGHL

SEQ ID NO: 507123 - protein, 345 aa, unidentified
MYHYAGIDVSLESSAICVVDGAGKILREAKAASEPEALIAWFRGLGLTLERIGLEAGPLSQWLYAALREAGLAVELLETRHVRDAFKAMPVKSDRNDARGIAQLMRLGWFRPVHCKSIEAQETRAVLTARKLLQSKLRDIENSLRGVLRGFGLKVGKTTERTYAARIRELVAGHPGLELVAQALLEAHAVLLREFNRLDKQTQKLARSHPSAQLLMTTPSVGPIVALTYAAAIDDPKRFTSSKATGAHFGLTPKKYQSGQTDYTGRISKIGDASVREALYQAAHIMLTKPVKGCTALKSWAMRIAKRAGMRKAKVALARKLAVILHRMLADGKPFNPAAKTAAAI

SEQ ID NO: 507124 - protein, 337 aa, unidentified
MNKITLIGIDTAKQVFHLVGVDGKGHYTWRKQLSRRRLLSGLAQVACCEVVLEACGASHHWARSIQALGHNVRLIAPQHVKAYRRGQKNDYRDAEAIISAALSPGMHFVGIKCVEQQAEQALHRVRSRLMSHRNAAANALRGLLGEYGVVFGLGFKPLREGARGFAETEEAAALGLVELVQDVLEEIGVLQGRMDHYEHLIEQRVQSDEISRRLREELNGVGKLSASALRVKVADVRDFGGGRHFAAYLGLAPGHSGTGGKVRIGHIKRGHDRYLRQLLIHGARSALSHLGDKQDPQSRWLRGLLERRGFNIASVALAHKNARQAWAIMAREQPQAV

SEQ ID NO: 507125 - protein, 419 aa, unidentified
MNKIKTRKVGIVNSKALIVSVDIGKTTPTAYCRCPDGRDVKPFEFSNDAEGFKKFWDRVCCVKTANHLEEIIVGYESTGVYAEPLVHYLMTKPVRIVQVNPMHTKRMKDLEGNSPGKTDQKDPKVIADIVALGHALSVVIPKGVAADLRRLTQARERATQRRTVFYNQLQGLVFLLFPEFLQVMKDIKARSALYLLRHCPTPEDMVNRGAEALIGILRKVSRGKLGKERGEALYERAKTSVGLKEGRKGILLEIREILSQIEACERFIEEVEEEMGRGLKEIPYSDSLLSIKGIGEVTVAGLIGEVADFREFHTISEITKLAGLDLFEISSGQHKGNRHISKRGRPLLRKLLYFAAINTVRKGGIMHASYQRYLERGMVKKKALIAIAKKLLRILFALVRDHSQYVESYSEQEGLKLAA

SEQ ID NO: 507126 - protein, 432 aa, unidentified
MRSTKMAKQNEETIAAYIGLDWADSEHEVTMLVVETGEVESRKLKQESEALADWVQSLRERFSGRKVAIAIEQRKGALIYALMCYDFLILYPVNPKTLARFREAFYTSGAKSDPGDSGLLLDLIRLHRDKLRPWVPEDADTRLLQMLVEERRALVDEVTRLTNRLKSTLKQYFPQALEWAGELDSRQALDFLTRWPMLESIRKAGAVAVEKFYRQHSMRNQDKIEQRVKAIKEARALTTDRAVLAASKMKALAIVRQLRALGKSIVEMEARIQELFEQHRDHEVFSSFPCAKKVLGPRLLAAFGGDRTRYESALELQSFSGIAPVTRSSGKSETIHKRMACPKFLRQTFHEYAAQSIKKPGWARTYYRRHRDKGVKHHAAVRALAYKWIRIMFRCWQEQEPYDEAKYITSLKRRSSPLVSGLPPAPGPLVEV

SEQ ID NO: 507127 - protein, 386 aa, unidentified
MPQPNDLSRSLVILEQDATLIAVIEMGQSSWLVAGIVPGVERSPLKKLAVDESALLKLLNRWREEAEKAGHRIERIAIAFEAGRDGFWLARWLRARGIEAHVIHASSVAVSREHRRAKTDRLDTELLKRAFLGWLRGERDHCKMVAIPTLAQEDAKRPNRERESLVGEQSRIVNRMKAALARLGIRGFNPKLKKAAERLDGLRTPEGEPIPPNTLAELKHDMERRRLVRSQIRDIEGTRLERLKQAPGDGPHGMVRLLARVIGVGVETADMLVQEVLSRNLRDRRAVARYGGLTGSPDESGKKRREKGLARSGNARVRRGMIQLAWRFLMFQKDSALAHWFYARTKNAPQTRKTMIVALARKLLIALWRLAQEGAIPEGIVLRPGL

SEQ ID NO: 507128 - protein, 355 aa, unidentified
MSQEKYIGMDVHQATISVAVMDSSGKLIMECILETKAATILEFIAGLRGTLSVTFEEGTSAAWLHDLLKPHVSHLVVCDPRRNALLKDGSKSDRIDARKLAELLHGNQLHAVYHGEHGVRTLKELGRSYLTITKDLTRVMSRIKALYRSWAIPCSGATVYAPRHRAEWLAKILEPGVRLRAERLYQQLDLLQPVRQEARRDLLVESPKHHAVTLLRQIPPIGPIRAALLVALLQTPHRFRTKRQLWAYSGFAVETHDSGEYRLVRGKLVRNRERITVRGLNHNHNHDLKNLFKGAAISASTRPGPLCDFYVALVEKGMRPTMARLTLARKIAAITLTIWKKGVEFDAKQLNRQAA

SEQ ID NO: 507129 - protein, 368 aa, unidentified
MAQRERDRSQRSRSLQAVGQLGSSRSSGHQPEQLRGPRARIVQGRETRRCPMSEACFVGMDVSQDTVDVAIHPGTMFQVETNERGIGQAVERLQALHPTLIVLEATGGLDVPLAGALAAAGLPVVVINPRQVRDFARATGQLAKTDALDAQVLAHFADVVRPTPRPLPDVETQELAALVTRRRQLIEMLTAEKNRVASARAVVRKQLRAHITWLERALDQADTDLAEAIRQSPLWREKEELLRSVPGIGPVLTTTLLANLPELGTLTHKQIAALVGVAPLNRDSGTLRGKRTVWGGHAQVRAALYMAAIVAARFNPVIRVFYQRLCAAGKAKKVAFVACMRKLLTIINAMLKHRTPWRQGTEPVCAGA

SEQ ID NO: 507130 - protein, 347 aa, unidentified
MTIVEDARVITGGVDTHADMHVAAALDPIGGLLGVEEFPVTPVGYAHLLGWLGGFGTVGLVGIEGTGSYGAGLARHVAAAGIRVVEVDRSDRQDRRRQGKSDPLDAVSAARAAQSGRARGAPKGRDGAVEAIRALMVAKRSARSERTQTINQARSLIVTGPDDLRARFAGHTVAALVSELAALRPRPGDAVGYATRIAVRELGRRAEFLDGQLARLDELIVPLVTGRAPGLLALHGVGPDTAALLLIAAGDHPGRLRSEAAWAHLCAVAPIPASSGKVTRRRLNPGGNREANHALWRIVITRMSSHAPTRAYVERRTAEGLSKKEIIRCLKRYVAREVYRHLRAADG

SEQ ID NO: 507131 - protein, 355 aa, unidentified
MKSCFENKDIYVGIDVHKKRWVVTVRTYDLELKTFSMHPVAEELEKFLVDNYTDALLHIVYECCFSGFWIYDYFCVKGYDIIVTPVNRIYRDGSVVKTDKIDSRKLAFQHSRGLLREVKVPTEKVREYRSIFRIYDKEKMREGQILRQVRCILEVRNHRLKWEKWNKEFIERLKGETFQEDIFNKKFQQLIREYEYLKEQIKDTERRIKEISEEEELGEKIKRIEKINGIGNISAVRLVIFLFDMKGRFETGEKLVHYVGLTPGEHSSGETIIRSRTGLVGNKQLRSIIIQLAWVAVRKDGSLLNKFERVYRRSGSKQKAIVAVARKLMMKVYTITEKEEDYEINKPACRSGRAA

SEQ ID NO: 507132 - protein, 409 aa, unidentified
MKVYLGIDWSQDTHAACFVNESGRDIARLSLPHSVDGLDKLDRARAQLGVSPDECWVGIETAHSLVVDFLWAHNYTHVFIIPPAATHSASKRYRQSGAQNDASAAFVLADMVRTDQQRLIAWRPDSALIQQMRARVSLLLYLTQQLTRTSNRLQAVLHRYYPAALTVFSQPMPPLAWHFIVAYPTPKAIESLALTDFEAFVRQHHYRQPQRTLLASFARLQQPQPQASEAVSQAYAPEAVLLSQQLLALNQAKTTQLKELGDLFDQHDDADLFRSFPGTGDFLAPALLAKCGDDRARFPSPIGWQCLAGTCPITEESGHRRRVLFRKACDHEFRAITQQWAMCSLSQSVWAATYWEKMRPTCDSASAAYRRLANRWLAIAWRCWQDHKPYDETYHLQQRAQRQQPRSAQ

SEQ ID NO: 507133 - protein, 353 aa, unidentified
MLAELVHHVIGVDPDRDWITLAVVDAHTTGVTAHDRFPATAVGYAEAVEFVAGHSVDTERAWAIEGTASYGRGLSVALSRLGEWVIEFDRPTRKTKDGAKSDHLDAVRAARETLGRDRLSEPRAHQGAREAIRVHAVTRAGAVRARTAAINELKAMIVSADEELRGSLRGLRTSQQVARCARFRERASMSIEGRGTRLSMRALARRIEHLNDEIDDHDRALKALLDDTAPQLLTERGIGYITAAAFYLAWSHPGRCRSEAAFARLGGTSPVEATSGQKQTCHRLNRGGDRQLNRALYLVAVTRRRCDPATRAYIARRAADGISERFAIRCLKRFIARRVWRLLEHPESVLDKT

SEQ ID NO: 507134 - protein, 353 aa, unidentified
MSNDKYVAMDVHKASVVVGVRDGKGKMIGRAVVETKAQTLRDYVKGLSGTVHLTFEEGTQAAWLYDLLKPLVAECIVCDPRRNKLLESGNKSDDVDVEKLSELLYLGRLRAVYHGSQGTRALKELAQNYESLVKDNTRVKNRLKAIYRARGISYEGSELYDYEQRAQWLEKLSERGVRERASQLYEQLAQLEEWVGRARLQMLRESRKQKAKKILEQIPTLGEISVAQLIATVDTPFRFRSKRQFWTYSGLAVVRHTSADYQFAQGELRRRTKPGPTRGLNRNYNRRLKRLFKSAALAGSSKGPFKPYYERLLARGLNPELAQVTLARKIAAVTLTLWKKGASFDQEKLVKPE

SEQ ID NO: 507135 - protein, 342 aa, unidentified
MSRYFGVDLHRNCFTVCVLLANGRQYVSTWKLGGLSKFVSRLRADDEVAVEVTGNTRLFYDAVSPYVARVVVVNPFQFEVIRKSVKKTDAHDARALALFLSKDMLPEVRMKDAQHAEMASLVQTRDTLVKSRTALKNKINNLLSARGVNLSKESLASDKGLREVLGMYFGSTVDVELQVLVDQIRSLNQSIAKIEKAISEQGPKLPGYENLKSIKGIGDVGAGVLLSVIGDVNDFTDEGKLAAYFGIVPRISNSNETAHSGRITKRGSKLGRTVLIQCALIAKRYSDYLARYYERIKIRRGTGKAIVALARKFLGIIYQTLKNDWVFEDFPNFILADQETQA

SEQ ID NO: 507136 - protein, 412 aa, unidentified
MSLLQAALEPSRLVLAVDPGKVVNRVWLSDGTGLLTEPVSMPVSRAGLAGVERLVSSHDVGHSGVVVAIEATGSLHRAWSSALERRYPGAVRLFAPSETRAARTQLGSGRFKTDDRDCAALTYLARQGAGRRWVDEVEIDALRAVVRHRRGLVHDRKVIQQRLHDQLNALAPGLSAPAGHGRSLALEQPSGQAVLACAAAFAGRPATVRSLQARATGRFSRADAEYWAQRWRGCLPPPADAEQRAGRLGRDLMRHQALQADIAALEADLEPLLANSGGQVLTTLPGVAVVRAAGFAAHSLPIDRYPDAEHLYSATGLAPALYESATIRRRGRISRQGLAEHREALMGIAWGLSRFSPAFAQRDREYRERGMTPIQARVALARHACRLAFRLLSTLEPFDEERYRQARHRRGR

SEQ ID NO: 507137 - protein, 251 aa, unidentified
MPCFVGMDVAKAQWDMALRPAGERWAVPNDARGIAPLVDRLQALHPTLSVLEAPGGLERAATAAWAAAGLPVVVVHPRPAREVARATGPWAKAEALEARALAHWAAVIRPTPRPRPDAQTHAWRALLGRRQPLRVMRTAAQHRLAGTSGRLQTDMAAPLTWRKARLATLDDDLATTLRASPRWRENDERWPSAPGLGPVCARPLRRELPALGPRTRQQIAAWVGVAPLHGASGTLRGRRTRWGGRAPVRTV

SEQ ID NO: 507138 - protein, 420 aa, unidentified
MSNMNTENEIVCGADIHRDFLVATMISRKGLKLQERFSMNQDGLLEFKSWILNHKCQRVAVESTGSYWYPIFYTLEGYVEFILANAFQIRNIEGKKTDKLDSERIAVYCLNDLIKPSRIYPKDYRDLRSITRSREALVNARSKLKNQIHQLLATCCIKLSSVISDSFGKSGRYILDRLLEGKSIDQIISGIPSKRVRNKEDELRNAIRNGLDPVQLLLIKTNLDAIDDLSEKIKILDAEISIKVKPFEEDLNILLSVPGIGLTSAATILAEMGDYRDFASADKMAMYFGIVPSVYQSAGKLRTGKITKRGSKHMRRILVEVAKAISKAKKNSNLKRFFMRVYKRSGKKNVAAIALARKVLCIIYHLLMNREDYQEPEIKKTKPKISICGSPISAMDIDEMISTLSRAGYLVEKGFKEGCG

SEQ ID NO: 507139 - protein, 370 aa, unidentified
MQFIGVDLHTNKFTCCYRTEAGSAGGKGEKTTETFELSSYGLAQFCQTLTPQTYVLVEATITTFCFARMIQPLVKEVIVANTYELKQISLARKNTDKVDADILCRIIKMQVLSGEKAISAVSIPPLEIQELRGLFTTYRLFKKQTTQTKNRIHSLLKEKLYGFTQEEIFDKKSRQMLKGIKGDPVLSCQIGLLFDDLEHVETLIDSLQDTIKEQAEPFMREIEILTSMKGVSVFIAIAILTDIIKVDRFKDSKSFTSYLRSAPRVSNSNTSVSVKGTNKKGRKMSATLITQSLNHVLDASEKLNRWYTRLTKYKKAGLVRTGLRRRVFAEIYQMLKKGEYHYGREAQKHEAKMRQYRIFLKKRKILLEIA

SEQ ID NO: 507140 - protein, 361 aa, unidentified
MYYIGIDISKFKHDCAVIDDSGEIVTPSWSFTNDAKGFSQLKLLLNSLDTETRIGLESTGHYGMNLKLFLESNNFSFMEFNPLLINRFVKSKSLRKTKSDSIDCMMIAHYLMTVEYKPYPSSFYHTEKLKSLTRFRDSLIRLRSRQLVELTNILDKVFPEFKPFFGSRFSVTALYILSNYSSPEKIANMNSKSYEALRKLSRGRFSTVDFAKLKQLAKNTIGTTEDYLLLQMQIVLDIYRQLDSKVDETEVSIKECVSDMNPPMLSVPGIGIESAAVILAEFGDFSKFKNASQMLSFAGLEPGYFQSGTSETTGKMVKHGSSYLRYALMNCAQTVVNYEPTFAMFFSLGPLTLTERIFKMA
